United States Patent Application Publication US 2024/0093182 A1 - sequence listing, part 7

SEQ ID NO: 13696 - DNA, 2105 bp, Artificial sequence
  DNA replication origin
acccgcagagctcgtgggtgcagaggacgcaggaggctctgcgtccgctgctaagcgtggccctgcagctgttcctgggccgccggggcctcccgctgcccttccgcgcgcccatccgcaccgtaggtgagccccggcctccgccccgcgatcctggcccagggcccgctccctccccgtcccgggttggggccacccagactggcctttggccaccgcgccagccctgaactctgttcccgcctatccccaaggaggaaaagaggaggagaaccggggatcccagcccagatcgcctcccgtcccgcccgcagtggggtcggcgattcccgtgcagcagagccccccgcccagtccggcccaggtggacacgctgcaagcgcgctacgtggggcgactcacgcagctcttcgaggagcaccaggcgcgctatggtgtccccgccgacagacacctggtcctcacggaggcgcgccccaccgcctggcctcgcctgtccgctgggtgactgcaggtggggaagtgaaattaaagactggcggcagggcacggtggctcacgcctgtgattccagcactttgggaggccgaggcgggtggatcacttgaggtcaggagttcgagaccagcctggccatcatggtgaaaccccatctctattaaaaatccaaaaaaaaaaaaaaaaaaaattagccagacgtggtggcgcgcctgtaatcctagctactcgggaggctgaggcaggagaatcgtttgaacccgggaggcggaggttgcagtgagccgagatcgtgccactgctctccagcctgggtgaccgagacgtgtgaaaaaaaaagaaaaaaaagaaaagaaaagaaaaagaaaaaaattaaagtgggaaacagacctgcagcctgtgtgtgtttgtgcatggcgggggaggtccaggcaggggtggtgaccttgacattcctggagatgccccggaccaggccctgcccccaccccgactggaggtcaaatagtctcagcagggcttctggccccttccagcacctgggacccagtgggtggggctagccagatcactcttgtccactccaacatcaattcctgaggcactcgggtgtcacctctcccttgcacaccccttacgcctcccagccccacccagcagccagcccagactggtgactgacaggaagttcaaagatcaggctgagaaaaaacccagagacatctggggctctggatccaaagatctccccactcacacacctacggacacacgctactctgggaggtgatttgcgacttagccaggcccccaaagctgggctcctgtagggagaaagtctgcccaggtccacatccaagccttcatcgtttgtcctccgggttctgggatcctgctggaagaggggagcttctgcaatgggagttgccacaaccctgcagcccccaaccacttccaaaaccttgcagaagcagcatctagaagcagtgggcgcctaccaatatgtgctcactttcctcttcatgggtgagagctggggaggcgtgggtgcctggggtctgccaggggagtagggcttggagggagagtggctgggctgctggcttgcatgcctgaggacagtgaccaggtgactggtctgggagagggccagaggagagagctggttgttctgaaggggaggaagggaagggagcagctggagggaatgatggagtttcagaagtgaactcttttctttctctcccttcccccaggccctttcttctcccttcttgtctttgtcctcctcttcacgtcactctggcccttctctgttttttacttggtgtggctctatgtggactgggacacacccaaccaaggtgagctccggatgggggcccaggtagccagagatggtggggacatggggggtgaggggaggtgactccgggggttcgtccaccagtatctcattgtccgcaggtggaaggcgttcggagtggataaggaaccgggcaatttggagacaactaagggattattatcctgtcaaggtgatgggtcaccctgcagaaaaactgcttcctacctctccccatctccctcccacacctaggagccct

SEQ ID NO: 13697 - DNA, 1311 bp, Artificial sequence
  DNA replication origin
gcgcggaagggcagcgggaggccccggcggcccaggaacagctgcagggccacgcttagcagcggacgcagagcctcctgcgtcctctgcacccacgagctctgcgggttcgggaactgctggaagagctcattctccctggagaagacaggcactagggaggccgcaggagagcatggcgcggctgactcctggccccggggtccgcgggtggcgccactctcctcctccccggcccggcagccctggggcgtccccaccgggtcacgctcgggtcctcacccgagttccagagctgacttaaccaatctcttctgattccgaatcggcaagctcagttgtccgggttttgcctccagcgcctgcaggggccctcccacgccaggacagccacctggccaccactgaggcagcggggccttgacaaaggagaccaaacctggggggagggcagaagctgggggacccaacgcctgggtcttatttacttatttatttagggacggagtcttgctctgttgcccaggctggagtacagtggcctgatcttggttcactgcatccttgaccttcagggctcaagtgaccctcccacctcaagcctcccagtagctgggaccacaggtgtgtaccaccacacctggctaaatttttgtttttgttttttcttgtgtagagatggggtttcactgtgttgcccaggctggtcttgaactcctggccttaagcgatcctctcgcctgcgcctcccaagtgctgggattacaggtgtgaaccaccgcacccagccaaagcctgggacttggaaagaagagtggagaggacatggggaaaggagagctgggccccagtgtcccctgggaagaggatggtggggcgggagacagcagcaaggtcctcctcttctcaccacctgacatgatgtagtcctggaagaagaggagatggaaccaacaaggcagcatgagcaggtgtggcgggagtttggggaagaggcaggagcagcccgtgggctctgtgcagaagttggcgaaggctcccacgaccaggaccctgtgagggtggaagtcaaagaggtagttccaggaggtgcccaactttgcagttttaactagctggggagcagacgggcgcaccccaccccaacggtgagattgcactttgggagatggtggtcccaagagtctattctgaagccccaaccgcacccagcaccccacagcccaggtcctcactgagagggggaagtagtcacagaaatgtctcaaactgcccagttgcaaacccaggcagatctgcgggctccagccc

SEQ ID NO: 13698 - DNA, 1042 bp, Artificial sequence
  DNA replication origin
ggggagtccccagaagccctgtgcccacgaacccctgtgggcggaggagagaggcggggactccgggagcttcctgagagggccgtgtcttgggagcaaggtgacatattcagttcaggcacgcggaacatgaactcaggaagtggggagacagagagacccatcccccaactcccaggacgggggccaggccccctaaaaaggcacaatggcagggcaggtttggcagagtggttgagtgtcaggggtcgacaaaggacaccatgatgtagcgtgtgccccaggtcgttggcagcccctcgtggtagtgggtgaggcggccggggtgcaggagtgcccagcccttcctcggggaggagatcacacagtcgtagcgcaggaagcggcagccacctccctggaaagagaagggaaaggaaacatggagtgagcagacgtggggcctggggagcaggcagatacacggggcagggcggccagaccggggggcacggtgcagcagaccggggtgacaagggagatggcagatatggcagacaccggaggctggggtgcctgcagacaggaagatccaggaggaagcagaggccgcctgcccagaagcgatccaggagctgatacccacaaagtcactgggaaatgggcagggaggggagctgggggatgcacgcaggggctctaggtggggacccgagggtcctgaggtgaagcgtgggtgggtagtgtgactggggcgcacctcatagtccaggcccttgtggttgagggcaacgttgagggtgaaggtggatgagtcgtggtgtggccgcagagacggctgctcgtctggccggtagcgaaccacaaagttcatcaccgcccgcgcctgggggagaggagggaagaggctgcagggacagctgcgggcgcagggggtcttttattttgtattattattattcttttgagatagtctcgctctgtcactcaggctggagtgcagtggtgcgatcttggctcgatcttggctcactgcaacctctgcctcccggtttcaagcaat

SEQ ID NO: 13699 - DNA, 886 bp, Artificial sequence
  DNA replication origin
gttttttgtagagataggctcttgctacgttgctcaggctgatcttaaactcccaggctcaagcagtcctcctacctcagcctcccaaagtggtggcatcaaaagtgtgagccactgcagccagcctcatggcacctctgactggtgaccactccaaacccctgagagtagggggcttgggtctacctgggccccgggtcggaggaggcggggggctgcaggctggcgggactcacactcgcttccgctgcaccagctccacgtagtcctcggagcgggcgtagtactcatcggggctcagggcgccccagaagttggaccacagcttgccgtggcgggacagcatgggggcgatcaccttcctgcggacaggtgggggtgagggctgggcagacgggagcaggcctggggagcccggtgcccagggcaggagtggggttcccggggcctgttggggtgccctccggctgcggggagagggggtaagccacctgttctcctcaatgaggatacgcagggtctgcaggttggtgaggacagcgtcggcgtccaggctgaagtagaactcacactcggggtcctgccgacacaggtccctggaggtgagaggcgagctgagacggcggcaggtggggaggcggtgtggatggggtaactggcccatgcccccaggagaagaggagggaggcagtgtctatccttccttccccaggctctctgctgtctgggtgagctggcaagggcaggagtgacagcatgggggctgcaaggatgcgaatggggaggcccaggaggggctggatgggtgacaggtgaggcaagggccaggcagcaggtggcagcacccctgaccctacagcctcatcccaccctctcctccccgcaa

SEQ ID NO: 13700 - DNA, 923 bp, Artificial sequence
  DNA replication origin
cggggtcctgccgacacaggtccctggaggtgagaggcgagctgagacggcggcaggtggggaggcggtgtggatggggtaactggcccatgcccccaggagaagaggagggaggcagtgtctatccttccttccccaggctctctgctgtctgggtgagctggcaagggcaggagtgacagcatgggggctgcaaggatgcgaatggggaggcccaggaggggctggatgggtgacaggtgaggcaagggccaggcagcaggtggcagcacccctgaccctacagcctcatcccaccctctcctccccgcaagcacccgctcacatggccatgtccctggcctcgcctgggctcagagcctcctccggccccacgagcttcacagctgagaagtggtcctggagctgcggccaggagtcagcgatgtggggttcatggaagacctcctgggaggggaagacatagggggatgggctcagagggcagggaggcggcacctgagggatgggggtgcaggaaggagatgggggtgggggcacgagagttctgatcagggcagggaaagggtccctcaggagaggctccaacaggggagtctcacgttgttgtgcaggaaaagggtgaccctgtcggggggatagtccaggagtagcagccgctgcaggaagcggggcagaaacggagtaggctgttccacaaacacggccagaaacacccgggggggaggctggaagatgcaacacgcagggactcagagagaagcccggacttccctgctgcccccacccaacctccaccctgacaggtgcagggacccaggagcgatgcccccaccgccccccagtccgctgtccttgtacctcctgctcagcacgctgccctctcgtgcccctccctggcacccccacctcacctgcccccc

SEQ ID NO: 13701 - DNA, 863 bp, Artificial sequence
  DNA replication origin
gaagcggggcagaaacggagtaggctgttccacaaacacggccagaaacacccgggggggaggctggaagatgcaacacgcagggactcagagagaagcccggacttccctgctgcccccacccaacctccaccctgacaggtgcagggacccaggagcgatgcccccaccgccccccagtccgctgtccttgtacctcctgctcagcacgctgccctctcgtgcccctccctggcacccccacctcacctgcccccccgggagtgtcctccggtcctggttgcagaagccacagcctccctcaggagtccagccattggggacgtagtttcccaggtagttgagctgcagctgttggggacagactgaggctgagtggctgaggcctccaggggtggaggtgggggtcaggcacctctgatatgggggctgggaagggccagcttctcagaagggttggaggtgcctgggggttggggcagggcggggcgggggttgagaccactggtggcaccttagtgggaccgtttccatggaccacaatggggagcgtgtcgtaggccacgttccggatacgcacacggttccgatcaaactttaaaaccacttcatctggggaagaaaaaggccaggcttcagaccccctttctctgggagctaccaagcaacacattcttctaaatatggggtcccaaattctccagggaataaagggacaccagggctatcctggagtgtggctcgttgtgggcaggaacctttgggttctgaccaggctgctggcccagagagctccactgcctactacctgcgtgatcacaccgcagctgggcgaggaaggggagggtgagctgagcgggagg

SEQ ID NO: 13702 - DNA, 1080 bp, Artificial sequence
  DNA replication origin
gagttcttcaactacactgtgcgggtgaggagagggaaaggcccctgggagggggtcccagcaggaggggtgggctgaagtctggatgcccaggtccccacggtaagcctggtcaggagttccccccacaactccccaccccttgcctggcacggggcaatcttctccacagaccctgggcctgggagaggagtggcgagggggtgatgtggctcgaacagttggtggaggacagaaggtccggtggttaaagaaggaaatggagaaatacgctgaccgggaggatatgatcatcatgtttgtggataggtaacggggctggggatagggagcggggtaaggatgctgaggttcccagtggacccctgcccatcctccccttcctcacccagctacgacgtgattctggccggcagccccacagagctgctgaagaagttcgtccagagtggcagccgcctgctcttctctgcagagagcttctgctggcccgagtgggggctggcggagcagtaccctgaggtgggcacggggaagcgcttcctcaattctggtggtgagtggcagagtgcccaaggcagaggggccaagagcggtgggacacagagtgttaaaggcgcctgagggctggagacagcctgggggacaggccctgggaccctgggagtctcgaggtcaacactccccctccccgccaggattcatcggttttgccaccaccatccaccaaatcgtgcgccagtggaagtacaaggatgatgacgacgaccagctgttctacacacggctctacctggacccaggactgagggtagggaaggcagaggagtgggcgcatcccgcagctctgtgggagtggaggcctcaggctgaatgggatttggggagcaaagggggttgcaaagagaaaaatgtgtgcctgggcgtggtggctcacgcctgtcatccaagacttttgggaggcttaggcaggaggattgcttgagtccaggaatttaagaccagcctggacaacatagttgagacctcatctctacaaaaaaaaagaaagaaaaaattagccaggcttcatggtgtacg

SEQ ID NO: 13703 - DNA, 782 bp, Artificial sequence
  DNA replication origin
aggctgaggccgcagggggcagcagcagcggcagcagcagcaggaaccggggtccaggccccgaggaggtcatggtggggagcgggcccagacagcacccaggatcctgggatctccgctacgcgcctggatcccagctccggaggggagctctggaaagggggcgctcgggctgctgtgcggccgccgcggggagcagcttggctggggctacgccctgaaaaaaaggcgtatccggaggctacagaaagctccagatgccggcgccacagacaaggcgaggattgtcccgggcgcacgggaggcgggggaggggcggcggctcgggccggcgggcgggagacagggactctgggctgagccagccgcttgacacatgtggaagctgaaacctggacaggggaagtgacccctggcggagggtcgggcgggacgcgggggcgggtcctggccgcagccctgcccagagagtgcgggcggaagacggggagagcgagaggctggcggcgacagggagggaggaagcctaggagtccgccgcgggacggaggcctgggggaactgggagttcagctttctgcagagggccactaggaacctcggattgcccacggaagccagccactttctttgacagtccagcccacctcctcttctgcccggagaagctccaggggctgcctttgtgatcacagcatcttcacaaggaccaaaggaaaataagatttcttgtaagaacaccgtgaccacatctttaaaatgacccatttcgtggctcccac

SEQ ID NO: 13704 - DNA, 1464 bp, Artificial sequence
  DNA replication origin
ctaggtttctggtttggatgtctgcatagacggttccatttgcgtagagagaatctgcaggagaagcagacttggatgggaatttttttttttttttgagttgcagtgtccacagggccagtgggtgatttcttttttccttctttctttttttttttttttggagacagtcttgctttgtcactcaggctggagtggtggcgcgatcacggcttgctgcacactgcagcctcaacctcccgggcccatgtagtcctcccaccgcagcctcccaagtaactgggactacaggcatgtgcaaccacgcctggcttattttttaattttttgtagagatggggtttggctatgctgcccaggctggtttctaactcctggcatcaagcgatcctttggcctcccaaagtgctgagattacaggcgtgcgccaccacacccggcctcaccaggcgctggctgcatggccagttctggagcccgggagcaggttctgtgttgagggagtcactctgggagtcatttgcttgtgggtgatcatcagagccctttgtttggagtcaaaatcccaggaagagtgcatagactgagcagagaagagggccagccacctccatagaggcagggagagcagccgagctggagccggaggattcctggacatggagaaggcctgcagttttgtcaaggaagcaagcaaagggtctctttctactcgatgaaggtagtcggcaccgccacagggtggacagggctcaggtccaaggaggaggaggaaggcacactggagccgctctggggcccagagcgtgggtgggtggtcccccaggatgaccaggcaggtgtcagattttggggttcaaggagaggatgggaggtgaaaaagtgacacatcacgtgagttgctgtgaaggagaaggagctgtgaagccgagtagacacatgagcgtcgccagctctttgatggaaagtgccggttgaggaggaggggttgaagatgggagagggagggaatgggctggaggtgaaggctcggggtcagtggtgggacttggggcgctccagggcaggggtgtgcccacttggcatcacgtttgtgggtaggtggcctggaagatgagcgtatccaagcatgggtggcccctggttcctttgaggtaggaggtgagatgctgagtgtgagggccatgtgtattgagggcccaggacagcctggaagccccagggcgctgtgacctccccagtcagcagtgagctgtctccaggccggggctcactggctgggactgggattgagaggaaggcggagaaaacaggcaggagaaactgaaagggtctcagctggcgggacaggaagtgtgggcccagggcttggcccgggaggagacaaggggaccaagggcttggcaatggggatgagatcagagagctgcagcttccaccccgggtgccttcctcgccctgccc

SEQ ID NO: 13705 - DNA, 1027 bp, Artificial sequence
  DNA replication origin
cgggtgtggtggtccacacctgtaacctgagctactcaggaggctgaggcaggaggatcgcctgcatccaggagttcaatcaaggctacagtgatgagctgtagtggcgccactgtcctctggcctgggcgacaaagcaagaccctgtctctaaaactgccctaggccctctgctgtacagcaccgctgccccctacctgttactccaggaagaaaccaaggtcaaaatgtccagcactgggctaggacagtgaaggacttggagtggaatcagacgtggggaaggcgacagcgatgcttagctgtggtttctgtatacccagcaacgtgagagcaacctgatagggcagttgttctcagccgggcgactttgcacaatgattgtcacagcttgtggggagggggttgctactggcaccccgtgggtagaggtcagggaggcttctgaacatcccacagtacacaggacggcccccagaatagagttgcccagctcaggtgtcaagagtgcccaggagaaagcctgtaatccaggcacaagcaaagcgtgccaggtgcatgggaggagtggggagcagggtgggaggggcccagatgcctaaggagggaagggtgactgcaactgggtaggctggaggagcccaggggaaggagaggatgtggggactgttaggtacaagagagcaagaaggtgaggggggcctggcacagtggctcatgcctgtaatcccagcacttcaggaggccgaggcaagcagatcatttggggtcaggagttcgagaccagcctggacaacatggtgaaaccctgtctctactaaaaacagaaaaattagccgggcgtggtggtgcgtgtctgtaatcccagctactggggaggctgaggcaggagaatcacttgaacctgggatggtgaggggctgttgggctggctccgtcgcagaggggagatgggaaaggctgacaactgtgcccacccccagggtatattcaggcctgccgggcactcatgatcaccgccatcctc

SEQ ID NO: 13706 - DNA, 1242 bp, Artificial sequence
  DNA replication origin
atcggatcggctgggacggcctgcagcccccgcgcgcggggaaagggtgagtgagagaccccggggctccgcagtcccgctaccgacttccacagccccccgaccctcgcgggcctccagaatgggcagcggccgagagattccccagcggcgttgcaggagcccacgtggagcccacgggcttccctgccctgagcagctgcagctgcagcccccgccaccccgagagtccagccccgagggcagctcctgccttgcctgcggttaccgccgccgccagctgagggccaaggagggagaggggaggccaggcgctctcaggagtcccaaaggacaaataaccccgccgctgccgcgggacccagacgcgagccagctgctcgcccgccctgccccgcctgagctttccgccggcagcctggggcccagcccttccctgtctgtcacagccagagcccaaaccccgggggcctgaggacagtccgctggcggttccgtcccgcgaggactggagcacaggggcctggggattggtggctgcgggttttgtccgtcaccgttggcggctgaacactcctccccggggtctgaggtctggggcacagcctgccgataccaccacggacaggccaggggactcgcttgcccctcccacccatcaacacctgctgcccccgggcctgagattagccgcatgcccaggcagggactgtcactaccagcattcgagcagggcacctagacgcccacgaagagacccacaaatcgctcccctgaacccactaacgccagggccagtgtacactgctctggggctcaagaacaggcaagcacagtctccactaataaccacaccttaagtcacccaagtaatgtacagagcctacacttctacctcaaaccaaagccaagatcccctacttaaccacatcatatctacatcttcaggaagaagtcctcccctacaaagcgaattcacaaacggaagaagtgactgttccacaggatgcgcagatctcaacggaaggacccaggagacatgaaaaagcaaggaaatgtgacgccttcagaagaaaccagtaattctccagcaacagatccccatccaaaagaaattcaggaaagctcaaacagagaattgagcagagaattgaccggactgattgtaaagaaggtcatcaacatggaagagtcttttgaacaacaacataaagaaatgaggaaaagaggtggggagatata

SEQ ID NO: 13707 - DNA, 1470 bp, Artificial sequence
  DNA replication origin
accagtctggaaggggagggcggggccgacccggaccctccagggaacgcccttgagtaactcgcgcacttgggacccattcccacctaggaccataggctcaagatggcctggtggatgccgccggcacgcgcctctcctctggcgggaaccgaaggcgccggtaggttttcacacttgcagccgatcggctaagagaacgcgggattcagccgagaagccactgggagcccgaggagcggagcagaggcacccaggcagcctgcgcggagaaatcggatcggctaggacggcctgcagcccctgcgcgcggggaaagggtgagtgagagaccccgggggctccgcagtccccccacggacttccacagccccctgaccctcgtggacctccagagtagggggcagcgggcgagagattccccagcggcgttgcaggagcccacgtggagcccacgggcttccctgccctgagcagctgcagctgcagccgccgccgcccagctgagggccagggagggagcggggaggccagaggctttcatacgtccgaaaagactaataaccccaccgccaccgcgggactcagacgcgaaccaaccgcttgcctgctctaccccgcctgagctttcctggggaccagcccttccctgtccgtcctagccagcgaccgaaccccggggccctcaggacagtccgctggtggttctgcctcctgaggacttgcgcacgcgggccggaggcctggggattggtgactattctgcctcttccgccaccgttggcggctgaacactcctccccggtgtctgagttcaggggcccagcctgcggataacacctcaggctacctacaggcccggggactcgcgtgcccgcccaacctggtcagccaccaccaacaccagcagggaccgcctggattccggagggttgcccccccaactgcaactaccctgcccacatcacacccactgccccaacgcctgagatcagccacacccccagccagtggctgccactaccagcattagagcagggcacctagagacacacgaatcactccccacaacccgctaataacagagccagcatgcactgctctgggactaaagaataggtaagatcaggccaccactggggcccaaatactggcccacctggccgcctagtccccagcaaccacagcctccactaataaccacaccctaagccacccaagaaatcatacagagcctacagtactaccccaaatcaaagccaaagtgccccagctaaccaacaccctatctacattttcaggaagaagtcctcccctacaaagcgagttcacaaacttggaagaagccactttcacaggatgcacagatctcaacggaaggacacagaaaacatgaaaaagcaaggaaatggggcgcctccaacggaacccagtaattctccagcagcagatccccatccaaaagaaaca

SEQ ID NO: 13708 - DNA, 1915 bp, Artificial sequence
  DNA replication origin
tgcaggtggagctgcctgccagtcccgtgccatgcgctcgcacttctcagcccttgggtggtcgatgggactgagcgccctggagcagggggtggtgctcgtcggggaggctcgggctgcacaggagcccatggagtgggtgggaggctcaggcatagcgggctgcaggtcccgagccctgccccgcgggaaggcagctaaggctcggtgagaaatcgagcgcagcgccggtgggctggcactgctgggggacccagtacaccctccgcagctgctggcccgggtgctaagtccctcattgcccggggccagcagggctggccgactgctccgagtgcagggcccgccaagcccacgcccacccagaactccagctggcccgcaagcgccgcatgcagccccggttcctgctcgcgcctctccctccacacctccctgcaagctgagggagtgggctccagccttggccagcccagaaaggggctcccccagtgcagtggtgggctgaagggctcctcaagtgccgccaaagtgggagcccaggcagaggaggtgccgagagcaagcgagggctctgaggactgccagcacaatgtcatctctcaacagcagggactcaaacctgtgcaggcacaccgagctggagagaggacatctcccagaggcggctgaccaatgagccagagttctgccttgagatacaatcaatcccccaattctcaaatcccttcctcacctccagccccacccaggaagcccagagctcatgaaaaaaaccgtgaggaggaggcatctgtgcggctttggagaccagcctcaggctacaggttgcaagaggaagccatggtcttctgaagagcaagtccagggcagttgtcgtggctcacacctataatcccaacagttttggaggccgaggtgggaggatcactggagcccaggagtttgagaacaggacaataaagtgagaccccatctctacaaaaataaaaaaaaattagccaggcatgctagcgtgcgcctgtggtcccagctaaatggaaggctgaggcaggaggatcacctgagctcaggagatcaaggctgcagtgagccatgtttgtgccactgcacaccagcctaggtgacacagcaagacactgtctcaaaaaataaagaaaatacgtgcataaatataaaaaggagaccaggtccgcagctggagggctgggtggcagtgggaaatgaaaatccaaggagcaaaaccaaaaaagtgtgcaaaagccaggcacggcagagagcaagccatggccccggcgatcgctgagagggcggcgctgccccgtccgcccccagacatcggcatcctcccctcccataggccctcagactcagcaagttaaaaactgaacccgggctgggcatggtggctcacacctctaatcctagcactttgggaggctgaggcaggccagatcacatgagaccaggagttcgagaccagcctggtctatatcgtgaaaccccgtctttactaaaaatacaaaaattaccagggtgtggtggcgcacgtctgtaatcccagctactcaggaggctaaggcacgagaatcgcttgaacccaggaggtggaggttgcagtgagccactgtgctccagcatgggtgacagagggggactgtctcaaaaaggcaaaaacaaaaaaaccaaaaccgaacccaatcaggcgctgtgactcattcatataatcccaacgcttttggaggttgaggcgggaggatcacttgagcccaggaggtcgaggctgcagtgcactgtgatcgtgccactgcactccagacaagatgctgtctcaaaaaaataaataaaataaaataaataaaataaaatttatcatgcacatcctctgtgctcccaaagatcttttcaccgcctt

SEQ ID NO: 13709 - DNA, 971 bp, Artificial sequence
  DNA replication origin
cagccaccccgtctgggagggaggtggggggctcagccccccgcccggccagccgacccgtccgggagggaggtggggggtcagccccccgcccggccagccgccccgtccgggaggtgaggggcacctctgcccggccgcccctactgggaagtgaggagcccctctgcccagccagccgccccgtccgggagggaggtgggggggtcagccccccgcccggccagccgccccgtccgggagggaggtgggggggtcagcccccagcccggccagccgccctgtccgggaggtgaggggcgcctctgcccagctgcccctactgggaagtgaggagcccctctgcccagccagccgccccgtccgggagggaggtgggggggtcagccccccgcctggccagccgccccgtccgggaggtgaggggcgcctctgcccggccacccctactgggaagtgaggagcccctctgcccagccaccacctcgtctgggaggtgtacccaacagctcattgagaacgggccgggatgacaatggcggttttgtggaatagaaaggggggaaaggtggggaaaagattgagaaatcggatggttgccgtgtctgtgtagaaagaagtagacatgggagacttttcattttgttctgtactaagataaattcttctgccttgggatcctgttgatctgtgaccttacccccaaccctgtgctctctgaaacatgtgctgtgtccactcagggttaaatggattaagggcggtgcaagatgtgctttgttaaacagatgcttgaaggcagcatgctcgttaagaatcatcaccactccctaatctcaagtacccagggacacaaacactgcggaaggccgcagggtcctctgcctaggaaaaccagagacctttgttcacttgtttatctgccaaccttccctccactattgtcctatgaccctgccaaatccccctct

SEQ ID NO: 13710 - DNA, 1325 bp, Artificial sequence
  DNA replication origin
ccggacgggtcggctggccgggcggggggctgagccccccacctccctcccagacggggtggctggcctggcagaggggctcctcacttcccagtaggggcggctgggcagaggcgccctcacctcccggacggggcggctggccgggcggggggctgaccccacctccctccagacggggcggctggaccgggcggctgaccccccacctcctcccgacgtggctgacacccccacctccctcccggacggggtggctggccgggcagggggctgacccccccacctccctcccggacggggcagctggccgggcggggggctgacccccccacctccctcccggatggggcggctagccgggcggtgaccgcccccacctccctcccggatgggctgacccccccacctccctccggacggggcggctggccgggccggggggctgacccccccacctccctcccggacggggcggctgccgggcggagacgctcctcacttcccagacggggtggctgccgggcagagggactcctcacttctcagacggggcggctgccgggcggaggggctcctcacttctcagatggggcggatgctgggcggagggtctcctcacttctcagacggggcggctgggcagagacgctcctcacctcccagacggggtcgccgccgggtagaggcgctcctcacatcccagacggggcggcggggcagaggcgctccccacatctcagacgatgggcggccgggcagagacgctcctcacttcccagatgggatggctgccgggaagaggcgctcctcacttcctagatgggatggcggccgggcagagacgctcctcactttccagactgggcagccaggcagaggggctcctcacgtcccagacgatgggcagccaggcagagacgctccttacttcccagacggggtggtggccgggcagaggctgcaatcttggcactttgggaggccaaggcaggcggctgggagatggaggttgtagcgagctgagatcacgccactgcactccagcctgggcaccattgagcactgagtgaaccagactccgtctgcaatcccggcacctcgggaggccaaggctggcggatcactcgcggttaggagctggagaccagcccggccaacacagcgaaaccccgtctccaccaaaaaagtatgaaaaccagtcaggcgtggtggcgcgcgcctgcaattgcaggcactcggcaggctgaggcaggagaatcaggcagggaggttgcagtgagccgagatggcagcagtacagtccagcttcggctcagcatcag

SEQ ID NO: 13711 - DNA, 1156 bp, Artificial sequence
  DNA replication origin
catccgccaccccgcgcccccaggcccgaatcgccccgcaccccaaccccctccagctctcgttccagctgcccggtgtctgcagcccccagtccccgctgccctgcgcccccaagtcccggatcgccccgctctccagcccccaagcctcgctccagccacccagtggccagggcccccgctgtccgctccctccccccaccccccggcccctcggccccgagctactcaccggcggctcgcgtagccgctgccaggggagccggcgccgggctcggggtagccgtgctgctgcagagctgcggccgagaagggatagaggaagccggtggccagcgccgacccgcagaggcagcaacacgcccagggcaggagcagggccagcttcatcgtgcgcagcagcccgcggggacccggagtcccgggcacgaggaccggcaggagcgcaccggcgcccggaccgaacccgcggcaccggccgggagcacagcgagaggagcggggcgagcggtcggagcccgggtgcgagctggaaatgtgtggggggcgcccacgcctctccggggccgccttttcaaattcggcgaggtgggctctaagccgtcaaagggggcgtggggcttttttgttaaccctcggcggtccggggccgaggaggcggcagtggcggcagagctagggtgcgagctccgcaggaggtccctggagcctaacaccccgaaagccagacctcgcgcccaggcccccgctacacaccttagaacctttgaaaccaaaccttcttcgggtccgcgaatgctttcggagcgcccattctgtgtctgccaatttcacctggacgatgttggtgaatcctcgccacactgccctcgatggtcccattcagaagtggaaactgaggctggagaaagttaagccagacaaatgcgagtcttccgatccttgtgcagggctctttggatcaaagcgctgcgttcccgtgagaaactgaccagagcttcccaggattctcctccttcccctttaacctccagcccccacctgccccgctgtctcttccaggtaagaagctttgggaggggcggaagggtcagttggggtgagaagttgtagctagattgggaggccgaggtgggcggatcacctgaggtcagga

SEQ ID NO: 13712 - DNA, 1233 bp, Artificial sequence
  DNA replication origin
tctgccgccactgccgcctcctcggccccggaccgccgagggttaacaaaaaagccccacgccccctttgacggcttagagcccacctcgccgaatttgaaaaggcggccccggagaggcgtgggcgccccccacacatttccagctcgcacccgggctccgaccgctcgccccgctcctctcgctgtgctcccggccggtgccgcgggttcggtccgggcgccggtgcgctcctgccggtcctcgtgcccgggactccgggtccccgcgggctgctgcgcacgatgaagctggccctgctcctgccctgggcgtgttgctgcctctgcgggtcggcgctggccaccggcttcctctatcccttctcggccgcagctctgcagcagcacggctaccccgagcccggcgccggctcccctggcagcggctacgcgagccgccggtgagtagctcggggccgaggggccggggggtggggggagggagcggacagcgggggccctggccactgggtggctggagcgaggcttgggggctggagagcggggcgatccgggacttgggggcgcagggcagcggggactgggggctgcagacaccgggcagctggaacgagagctggagggggttggggtgcggggcgattcgggcctgggggcgcggggtggcggatgccaggggcaggggacacggggcaactgggacgaaatggcggtggctgggggttggggtcacggggggaaagaccgaagggccttgggtgcagggcgattgggggctggggcgcggggcggcgggggttgggggctgcagacggggcagctggaacgagcgatggaggaggctgggggttggggccgcggggctgcggggctgcggggttgcgggggctgaaggttcgggtccggctccggggctgcggtggtctctggccgcgcccaccctgtcccttcctttcttcgcttccccaaccttcgccccctcgttccgggctccgagtagaggtggttccgaccgccgtggctggggctggggctctgcccggggcgttcggccgctcacgtggctctgccgctcacctgcgcggctgcggctttgtgtcgcggagcaggttctcgggtggccaaggcctcgcgtcccgggcacccctctcctatcagcggccccaggacaccagaggggtcattcccgcccagtctttggggctgaggccgcggaggatcctcggctgcg

SEQ ID NO: 13713 - DNA, 1571 bp, Artificial sequence
  DNA replication origin
ttagccaaccgaccaaccgaccaactgaccaatgtgtgggggccgtgagaggggacgaagccagcaggggaagcagcggtgtaacaggcacagagcggagagagaccacggcaagtctagagacttgcctgcaatgggaagtggccaggccaggcacagtggctcacacttgtaatcctagcactttaggaggctgaggcaggaggatctcttgagcccaggagttcaagatcagcctgagccacatagtgagaccctgcctctacaaaataaaaattaaaaaattagcccaggcgtggtggcacacacatgtagtcccagctactcaggaggctggggcaggggatggcttgagcccaggatcatagtggctatgatcatgctacttcactacagcctgggcaacagagtgaaaccctgaagagaggaggagaggaagggagaagaggggaggggaggggaggggaggggaggggaggggaggaggaatgagagagaaagagagagagaaggagagagggagggagggaggaagggaaagagccagagagagagagagagagaaagaaagaaagagccagaaggctgaaggaaggggaggagccaggagaaaggaagagacatgtgacctgccgggctagggaataaatgccttcagagtacaagaagcaaggggcagcaagcttgggcagtggagaggaggaaagaggaagggacgtacacaaacaatacgggatcaggttaaggtgctcccacctcctcctcccatccccatagcctagaaattgaaaattaaaaaataagtccctggccgggtggtggctcagcacttttggggtccgaggaggatggatcacttgagcccaggagtttgagaccagcctgggcaacatagcgagaccccatctctacaaaaatatttaaaaattacctgtggtggcacacgcctatagtcctagccactcaagaggctgaggcaggagtatcacttgagcccaggaggttgaggctacagtaagctgtgatcatgccactgcactctagcctgggtgacagagcgagaccctgtctaaaaataataataaaataaaataagaaaaaaagtcctcaagggcattggaaagagagaagcaatgggccagacatttggaggggtccctaagagacagaaagtagatgggcccacattgaaggcaaaaatcacagccagaaacacacaaaagaggaccggggctgaagctaggagccacatgggggcacagatgcagatgaggaggtagagagggacccaaaggtgaccatcagagagattggttaggggaccaccatagaaagagctggacaggtaggacccgggtccttgtccctgctggtttcaggaatcaggcattggaggctgagtgcggtggctcacactcataatcccagcattttgggaggccaaggtgggagaatcgcttgagcttaggaattctagactagcctgggcaacatagcaagatcctgtttgtctctacaaaaagtatatatatacgactgggcatggtgactcatgcctgtaatcccagcac

SEQ ID NO: 13714 - DNA, 1271 bp, Artificial sequence
  DNA replication origin
agtcctgacctcaagtgatccacccgcctcatcctcccaaagtgctgggattacaagcatgagccaccgcacccagccaagattaatttaaatcagtagacttggagtaaagcaggttgccctctataatgtgggtgggccttgtccaatcagtcgaaggctttaagaaaaagactgacttccccggaggaaggaggcatttgaccagcagccagcccatctcaagctgcaacatcagctctcctccctgggtctcagccagccagcccaccctgcaggtttggaataatcgccagtctccataatcatacaagccaattccttaccatttcaatctctctcccactctccctctcccccatcccttcctattggttctctggagaaccctgacccaggcaaaatgtcccgttagggagggcacaaaggaggggaagggatttggagtttgaggacagcggctccacggtgcttggggtagaggccccaggctgggcaggctgtggggagagtggtttggggaagccagtccctggagctaagcacggcctggagaggaggaagaagggaaaagaaggagagttggaactttggagaccgtgaatgctggtgtctgacagcaagatctctctgcggatgctgaagagtccctgaagcctgtggtctggtcagggctggtgagagggaggggctggtgagagggaggggctggtgagagggaagggctgactatgggcggggctggtgagagggaggggctggtgaggggtgtggctggtgaggggcgtggctggtaggggcagagctggtgaggggcaaggctggtgggggcagggctggtgaagggtggggctcatgagggtcagggctggtgaaaggcaggcctcgtgaggggcaggtccagtaacaagtagggccagtgagagggacatgcctggtgagtggggcagtgctgccaggggcgaggcctgtgatggatggggccaaagacaggctggatttccaaggtcattgtagcccctcgttccagcctggagccataaggctggttggttccctcttcaaccccacctggccttccccgacctcggatcccataccccactcatctgtggtggtcttctgtctgtcaaacacccactgggttgtgtggttctgttgcggtaggagcatgtctctgacatctttgcacacacacatatataccctatatacacacacccatgccttatatacagaaggtgctccataaatgcatgctcagcctttgt

SEQ ID NO: 13715 - DNA, 758 bp, Artificial sequence
  DNA replication origin
ccgtggcctcccctgctgtgctcagcccagggcaggagtcccctgggcccagcacccgtttcccaggccctgcctgcccagcctgcccctgactccctgcaggcccccagggaactggagagggtggagaggtgcccccacctcccgttccagtgttgactgtgtgacttgcttcttagggtgaacctggcgtgaagggggaagaaggagagaaagccgccactgcagaggtaaccatggctgcccttcacgttccctcccgcctccttggctgtgagcactgtcacgggagggcaggtgccccacagatctgcgctgaccgtcagccagccccgagctgggtgctgggccaccgggtgtacagggcccctgccctgagaagttcacagccccatgggaactcagctgagtacagcagtgattgcaagagagtgagaaggtggctgggtggggatgccacagagggggtgattggcccttgggggggcttcccgggacagggagaggagtcgcaaacttgtaggaaagacagtctccctggaggaggcgtcaggctgcagagtccctctcaacggaccgggttctcccgtgaatggcgtctcggcatgggcgtgcttacaaggtcaagggtgctgggggactgaaggggacagggctgctggatgtggtagaggatggatggaggaagagggacttgcaaactgggaatctgaggagagaagattggagcaagcggaggctggggccagtgggagggg

SEQ ID NO: 13716 - DNA, 796 bp, Artificial sequence
  DNA replication origin
ggagggaggaatggaggaagggaggcagggagggaggaagggagggagggaggaaggcagggagggaggaagggagggagggaggaaggcagggagggaggaagggagggagggaggaagggagggagggaggaagggagggagggaggaagggaggaagagagaaagaaagagaaagagaagaaaagaaaagaaaggagggaaggaagggagggaggaagggagggaggaaggaagacagagaaagaaagaaaaagaaaaaaagcaagagagagagaaaaagagagagaaagaaagaaagaaagagagagagagggagggagggaagggagggagggaaggagggagggaaaggaaagaaaagtaagaaacaagaaccgagtgtttaaggaagagaagagcaggtctaaggtgtgaccctggaatcgggtggctgaggttgggggagcaggtccctggagccaaggattggaggctgtgggttgaggggtagaattcagaccctgagaggccaggaggaaggaggccaaggagagtggcatgttggaccctgcagagggccagccctggctttgacggtagctgcttcaccacaggggccacactcccctaccccttggccacagtgaaaggtctcccctcctctttccccactgctgagctcctgttccctctgtgggaggcgggagagagaagcaccaccatcagtctggagctctgggctcaggacacaggggacaggtacatagcagaggagctcctccctccaccccaagcctggctccgcttgctctcc

SEQ ID NO: 13717 - DNA, 1177 bp, Artificial sequence
  DNA replication origin
cgctgcccagcccagtgatatcgcttgatgtcccttcccctctctgggccttggtgtccccttctctatgtgtgcgtggaagtagaaatggataagaaatggtgggtcaggctgggcgcggtggctcacgcctgtaatctcagcactttgggaagccgaggtgggcagatcacttgagaccaggagtttgagaccaccctggccaacacagcaaaaccccatctctactgaaaataataaaaaaaattagccaggcatggtggtgcatgcctgtagtcccagctactctggtggctgaggcaggagaatcgctcgaacccaggaagtggaggttgcagtgagccgagatcacgccattgcactccagactgggcgacagagtgagactgtctcaaaaaaaaaaaaaaaaagaagaagtggtgggtcactccaggagagcttcctagtggggtgggtgtgggggcaaaggcagatcttgaagaatgactgcaggttgcccaggctagggggggaacagcattctagatgagggaacagagagcttggagggccagggcttggcatgtgcatgtttgttcagagttggctgcagctggagggtgcgggtggaggtggtgtaggggagactgagcacagagcggcaggcggggcctctgggggagcgctcacaccctagcccctggaccctgcgtctgccctgggagcatgggagaacctgaggaggagttaggcaaggacaccatggaggccagcctggagaaggagaggagagggttgcagctcccaggagggtcatggccgtcgagatggagtcgggcggacagataagcaaagagccaggggccagtgcccataggatccagggtctggggagaggactgagccagatcgtagccagcaccgcctcgggcaagagggcagtaaggattggggaaagtgaccagctcacttggaatgcatgaaggggaagtggctgcaggcagctgtctggcaggcaccggggctgccatcatgagggtaggggtgccccacccagtgacagcaagggaacagagagccaagaattgcaggcaggagtgggcgggggagtggcagccttcccaggacccaagattcagggctgacctctgagctgtgccgacgcagtcccttcagaaccttgctggacctgagggtg

SEQ ID NO: 13718 - DNA, 1462 bp, Artificial sequence
  DNA replication origin
tcaagacagctgggctgcaaagaccctagggtttaggactcttgtgctgtaaagaaaatgatctctccctccctcgtggagctctgggacagtgtagggtgggggtgtaaccagggggatcatgagaggctgggggcgtggggggcagggactgaggacgccgaggccacagccaggtgtgccagagaaagggcagaacctcccacagacggaagtgatcattttttattaatcggaggaaatgtatatgtaattatgtgggatgaactctgtggggaagttcttttctttatgatgtctgaaaggatttataaatattacagaggttttacagcatcataacgtcccggccgccctggcagccccctttcaaaggattaggagagacagagcacccagtaaaagctaattataagtcagccggcgcttctgcccctgccctcgacgacgcgggctcctgggcgggggtggggacagcagtgagctgggggcaggggagaccacacaggcgttgggggaggggagcaggggatgaggggactcctctgctctggtgggggcaggtagacaagggcttggcaggagagggtggtacaagttgtgacggagacaggagctggtggtgggaacccatttctgtgccatcccgtccacctccccgtctggaatccagcaattcttttcccccatcgagagcccattctggggctcacagcgcccctgggggctgtaaggatggctgcccaggaacaggactcttgagggtcttggggacctagggctttcagcaaatgcccaatggtggacttccagacaccctgacatcacagaggcaggaaggctggccagaaaccatctgactactcaacgtgggtggcctcctgctttgcctgctgcgtgggttggccctgagttctgggcagctatttccaagcactggctgatccccactttgagccaggttcagggtggggataggagagatcagagatggggcaaagtgggttttacccctgagatgtccacttagtcgaggacacagacgcacagatatgtcaggacagtgtgatacatgctgtaggggtgacagtccacagtggagccatgtggggaggggagagtggcctggggtcagggaaggcttctcggaggaggtgacagggagctgagcctgcaggatgggtaggagtctctagatagattctccagggaaggcattccaagcagggaattccaacagagcaacgcattccaggcaggggcaaacgctgggagggaaggcagctctgggacagagtagagggcctgggtgagagggagtagcagctctgggacagggcaagaggcagatcctgtggtggggctaagagcgcagttgttctcctgagaacacgaagaaggtttttagcagctggcgataaggtcagattccagctgtagtggaggatgccggggtagagat

SEQ ID NO: 13719 - DNA, 980 bp, Artificial sequence
  DNA replication origin
ggctgcagggtctcctgtccacccaataggaccccaccctggttccttacaagtaggaggtccccaagccattgcccatatcctgaccccctgtcctgcaagccacagcctcttcctccctcccctgtcactgaaggaccaaccaggaatacagtgtttaagtcaagcagaatggacacatctttagggagcccaacggtggggtgccagggtctgaatggcgctgtgtgtaggggggttatatgctcggctcccaagcctggggcaggtcattctggctctgcccagattccacgctgactttgggcagaccagcatcttccccagcaaaaggccctgtggcatggggaaattcctgcgcatgaagctggagatgcacggtctatgggtgagtggaccccagtactacggtggaacccccaatactgcaggggcacctcagtgcaaggcaaggccgtgcacacctgtcgtaggacactgagagacattagcgtagtgatgatgcctatgtgtgtatgtgtgtggtctatgtgagtacagctctgtgtgttagtgtatgtgtgtgcatctggtgtgtgactacatgtctgtgtgtgcgtgtttgtgtgtgtctctgtgtgttagtgtgtgtattcatttgaatgtgtaaatacatgtctgtgtgtaagtgtgactctgtgtgaatgtctgtgtgtgtctttgcgttagtgtgtatgtgaatgcatgtctgtgtgtgcctgtgagtatgtatctgtatgtcagtgagtgtatatgtgaatgcatgtctgtgtgtgtacgactgtagtgtgtgtgtgtgaatgtgtgtctgtgtgactagggggttggagggtgtgagtggagctctgggcagagtggtccctgtggctgtacaatttggaaaatgccctctatgccctgcccacctccctggggcagggggtgccgtcctatttccctggtgaagcctgcaaattcctcct

SEQ ID NO: 13720 - DNA, 916 bp, Artificial sequence
  DNA replication origin
tggagacccggttggtggcagcgcggcccctccggtctatcccgatcctcgttagcgcggcgccacctagcggcgcccgggggaagcggcggctcgacctcgtccagagcgcctcgtggggtccggagttccccgtgcttctgctgcgccctcggggagcgaacgacgggcaggggggacaggaaggggccgccctggcctcggccagaggagcaggaggcgagggcaaggctgtaactcctgacacctaagggcctggatgcccgggggaagaggcgggaggaacgaagtcagggctgactcagccctgaccttggacctgaccttgaccccaggccctgtagtttgcttccttaaccccagtttccatgaacagaagcctccacttagtcccatcagggaggtcaagggggaggcaagagaggagggatgtccagcctgggcagggaagaaggtcagccctgggagtgcagcaggggggtggcgggggctgggtagggtgggctcagggtgcactgggagggacaggggacaggaggcacaggctgtgggtcgcaggcccaggatgggctgcggggtgggacctgtggcagaggatcccagaaggcagtgaggccagggctgcagggtctcctgtccacccaataggaccccaccctggttccttacaagtaggaggtccccaagccattgcccatatcctgaccccctgtcctgcaagccacagcctcttcctccctcccctgtcactgaaggaccaaccaggaatacagtgtttaagtcaagcagaatggacacatctttagggagcccaacggtggggtgccagggtctgaatggcgctgtgtgtaggggggttatatgctcggctcccaagcctggggcaggtcattctggctctgcccagattccacgc

SEQ ID NO: 13721 - DNA, 827 bp, Artificial sequence
  DNA replication origin
gggaggcctgagggatgagtgatcagactccctcaaagaaaaccagagccccagctgagaaccagctcggtgcccatccaccctccccgttccaccccaacacgcttatccccagagtgttccggagaggtggttccaactaggggtctggtgggagttcatgaggatgggagttcatgaggaaagagagcacaggatccccagccctggatgggacaggcggggaggtgccgggaagaacacccagggagaaggaagaacatggagaacgcggagaacgcatcgggtacgccagcaggactgtgtgcctggaaaccagaatgcaggccattaagacacggaccgggcaggcctgggcagggcagcccacgagtgcagatcccttggggcactggggagccacagaaggtctttgatccctgcagttacacatataccaagggactttgagccccttctcaggatcggtctggcagcagctagggaagagttctaggggtgggtaggaggaggtgggaggtgcaagaagtcggagaataacctaagtgaggacaaccgccaggatgagaaggcggagggggcatgggactaaggacgctgggaagtagacaccccaggactggggcccgagctgggaggagctggacgaggaggggccctttctcagaaccagtctacagaggtgagagggaggacagatggggaggggcttgcttggactttgggatcttcctagaaatcggccacacaggacccagatggtctctgtgtccctctgtcatggggacaacgatcctccgcttcaatcggacccttagagtcactca

SEQ ID NO: 13722 - DNA, 841 bp, Artificial sequence
  DNA replication origin
gggaggcccctgatgtcgggaacggggttcactgtctccccaacgcaaccttgactcgccggtgggtgggagcgcgctggcgtcggggggcacgttgcgagcctccaccctagatgcggtgacgccgcgcacagcagggcactgtggatctcgggtggccaagggctgcctccgtgtggggcgccccggcccgcgcgctcagtcggccggccgccgcgctgtagctccgaccgcgccgcccggtagagggcagcggcgccccgacactcgggtcctcgggtcctcgggtccccgcgcacgtgcccaccggcgcgcccaggcccccgcgcctgccacgccctgtcccggagtcaggcttctggcgggaagcggcattgccaccgagggacattcctgtcccggggaaatgcgacttctaaggatgcctgcacactcggggaggcggcgggggtgggggggggggtgcttccgccttcccctggcatgtctatttctgcggtggcaggcaggcgagacctaggaattgcgctaaaggtggctagacaaaatgtgcaggggcttaaaaaaaaaaagaaatccctcccatggggaaggctcaaggaaggatcagggaaatggtttggatttgatgcagatgttctcaatctaattatcgtgtagatcccctgggtttgaaccaaaaaagtgaaatatatatgacctgtgtaatactcccgaaatacatctggttggaattcagtattctgaatccatggcaatattttagaaataaatctgatgactattaaataccgttgttacatttctggttatatttatattatttacatgctaacctgac

SEQ ID NO: 13723 - DNA, 898 bp, Artificial sequence
  DNA replication origin
aggaggaggctgcaactttcccctaggcaggccccaagctgttcccccgggtgcccgggcagtgtacgctgcctccccgccgccggtccgagccgcgatcgccgcgcgcctgggggctccggcggcccccggtgacctgcggcgccgggtcccttccttgcgtcccctcggggcttctgccctctctgcagggcccgccatggagcgcgcggcgggtgcgctcggagatgccttctcgggccgggttctcgaaagcagagccccgggggcccgttgggaccgtggcatgccgggcggtggtccgcgcgcggagtccccggcgccgcggggggaccgtgccggggctccccggcccgcgcccgagtcgccgccgtgcccaaggggcgagtgcctgcctgccaccccccgcccggaggagcggcgcacccttagggtccgccccgcacgtgccagctcggcgcccgcggcgccgggacagccccgggactctgccaggtggatgttgtgcgtagccggagccaggttgaaggtgagcggcgtgtgggccagaagtcccgaggttgcaggcgcggagggaaccggggatgtcggggggtgcccgggtcccgcggcttagaatgctctagggcggcctggtgctctgggaggggataggagggttcctcagggcccctggggaactgcagctactcccaactgctaaggtgtgcgtgaagataaacttggctgaactttcctaacctggaggactggtgacagtgacctaccgcaatacctttgggagcaaagctcgagatgcaggcttgtatcaaacgaagcgggttggattaaaacatatttaaatggaatctgacaactttaattgtatatgcttgttttctgctcttgcctactaaga

SEQ ID NO: 13724 - DNA, 1035 bp, Artificial sequence
  DNA replication origin
gtttgactctgctgacagcctgagtgggaggaaacttccccatatgaacgaacggggaaagtgcatgttgtagttctcaaaacccaaaaaaatctaagagaaacccagcagcaagaaacacagaggtttgggtgtcagcatcggaggaatgtctcacgtctgccttgtcccccagaccccgtccctgtgtctgggcaaaggcacgccccgctccaggtcggccccatttcagagcagtggccctcataggctttgtgcctcttcatttagtctaagaaactacctaggatatttttgtagaggtgacatcactgtctggctgcagaagcatttgcttggatttggggaagtgagggctgggagaggagggcttagagaggcaggatgcccaggcccattgcgggtggctgatggggggtgggcttagcatctgcagggacagggtggagggagaggagccaccccaggcagggggaaggggtgtgccccctttgggatatggaggttttggggggctggtgggagggaattccaggggtcgagcccctggggaaaaggaggctttaaggtcagtggaaaagtgggtgccaaagtctggaagatgagttgaaacctggagtttgaagcccggggaggattttgttggagtgttggctggtgctggagagttttgcatcacttggggtggggtggggtgaagaattaacttgaactggcacagcacccctttgtcttgactttccctgttctggagtgaggacggcttgatgtttcagcaaaaggagtagtggagagggagaatatttgcttgtaggattgggttccacataccatatctacagttttacatccactggtgacaagacaggagcttttctatttttgttttgtatttttatgtttttgtgcactaacagtaatggtttcatgggaacagatggcggacggacacgggcttaggctcttggtttatttcatgttacttgcatgacagccctatggagctgcgtacctgccataggtgagaagccggga

SEQ ID NO: 13725 - DNA, 1277 bp, Artificial sequence
  DNA replication origin
ctgtcaacttacaaatcatggacaggccgggcgaggtggctcacgcctgtaatcccagcactttgggaggccgaggtgggtggatcacccgaggtcaggagtttgagaccagcctggccaacatggagaaaccctgtctgtactaaaaatacaaaaattagccaggcatggtggtgggctcctgtaatcccagctactcaggaggctgaggcaagagaatcgcttgaaccggggaggcagaggttgcagtgagccgagatcacgccactgcactccagcctgggcatgagtgaggtgtcccaagggaaaaaagaaagaaagaagaaaggaaggaaggaaggaagaagggaaggaaggaaggaaggagggaaggacggagggagggaaggacggagggagggagggaaagagggagggagggagggaaagagggagggagggagggagggagggaaggaaggaaggaaggaagaaggaaggaatcgtagacactttaaaaagcaggggaggaaagaaaaaaaaacaacaacgacaataaaacaacaaaccaggcaatgaggggaagataccaccacaccacactcttctccccttagtatttctggcattcaggcacatcttgggcaaacaagtcctaaggaataacgtgggctagaattcaagaacagatgtcaaagctattgcagaaaaaagggaaacactgaacattttgatagaccacatttgaaacacatcccagttaagggaaggcagggaaaaaaaaaaaagagcaaccgaaaccaatgtggtggaacgggggatacagataagagaggagcagtcacagcgaagcagaaggctcttcaaaaatataaacaatctggagggaggagggctttgacatctatatttaagcagcagcagccgaagttataaaaggagccttcgaaagaaggcggggaagaaagccaatattgaaatatgacaaaaaagaaaaaaaaagagttgatgtttcgttccaatcgcacacagacgcagaaaacttaggagaaaaacaaaaagaacatgactgcttttggccgggggtccctacttcccccactgcatggaagcctagcagggtgggggtgctgggggcggttacccaatcggtgggcatctaccgatgtctttgagttggcaggcgctggaggtatgaaggtggggtcccagccccgacccccaacttctcatctagtgggtcaagtgtgggaaacgctggggaagatgccagatgagccgggggtctgtgggccccc

SEQ ID NO: 13726 - DNA, 1042 bp, Artificial sequence
  DNA replication origin
ctggctcaaaagctcccctactgagcaccttgtgacccccactctgcccgccagagaacaaaccccttttgactgtaattttcctttacctacccaaatcctataaaacggccccacccctttctcccttcgctgactctcttttcagactcagcccacctgcacccaggtgaaataaacagctttattgctcacacaaagcctgtttggtggtcttttcacacggacgtgagtgaaagagactgccattcatgaatggacaaggcctggctccgtccacgctttcccagctctgtgtcctgccatcggacatgctggcacatctgctgtgggtgccctgcacttctccgggcactcctggcccagctggggaggttggcatggtatccaccattttgttctaaagtagtaaatgaaactcttgggagggcagcacccagcagatgtttggagctagagacagggctctggggatgtgtaggaacccggacctggtgtggcaatggtgtggggctgtcacgaggcgtgaggaggctggggtggtgttggggacagcacacgatgctggggctcaggccaagtgaagcttggacttcactctgtctgaggctttgccaagtgtcagagggtgcacacttgggagtcacatggccaggctcacatttccagccgaagttacactctacagcctggcagcagatggacgtttggggacagaggtggagccggaacagctgagacactgttttagaggactctgcgagaaacacgctcttaaaacaaggaagcggtggttatgtcttattcaacaacgatctgttgtggaccagctgtgtgccaggcagttgcaggccctgaggctgcagcagtgagcagaaggccaaggtccctgccctcgcggtgcttacattctagtggagacagatgttaaactacagggcaggaaaacactgtcaaggagatgcaggtggaggattctgactgtggaactggggcatagagacagtgggttttgaaagcacttggctgagaaggatgggag

SEQ ID NO: 13727 - DNA, 794 bp, Artificial sequence
  DNA replication origin
gccaagtgtcagagggtgcacacttgggagtcacatggccaggctcacatttccagccgaagttacactctacagcctggcagcagatggacgtttggggacagaggtggagccggaacagctgagacactgttttagaggactctgcgagaaacacgctcttaaaacaaggaagcggtggttatgtcttattcaacaacgatctgttgtggaccagctgtgtgccaggcagttgcaggccctgaggctgcagcagtgagcagaaggccaaggtccctgccctcgcggtgcttacattctagtggagacagatgttaaactacagggcaggaaaacactgtcaaggagatgcaggtggaggattctgactgtggaactggggcatagagacagtgggttttgaaagcacttggctgagaaggatgggaggagggaggagggaggagggcgggtacatctgtagatggaccaggttaaggtatggacttccccatcctgacaagggggagccccaagcttgttttcaggtgtgacgggggtggggagaaagagagcattccaagagaggcacgaacgtcatttccagagcgagatgaaggtcacagagtttgggaggagatgggatccggcactcgggctggcgagcagacaggagggaactcagggagatgggaaccccggggaggaagttagggcaggatcccctgggagttttcccggatacataggagaaaaggttatccttcaagggtgagcgggggctaagtgcaggggacagaagagaggaaagcccg

SEQ ID NO: 13728 - DNA, 886 bp, Artificial sequence
  DNA replication origin
gcagaggttgcagtgagctgtgatcacaccactgcactcttgcttgggtgacagagtaagaccctgtctcaaaaaaaaaaaaaagtaattaatccccagtgttggaagtggggcctggtgggaggtgtttgggggacagggcgggtcccttgtggcgcggtgctgtctctgagatagggatctggttgtttaaggagcgtggcacctcccccacccccattctctctctcttcctcctggcctcgccatgtctcacacctgctcccacttcgccttccaccatgagtaaagcctccaacgcctccccagaagccaaaccgacaccagcgccacgcttctggtacagcctgcagaaccatgagccaaagaaaccccttttcttgataaattacacagcctcaggtatttctctatagcaatgcaagaacagctaatacagaaaatcaggggtggtggacaggtcctgagacagtgctgctgtgaggtggccagagcttcagggggtgatccacaaagggggtcccgcaaagaccctgagaagaggcagcaggaggcaggggagacagcaggaggatgcatgtgaaggcaccaagatgaggcaggagggtcaatgaatatggagggtcagggggtcagaagctacagagaggctgagcgaggcgaaggtgttgtcgtcgaggtggtgggggcatgcagggctgcaaggcacagcccgatgggcagaactggtggaagagcagtaacgtgtgcccgagaggggatcttgagaagcatagagtgtgtggaatggaccatctgcaacccagaaacccaggagagagggacagattttgtttaggggagagagggatgacaggcgacgggtggataagtgagcataagacag

SEQ ID NO: 13729 - DNA, 1275 bp, Artificial sequence
  DNA replication origin
ccctggcttgtggcagagagcagggcctggccagccacaggacaccctgcccgctgttcttgcagacccccagggggctgccagggtgctgccaggggcttccctgggtgcacagtctactcagtgtgacattctggactcccctgacatctgtgagagcccctccccgcctctgcagccgtccattctgcccatgggaaagtactccacgggcagaacttctgcagtctgggtgggggaggggagttgtggggtggggtccccacaatggatcgcccgattctgggagctgtaactggtttttccttgtctgcctgtcccgcaaatgcactccaggttaacccggtcactgccacacaccctcgggtagtcctcggcaggtgttcctgaatgggccctgggcctacattgcactgaagcggtggggaggctgtcttgggggggctcctggcctgaggggccagggtgtgcagggctggcgtggcaaggctggccgagagcacccagacaagggcaggtggaggggagccagggaaggccgagtgctcagggataggggccaagtgatggggggacccctgggcttccctgggctgatgcccctcccctcccctgcccaggctgggctcacgaacccgcttgctgaaggaggagaaggggtccaggcgctcctcgtactgggacgagtaccgcagctccgtgtcatcactgccgctgccctgcacagacagggaggggaagagaaccagtcagtgccttggggcccagcgggaagggcaggagcccaggggagcctcagtttcctcatctgcaaaaaagggaagtgggggagggagccctagatctcagaggcgggaggagagggtgctggggtgacaatgtgaatgtggctggtgcctcctgccacaggggcatggagttacccatggggtcagggccacagtgcctccgggcacagatggggaactgaggcccaggcagggccgggcgcagctgcaggaaggtgggtttgctgggagtgtggggtggtcatgcgagcaggcaggcagctgggagaggagacgccccccagctggccacccagagccaggctggtttgcagagtctgagtgccctctggtggccaaggagcggctctgatgggtggggacagggctgggggctgctgggccccaaaggaagagggagaggtgaatccctgccccactatgccccacgctcttctctcactcatagaaagggtttcctggcacggggtggcccctgggaggcctg

SEQ ID NO: 13730 - DNA, 1438 bp, Artificial sequence
  DNA replication origin
ggatctgggtttcagcagagctctgaatgtactcatggaattcctggagatgagaagagggggaggaatgttctgtgtgcccagctgtgaggccagccccagctcccaggggtggcaccgcaggcatccccaccagcctccagtccctccagcgtcccagagcacagggcaccagggtggctgcaaccgtggtttatttcaaatgtgcaaagctaaatatgcaactacaaatctaactcaggaaggcctgccagtggccctgagaggtggccgtgctagggtggtccacagccagttctgattggctaggagacgttcagacccctcataccaatccatgagtctgaagagactggggctcgggggctcattagagactcttccttatctagaaaccagaatatcttgctaaagaagaaagcagaaatcacatgggtctgggggcagggagggggtaatagaaactgttccgctggctggggctctctctcttggggtgcagtgggggagggggcagactctgtcaagcctcatatactctgcagggtggggctggtggcaaaggcaggctgggggtgctggactcaaagcctgctgtcctggaaggaagcgtcttccacctcttacggggcatggggggatcctaggagagcccaagaggatcgcagtgcagacaggcccaagctggattaaccgcagctggaatcggtggtcacccaattagcctcgcagctgagggacctctgccaccagggctagaggtcaggctgcgggcagagccctaacctgaggtgggggctgagagggtctctgcggcttagcctggccgggcattgggggctcgctctctggacctagcgggcctgatgtgaccgagacattctttcaaggggacccgaggtgacctggggcctctggcagctgctggacagcggataagggcagtttccatgggggattcttcaggggagtctaagtgattagatgcactgagcagtcggggtggaggcgcagccgtcactgtcacgggggaggccccggggtatcactgccacaagtcaccagccgcagccccgttgtcattctcgtggaacttgtgcaggtggtcagcgaacctgggggacacgggaagctttgctgaggccgagtgtgtgtgttggggaaggggggtgtgtaccatgtgatggggtggggctagggggtagtggataccgggagtaggggtagggggagggccagaatggggggctgtgatggagggctaaggagtgggggacatgaggcaggaactcgggggtgttgcgggggtgctgggagctcgctgtggggctgagggggggcccaagtgggggtcctcacttcttggcgcagaaggtggcacagtccctctccatgctctcgctccatgccagcttgtagagcacctggccaggtggag

SEQ ID NO: 13731 - DNA, 1438 bp, Artificial sequence
  DNA replication origin
agggccgctcagagaagagagtagtcttgctcctggagatagcagggggggacccctgggtgtcttctcccctcatctccctccttgtcccctgcccccacctctggcagttctgtcctggtctccttgccagccggagctgcctccatctgtcgccctcccgggcccaaactgacctctgacttttcccagagccatttcccatctctaatttacagacaagggtttttatcaaacccttcttagggatggaaaggtggggcttccagagttgaaggtggaggggacagagccttcacctgctgcccaaaaccccggtgctgccctccacgggggcacggaagacaggcagaccccttccctgccccacatctcggctctgttccctccgcaggaccaggccagcagacactttaatgaaagcttcggcagtgggccagccctcgatcggagctgcacacaggcctgcacgcctggttgggaaccaggacacctatgaatgaggccgggaagggggaggagggggtgcccgagagtgggagaaagggaagctccatacatggcctggttgtggtctccaccctcctgggagaggggagagcctgacccgcggtggactaacctggttcagagtagtgggctgaactccactgctgggatgatagcggccagagagggtcctgagatgggaagccatgggcaggacaatagcttggatccatccccagggaggaagaagtgaggaggggccggcggcagagcgcctcggacccacaaggaggaactgatggagatgtggaagtggctgtgggggtggagggggcgtggttggccaagagcagctgtcgcctcgctggggataggaatgaaggtcagggaggaaaggtccatcctgggtccctgagggcaggaggcttgaggggcttggaagaagtcctcatgggggagatgaggggtgctgggacggggaccccaaagaaaggcccctggatacacatgctttagactgttcagaactaaaatggagacagaggtagcacaggggaccctggcctggtgggctgcagtgggggacctgggtttgcagccagtcttgtgacagctggacaatgagttaatgcacccactccagacccagagaatgcgctcctctatctgaggctgggctggaggtgaggtggcccagaacctgtgtctcggggggttcccatgcgaggctggtgctcagggagattgatgggcacgggctttgcagcccctggcaggcgggggcccatgggaaaggggagcacagaaagggaagcagagattccccaggaactgacgtggaccaagacacgtcatacacccaaccacagcccgacaggtggttttttttttttttttgagatggagtctcactctgtttcccaggctggagtgcactggcacgatctca

SEQ ID NO: 13732 - DNA, 1495 bp, Artificial sequence
  DNA replication origin
cggcgcgtcccccgcgcggctctctggcagccgagctccgcgcgctccaagcccagccccagcgcggcgcgcccctccgcccgcgaggcgcgcgcctcccggccccgccccgcccccgcccccgccgcgagccccggccccgccccccctcgcgcgtcctggccccgccccctcccgcccccacttgcgccgctcaggccccgcccccggccatccgcggagcccgagcggcgccggtggccggtgcttgctggctccccgcagctgcggtgccgagactgcccggtcctggggcccggagagaggggttaggagccggctccgagtcgccccatctgggcgggggtccccatgtcgccgagccggccccaggccaggcgcgggactcccactcctcctcgtggaggccacccctcgagcccgcggtggtggtggccccgggagcgcggagcgtggggccgggggaatgtcctgcgtggcgggtgtatgggacgcggacgccctcgaagcgcccctcgctgacgggtgcttcgcgggagccgccgctgtggccagactctccgcagcagggacaatgggagcctggaggaggcctggatgtcgcaacggaggaagtcgacgcctggttctcataaatctcgagggcgccaccacgccccctccctgcagccctccggtgcgggaaatcgcccccgggccacagggcgggacggcccccctgagcgcagtgcccccaccacccagccttcgctgtgatgggggcctgatgccacccggagaggtgtcagagatcatagaggggcgatgaggggccacaaccctggcaccttcctcacccctgcctggctccagaactcgcctgctttagggcagagaccagtggggctgaggaaacagtcccgctgggctttgcggggcatttgtagcctgacccctggtgctgagggcacagcgcgggggctctgggaggcttcctgaaagaggtgcagggggctcagcaggcctggaaggggtctgagaggggagggagggcttcggtgggggcagaggtgtggaaagggccgctcagagaagagagtagtcttgctcctggagatagcagggggggacccctgggtgtcttctcccctcatctccctccttgtcccctgcccccacctctggcagttctgtcctggtctccttgccagccggagctgcctccatctgtcgccctcccgggcccaaactgacctctgacttttcccagagccatttcccatctctaatttacagacaagggtttttatcaaacccttcttagggatggaaaggtggggcttccagagttgaaggtggaggggacagagccttcacctgctgcccaaaaccccggtgctgccctccacgggggcacggaagacaggcagaccccttccctgccccacatctcggctctgttccctccgcaggaccaggccagcagacactttaatgaaagcttcggcagtgggcc

SEQ ID NO: 13733 - DNA, 1240 bp, Artificial sequence
  DNA replication origin
cagctgcgcccccgccccctgctagggccccggccgggtagtggggcgagagcagccgggtccttagaggaggggtctctggttgggggaaggggtgcccaggtctcttccctacgctgggagcgctgggagggggcgtcaacctagaatgagggtgagggccacgggatgggatcggggaggacctcctccaggccacaggcacgccctccctttggcccaggcccccctttctcgacctgcccagccggggagctccccggagcccccgattgccgggaggatcgtggagggtgcccaagaggccggcgcctttaagaaggggcgggttcgtgccctccattcaggcccttgggcctcggccattgatgaacctgcgggctgcgcgggccggaaccgcgccagcccagcgggctgaagccgggcagaggcagggacgcatcctggccccctgcagccccgaagtgggggccttcagggagggaagtctgcagtgactggagcctctcaggagccacgcaaggcagaccgggcagccccaggcgagactctgaacacgaataagccaggatctacgtgcacttcgagctagtgcaagggagagcctcaggctaggctgtcagacctgggtggagccctaccaatgcccccgagccaacatcacctaccctgtaaaatgggatggtgctgcctgcctcctggctaagggaccggcaactcccggcaggaattgcgtcccagagtcaggtccctggagctcctctgggaggactgggggcagggggtgtggtttccccaagaggttttgactgcctcttgagctgaagcccccactactgtgtcccaccttgaactctcccaacctcttccctcctggcctccccactccacgcaggaagaggttgggagagtgacctagaacttttcagctccaggagctttgggagaggtctggtggtggcggtggtggcacttcttttaggctagtgtggatcagggcatttttgggggtctcagagacagtttcccaccagctacttccttagaggtctgtcctaccaacatacaagaacagccccaccccgtggcaggccggcttctgatgctgcttggttgaatgcttctaggtaatcaagggttaatgcacacgcttttctttttacccttgttgtgaaaaatctgtctgaagtttctaaatccctcttccctacttagcgtgaatctcctagggaggacttct

SEQ ID NO: 13734 - DNA, 1366 bp, Artificial sequence
  DNA replication origin
gggggtcttggaagtgggatctccacccaagtgatcctgggcctcccagggctgagcttttggtttcaaacttacttgtgccaagctaagggcatcaggatcgccgttcgtgtcatctttacaacaatcctgtgggtttagtgctattattatccccacacacttagggaggggaagtgactggcccaaagtcccgcagtcaacgagccaggcctcccaaccactcctctctgacaagaggctggcacttcttgccctgcctacccagcctgggttgcaaggaattgggggtttaggggcttcaggcctcctggctgctgtcttcccggggctacgctcattcttactgtccaagtgaggccaggggactggtcagagccctggggcctggggaggtttctcttccctgctcacctggctgggtgccgttttatggctatgctctgtctagggggatagcaggtgtgacccctcaacacgaggtcacagcccacacctgtttgggcagagcaaggcagggcatcgctgtgtgggcgtgcagcatcttttggttcctctgggtgaagcagggtttgggccccattctccacatacttccgggccatctgagggtagcgcccacctggggggtggggaggacaaccagccaggagctcacggttcggtggaagagacaggccacagccatgtggtgtggtggaggggcagggggcaagggtggaggtgggaagaggatcaaggggcgttcccgaggcctctgtgggcttgggggcctgcctgctattggggcagaacaggggaagtaggcagtgcccagctgggtgctgaggctctgtgcagaggacaggcaggagttggaggaagaggatgtatttgaacttggatgtggtgagtttgaggtacctggagatcagccaggctgggagttgagctcagagaaaggcccagggaagctttattagcacctgtagtctccagagttcggggatgctcagatcttaggggtgccaccagaggtctcaggaggcactggtatgagtgtcctggaaaagccagaaggcagctgggtgggatgagttggtgaggggcactaagggggtatcctgcaggtttagggggctgggccagggcccatgtgagagttatgacactgggggagtggaaggggctgagtgtctcaggccaaggctggagatgggaggggggaacctctgctctgcaaccccagaaaggcagggtggggtgggagtaaccagggccagtgcagctggaaccagctcagcctgtcctccacctgcagagcccatccaggaactgtccagcactgggtgctcctgaaggaggctgagtctgcctcttgagccca

SEQ ID NO: 13735 - DNA, 1732 bp, Artificial sequence
  DNA replication origin
gggctcgggcgaggcgcgccggtgccacatgtcgcgcacgccgtccaccacgcacaggctcatgttgcgcagcgagaagcccttgcgaacgcgggccttggtggccgcgtgcgtggacacgtcctccgagctccgcgagtggccgtagggcgccgccttgagtgcagaggtgtccgcgagctccggctccatggcctctgcgctcacggccgcgccccgagtcgtcggcccagccaccagcacgcggcgcacctcctcgccgaagacgtccaggaagttggcggcgaagtggcgggagaaggaggcgccggcgtcgggcgtgtcgtaagctgggttgtcccgcaggaaacggcagaacttgtgcgcaaagtccacggcggccgcctgcgcatgcagctcgcagaactgccgccagtccgggaccgggaccgggactgggaccggggcggctgcggcggggccagggccggcaccattcatggcttccgtcccatcgcagccacctgcggcttcgggcgagaagagcgcgcagtgactttcaggcctgtgatcaatgcgcccacctgtcccctccttccagctcccctaggactctctggggctgtgtgggtgtgtgtgtacatgcacacgtgtgtgttgtgggactacagcaggcagccattccaagcagcatggatgtgtgtaaagagaaagacaactggggccgggcgcggtggcccacgcctgtaatcccagcactttgggaggccgaggtgggtggatcacctgaggttgggagttcgagatcagcctggtcaacatggtgaaaccccgtttctactaaaaatacaaaaattagccggttagccgggtgtggtggtgcacgctgtaaccctagccatcgaaaggctgaggcaggagaactgcttgagcccaagaggcagaggttgcagtaaaaatacaaaaattagccaggagtggtggcacacgcctgtagtcctagccactccggaggctaaggcaggaaaatcacttgaacccaggaggcagaagttgcagtgagccgagattgcgccactgcactcccgcctgggcgacagagggagactgcaaaaaataagagaaagacaactggggaggcaggaggtggtgtctgcagaaggggcagtcctgcattcattctctccccaaatagtagtctcagggacctcagggtcattcctggggctggcagaagaggctgggatgatggatgctttcaagtggggtccccatgagcctctggtgacctcacttcctcagtgacctcttctgatgttccccaaagcccggtagaaaggaagaaatcacatggaatcctgctggctggacctttgaaatataccgaggactcagctccttcctccaggtccaggctgccgtcctgggattcgcataactatttttcctgcatgcagcactccagcagctgctttatggtccccgggatcctgatcttacttcctctaaagtctgttctcctcccaggagcccagtcatttccaaaactcaagactgccatgtgcggtggcgcatgcctgtaatctcagcactttgggaggccgaggcgggtggatcaggaggtcaagagattgagaccatcctagccaacatgatgaaaccccgtctctactaaaaatacaaaaattagctgggcatggtggcatatgcctgtagtcccagctgactgagaggctgaggcaggagaatcgct

SEQ ID NO: 13736 - DNA, 1367 bp, Artificial sequence
  DNA replication origin
cgccaacttcctggacgtcttcggcgaggaggtgcgccgcgtgctggtggctgggccgacgactcggggcgcggccgtgagcgcagaggccatggagccggagctcgcggacacctctgcactcaaggcggcgccctacggccactcgcggagctcggaggacgtgtccacgcacgcggccaccaaggcccgcgttcgcaagggcttctcgctgcgcaacatgagcctgtgcgtggtggacggcgtgcgcgacatgtggcaccggcgcgcctcgcccgagcccgacgcggcagctgccccgcgcaccgccgagccccgcgacaagtggacgcggcgcctgaggctgtcgcggacgctggctgccaaggtggagctggtggacattcaacgcgagggggcgctgcgcttcatggtggccgacgacgcggccgcgggctccgggggctcggctcagtggcagaagtgccgcctgctcctgcgcagggctgtggccgaggaacgcttccgcctggagttcttcgtgccgcccaaagtgagttaccccataatcccacctagcctggggggaccagaggaggcacctgggcagcagctgagggtgccagggactgcctttggggaccgcgtggtctaatctggttgacagggtgaagtatttggtgccaggaccctgggaggtgggcctgtcatgcctcttgaacaagtcaccccttcaaccccggttcttcctttgcgaggaagggtcctctggctacaccaaagggttctggggcactaattttttcttttcgtgtgtgtgtgtgtgtgtgtccgtgtgtgtgtgtgtgtgtgtgtgcgcgcgcgtgtgtgtgtgtccctctgtcacccaggctggagtgcagtggtacgatctcggctcactgcaacctgtgcctcccaggctcaagggattctcctgcctcagcctcccaggtagctgggatttacaggcacccaccacgatgcccggctaatttttgtattttaaggagagacagggttttgccatgttggccaggctggtcctgaactccttacctcaagtgatctgcttgcctcagcctcccagtgttgggattacagtcgtgagccaccatgtccagcctttctttcctttttgttttgagacaggggccgtcactcaggctggaatgcagtggtacaatcatggctcactgcagccttcacctcccaggctcaagcagtcctttcttagcatcccaagtagctgggaccacacacaccgccactcccagctaatgttttttatttttcgtaaagacgggatctgactatgttgctcaagtggtctggaactcctgagctcaagagatcctcccccaccttgg

SEQ ID NO: 13737 - DNA, 2014 bp, Artificial sequence
  DNA replication origin
gaggaggcaggaagccagagacctgactcaccagggctggcacctcaaaggctgtgtgagagggaaatctaaggtgccaggcaatggcttctgagcctgcaggccccgagctcctgactgctccaagggtgcatctaggcctcttggaggcaagagatctggaccgtgggtgggtgcagaggcagtgggggtatcattcagggcatcccagggggctcactcaccctgggagcctgtctcctgggaccagacacatttgggaaactcaaccaagttcttagcatggtaggagctgccctcccatgggaatgactcctgaatacccacaaatgcccccacctttgcatgacacaaaggaggggaagggcccagtgaccctgcaggaacgctgccctctgccagcagcaaaattagtgggctctgctgggactaagcggtggagtggggcgggggcgggcaccagctgctccttccccttctccgagggcagcagacactgctatttacagaagggcagctgtgactgtcactcaggcccaaggcactggagccctgggcttctgtccctgccctctgggtgaccccgggtaagccccaccccacccgtcactgggcctcggtttccctttctgacaaggagtggagtcgggcttaggggtctaggatttctcccagggaattaaaggcaggggcctgggcaggaaaaaagccctagggaagtgtaggggtgctgggacctggggaaaaagctcttcagagagtagctgtgtccctgggaagtcacttttccagggcccatgtggctcatgggcaatgagccttggggagcccacacccctgcaccccagcagactgagagatggagagagagccaagaagcggcgggtgactcagagagcacccagggacagagtgggccctgatgcgggaggtgggtgtggggtccccggtggtccctgggggtgctgtcggctgctgcaccagcaaaacctccccctgcctaaacctctcagtgcccaaggacctccacttccatgttcctttcgttcttgggaccaccagggtggcaggtatcattagatcggatttttttttttttttgagacagagtttcgctcttgctgcccaggctggagtgcaatggcgtgatctcggcttaccacaatctctgcctcctgggttgaagtgattctcctgcctcagcctcccaagtagctgtgattacaggcatgtaatcctgtatttttattagagacggggtttctccatgttggtcaggctggtcacgaacccctgacctcaggtgatccacctgcctcggcctcccaaagtgctgggattacaggcatgagccaccgcgctcggcccccagttttttgttttgttttggtttggttttttgagatagggtctcactctgtcgcctagcttagagggcagtggtgcagtcttggctcactgcaacctctgcctcttgggttcaagcgattctcctgcctcagcctcccaagtagcttggactacaggtgcgcgccaccatgtcctgccatgttagaccagctctggcacccgccagctgggtgacgttgggcaggccacacttccctctctgagcatctgtctgcgctctcttctgtaatctggggaccatgtgctcacctcgctggggtggggtacccagaggatgacagtgtgtctgtgcagatgcccaccaggctggggtctggacacactgtgggctctcagagggtgggcactattgttacagctattcccactttccaaagcaggggggccaccttggagaagacgtgacactactgccagggacctgatggccagcccctaagaggggaagggtcagtgcatgccagtgagcaacaatgttggtgacagccagaaagaagcctggcatccccctggccagaaaaggaccccctgggcaggggctgggctggagtctggcagctgagctggggaagagcagagccccatggagtcagacacagacctc

SEQ ID NO: 13738 - DNA, 996 bp, Artificial sequence
  DNA replication origin
gctggagctatccgactacccatggttccacgggacactgtcccgggtcaaggctgctcaactggttctggcaggggggccccggaaccacggcctcttcgtgatccgccaaagtgagactcggcctggggagtacgtgctgaccttcaacttccagggcaaggccaaggcaagtgtgtggggggcgccatgggggtgcagtggccagccctgagggagaggggtcatggtgaccccggtcctgaggctgtgccctggaagcagctgcaggcgaacaggtgtggcatgacttcccacgggccccactcaccccagccatgctccgtgagccacctgcgtccctcctacacatcactgagggactgcagtcagccctatttcagcctctgcattctccagaaggggaggccacctactggcggctgagccctcaggaggctgggcccttctaataacccaaatttgcaaatcctttcagctcctgcgcgcgggggatctcatagcactggagcttcggagggtctccacccagagatcgcccagtggggggtgggagccaaccaaggccctcagagccccaccttctgccccaccgacctcagacagcccctcttccctgcccaggttaggtcaccaacccctgaggaacacacacgggcaaaccctagagacccagcaggggaggaggagctgggctgggtgggagagctgtgcagggtctagggggtggggttcagcattggaggggacagcctgatcagagacctgcaggggagggagaattgtggaggggaagacagtcaggaaggcgatcccaacagcacccagctggatcagaggcatgatggtacacccaggcggtgtgctttcaaggaagaggattccttgctatattgacctgaaatgctttgtttttgtttttgtttttttttgagacagtctcgctctatcctccaggctggattgcaacatcgcaatctcagctcattgcaacct

SEQ ID NO: 13739 - DNA, 1915 bp, Artificial sequence
  DNA replication origin
gatggacgggtgtctctgagagtggctgccccgcagtccccgccttccccgtgggagaaaggacgacaggagagccgggtgcagtccctaaaacaggcttttaataacatcgtgtcttcactgaagagcttggcgtgtcccacccgggcggcgccgcgggctagtagaaggagtactggttctccacggcgcgcgcgcggccgggcgcggcctccgggggctcctcggcggcggtggcggccacggcctccagcaggcgctcggcgctgttgctgcggctccgcgcgctgagctggccctcgacggggcgcgggggggcgggccccgacgcggcagaggacgacgaggcggaagacgaggaggcgccggcggcgtcggagggcgaggcaggcgggcaggcggccgcggcgaggctggagaagtagtgctggccgggcgagtcgctccagcaggccggggacgcgggcgcggcagggggcgtggggcccggctctgcaacaaggcgacggcagggcgtgagtggggacctgggctggccacatcctgcagggaggccgggatccctcaaggggccagggcccacgctcaggtttccgagttgcagcccatgtcctcggacacatatgcaagcacacccgcccacatgcataaacagaagcacacacacatacatgtacctaaccacgcgtgtgcacgcccatatagccacatgcacaggagtgcacacacacgcatacataatgcacacgctcgcacacaggcacacaagcacacgcgtgcccatgcacgcatgcacacgctcatgcatatgcgcacacacgcacacgtaagcgtacgcacacgggcacatgcacacatacactcatgcacacacacaagcacacgcatgcacatgcacccatgcccttagtgctcggtcccagcagctttgctctgagcctccccagtgcagggcttaagaatccatatgcccagctcctttcatcccacttgccccaatccacacccctgtccccacccccatacacccacctgcactgctgttgggcgcccccttccccttgccaggaatcattagggacctggctgcctctaggctgccacttctgcctccattccttatgacgtgactgcttgaaattgctgtggctaggctagggtgggagggacacggctgaggctatgggacaggagacctggggctcatcccaccccagggaccaccttcttgagtaatcaacgggaagtcttcttgagtaatcacaccagccaggtggcggcatcttacctggtggggggtcctgggcccgcacatagctgcgaagggtgatgtcggccgagccccctgactccagtgggatggggtgtgtgtggaagtggcggagcatgtcaagcacagactggaaccacagatgctgtacgtgacactggccgtggccgttcagggacaggcgcaggtgctgtgggtacaggtgggtgtggtcaggggcaggtccggggctgggcacctgggtaagcgcctttgggggttgatggaaggaccaaggctcacaggggctgtatggggctgtgtcagggccgggggcccctcacacatgagccccatctggagatggggaatgggggcaacggacccaggctgagatggaaggcatcaggcattgtccccatgctgggagcacctccactatgggcccatgccctacacacctataatctctaatcccctccctaatgccagaagatagggattactgcccccatgttagagataggaaaaccaaggcccagggagggggagtgactggcccatggtcacagagcacagagcagggaagaaaactcctgtttgggtggttcccccagcccaggaggctagaggttggccctctgtccctgcagagccaaaacccgg

SEQ ID NO: 13740 - DNA, 1384 bp, Artificial sequence
  DNA replication origin
cctgcccgcctgcctcgccctccgacgccgccggcgcctcctcgtcttccgcctcgtcgtcctctgccgcgtcggggcccgcccccccgcgccccgtcgagggccagctcagcgcgcggagccgcagcaacagcgccgagcgcctgctggaggccgtggccgccaccgccgccgaggagcccccggaggccgcgcccggccgcgcgcgcgccgtggagaaccagtactccttctactagcccgcggcgccgcccgggtgggacacgccaagctcttcagtgaagacacgatgttattaaaagcctgttttagggactgcacccggctctcctgtcgtcctttctcccacggggaaggcggggactgcggggcagccactctcagagacacccgtccatcagggacccccgtccagcccagtgtggcctgacacctgccaggcccccttgcagctctgtctctggtgggacagctgagggactccccatggggcgtcgggcagcacctgaaagagggcccaacagcaagggttagggcttaggatcgggagggggctttactggagctgtgagggagagagatgggaggtggtaacaatgaggggtgctgaaaagagaggagggggcattcaggacacagtgagggatggggagcacgcccaagtcatacggagagcttggatgccaggaggaggagtcgaggcccggactgggagggtaaaggcgtttttagacagatctatgaagcctggcggtgtggacagggcggcagggcaggaagaagcctggcggtgtggacagggcggcagggcaggaagaagcctggcggtgtggacagggcggcagggcaggaagaagcctggcggtgtggacagggcggcagggcaggatgtctccatattagcccttaggggattgggcaatggaagaggctggatttcccagctcggtggtagacttaaacttggaagaagcttaaagagccctcccacccaccgcgctccacctcattcacacccagcccccaccccgtctcattcccaccccacacctacccacaagtggaattccagctgtgactcccatgaccccaggctctggagacactgcttgctggcagtcccaggaccccagtccccaggcagtgttcaagaaagatcctgttcctactaagccaaacctctgccttccccacaacaccccagacctggggtcacagacccacagtccccttgcccaagactggccttgcagggcttgggtcaatgatgcatccatctatttttctttctttccccttccttccttccttccttccttccttccttccttccttcctctcttctctttctcttctctttctctctttctttccttttctttct

SEQ ID NO: 13741 - DNA, 888 bp, Artificial sequence
  DNA replication origin
ccgaatgctcaaaacagaatcagcacagaagcaggcaaaagcactgattgactgtcacctttgctcaatggggggctcatgcacatatgcacacacatagagtataagactgtgggagagggtctgtgccaatcctaagggggcaggcgctgttcctggggtgttcccaggttaaagtgaattcggggggggacagcagaagttgatacggtgactgcccccccccgggctctcccaagggatgcagcaggaaggcccaggaggtcagtgaaaagggggctctctcttcagtatggtcaccagcgtgagatcctcaagcctgtcactcaagagggtggttccagatagcccagactcagtggctctggcgaaatcacagccattgcacagacggcagcaacattttcaagggggtttcatttgttcctcaacaagcatttcagatgcctgctctgcgccaggccaggcccatggggtagctgagccaagctttgggaccacaagtgccctggctgacctgtgacactgggtgtcgcagacatgggggactgcaggcgcaggagcagcgaggtgggatatgagacctgcaaggtagagagagccttgaatgccaggccagggagtttggaaggtgctgagagccagtgccaattaaaatgggagctgagatcaccctgtggccagagggttggggcaaggatggattgaaggcggcaaaatgaggcggggggccagggaggctgtggtgggtctgggtgaggggcaaggggccagggcagggcagcagagcaggaggacagtgacggaagaaagatcacaaccgggtgtggtggctcacgcctgtaatcccaacactttgggaggccaaggcgggtggatcacttgaag

SEQ ID NO: 13742 - DNA, 1189 bp, Artificial sequence
  DNA replication origin
cctgcgcctcttcaggtcatcgcttgctctcgttcccaggctttggcctctagtggacgagaatcaccgagtctgcggggctggacgctgactgcccgggccagcacctaggcgggcgggagctgtgcggcccagggttcacgcgggccgggtagaggctcgagccgggacccccgagcgtgaaccccggagccggcggcgctggggccagaggggccgggcgggaggtggtggcggaggcgaaggggcgacgggacctgggcctggcccgtgtgtgtcctcggcggcctggcgccggccgtcgctgtacggtgagccccagggaggcggatctgggccccgagaaggacccccgcctggatttgccccgtaggcccggcccgggcccctcgggagcagaacagctttggtgaggtggacaggaggtgacctcgcgagcagacgcgcgcgccagcgacagcagcccgccccggcctctcgggagccgtggggcagaggctgcggagccccaggagggtaagtcttgggtttttgggcccggagcgagaagggcctgggtgaagtcaccgtgtgttggggaccttagagtgtggggcagagggagggtcccgattgcttgccggagagacatgtgttgggtttgagggcagggtctggctgcaccgaacaggcgctgcatgggaagatctgggaggacgaggcttacggaggcgtggagggtgtcaccaccctcagctgcggacgtcgtctccactccccgctaacccctaacagtccttcctcctcctctccgtgctccagatttggaccgcctttaaacgtccgtcagcacttctattctctcacttaagtgtctgctgatcccccccttagatctgccctgggagaatcgtagtaatgcaggaacagtctgcagggattctctcctgctgcctcagttgctaggggaagagactgggccttagcaggtgggtgacttgaccaggtcaccggctttgtgggtagagctgctcatagtagaacccaggagacttatctcccaggccagtgttctttctcccgtatcctagttttcttaatagaagattattaggtgcagcaataaccaagttcagttagataatttagaaacaaaaccatattttatacacattcatttcatttctgagagctcacatactcaattcct

SEQ ID NO: 13743 - DNA, 1225 bp, Artificial sequence
  DNA replication origin
cgccgaccctgatcctctgggcgccgcaccccgccagggatcccgcggggtggaggtcaccaaccccggatgggtagtgaccgcgcccgggcagcctacagtcgtccccttccccgccgagcgtccccggtccaattccggcccccccagccgcagggaccccgctccccgcgccaggcccccgcgccgccacactcaccggagctgccctcgccccgcccggctcggctcccgctcggactgcgtggccgcgtggcctgtggcccagtggcccggccggggcgccgagcgcggccccctccctccttccgccggtcgcgcggggtcccccggccccgcctccaccccgcccccgcggccgccgcagccgctgccaaggcaaccaggcgccgccaacacgtgacccacccgcgggagagccgcggccacgtcacccgccgggccgggaggggcggggctggcggcgcctcctcggagagtgggggggtgggggtccccgcctcacctggaaccaccccgggatcgcgcgagggagaggagcaggggaggtgggaagaccccgacccgcgcgcatccctcctgccccagctcctgtccccggccccagctctgggagtcaaggcgaggccccccaccgccccatcgggggtccggctacccacagaccacgagctgggctttccctgcccctgggtccgggcgcaaaaggggagccccaggcttggcagggtgagcctcggggggtgcccagcattggacgctggctgcgtagaggggcggggagtggggacagggcgggcgggtgcaggtgggcagtggaggggaaaggaaggtggggaggggagaatccgtctggccacgcccgagttttcacaggatttttttttttatttttttgagacagggtctggctctgtcgcccaggctggactgcagtggtgcgatcacggttcaatgcagcctcgaattcctgagctcgagtgatcctctgccctcagtcacccaaagtgctgaggctacatgtaggcaggagccaccacaccgtggtagtttttaaaaaatttgtttttgtttgttttttgagagggagttttgccctgtcacccaggctggagtgcagtggtgccatcttggctcactgcaacccccgaccccggggttgaaacgattctcctgtctcagcctccgagctacaggtgcacgccactagcctggctactttttt

SEQ ID NO: 13744 - DNA, 1456 bp, Artificial sequence
  DNA replication origin
gaggatcacctgcggccaggagctggagaccagcctaggcaacagagtaagacgctgtctctaaaaataattttttttgacatggggtcctgctgtgttaccaaggctggagtgcagtggcacaatctcagctccctgcaaattctacctcccaggctcaagcgatcctcccgcctcaaccacccgagtagctgggactacatgtgtgtgccaccatacctggctaatttttggtatttttggtagagacagggttttgctatgttggccaggctggtctagaactcctgagctcaagtgatccgcccaccttggcctcccaaagtgctgagattataggcatgaaccactgcgcctggcctctaaaaagaattttaaaaaagagggacctttcctcaaagacaagatgctgcctgcatggaaggattccgagagacgggaaggccactccaggtgtacatgtggggtggctctccttgtccaggagatatggagggaagactggctgccacctggggggtggagggggcagggagatgtgggtggaagacacttggagcctggggctgtggaatgagccagagggtctgggcagcatgactgggcgtccagccacaggagaatggaagaaattggtgagtggaacggtctgggcactgctagatcattctggtttgggaccacagttcaacccagggaaatggctggccgactggcaggagtgggacgcaagggagagcctggtggcctccaaaggaaggaagggtgaacaagagggatgccccatcagtaagggtgggctgggctcaggtctgagagtggaggtgaagagctcagggcagtgagggctgagggtggcttcctgggagccgccaggcctcccatgccccatcggtgaggccctgcagatgtccccagagtgggtgggattgtggaggaaacgatgtctgtctgcctggagctgggtcttgagacaggtctccaggtctcgaaggagcagcccaggagggggttcaaatccatcctttatgttcccaatgccaactgtgtgtgccaggcccggtggcccagggggagggacagagtctgggcctcacactggatcccaggcagggggtggggtggggcaggatggagccctgtacttctgtcaggtggcacagaccctagaggatgctccgggactgaaccttgtggggttgcttttttttttttttttttttttttgctttaatgagcagtccgagaaaacaggtcttgtagaataacgcgatcccctctctagagatgagcttttcttcctggctggcctactggacacatttccagagggcggtcttggagtttgacttcctctaagcatctggggcaccggcaatggcgagtgtctctctccagcaggcgcactgggagggggcctcccaggggcgctaggctgcatccctgtccctccccc

SEQ ID NO: 13745 - DNA, 946 bp, Artificial sequence
  DNA replication origin
gtcacctcggggactctggggggatctgcctgtaaacctcgacgtagcctctcgggtctggcgctgggagcttcacgggcctgcagggagatgacacggaaagggtcgatcgagggtgctgaataccagtccaacggtgcctgaaggccgtggactgcaatgggcaaggagacagtgaattccagttaactaacgaaaaggaactcaaggatcgctgcaacccaggagctggaggctgcagtgagctatgatcgagccacctcacttcagcctgggcgacagagcgagactctgtctcacaaaaagaaaataaataaaaaaagaaaaagaactcagcgcctttgggctggcatggaaggactgtggttggttgcaagggcattccaacccagaaaactgcgtggggtaggaaggtggattggtgatgcctcaggtgagagagatgaggctggagaggttgtggggggggggaggtctgatcacagatgctccccggtgcatcagctgagcaggctggacttgtcccaaaggccctggagagctcttgaagggttttaaaggagtgatgaagtcaaatgtgaattttagaaagatcctgggaagggaacgggcagatatgaaggtgtggaggctggtaagccagtgaagactgccccaacgtccatggtaaaagtgcccaaggtcctatggaaacagcatggcatgcctcatgaattaaacatagaattacccatgatccgcaatcctgcttctgggtatatatccaaaggaactaaaagcagggtctggaagagatatttgcacacccatgttcatattcacgacattattcatgacagcccaaagatggaagcaaaccaagcatctatcaagatacctgggccgggttcagtggctcacgcctgtaatcccagcactttgggaggctgaggtgggcagatcacct

SEQ ID NO: 13746 - DNA, 1066 bp, Artificial sequence
  DNA replication origin
ccccgaccgcccggccccgaggacacagcctcacccgctgcccggctcttactccagactccggatcttccccagccggtcgctcttggggcgcccgcgctgcattagcagccgcgccgagagggggcccatggcgaggaggcgcagcccgcgctgacccagtcggccaccccggcgtgtggcgtcgccctgcgtctcctggagcccggcactggcgtccgcggtaactgagcccaggaggcggcgccgcgcgagcccgtgggcgttaacgaccggaaggaagcggaacccaggcctcgtgcccccgcccggcgcggactacaactcccagcggcccccacggccgcgcctgcgcactggccacgcggacggcgcgatggcggcggctgccgccgagacccccgaagtccttcgggaatgcggttgcaagggcatccggacctgtctgatctgcgagcggcagcgcggcagtgacccgccctgggagctgcccccagcggtaaggggtgggagaggggccgcgcccacaaacgtcgctctgcatctggggaaactgaggtccagcttggccatgataggggccgggatcgaagcctgtgagggacccttacggtaggggtgatgcagggtgaggagatgagggctttaaggagcgggcttgggagtggggaaggagctggaacgtgggtgggttcgattacaggtcacctcggggactctggggggatctgcctgtaaacctcgacgtagcctctcgggtctggcgctgggagcttcacgggcctgcagggagatgacacggaaagggtcgatcgagggtgctgaataccagtccaacggtgcctgaaggccgtggactgcaatgggcaaggagacagtgaattccagttaactaacgaaaaggaactcaaggatcgctgcaacccaggagctggaggctgcagtgagctatgatcgagccacctcacttcagcctgggcgacagagcgagactctgtctcacaaaaagaaaataaataaaaaaagaaaaagaactcagcgcctttgggctggcatggaaggactg

SEQ ID NO: 13747 - DNA, 1931 bp, Artificial sequence
  DNA replication origin
tcactgccgcgctgccgctcgcagatcagacaggtccggatgcccttgcaaccgcattcccgaaggacttcgggggtctcggcggcagccgccgccatcgcgccgtccgcgtggccagtgcgcaggcgcggccgtgggggccgctgggagttgtagtccgcgccgggcgggggcacgaggcctgggttccgcttccttccggtcgttaacgcccacgggctcgcgcggcgccgcctcctgggctcagttaccgcggacgccagtgccgggctccaggagacgcagggcgacgccacacgccggggtggccgactgggtcagcgcgggctgcgcctcctcgccatgggccccctctcggcgcggctgctaatgcagcgcgggcgccccaagagcgaccggctggggaagatccggagtctggagtaagagccgggcagcgggtgaggctgtgtcctcggggccgggcggtcggggagaagagcggggaccctccccaacggcccgcttgtccccgttatcgccctctgggttcggcagagtggtccaaatgtcttcttgttgggagatcgtggccccacccgctcgccgggagccccgaggggcctcatcccctgaagggagcccggacagttaggggcacagcctgccgctatcgttagagggcctgggaagcacagacgagcccccgaaggatcaggaagagcatcctagagggggctaggatgcccccgagtcctaaagtagttgcagcttttttttttttttttttttttttttttttttttttgttaagtggtgtggagtcgggagtagtggcgcgcgcttctagtcccagctactcgagaggctgaggcgggaggatccctcagcccaggagttggaggcagctgtgagctatgatcgcgcctaggcgactgagtgacaccccgtctctaaaaataaagtaacggggggatgggcggggcggctacacttgtacgagaaatgtcaggtgaaaaagccttctgaggtacccggggcagattggtgtagggtgcaaagcctgcccgccccctaagccttctgcccccaactccagcctgtcaggattggagctgctttccgagcacctggaccccaaactcctgtgccgcctgacgcagctgcaggagcttgacctgtctaacaaccacctggagacgctgccggacaacctgggcctgtcccacctgcgtgtcctccgctgcgccaacaaccagctgggggatgttactgccttgtgccagttccccaagctcgaggaactcagcctggagggcaaccccttcctgacggtaagtgggagcctcccaccagcttcatacctggggccaggactctgttgggctcaggctcagcatctcctgagccactgctcttcaccctctcttccccaggtcaatgacaacctgaaagtctcctttctcctgcccacgctccgtaaggtcaatggcaaggatgcgtcctcaacttactctcaggtggagaacctgaatcgggagctgaccagcagggtaaggggatgagaggattattgtgtgcttaggagctgtgggggcattgggagaatgatagaattggacatcaggaggatgttgaggagggtgactgatagaggctctttgccccaacagcccctagcctgatgtgctactttatttatttatttattttttgagatggagtctcactccgtcgcccaggctggagtgcagtgatgcgatcttggctcattgcaacctctgcctcccaggttcaagtgattttcctgcctcagcctcccgagtaactaggattacaagcacctgccaccatgcccagctaattttttttgtatttttagtagagacagggtttcaccatgttggccaggctggcctcaaactcctggccttaggtgatctgcccgcctt

SEQ ID NO: 13748 - DNA, 1429 bp, Artificial sequence
  DNA replication origin
cactccgtcgcccaggctggagtgcagtgatgcgatcttggctcattgcaacctctgcctcccaggttcaagtgattttcctgcctcagcctcccgagtaactaggattacaagcacctgccaccatgcccagctaattttttttgtatttttagtagagacagggtttcaccatgttggccaggctggcctcaaactcctggccttaggtgatctgcccgccttggcctcccaaagtgtcgggattacaggtatgagtcaccacacccggcctgactcttctaagtagctttttctggggtgtttcttttttacctttttttttttttttttttttttttttttttttttttagagacagggtctcgctctgctgcccatgttgaagtgcagtggtgtgatcgtatctcactgcagcctccaactcctgggctcaagcgatcttcccgccttagccttctgaatagctggggctttaggcgcatgccaccacgtctggatcattttaaaattttttgtagagatgggatcttgctctgttccccaggctccaactcctggcctcaagcgatgcttcttcctcagcctcccagtggctgggactataggcacctgggttgttgctggtgtgtgtgtgtgtgtgtgtgtgtgtaggcacctgggttgttgctggggtgtgtgtgtgtgtgtgtgtaggcacctgggttgttgctggggtgtgtgtggggtgtgtgtgtgtgtgtgtgtgtgtgtgtgtgtgtgtgtgtgtgttttatgaggctgtgattccaggaggcttccagcaggtggcgggattgagattccctgagatggagggctgggtccggaggagctggggtgggccgggcctggatctggtccctcttgcaccaggtcacagctcactgggagaagttcatggccacactgggtcctgaagaggaggctgagaaggcccaggcggactttgtgaagtcggctgtcagggatgtccgctacgggcccgagtccctcagcgagttcacccagtggcgggtatgtccctgtcccaatgtgcagggagtcactggctctcgtatctctagctgcctggaggtccctggccatgaagggctgaggggctgtgggagtggggtgagtcagggtgggcagccctgttggctggagaggcccttccccaactctggaagcataagctccccctgactatgcatcggcagggctgggggcacctgggactctgcccagcttcctgatggcctggccccacccaggtgcggatgatctctgaggagctggtggccgccagtaggacccaggtgcaaaaggctaacagcccagagaagcccccagaagctggagctgcccacaagcccagggtgagtgcagctcccagggctctgaggccagcccagtccctcctccctgg

SEQ ID NO: 13749 - DNA, 1697 bp, Artificial sequence
  DNA replication origin
tgtgcagggagtcactggctctcgtatctctagctgcctggaggtccctggccatgaagggctgaggggctgtgggagtggggtgagtcagggtgggcagccctgttggctggagaggcccttccccaactctggaagcataagctccccctgactatgcatcggcagggctgggggcacctgggactctgcccagcttcctgatggcctggccccacccaggtgcggatgatctctgaggagctggtggccgccagtaggacccaggtgcaaaaggctaacagcccagagaagcccccagaagctggagctgcccacaagcccagggtgagtgcagctcccagggctctgaggccagcccagtccctcctccctggagaagcttcaggagaccaaggcgtcctgggcatgtgcccaggaagcaccccaggtcctggctcactccctaggtgaccccgggccagcctgggcctcctgcatccgcagtgaggtggggtccagcctgtgatggggaggaaggaagccccaggcagacaggcccatggtcacaaggccccctccacaggccagactggcggccttgaaacggccagacgacgtcccactcagcctctctcccagcaagcgggcgtgtgcctccccgtcggcccaggtggagggcagccctgtggcaggctccgatggcagccaggtgagctgaggtggcaaggagcaggtggcagatgagtcggggctgggcagctgtgacccttctctccccccacagcctgctgtgaagctggagcccctgcacttcctgcagtgccacagcaagaacaacagcccccaggacctcgagacccagctgtgggcctgtgccttcgagccggcctgggaggagggtacatggtggcgggcaggcggggcaagggccgctggaaatagggccgcctggatgggtgggggatcaggagacagagcttaaaaggcgccatcaaggctgggaggaggaggctgcagggaggacctagatgggaaatgtctctgctcatccgacctctcaaaaccgggcactcaggggccacatcccagaccgtggccacgtgcggcggggaggctgtgtgcgtaattgattgccagacgggcatcgtgctccacaagtacaaggcacccggcgaggtgagtgcaaggccctgtccctgctgggcaagggtgcccgactgactcctgaacagcagcatggggatggatgcaggctcggccccctgccccatggcctttttctttcatgctggggctccctcccccaggcccgggctacccgcgtgttcacaccaatagctctgccccagtgactgtttactctaacccccgcccaggagttcttttctgtggcctggaccgctctgatggtggtcacacaggctggccacaagaagcgctggagtgtgctggcggctgcaggcctacggggcctggtccggctgctgcacgtgcgtgccggcttctgctgcggggtcatccgagcccacaagaaggccatcgccaccctgtgcttcagccccgcccacgagacccatctcttcagtaagcccctccccttcacccctgggacccccaagcacccctgtcctgctgccccagtagcctccacgctcccctccctgggatggctgtgagctcgggcgcctgccgggccccagtctgcaccgctccga

SEQ ID NO: 13750 - DNA, 978 bp, Artificial sequence
  DNA replication origin
gagccagaaagcctcaacgtggcacttccaaagcctgcctgcccagacaccacctcacctgccctccgctagccatcggcccctctttacagatgaggacattatgccagcacagaggaccatcacactgctgatgagtggcaggagtgggctggatcacgtgggcacagcatggtgctgaagccccaggtgaaggggaggtcatcatggcccagtcccacagctgaacccagggtgagagcagggtcagagtcctttcctccagagcctggcagaaaggtgggacaagccagctctgcgaagaggcctctaaaaacaacccttatggttacccgggtgtgcccaggctgctgtgagcccatctgggccaacagccaccctctgcagaggcctggcttccaaggcgccccctgcccagcctcacctcctcttttggggctggtccagccgcacgtcccagcagcagcagccgccctcgcagccggccagcaggcgggcgtccgggcaggaggcgacagggcagaggcgcagggggatagaggtggtgtccagtgtgagcagctggctgccagtgggcaagggggaacagagcatcagacccagaccgaggtgtccctgccccagcagctggccactccccagcctcacccgaagcatcacctggcctggaattcgtagtcctggttgggcaccccgatgtcccagaggatgatccgcttgtcataggaggccgctgaagagggggtggggtaggggagaagtggccctgagatgaccctgctccctcctgctggctgcatcccaggctgagcccacggtcccaaggccagcccctccgaggcggggagggcgggccgaggctaggagacaggaacactcctgggcccccaatccctgtttcctccatctaacctgatgcggtggctccagcggccacttcctgtggctcatccatcccccttgacaggggcgccacac

SEQ ID NO: 13751 - DNA, 1449 bp, Artificial sequence
  DNA replication origin
agggacaagcggtccatctgtgtgcccggaggccaggctgtcccacaagctgagctcactcacccacgatgtcctcattcacaaatgccagcccatccactctccgtccagatgcctcggagccctcagagaagacgaattccacttcacacaccctgtggggcagcacgagatgctagttggccattccttgcagatagagagctgcccactcacccaggcatctgcagcgcacctgctggggaccctgccctgtgtgaaggctgcacagaagatgccaccaaagagatacattcttggccccaggaaggttcagtttgccctggaagggggagccagcacctgagtgtcccgagtcacagtagtgacccagaggcacgaggggtggctcttccaggacggggctaggccagggggttggataaggctctgaagcgagccagtgcctctgggaccgagtgtgagatgaacaggggcctcctggcagccaagtagagcaggtgtttccaggccatggcccagggggctgttgggggcatctgctctgactcaaaagacgggggaatggggggccatggcccagggggctgttgggggcatctgctctgactcaaaagacgggggaatgggggaatgagggaatggctgctgcatggttcagagctgagagtgtgtgggagtgtctgcttggagaagtgtcccggcagctacctgactctcggaggctagcctggagccaggagagtggcccagcagctaaccatgggccaggcctgagccagttgggcagagggtaagagaagaagcatcttagacacagggaccagacatacgggcagggagggaggcggcggcccaggggctgctggtgagaaagagaagcccataactaccgccgccaccacctctgccgccaaggcccctgctgctcctttcaacacagcagctgctgtgtcgaagctcctcctgggctgtttgttgtaggtaagctaaaaatccaaatcttggcccagggcagtggctcacacctgtaatcccagcactttgggaggctgaggtgggtggatcacctgaagtcaggagctcgagaccagcctggccaacacggtgaaaccccgtctctattaaaaagacaaaagtcagctgggtgcaatggctcacatctgtaatcctggcactttgggaggctgaggcgggtggatcacctgaggtcaggagttcgagaccagcctggccaacatggtgaaaccccatctctattaaaatacaaaaataagccaggcgtgttggcgtgcacctgtaattccagctacttgggaggctgaggcagaagaattgcttgaacccggtgggggggtggaaattgcagtgagccgagatcgtgtcattgcactccagcctgggcaacaagagtgaaactccatctcaaagaaaagaaaattagccggg

SEQ ID NO: 13752 - DNA, 809 bp, Artificial sequence
  DNA replication origin
gtttccaaagaaagatcaagggacatggggaaaggagaaaggtacagcttgaggttcccgctcagccaggactaggaggcctctgtaggggcagaacagccctgccggcgctctgagcatgcgccgaaaagcgcccacggggaaagccatgccggggggcggggtgcggggtggcgggggcgggggggggggcggtgcgctcgccactgacgcatgcgcagaggcactggtctctctcggggttttctcgcgcctgcgcaagatcctccagcccaacagggggcgatgagccgatccttgagcgggtttgccccgccggagtaatccggaagaggcctcttattagggctctggtggcggcggcggcggacccttggggtctggacgcaacggcggcgggagcatgaacgcccctccagccttcgagtcgttcttgctcttcgagggcgagaagaagtaagtgacgccggctgcggcgggccgaggtgcgcgggcctgcggctgtcgcattctggggtgtctcctgcccatctcttgccccgggagggaaacagcttttgcttgatcgtctgctcggcctgtgtcagccaaatttaaggccgttccgcgaggcagtcgcgagtgtgtccatgttgcagatgaggacactgaggcttggaggcgagcaagttgccccggacacaggaagtggcggcgcttgtattcgaacccagagtgtctggttctccatagcccttttcctctgggatctggcagcttcctcttttgtctctcgcccgccacctccatccttcatcccctccgatctg

SEQ ID NO: 13753 - DNA, 875 bp, Artificial sequence
  DNA replication origin
cagccggcgtcacttacttcttctcgccctcgaagagcaagaacgactcgaaggctggaggggcgttcatgctcccgccgccgttgcgtccagaccccaagggtccgccgccgccgccaccagagccctaataagaggcctcttccggattactccggcggggcaaacccgctcaaggatcggctcatcgccccctgttgggctggaggatcttgcgcaggcgcgagaaaaccccgagagagaccagtgcctctgcgcatgcgtcagtggcgagcgcaccgcccccccccccgcccccgccaccccgcaccccgccccccggcatggctttccccgtgggcgcttttcggcgcatgctcagagcgccggcagggctgttctgcccctacagaggcctcctagtcctggctgagcgggaacctcaagctgtacctttctcctttccccatgtcccttgatctttctttggaaacgtgcacccccttggagtgcgcagcaggaggcccctgaatagagagaataaagctaaggggtagtggacagctgcggctagcagccgtagggggagcagaagatctcgtggccagaggcagatctatgacaagccccctgcccaggctgcctataccgactgctgcaggacctctgcctggggggtgcagctggcttgttagccgggagggacaattgggtgagggatgcagaaggaggcaggtgtatacagcagtgagaggggagcccgtagggttacgtatatctttttatatattattattattatttagagacagcgtctccctctgtcgcccaggctgaagtacagtggcgccatcatgcagcctccaactcctgggctccagagatcctcctgcctc

SEQ ID NO: 13754 - DNA, 929 bp, Artificial sequence
  DNA replication origin
tattagagcctgggactacaaaagcaagttggaaaattaataaatgcaaagtcacaaagccttggccacggccggattgactttgtagcccagggaatgctggctgtcccgacactaccccaaagctcacacctccgaggccttctgggagtgccccccagagaggccaggtcctcctctcccagttgctgggcacttggtcaccatcagtctgtgctctgccctggctgaggtcactctaggtctcccatgcctacccctggtgctgcagaaggggagactgaggcccagagatggggaatggaatgcccctggctaggtccctgagcctcctcctccctgcctgccccagaaaagcgccctcatcaagttagccaacatccgggcagcggaaaaggttgaggaaaagagctttggcggctcgcacgtcatgcaggtcatctacacggacgacgccggcaggccccagactgcctacctgcagtgcaaggtgcggggaggggagcgggtgctgtgggagtggcctgaacactgtgggagtggcttgggtgctgtgggagaggcctgggtactgtgggagtggcatgagtcctgtgggagtggcctgggtattgtgggagaggcctgagctctatgggagtggcctgggtgctgtgggagtgccctggatgctatgggaatgccctgggtgctgtgggaatggcctgggtgctatgggagtggcctgagctctgtgggagtggcctggctgctgtgggaggggcctgagtggactggatgagaaaagagttgattgagcctctcgccccgctaccagctacatcaggcaccgcagggtgtgtctaatctgggaggtgtcagggacaggtgtgtgtgtgttgtccaggggcctgagcccccaggaggccatggcccatgtctttccctgg

SEQ ID NO: 13755 - DNA, 1043 bp, Artificial sequence
  DNA replication origin
tgattttttgtatttttagtagagacggggtttctccacgttggccaggctggtctcaaactcctaacctcaagtgatccacccgccttggcctcccaaagtcctgggattacaggcgtgagccaccgtgcccggccctcctaggttctgacaagcagtacagatgccacacacctggctttcttctctgaccccgggggtacctcaagtgggctccaaggaaggggacaggtgccccacttgccggcctctcagagccccacttgccggcctccctccttacccaccttggagctgggcgtcttcgcgaagctgagggcctcggtagtgagggagaagtagagcttcttgaaggaggaggacatgagggggcccttgcccttggtcctgtggatgaagagtggcccctccttcacaggtggcgcctgcaaactcagcgtccgctgcaggtccagctctgccaggccagggagggaggggaatagagagcccagtgaatgagggcgggactggggggagcggagcagtgggaggggccatggggctcaagggctgagcaaatctgaacagcaggcagtggacgtagtcatggggctcaagggcggagcaaacatcaacagctggtggtgagcggggtgacaggtggactgaggaaggcagggccatgggcttggaggcgggacacgcgtcagtagcaggtggcggcggggctatggagctcaaggatggagcaaatgtcaacaggcgcagatgatgggggggtgaggccatgggtctagggctggggcaaacgtcaacggcaggcagtgggcagggtcacaggaagcacaaacagtggtgcgtgggtctatggcctaggggcctggcaaatgccaacagcaggcggtgggtggggccacgagaggaacaaacagcgatgggtggggccgtggggctcaagggcggagcaaacgtcagcagtaggctgtgggcgggtctgtgcagggcggcgctcaccgtccttctcctcgatgtccacgagcttggtgatgaagtccttcagc

SEQ ID NO: 13756 - DNA, 736 bp, Artificial sequence
  DNA replication origin
gaagaagtacgtggagctggaccccagcaaagtggaagttaaggatgtagggtgaggccgggggtaactccgggggttgcggggtgcagcggcagcgggttgggatcaggccctgtcagcatgtgtgtttgtgcttctgcccacccgtgtattgtcccctgtgtccgtgtcctggctgctgtgagagccactgttcctgtcgtggccctggcgctgaccgcgacctcctctgccaacccgccccgttccacgcaggtgctccgggctgcaccgcccgcagaccgaggccgaggtgctggagcagagcgcgcagacgctgcgcgcccacctgggggccctgctgagcgcgctcagccgctcggttcgcgcgtgccccgccgtggtgcgcgccaccttccgccagctcttccggcgcgtgcgcgagcgcttccccggcgcccagcacgaggtgcgccctccacccgctgggctaggctgggccgggttggactgggctggggcgaggggtgaagagcggtggggaaccagggagcgctggggaggaccagggaggctgtgtcccagcgagggtcagggacggagcctaaggggagggggctgccaggagccctggtctgggggactccagcccgcgctcttccgcacccctccagaatgtaccgttcatcgccgtcaccagcttcctgtgcctgcgcttcttctctcccgccatcatgtcgcccaagctcttccacct

SEQ ID NO: 13757 - DNA, 885 bp, Artificial sequence
  DNA replication origin
gtgcgggcgtccgcgtggcgctcccgcaggtggaagagcttgggcgacatgatggcgggagagaagaagcgcaggcacaggaagctggtgacggcgatgaacggtacattctggaggggtgcggaagagcgcgggctggagtcccccagaccagggctcctggcagccccctccccttaggctccgtccctgaccctcgctgggacacagcctccctggtcctccccagcgctccctggttccccaccgctcttcacccctcgccccagcccagtccaacccggcccagcctagcccagcgggtggagggcgcacctcgtgctgggcgccggggaagcgctcgcgcacgcgccggaagagctggcggaaggtggcgcgcaccacggcggggcacgcgcgaaccgagcggctgagcgcgctcagcagggcccccaggtgggcgcgcagcgtctgcgcgctctgctccagcacctcggcctcggtctgcgggcggtgcagcccggagcacctgcgtggaacggggcgggttggcagaggaggtcgcggtcagcgccagggccacgacaggaacagtggctctcacagcagccaggacacggacacaggggacaatacacgggtgggcagaagcacaaacacacatgctgacagggcctgatcccaacccgctgccgctgcaccccgcaacccccggagttacccccggcctcaccctacatccttaacttccactttgctggggtccagctccacgtacttcttctcctcaaacaccttgttgatgatggggcccaggacgccgtgcaggtactgcatcccggccacctggggaccaccgcaggtcacattgatcctgtctcccccagtcccactccagctgcccac

SEQ ID NO: 13758 - DNA, 1268 bp, Artificial sequence
  DNA replication origin
agggtggcctgagtccctggtggagaggtcacaggctgcccattccaggggcaacctgggctccttgcagctggaggtgcggctgcgggacgagacggtgctgccctccagctactaccagccactggtgcacctgctgtgccacgaggtcaagctgggcatgcaggtgagggggcctgggcagggtgggagggtccagtggcagtaggcctgtgcgcctgtccttctaaacccattctgcagagcagaaacctgaggtctggggatgtgaggagctggccagtgtccagggccccgtccccagccaccccttgggaaactgtcctctttccctgggatgctctgaggtcctcagagggaaaggttcgggatcccccgtgcctctccctgcagggcccagggcagctgatcccactcatcgaggagacaaccagcaccgagtgtcgccaggacgtggccacgaacctgctcaagctcttcctggggcaggggctggccaaggacttcctggacctgctcttccagctggagctgagtcgcaccagtgaggcctgggaaggagctgggcccagaacactgggaggtgtttgggggtgggtgggctcctcctgtaggaggcagatggggtcagagaggagggaggcaaggaacagagccaagggcagaggtgggacagtgggctgggaggtggcgaggaggccctttattgaggggccagcttagatcccccagccccaaggtcctctgtcctccccctcccccaaaagctttgtgccagccccctacccactgggacctctgtttgtaggtgagaccaacaccctgttccggagcaactctctggcctcaaagtccgtggagtcttttctgaaggtgaggttgcatgctatattgtcctcatcttgcaaacgacaacactgagcttcagagagagcgacagagggggctgggacttcgactccagtgttctatctccatattcagagccctttaaggttaagaatgtggctgggcatagtggctcatgcctgtaattgcagcactttgggaggctgaggcgggcggatcacttaaggtcaggagttcgagaccagcctggccaacatggcgaaaccccatctctactaaaaatacaaaaattagcctggcatggtggtgggcacctgtaatcccagctactggggaggctgaggcaggagactcacttgaaccaggagccagaggttgtagtgagctcacgccactgcactctagcctgggccccgtgc

SEQ ID NO: 13759 - DNA, 1542 bp, Artificial sequence
  DNA replication origin
actggaacccaggaggtggaggttgcagtgagccaagattgtgccgctgcactccagcctgggtgacagagcaagactccatctcaaaaaaaagacagaagacagagctgagctgaatgcagaactgtggggaaaaataaaggggaggggccgggcgcggtggctcatgcctgtaatcccagtacttggggaggccgaggcgggtggatcacaaggtcaggagatcgagaccatcctggctaacatggtgaaaccctgtctctactaaaaatgcaaaaaattagccaggcgcggtggcgggtgcctgtagtcccagctacttgggaggctgaggcaggagaatggcgtgaacccgggaggcggagcctgcagtgagtcgagatcacgccattgcactccagcctggggacagagtgagactccatctcaaaataaataaataaataaataaataaataataaataaaggggaggtggagcccagccaggatgagaaggatgctggctaggtgggcaggggctgaggggaccctggagctgtgtctcctgacctctcaccctgagcagcccccctgccctgcctgcctgtagccaattcccaaatgtcagcccccaccccaccccttgaggccggctgcccagctccatgcacttactcgtcatgccgccggctcttggactggtcgggctgcagccggaaccagccctcctcctgctgcaccacccgcagtctctggacatcaatcaccacctggggacatagtggcagttttcctggagctgggagacttacgtctcctccttgccaactactgttcttagtggggaggggccccttccaagggtccctgagtgccagtggtggtggggggaagttgctggttctggcagacggtggaggtgggggggtagtcccaggcttcctgagtgtccctctttggggaagccggagggaggtccctgaggatgggatggctgcaatggaaccaggtgctgggggacagcaggtgcagcctgccgggggaggagggggggcggggcggtggtgctcactttgcccaggaagtcgtttcggctgacaaggtcccagtcccaggcctccacgcacagcgcctccatggccccctcctgcagctcaaattcaaacgtctcattccagcgtgggtagcatgacttcttcacgatctgcccagaggagggtgggagggggttaggctgatgccactggactccccaggctgggcaaaaggcagagctgccctagacacctcccctgggttccccacagcctcctcgccttggaggttctgccacagcagaggttaaaatgtcctgtccaagctcccacccatttctgagatagggagaactgaggcccagggtggggaaaagatgtatccaaggccacacagcaaaacagtactgactatgaggatgtggtgaacagggaatacctctacactgctggtgggaatgtgaactagtacaaccactatggaaaacagcagagattccttaactaactaaaagtagaactaccat

SEQ ID NO: 13760 - DNA, 806 bp, Artificial sequence
  DNA replication origin
gtccggtgagaggcccttggccaggccagttccctgaaggtctttctcgtctcctagctggggtgtcagggcgaggtggggaatcccaggcaggggaccaggtgctccaagccccctcccatctccgtacaaaattcacaacaaaattcacacccctttgcggggagagcgcgggccgatgagaggctgagcgcccctcggtcctgggggtgggggcggtacctgatgatgggctcattgtccaccttcacgatgcagtaggggtcgctgctgccagtgctgcaagacaaataggcaggggcggggctggagggcgggatcggggcggggactcgcggcaggctcctctctcttttggcccctcgggaggagtgcgggggaagagagcggaggctgagtctccgcgtcctggtttggagaccgcaggctcctccggccaaacacgggtccccgccctcagcccgggagcggatggtgagggaagggcaggaacccgcaccagggctcccctttcgcgggcaggggtgggagtagatggagggagagttgtgggggagggagaaggagggggaggagacagggatgggtagagagagaaaggagaagaaaggagggggaaggaggaaggggagagactgggagagggacagagggaggggcagaaagggaaggggacggacagggaggggagagagagggaagaggagacagagggagggggctgagagggaggaggagagaggtgggggttaagagggaagggggatgatagggagggggagagagagggaggagagtaagaggga

SEQ ID NO: 13761 - DNA, 884 bp, Artificial sequence
  DNA replication origin
ggaagaggagacagagggagggggctgagagggaggaggagagaggtgggggttaagagggaagggggatgatagggagggggagagagagggaggagagtaagagggagggagttaagagggagggggagactgagtgagggggtgagagggaaggggtgagagggagggggagagagggagaagagtaagagggagggggagagagggaggagagtaggagggggagagagggaggagagtaggagggggagagagggaggagagtaagaggaaggagagtaagacagagggggagactgagggggtgagagaggggggagagagagaaggggagagagggaggagagtaagagggaggagagtaagagggagggggagactgagtgagggggtgagagggagggggagagagggaggagagtaagagggagggagtaaagagggagggggagactgagggagggggtgagagggaggggtggagagggagaggggaaagacagggaggggagggagagggacagagggagggggtactggaaacctcctgttcctcccgcaggggatagaatgttcctcctttctatgccctcctaccccatccctgcctccccccagaacagctccaagcaacagccccaggcaagctcctgggacccctaccctccacaccaaagtcgagccccttactctccctggagcctttgctcctgctctccccaacactgacactgctgtccctcctgcccagtcggccttcagccctgccagagccctccctggccccaggacgggacggggaggaaggcctccctggactcacactgcctgcccacttcatccagcctggtagtgatcagctgcctcccacctgctctgag

SEQ ID NO: 13762 - DNA, 811 bp, Artificial sequence
  DNA replication origin
agggggtgagagggaggggtggagagggagaggggaaagacagggaggggagggagagggacagagggagggggtactggaaacctcctgttcctcccgcaggggatagaatgttcctcctttctatgccctcctaccccatccctgcctccccccagaacagctccaagcaacagccccaggcaagctcctgggacccctaccctccacaccaaagtcgagccccttactctccctggagcctttgctcctgctctccccaacactgacactgctgtccctcctgcccagtcggccttcagccctgccagagccctccctggccccaggacgggacggggaggaaggcctccctggactcacactgcctgcccacttcatccagcctggtagtgatcagctgcctcccacctgctctgagctacctgggggcggggagcatgcctgtgtccccagggcccccacagggcttggcacaagacaggcagcccatgagtgtttgccgaatgaacagacgaatgaatgaactgatgagtgaatgaatgaataaatgtaacagctatctggggaaagagggatgggggaaggcaaacacgcgctcagttccaagggtctcaggtgttggggggctcctggggctgggagaggcctgcagccaggcctagggctggtactgggtaaaagtggggaagtgagggctgtctctagagctgttcctccagtgagtgtccataaaaaggaagtgtgtttctatggtggagggtggggaattccaagctctgcttcccttctcaaaaggggctcttccggc

SEQ ID NO: 13763 - DNA, 1226 bp, Artificial sequence
  DNA replication origin
gagggcctcccatgatctccaaacccctgcccgactctgcagccaaatgctttgcataggatttccgaggctcagtctcactgagcccagccgcaagcttacagccgcgggcaggctagaattctcagcctgtcggcagcaaaggcaatctgaatcctgacttctctacctaccctcttggcaaatggctttcacttcctgagcctcagtttcccaatgtgcaaaccgaggatgtctatcttataaagctaagaagaggattaagtgggggaagtcctcaacacctcttattctccctactatggacccggtgccaggatgaatgagtcacagtccctgccctcacagtcagctgggacaggcaccacttgacggaggaactgccacaccaggggcttcctcctgccacccagagtgctggggggcgagcccaggagccaggaactctgcccaagtgcaccagggaatgccctggagaggagaagtttgagaggagtcctgaacattgaataggagttttctggaggactgaagtggagtgcttgaaggcagaagtccccacacatgggcgaaagcagagatgtgaagggtagtagcccaaatgtgagggactgtttatgggatggtttaagaggcggctgacaggtcagagctgtgtatgcaagccacaggggaagatggggggttgcaaaggagacgtgagtagggcaggcaggggggcagggtgaggatcgagatcccaaggcacccctccactgtagatggaacccctttgcccagaggcaaagcactgagcagggaaccaggcactgggctcccaggtgggcatactccaagagcttggctgccctgggctggagagagcctggagccaggcactagggccagctgctgtggggatgaggagggaggcgacagacggaggggctgctcctcccagctgccaccagccagaagaggccaagatgacctagttcctagtgccagtggtggcagggggtgggggatgcttaaaggctgggcctggaggctgagacccttctcagagctcctctgccttcccagcccacagacctcactgccagctcccactccacctccctccaagcctccaagcacagaaacccacctagggatgcccaccgccctcccttccccattgtcatggtaactgctgagctgggcctcatcagacccagggggcctggaactggcactgctctcgg

SEQ ID NO: 13764 - DNA, 1283 bp, Artificial sequence
  DNA replication origin
gccggctgcccggcgagtgtcagcgcctcctcacaggccccgcccctcacgccccagacggccaatgagagctgcggccccggccggcccctccccgccctggggaaccccggtcgcggattggccggcccgggcgcagtgtcccccgcacgtggggcgggggcggggtgagtggagtggcagcgaagccccgcccccgccgccccgcccccgcccccgcctcctccccggcccgccccccctgcggcgcccagtccagcgcccgccgcccgccaccccggaccccggtgtctggcttcccccgagccggcaccccgcgatggccaagcgcagctcgctgtacatccgcatcgtggaggggaagaaccttcccgccaaggacatgtgagcgcggccgggggtgggagccccaactttccggggaggggcactgccccccaggacgcctgacctttccggggtccacccacaagagcagcggagagggtgcgggagtgcggccgtggtgggggatcggcggggaaaatggggacagtgacattttctgcgagcaccagacggggtgacaaccggggggcggggaagtgtcaccgagggctgggggctgggaactagggagggggcgagaatttgtcagcgatccgcggctcacgaggggaaggggctttgatacgacaggagctggagcctggtgacatgccaggggagacgtcttggtgatctgcccccggggtggggttggagggggtggggtgtcccccgcaaaggaagggtcttcctcagtagttccagagcccttaatgccccggagtgtgcacctgaagcacatgctggggcccaggggctgtccccgggcttcctgctgtgcactcgggtaggagggactggcatgaaaagtgagaacaggtcaggaggccaggacaggtgcaggactgtgggggagggaaggagggtagtaactgtcgcttgtgccttgggctttacacctgagccatcccgttaatcctctcaaccaccccgaaaggcagttctcaccgttccattttacagatgagaaaactgaggttcagagaagtgaaatgctggctccaagtggcaggcagagcagggtcttgagtctagggcttctcacaggcactgacatctggggattcccctggtccctggctcgatttggggaggtttcaggggccccttgttccactcttctcagtaggtcccagggctgagctgcctgacccctggcccaccatcttggtcttgccaccaccttcctcatgtac

SEQ ID NO: 13765 - DNA, 995 bp, Artificial sequence
  DNA replication origin
ggaaaagggcaaaaagcagcagaaataagagcagggaaagaacaggggctgggtgtgatgggtcccatctgtaatcccagcgctttgggaggcctaggtgggaggatcgcttgagcccagaagttcaagaccagcctgggcaacatacggagacccccatttctaaaaaagttttaaaaattagctgggcatggtagtgtgcatctgtggtcccagctactcaggaggccgaggtgtgaggatcgcttgagcccaggaggtcgaggctgcagtgagctatgattgcatcactgcactccagcccgggcacagagcaagaccctgagaccttgtcagaaagaaagaaagagagaaagagagaggagagggagagggagaaagaaagggggggggggagagagagagagatgaaagagaaggaaggaaagaaagaaaggaaagaggaaggaaggaaggagaggggaaggaaggaaggaggggaaggaaggagagagagaggaaggaaggaaggagggaagggaaggaaaggggaggggaggggaggagagggagaaaagaaaggaaaaagaacaagtggatatcaggggacagaaaccattcgcagcccatccctcggcagatgcagagggagtcagcctggaacccccacccctgctggctgtgccccaccgctgtctccacaccccagcccttcctccagacacccagccgtccactgcagcaggagcacaggtgccccaaggggaccactgttggaaaccaggcagccctccactcacccacacagtgtgtctctgcaccccctctttgacatgggagccggggcgctcttggaaataagggtttacctgaggggtctgaagacttgggcagtggggggctgtgaagccttggggagggaatcagcttgtccaagagtctggggcagcgagtggtcgggggctacccggtctgaccccatcaaagtaaccttcctgggggatatttccattgca

SEQ ID NO: 13766 - DNA, 871 bp, Artificial sequence
  DNA replication origin
tctgagcattgcctcaagacgccatacaggccgggtgcggtggctcacgcctgtaatcccagcactttgggaggctgaggcccgcagatcacctgaggtcaggagttcaagaccggcctggccaacatagtgaaaccccagctctactaaaaatacaaaaaattagccgggtgtggtggcacgtgcttgtaatcccagctactcaggaggctgaggaaggagaatggcttgaaccttggaggtggaggttgcagtgagctgagattgcatcactgcactccaacctgggtgacagagtgagactccatttaaaaaaaaaaaggggggggtgtcaggatttcatacagagctcaggtgcctgagcctggggcacagagagtgtccacaaggcttcctagagaaaaggggagacctagccctgttgggatttggggaggagggggagagggagtgactaaaaagggggtggggaggtgtgggggcaggaggggcaggaggggtgcatgcagccaggccaggccaggggccccaggtgcctagctgaggaactgggctgtatcctgcagcctatgggagccgggagtgggttttgatcaggggagacaggcagataatgtttgagcggggtcctgaggtgtggagggtggagggggagagtgatggggagcaggagcaatgagctagatttgtgaggtttgaaggaatcgcctcagtccctttggttaattctgcccagccagtggagtctcagtttcccctatgcgatgggtcagagcatgctagccaatggctgtgggatctcggccagagcctttcttcagcatccatcatctctccctctctcctcccctcccaagcttcaacagctgca

SEQ ID NO: 13767 - DNA, 894 bp, Artificial sequence
  DNA replication origin
tctgctccccctacggctgctagccgcagctgtccactaccccttagctttattctctctattcaggggcctcctgctgcgcactccaagggggtgcacgtttccaaagagagatcaagggacatggggaaaggagaaaggtacagcttgaggttcccgctcagccaggactaggaggcctctgtaggggcagaacagccctgccggcgctctgagcatgcgccgaaaagcgcccacggggaaagccatgccggggtgcggggtgggggggtgggggggggggggggcggtgcgctcgccactgacgcatgcgcagagacactggtctcgctcggggttttctcgcgcctgcgcaagatcctccagcccaacagggggcgatgagccgatccttgcgcgggtttgccccgccggagtaatccggaagaggcctcttattagggctctggtggcggcggtggcggacacttggggtctggacgcaacggcggcgggagcatgaacgcccctccagccttcgagtcgttcttgctcttcgagggcgagaagtaagtgacgccggctgcggagggccgaggtgcgcgggcctgcggctgtcgcattctggggtgtctcctgcccatctcttgccccgggagggaaacagcttttgcttgatcgtctgctcggcctgtgtcagccaaatttaaggccgttccgcgaggcagtcgcgagtgtgttcattttgcagatgaggacactgaggcttggaggcgagcaagttgccccggacacaggaagtggcggcgcttgtattcgaacccagagtgtctggttctccatagcccttttcctctgggatctggcagcttcctctttttgtctctcgcccgccacctccatccttcatcccct

SEQ ID NO: 13768 - DNA, 876 bp, Artificial sequence
  DNA replication origin
ggccctccgcagccggcgtcacttacttctcgccctcgaagagcaagaacgactcgaaggctggaggggcgttcatgctcccgccgccgttgcgtccagaccccaagtgtccgccaccgccgccaccagagccctaataagaggcctcttccggattactccggcggggcaaacccgcgcaaggatcggctcatcgccccctgttgggctggaggatcttgcgcaggcgcgagaaaaccccgagcgagaccagtgtctctgcgcatgcgtcagtggcgagcgcaccgcccccccccccccccacccccccaccccgcaccccggcatggctttccccgtgggcgcttttcggcgcatgctcagagcgccggcagggctgttctgcccctacagaggcctcctagtcctggctgagcgggaacctcaagctgtacctttctcctttccccatgtcccttgatctctctttggaaacgtgcacccccttggagtgcgcagcaggaggcccctgaatagagagaataaagctaaggggtagtggacagctgcggctagcagccgtagggggagcagaagatctcgtggccagaggcagatctatgacaagccccctgcccaggctgcctataccgactgctgcaggacctctgcctggggggtgcagctggcttgttagccgggagggacaattgggtgagggatgcagaaggaggcaggtgtatacagcagtgagaggggagcccgtagggttacgtatatctttttatatattattattattatttagagacagcgtctccctctgtcgcccaggctgaagtacagtggcgccatcatgcagcctccaactcctgggctccagagatcctcctgcct

SEQ ID NO: 13769 - DNA, 943 bp, Artificial sequence
  DNA replication origin
atatgactattagagcctgggactacaaaagcaagttggaaaattaataaatgcaaagtcacaaagccttggccacggccggattgactttgtagcccagggaatgctggctgtcccgacactaccccaaagctcacacctccgaggccttctgggagtgccccccagagaggccaggtcctcctctcccagttgctgggcacttggtcaccatcagtctgtgctctgccctggctgaggtcactctaggtctcccatgcctacccctggtgctgcagaaggggagactgaggcccagagatggggaatggaatgcccctggctaggtccctgagcctcctcctccctgcctgccccagaaaagcgccctcatcaagttagccaacatccgggcagcggaaaaggttgaggaaaagagctttggcggctcgcacgtcatgcaggtcatctacacggacgacgccggcaggccccagactgcctacctgcagtgcaaggtgcggggaggggagcgggtgctgtgggagtggcctgaacactgtgggagtggcttgggtgctgtgggagaggcctgggtactgtgggagtggcatgagtcctgtgggagtggcctgggtattgtgggagaggcctgagctctatgggagtggcctgggtgctgtgggagtgccctggatgctatgggaatgccctgggtgctgtgggaatggcctgggtgctatgggagtggcctgagctctgtgggagtggcctgggtgctgtgggaggggcctgagtggactggatgagaaaagagttgattgagcttctcgccccgctaccagctacatcaggcaccgcagggtgtgtctaatctgggaggtgtcagggacaggtgtgtgtgtgttgtccaggggcctgagcccccaggaggccatggcccatgtctttccctgggcatcca

SEQ ID NO: 13770 - DNA, 1150 bp, Artificial sequence
  DNA replication origin
gtggcacgatctcggctcactgcaacttctgcctcccaggttcaagcgattcccgtgcctcagcctcccgagtagctgggactacaggcacccaccaccacacccggctgattttttgtatttttagtagagacggggtttctccatgttggccaggctggtctcaaactcctaacctcaagtgatccacccgccttggcctcccaaagtcctgggattacaggcgtgagccaccgtgcccggccctcctaggttctgacaagcagtacagatgccacacacctggctttcttctctgaccccgggggtacctcaagtgggctccaaggaaggggacaggtgccccacttgccggcctctcagagccccacttgccggcctccctccttacccaccttggagctgggcgtcttcgcgaagctgagggcctcggtagtgagggagaagtagagcttcttgaaggaggaggacatgagggggcccttgcccttggtcctgtggatgaagagtggcccctccttcacaggtggcgcctgcaaactcagcgtccgctgcaggtccagctctgccaggccagggagggaggggaatagagagcccagtgaatgagggcgggactggggggagcggagcagtgggaggggccatggggctcaagggctgagcaaatctgaacagcaggcagtggacgtagtcatggggctcaagggcggagcaaacatcaacagctggtggtgagcggggtgacaggtggactgaggaaggcagggccatgggcttggaggcgggacacgcgtcagtagcaggtggcggcggggctatggagctcaaggatggagcaaatgtcaacaggcgcagatgatgggggggtgaggccatgggtctaggggtggggcaaacgtcaacggcaggcagtgggcagggtcacaggaagcacaaacagtggtgcgtgggtctatggcctgggggcctggcaaatgccaacagcaggcggtgggtggggccacgagaggaacaaacagcgatgggtggggccgtggggctcaagggcggagcaaacgtcagcagtaggctgtgggcgggtctgtgcagggcggcgctcaccgtccttctcctcgatgtccacgagcttggtgatgaagtccttcag

SEQ ID NO: 13771 - DNA, 879 bp, Artificial sequence
  DNA replication origin
ggggggtgaggccatgggtctaggggtggggcaaacgtcaacggcaggcagtgggcagggtcacaggaagcacaaacagtggtgcgtgggtctatggcctgggggcctggcaaatgccaacagcaggcggtgggtggggccacgagaggaacaaacagcgatgggtggggccgtggggctcaagggcggagcaaacgtcagcagtaggctgtgggcgggtctgtgcagggcggcgctcaccgtccttctcctcgatgtccacgagcttggtgatgaagtccttcagctgcgccacgccctggcgcacggtgggctgcagcggctccatccaagcctccttggccctggaagccggcgtgtccatgttgcccacgttctggactgcctggaggtgacagcaggaaggaccaggttctgctaggttaggggcctagccactgcaccccctcccaccccccctccccaagtctttgctactcagctgtagcgatggaggcagaggcgacagaggccatgcccacgggccccctccagccccactagggatcagggaggagaggatcatgaagtttgatgccttatgataactgagaccacttgggccttcctctgtaggtttaactgacgctgctgcactggataccccaccccggtgccgggcacataggtgcagcctgagagtaagcagacccgggttggaaggtcccgcgattcaccaccgacaggatgggcggccttggcaacccccgacccctcgcaggcctgttcccttatccatgagatggagctcggacaaggtggccacaggaaggctttgcaaactgtgaagtgcagtgcctacgtgggcgtgccagtggcctcgccggagccggtagggaa

SEQ ID NO: 13772 - DNA, 724 bp, Artificial sequence
  DNA replication origin
cgtggagctggaccccagcaaagtggaagttaaggatgtagggtgaggccgggggtaactccgggggttgcggggtgcagcggcagcgggttgggatcaggccctgtcagcatgtgtgtttgtgcttctgcccacccgtgtattgtcccctgtgtccgtgtcctggctgctgtgagagccactgttcctgtcgtggccctggcgctgaccgcgacctcctctgccaacccgccccgttccacgcaggtgctccgggctgcaccgcccgcagaccgaggccgaggtgctggagcagagcgcgcagacgctgcgcgcccacctgggggccctgctgagcgcgctcagccgctcggttcgcgcgtgccccgccgtggtgcgcgccaccttccgccagctcttccggcgcgtgcgcgagcgcttccccggcgcccagcacgaggtgcgccctccacccgctgggctaggctgggccgggttggactgggctggggcgaggggtgaagagcggtggggaaccagggagcgctggggaggaccagggaggctgtgtcccagcgagggtcagggacggagcctaaggggagggggctgccaggagccctggtctgggggactccagcccgcgctcttccgcacccctccagaatgtaccgttcatcgccgtcaccagcttcctgtgcctgcgcttcttctctcccgccatcatgtcgcccaagctcttcca

SEQ ID NO: 13773 - DNA, 880 bp, Artificial sequence
  DNA replication origin
ctggtgcgggcgtccgcgtggcgctcccgcaggtggaagagcttgggcgacatgatggcgggagagaagaagcgcaggcacaggaagctggtgacggcgatgaacggtacattctggaggggtgcggaagagcgcgggctggagtcccccagaccagggctcctggcagccccctccccttaggctccgtccctgaccctcgctgggacacagcctccctggtcctccccagcgctccctggttccccaccgctcttcacccctcgccccagcccagtccaacccggcccagcctagcccagcgggtggagggcgcacctcgtgctgggcgccggggaagcgctcgcgcacgcgccggaagagctggcggaaggtggcgcgcaccacggcggggcacgcgcgaaccgagcggctgagcgcgctcagcagggcccccaggtgggcgcgcagcgtctgcgcgctctgctccagcacctcggcctcggtctgcgggcggtgcagcccggagcacctgcgtggaacggggcgggttggcagaggaggtcgcggtcagcgccagggccacgacaggaacagtggctctcacagcagccaggacacggacacaggggacaatacacgggtgggcagaagcacaaacacacatgctgacagggcctgatcccaacccgctgccgctgcaccccgcaacccccggagttacccccggcctcaccctacatccttaacttccactttgctggggtccagctccacgtacttcttctcctcaaacaccttgttgatgatggggcccaggacgccgtgcaggtactgcatcccggccacctggggaccaccgcaggtcacattgatcctgtctcccccagtcccactccag

SEQ ID NO: 13774 - DNA, 1247 bp, Artificial sequence
  DNA replication origin
tggtccagggtggcctgagtccctggtggagaggtcacaggctgcccattccaggggcaacctgggctccttgcagctggaggtgcggctgcgggacgagacggtgctgccctccagctactaccagccactggtgcacctgctgtgccacgaggtcaagctgggcatgcaggtgagggggcctgggcagggtgggagggtccagtggcagtaggcctgtgcgcctgtccttctaaacccattctgcagagcagaaacctgaggtctggggatgtgaggagctggccagtgtccagggccccgtccccagccaccccttgggaaaatgtcctctttccctgggatgctctgaggtcctcagagggaaaggttcgggatcccccgtgcctctccctgcagggcccagggcagctgatcccactcatcgaggagacaaccagcaccgagtgtcgccaggacgtggccacgaacctgctcaagctcttcctggggcaggggctggccaaggacttcctggacctgctcttccagctggagctgagtcgcaccagtgaggcctgggaaggagctgggcccagaacactgggaggtgtttgggggtgggtgggctcctcctgtaggaggcagatggggtcagagaggagggaggcaaggaacagagccaagggcagaggtgggacagtgggctgggaggtggcgaggaggccctttattgaggggccagcttagatcccccagccccaaggtcctctgtcctccccctcccccaaaagctttgtgccagccccctacccactgggacctctgtttgtaggtgagaccaacaccctgttccggagcaactctctggcctcaaagtccatggagtcttttctgaaggtgaggttgcatgctatattgtcctcatcttgcaaatgacaacactgagcttcagagagcgacagagggggctgggacttcgactccagtgttctatctccatattcagagccctttaaggttaagaatgtggctgggcatagtggctcatgcctgtaattgcagcactttgggaggctgaggcgggcggatcacttaaggtcaggagttcgagaccagcctggccaacatggcgaaaccccatctctactaaaaatacaaaaattagcctggcatggtggtgggcacctgtaatcccagctactggggaggctgaggcaggagactcacttgaaccaggagccagaggttgtagtgagctcacgcca

SEQ ID NO: 13775 - DNA, 1566 bp, Artificial sequence
  DNA replication origin
gcaggagaatcactggaacccaggaggtggaggttgcagtgagccaagattgtgccgctgcactccagcctgggtgacagagcaagactccatctcaaaaaaaagacagaagacagagctgagctgaatgcagaactgtggggaaaaataaaggggaggggccgggcgcggtggctcatgcctgtaatcccagtacttggggaggccgaggcgggtggatcacaaggtcaggagatcgagaccatcctggctaacatggtgaaaccctgtctctactaaaaatgcaaaaaattagccaggcgcggtggcgggtgcctgtagtcccagctacttgggaggctgaggcaggagaatggcgtgaacccgggaggcggagcctgcagtgagtcgagatcacgccattgcactccagcctggggacagagtgagactccatctcaaaataaataaataaataaataaataataaataaaggggaggtggagcccagccaggatgagaaggatgctggctaggtgggcaggggctgaggggaccctggagctgtgtctcctgacctctcaccctgagcagcccccctgccctgcctgcctgtagccaattcccaaatgtcagcccccaccccaccccttgaggccggctgcccagctccatgcacttactcgtcatgccgccggctcttggactggtcgggctgcagccggaaccagccctcctcctgctgcaccacccgcagtctctggacatcaatcaccacctggggacatagtggcagttttcctggagctgggagacttacgtctcctccttgccaactactgttcttagtggggaggggccccttccaagggtccctgagtgccagtggtggtggggggaagttgctggttctggcagacggtggaggtgggggggtagtcccaggcttcctgagtgtccctctttggggaagccggagggaggtccctgaggatgggatggctgcaatggaaccaggtgctgggggacagcaggtgcagcctgccgggggaggagggggggcggggcggtggtgctcactttgcccaggaagtcgtttcggctgacaaggtcccagtcccaggcctccacgcacagcgcctccatggccccctcctgcagctcaaattcaaacgtctcattccagcgtgggtagcatgacttcttcacgatctgcccagaggagggtgggagggggttaggctgatgccactggactccccaggctgggcaaaaggcagagctgccctagacacctcccctgggttccccacagcctcctcgccttggaggttctgccacagcagaggttaaaatgtcctgtccaagctcccacccatttctgagatagggagaactgaggcccagggtggggaaaagatgtatccaaggccacacagcaaaacagtactgactatgaggatgtggtgaacagggaatacctctacactgctggtgggaatgtgaactagtacaaccactatggaaaacagcagagattccttaactaactaaaagtagaactaccatttgattcagcaatccca

SEQ ID NO: 13776 - DNA, 763 bp, Artificial sequence
  DNA replication origin
tgagaggcccttggccaggccagttccctgaaggtctttctcgtctcctagctggggtgtcagggcgaggtggggaatcccaggcaggggaccaggtgctccaagccccctcccatctccgtacaaaattcacaacaaaattcacacccctttgcggggagagcgcgggccgatgagaggctgagcgcccctcggtcctgggggtgggggcggtacctgatgatgggctcattgtccaccttcacgatgcagtaggggtcgctgctgccagtgctgcaagacaaataggcaggggcggggctggagggcgggatcggggcggggactcgcggcaggctcctctctcttttggcccctcgggaggagtgcgggggaagagagcggaggctgagtctccgcgtcctggtttggagaccgcaggctcctccggccaaacacgggtccccgccctcagcccgggagcggatggtgagggaagggcaggaacccgcaccagggctcccctttcgcgggcaggggtgggagtagatggagggagagttgtgggggagggagaaggagggggaggagacagggatgggtagagagagaaaggagaagaaaggagggggaaggaggaaggggagagactgggagagggacagagggaggggcagaaagggaaggggacggacagggaggggagagagagggaagaggagacagagggagggggctgagagggaggaggagagaggtgggggttaagagggaagggggatga

SEQ ID NO: 13777 - DNA, 858 bp, Artificial sequence
  DNA replication origin
ggcaggggtgggagtagatggagggagagttgtgggggagggagaaggagggggaggagacagggatgggtagagagagaaaggagaagaaaggagggggaaggaggaaggggagagactgggagagggacagagggaggggcagaaagggaaggggacggacagggaggggagagagagggaagaggagacagagggagggggctgagagggaggaggagagaggtgggggttaagagggaagggggatgatagggagggggagagagagggaggagagtaagagggagggagttaagagggagggggagactgagtgagggggtgagagggaaggggtgagagggagggggagagagggagaagagtaagagggagggggagagagggaggagagtaggagggggagagagggaggagagtaagagggagggagtaaagagggagggggaaactgagggagggggtgagagggaggggtagagagggagaggggaaagacagggaggggagggagagggacagagggagggggtactggaaacctcctgttcctcccgcaggggatagaatgttcctcctttctatgccctcctaccccatccctgcctccccccagaacagctccaagcaacagccgcaggcaagctcctgggacccctaccctccacaccaaagtcgagccccttactctccctggagcctttgctcctgctctccccaacaccgacaccgctgtccctcctgcccagtcggccttcagccctgccagagccctccctcgccccaggacgggacggggaggaaggcctccctggactcacactgcctgcccacttcatccagcctggtagtgat

SEQ ID NO: 13778 - DNA, 788 bp, Artificial sequence
  DNA replication origin
tgagggagggggtgagagggaggggtagagagggagaggggaaagacagggaggggagggagagggacagagggagggggtactggaaacctcctgttcctcccgcaggggatagaatgttcctcctttctatgccctcctaccccatccctgcctccccccagaacagctccaagcaacagccgcaggcaagctcctgggacccctaccctccacaccaaagtcgagccccttactctccctggagcctttgctcctgctctccccaacaccgacaccgctgtccctcctgcccagtcggccttcagccctgccagagccctccctcgccccaggacgggacggggaggaaggcctccctggactcacactgcctgcccacttcatccagcctggtagtgatcagctgcctcccacctgctctgagctacctgggggcggggagcatgcctgtgtccccagggcccccacagggcttggcacaagacaggcagcccatgagtgtttgccgaatgaacagacgaatgaatgaactgatgagtgaatgaatgaataaatgtaacagctatctggggaaagagggatgggggaaggcaaacacgcgctcagttccaagggtctcaggtgttggggggctcctggggctgggagaggcctgcagccaggcctagggctggtactgggtaaaagtggggaagtgagggctgtctctagagctgttcctccagtgagtgtccataaaaaggaagtgtgtttctatggtggagggtggggaattccaagctctg

SEQ ID NO: 13779 - DNA, 1224 bp, Artificial sequence
  DNA replication origin
catgatctccaaacccctgcccgactctgcagccaaatgctttgcataggatttccgaggctcagtctcactgagcccagccgcaagcttacagccgcgggcaggctagaattctcagcctgtcggcagcaaaggcaatctgaatcctgacttctctacctaccctcttggcaaatggctttcacttcctgagcctcagtttcccaatgtgcaaaccgaggatgtctatcttataaagctaagaagaggattaagtgggggaagtcctcaacacctcttattctccctactatggacccggtgccaggatgaatgagtcacagtccctgccctcacagtcagctgggacaggcaccacttgacggaggaactgccacaccaggggcttcctcctgccacccagagtgctggggggcgagcccaggagccaggaactctgcccaagtgcaccagggaatgccctggagaggagaagtttgagaggagtcctgaacattgaataggagttttctggaggactgaagtggagtgcttgaaggcagaagtccccacacatgggcgaaagcagagatgtgaagggtagtagcccaaatgtgagggactgtttatgggatggtttaagaggcggctgacaggtcagagctgtgtatgcaagccacaggggaagatggggggttgcaaaggagacgtgagtagggcaggcaggggggcagggtgaggatcgagatcccaaggcacccctccactgtagatggaacccctttgcccagaggcaaagcactgagcagggaaccaggcactgggctcccaggtgggcatactccaagagcttggctgccctgggctggagagagcctggagccaggcactagggccagctgctgtggggatgaggagggaggcgacagacggaggggctgctcctcccagctgccaccagccagaagaggccaagatgacctagttcctagtgccagtggtggcagggggtgggggatgcttaaaggctgggcctggaggctgagacccttctcagagctcctctgccttcccagcccacagacctcactgccagctcccactccacctccctccaagcctccaagcacagaaacccacctagggatgcccaccgccctcccttccccattgtcatggtaactgctgagctgggcctcatcagacccagggggcctggaactggcactgctctcggtggtggcg

SEQ ID NO: 13780 - DNA, 1532 bp, Artificial sequence
  DNA replication origin
ctcgagccaccgcgccggctgcccggcgagtgtcagcgcctcctcacaggccccgcccctcacgccccagacggccaatgagagctgcggccccggccggcccctccccgccctggggaaccccggtcgcggattggccggcccgggcgcagtgtcccccgcacgtggggcgggggcggggtgagtggagtggcagcgaagccccgcccccgccgccccgcccccgcccccgcctcctccccggcccgccccacctgcggcgcccagtccagcgcccgccgcccgccaccccggaccccggtgtctggcttcccccgagccgggaccccgcgatggccaagcgcagctcgctgtacatccgcatcgtggaggggaagaaccttcccgccaaggacatgtgagcgcggccgggggtgggagccccaactttccggggaggggcactgccccccaggacgcctgacctttccggggtccacccacaagagcagcggagagggtgcgggagtgcggccgtggtgggggatcggcggggaaaatggggacagtgacattttctgcgagcaccagacggggtgacaaccggggggcggggaagtgtcaccgagggctgggggctgggaactagggagggggcgagaatttgtcagcgatccgcggctcacgaggggaaggggctttgatacgacaggagctggagcctggtgacatgccaggggagacgtcttggtgatctgcccccggggtggggttggagggggtggggtgtcccccgcaaaggaagggtcttcctcagtagttccagagcccttaatgccccggagtgtgcacctgaagcacatgctggggcccaggggctgtccccgggcttcctgctgtgcactcgggtaggagggactggcatgaaaagtgagaacaggtcaggaggccaggacaggtgcaggactgtgggggagggaaggagggtagtaactgtcgcttgtgccttgggctttacacctgagccatcccgttaatcctctcaaccaccccgaaaggcagttctcaccgttccattttacagatgagaaaactgaggttcagagaagtgaaatgctggctccaagtggcaggcagagcagggtcttgagtctagggcttctcacaggcactgacatctggggattcccctggtccctggctcgatttggggaggtttcaggggccccttgttccactcttctcagtaggtcccagggctgagctgcctgacccctggcccaccatcttggtcttgccaccaccttcctcatgtacagggtttaggcagctccctgctcctagagcctcagtttcccctctttaaactaggggttgaaatccctctagaggaagagggggaaagctcaaaggtcaaggggcactggctgcctggaggaggagggtgggagggggaaaagtggagcctggaggaaacagagtccaaagtctgcggagctgcagttccccaccccttgggcgccccgggctcctggatgcagagaagtggctag

SEQ ID NO: 13781 - DNA, 802 bp, Artificial sequence
  DNA replication origin
gcagggaaagaacaggggctgggtgcgatgggtcccatctgtaatcccagcgctttgggaggcctaggtgggaggatcgcttgagcccagaagttcaagaccagcctgggcaacatacggagacccccatttctaaaaaagttttaaaaattagctgggcatggtagtgtgcatctgtggtcccagctactcaggaggccgaggtgtgaggatcgcttgagcccaggaggtcgaggctgcagtgagctatgattgcatcactgcactccagcccgggcacagagcaagaccctgagaccttgtcagaaagaaagaaagagagaaagagagaggagagggagagggagaaagaaagggagggggagagagagagagagagagagagagagagagagagagatgaaagagaaggaaggaaagaaagaaaggaaagaggaaggaaggaaggagaggggaaggaaggaaggaggggaaggaaggagagagagaggaaggaaggaaggagggaagggaaggaaaggggaggggaggggaggagagggagaaaagaaaggaaaaagaacaagtggatatcaggggacagaaaccattcgcagcccatccctcggcagatgcagagggagtcagcctggaacccccacccctgctggctgtgccccaccgctgtctccacaccccagcccttcctccagacacccagccgtccactgcagcaggagcacaggtgccccaaggggaccactgttggaaaccaggcagccctccactcacccacacagtgtgtctctgcaccccctctttg

SEQ ID NO: 13782 - DNA, 866 bp, Artificial sequence
  DNA replication origin
aagctctgagcattgcctcaagacgccatacaggccgggtgcggtggctcacgcctgtaatcccagcactttgggaggctgaggcccgcagatcacctgaggtcaggagttcaagaccggcctggccaacatagtgaaaccccagctctactaaaaatacaaaaaattagccgggtgtggtggcacgtgcttgtaatcccagctactcaggaggctgaggaaggagaatggcttgaacctgggaggtggaggttgcagtgagctgagattgcatcactgcactccaacctgggtgacagagtgagactccatttaaaaaaaaaaaggggggggtgtcaggatttcatacagagctcaggtgcctgagcctggggcacagagagtgtccacaaggcttcctagagaaaaggggagacctagccctgttgggatttggggaggagggggagagggagtgactaaaaagggggtggggaggtgtgggggcaggaggggcaggaggggtgcatgcagccaggccaggccaggggccccaggtgcctagctgaggaactgggctgtatcctgcagcctatgggagccgggagtgggttttgatcaggggagacaggcagataatgtttgagcggggtcctgaggtgtggagggtggagggggagagtgatggggagcaggagcaatgagctagatttgtgaggtttgaaggaatcgcctcagtccctttggttaattctgcccagccagtggagtctcagtttcccctatgcgatgggtcagagcatgctagccaatggctgtgggatctcggccagagcctttcttcagcatccatcatctctccctctctcctcccctcccaagcttca

SEQ ID NO: 13783 - DNA, 795 bp, Artificial sequence
  DNA replication origin
ttccaaagagagatcaagggacatggggaaaggagaaaggtacagcttgaggttcccgctcagccaggactaggaggcctctgtaggggcagaacagccctgctggcgctctgagcatgcgccgaaaagcgcccacggggaaagccatgccggggtgcggggtgcggggtgggggggagcggtgcgctcgccactgacgcatgcgcagaggcactggtctctctcggggttttctcgcgcctgcgcaagatcctccagcccaacggggggcgatgagccgatccttgggcgggtttgccccgccggagtaatccggaagaggcctcttattagggctctggtggcggcggtggcggacacttggggtctggacgcaacggcggcgggagcatgaacgcccctccagccttcgagtcgttcttgctcttcgagggcgagaagtaagtgacgccggctgcggagggcctaggtgcgcgggcctgcggctgtcgcattctggggtgtctcctgcccatctcttgccccgggagggaaacagcttttgcttgatcgtctgctcggcctgtgtcagccaaatttaaggccgttccgcgaggcagtcgcgagtgtgtccatgttgcagatgaggacactgaggcttggaggcgagcaagttgccccggacacaggaagtggcggcgcttgtattcgaacccagagtgtctggttctccatagcccttttcctctgggatctggcagcttcctctttttgtctctcgcccgccacctccatccttcatcccctccgatctgt

SEQ ID NO: 13784 - DNA, 875 bp, Artificial sequence
  DNA replication origin
acctaggccctccgcagccggcgtcacttacttctcgccctcgaagagcaagaacgactcgaaggctggaggggcgttcatgctcccgccgccgttgcgtccagaccccaagtgtccgccaccgccgccaccagagccctaataagaggcctcttccggattactccggcggggcaaacccgcccaaggatcggctcatcgccccccgttgggctggaggatcttgcgcaggcgcgagaaaaccccgagagagaccagtgcctctgcgcatgcgtcagtggcgagcgcaccgctcccccccaccccgcaccccgcaccccggcatggctttccccgtgggcgcttttcggcgcatgctcagagcgccagcagggctgttctgcccctacagaggcctcctagtcctggctgagcgggaacctcaagctgtacctttctcctttccccatgtcccttgatctctctttggaaacgtgcacccccttggagtgcgcagcaggaggcccctgaatagagagaataaagctaaggggtagtggacagctgcggctagcagccgtagggggagcagaagatctcgtggccagaggcagatctatgacaagccccctgcccaggctgcctataccgactgctgcaggacctctgcctggggggtgcagctggcttgttagccgggagggacaattgggtgagggatgcagaaggaggcaggtgtatacagcagtgagaggggagcccgtagggttacgtatatctttttatatattattattattatttagagacagcgtctccctctgtcgcccaggctgaagtacagtggcgccatcatgcagcctccaactcctgggctccagagatcctcctgcctc

SEQ ID NO: 13785 - DNA, 1074 bp, Artificial sequence
  DNA replication origin
actacaggcacccaccaccacacccggctgattttttgtatttttagtagagacggggtttctccatgttggccaggctggtctcaaactcctaacctcaagtgatccacccgccttggcctcccaaagtcctgggattacaggcgtgagccaccgtgcccggccctcctaggttctgacaagcagtacagatgccacacacctggctttcttctctgaccccaggggtacctcaagtgggctccaaggaaggggacaggtgccccacttgccggcctctcagagccccacttgccggcctccctccttacccaccttggagctgggcgtcttcgcgaagctgagggcctcggtagtgagggagaagtagagcttcttgaaggaggaggacatgagggggcccttgcccttggtcctgtggatgaagagtggcccctccttcacaggtggcgcctgcaaactcagcgtccgctgcaggtccagctctgccaggccagggagggaggggaatagagagcccagtgaatgagggcgggactggggggagcggagcagtgggaggggccatggggctcaagggctgagcaaatctgaacagcaggcagtggacgtagtcatggggctcaagggcggagcaaacatcaacagctggtggtgagcggggtgacaggtggactgaggaaggcagggccatgggcttggaggcgggacacgcgtcagtagcaggtggcggcggggctatggagctcaaggatggagcaaatgtcaacaggcgcagatgatgcgggggtgaggccatgggtctaggggtggggcaaacgtcaacggcaggcagtgggcagggtcacaggaagcacaaacagtggtgcgtgggtctatggcctgggggcctggcaaatgccaacagcaggcggtgggtggggccacgagaggaacaaacagcgatgggtggggccgtggggctcaagggcggagcaaacgtcagcagtaggctgtgggcgggtctgtgcagggcggcgctcaccgtccttctcctcgatgtccacgagcttggtgatgaagtccttcagctgc

SEQ ID NO: 13786 - DNA, 884 bp, Artificial sequence
  DNA replication origin
cgggcgtccgcgtggcgctcccgcaggtggaagagcttgggcgacatgatggcgggggagaagaagcgcaggcacaggaagctggtgacggcgatgaacggtacattctggaggggtgcggaagagcgcgggctggagtcccccagaccagggctcctggcagccccctccccttaggctctgtccctgaccctcgctgcgacacagcctccctggtcctccccagcgctccctggttccccaccgctcttcactcctcgccccagcccagtccaacccggcccagcctagcccagcgggtggagggcgcacctcgtgctgggcgccggggaagcgctcgcgcacgcgccggaagagctggcggaaggtggcgcgcaccacggcggggcacgcgcgaaccgagcggctgagcgcgctcagcagggcccccaggtgggcgcgcagcgtctgcgcgctctgctccagcacctcggcctcggtctgcgggcggtgcagcctggagcacctgcgtggaacggggcgggttggcagaggaggtcgcggtcagcgccagggccacgacaggaacagtggctctcacagcagccaggacacggacacaggggacaatacacgggtgggcagaagcacaaacacacatgctgacagggcctgatcccaacccgctgccgctgcaccccgcaacccccggagttacccccggcctcaccctacatccttaacttccactttgctggggtccagctccacgtacttcttctcctcaaacaccttgttgatgatggggcccaggacgccgtgcaggtactgcatcccggccacctggggaccaccgcaggtcacattgatcctgtctcccccagtcccactccagctgcccacct

SEQ ID NO: 13787 - DNA, 1156 bp, Artificial sequence
  DNA replication origin
tttttgaagctggcgctgaatattgggggtggattgggagatgaactgaaggtttaaaatatcggttccttctggactggctaggtctaggttggtatattttctcatggcttcagttaaacgagagataaaaagggctgggttttcgttaggaccttgggtgatttctgaaagtttttcatagtttaccactttatgggcagcctttttgagtcctgcaaggaggcacacaatcatgtggtctcgacagcagcgtccagaggccccatcttgataatcccagtgggggtcctggttggggactgcctttgcaccagtaggctgagcaggagcttggtgatgaattgtatcagcatgtacctgagttagggtccagatacagccccagtcttctggggtgagggtggaagagaggataatgtagaggtcatgccaagttagttcataagactgggtgaggtactgaaactctctaatgtaagaggtagggtcttctggaaatgaactgagtcttttgttaatttgagagagatcactgagggagaggggaacataaactttaacaatgcctccagttcctgctactttctgaagggggctctctagcacaggggctgaactaagggtggggcatgggccaaagatggtgcctgagcgagtatgggtgggagagaaggaagaacctgaaagtggttcctgctgagggtttgaagggggaaggagggttaagttgataggcagtggaggatagataggggcgtaaggtggtgggatgggtttacaggcttcaggagagggcagtgaggaaggagaatgagtaatgagtacagacaatgctagaattgtcctgaggagaggacagtgtaggaaaagaagtggatactgctgcttgggaagatgggggctgggaagatggcgactgggaagatgaaggctgagaagatcgcagctgagaagataaagaggaggcttagggggttaaagaagacggctgagagggagaggcaggggctgagaggaatggacagcagtctgctggatctaacgaggaaaatatgtcgagttgggaggagaaaggtgatctgggtggcgagaatagaggaggatttgaacaggtgagcaagaattacagaggtcgggttgtgatctgagtgca

SEQ ID NO: 13788 - DNA, 926 bp, Artificial sequence
  DNA replication origin
tccaggacggaggcggtttggttagtgattatctctagaacagcctgtagccttaattattctatttagcatatatatgggagtgcgataaccccatgaaccatcctccgcccaagtggcaggaccataatattcgatgatccattgcaggggccactcgtcctcttgccgtctttggcttcctcctacctttaaggatcgtttttctctgtttaagtgatcatacacagggactccatgggtgttggggttttcccatgtaaaggcaaagaggttttgggaatcagggtgtaatggaattgtgaaaaaagcatcctttaggtctagaacagaaaaatgggtggtattggagggaactgcagaaagtaaagtatatgggttaggagctactggacatactgggagtacagcttggttaataagcctgaggtcctggactaagcgataagttccatctggttttttaacaggtagaattggtgtgttaaaaggggagtatgttgggcggagtaggtgactggcgaggaggtgagaaatgataggcgttaggcctgtgagagctgcttgggggatgggatactgcttctgtgataggaactgggtgggctctttaagggtaatgtggacggacgggagtgtggtgttttgcgactgagggtgtggaattaccccaaacaggggggctaactacagatgggggataaggaaaggttgcatgttttaaggtgggaggttggaatagaagaaagaagccccagaggggtttgggttgatgcgttgggtattatggggaacgtggaagtggagagcagtgtggagttttgaaaggatgccttggagcggagttgggcatgagggcaggactaagaaagagtgagtgaaggaaaaggtgtgcagggagcagaaaagtggagcggggggctcag

SEQ ID NO: 13789 - DNA, 1332 bp, Artificial sequence
  DNA replication origin
aacgccacctgacctggatgtggagaaaggaaatggggtctgagctccgcctcccggaaacggcctagctcaaagcctataaccgcccactccagcccggcgcgtcccggcggcttctcccaggcgaggcggggcggtgcggggcgctgcacaccgggaggggggggtcggacggtgcgccccacgcggagacgccggggcccgcaacccagagccgagcttcccgtctcttcccccggggcgtgaagcaaccattcctccctcccgcccctggcagcggagcgcggggcggtgccacgcccagccccgccccctggttgccgggacaacgcccgcacgcgcccggcccctagtcccagcgcggggagggtactatcgcagcttctccgtcaggccttgggccatggcctcgctacgcaatgccaacccgaggctgaagaactacttcaaggagaactacattcctcaggtctgcgaggtactggacacgcgtggcagcggacacagaccgtcggtggggagttagaagggggaggagtcaggaaagacttcccggaggagggactaggtttcgggattggggaggagtggagggaaggcggggcagaatgcgagaaagtgaagtcaaattcggacttgtaggcgatcagggctgaagacgctgattagagagaaaacagagggtgatggtggctgcacgtggggaatgggtgacatctcccagggggaatgagcacaaggcccagatcggaaaccccaaactcagattttaaggtttggacaagaagtacctgaggagtggaggagtgagaaagaagtgccagagagcctgaggaggaaaatcagcagactggcattatgaagaatgttgtcagaagtagggagtaggcactagtcacctaagataaggagctggattctgcccaaggtgagcctgaggtttccatggagccgtgagggcagaaaatagatggaggttagcggagggaagagtggaagctgagacctttggtcagtgtagtcagccctttgtgaaggtaaggaccctctcaaccaggattgcctttagacaacaggaaggactgccctcctactgccgttataagagtagggaaggaagacaggaaggggatagacattaggttttgtaggtttgggggtaggaagctgagaacatttgcctttgttgacctctttttttctctacaaatagttggtgagatatttaccaagaatgtgcgtgtttgagtggggatggggatgttggtgcagtaggaggttcgagcaaagatacgttatgtggagaatgagggagagagatgtctagggaaa

SEQ ID NO: 13790 - DNA, 1208 bp, Artificial sequence
  DNA replication origin
ggctctgggttgcgggccccggcgtctccgcgtggggcgcaccgtccgacccccccctcccggtgtgcagcgccccgcaccgccccgcctcgcctgggagaagccgccgggacgcgccgggctggagtgggcggttataggctttgagctaggccgtttccgggaggcggagctcagaccccatttcctttctccacatccaggtcaggtggcgtttgctgtggcggctaggcccgcgtgcgctggagacctccgcgctggcccccgcgagcctcctgccctggcccggcgctgcggctctgccgcggcggcagcatgggtggcccccggggcgcgggctgggtggcggcgggcctgctgctcggcgcgggcgcctgctactgcatttacaggctgacccggggtcggcggcggggcgaccgcgagctcgggatacgctcttcgaagtccgcaggtgggaccccggggtttccggcaggtgggcggggactgggcaggggggctccccaggccggggtggtggcttgcgtgtgctcggggtaaaatgaggagccgagctagagggagaggcagtacttgtgtgagtgcagggtgctgcgccgcccccgccgcccctttgctgactatactggtatgaaaacttgccctggctttcctgcctgagctccgcgtcacagcggaggattagatttcttaaaaacctgttgatggcctctcattttaaagcttgctccgggcctttgtgtaactaaagggattctcccgattgtggaagggctgttgaggggcccagagccataggtcaatctctgcttgcaggtgccctggaagaagggacgtcagagggtcagttgtgcgggcgctcggcccggcctcagacgggaggtacctgggagtcacagtggtccaagacctcgcagcctggtgtgtgttttggaaatgggaacagttgtctgcgcgagacacaccctcccagcggacaaatgcatgattcggtttctgtccaaaagttgatcggtacattaaaaccctccaaaggcatgtttcacatcatggaagctgttagggaaataatttaaaatatcatatctgccatccaagaaactcctgtccacaattgtagaagagagctaaacagcttcattgttgaataagcacaaactaaattgcctcacacatcacgggcaatttgctaatgggatagcagg

SEQ ID NO: 13791 - DNA, 690 bp, Artificial sequence
  DNA replication origin
actgggaaatggtgaagggcactgggaaatggtgaagggcactgggaaatggtgaagggcactgggaaatggtgaagggcactgggaaatggtgaagggcactggggaatggtgaagggcactgggaaatggtgaggggcactgggaaatggtgagggacactgggaaatggtgaggggcactggggaatggtgaagggcactggggaatggtgagaggcactgggaaatggtgaagggcactggggaatggtgagaggcaaggctggagaagaaggggcaggaagacggtgtgtgacatagatcctgaaggcctagttagccatgtcgacacagttggaagtgttgaatggttttcaaaacaaggagtgacatgattcgatttgcatattggaaacagctctctggaagattgatgggcaacaagagaagatgcaaagaggacagttagagctgctgctgaagaccacgggaaaaacgactgtggatcatggcattgagggtggaaagcaatgaattgatttgaggaccattaatgagacagaatcagcaggatgactgcctggataaaggaatagggggaatggtagtgccacttgctggagtaaggagactggaggaaaagcagacttggggtttcaggtgactaaaagacaccccatcacaaggaggagcccctcttctggacaca

SEQ ID NO: 13792 - DNA, 1400 bp, Artificial sequence
  DNA replication origin
cgcctgtagtcccagcactttgggaggccgaggtaggtggatcacctgaggtcaggagtttaagaccagcctgaccaacatggtgaaaccccgtctctactaaaaatacaaaaattagctgggtgtgctggtgcgtgcctgtaatcgcagctactcggaaggctgaggcaagagaaccacttgaacctgggagacggaggttgcagtgagccaagattgcgccatcgcactccaacctgggggacaagagcgagacttcatctcaaaacaaaacaaaacaaaaacagtgtggtaagagatatgacaggggaaggtctaggttacaggaagagaagagagttccttcaggatctgagttctaagtgagatgtgaagactgagccagagtcatccaggagaactggcagggcctgggcaggacagaagggtggccatccaagataacaatatgtgtgcatgtccagggaagagagggcatcaggcactgaggaatggtgagaggcactgggaaatggtgaggggcactggggaatggtgaagggcactggggaatggtgaagggcactgggaaatggtgaggggcactgggaaatggtgaggagcactgggaaatggtgaagggcactgggaaatggtgagaggcactgggaaatggtgagaggcactggggaatggtgaagggcactggggaatggtgagaggcactgggaaatggtgagggacactggggaatggtgaagggcactgggaaatggtgaagggcactggggaatggtgaagggcactgggaaatggtgagggacactggggaatggtgaagggcactgggaaatggtgaagggcactgggaaatggtgaagggcactgggaaatggtgagaggcactgggaaatggtgagggacactggggaatggtgaagggtactggggaatggtgaggggcactgggaaatggtgaagggcactggggaatggtgagaggcactggggaatggtgaagggcactggggaatggtgagaggcactgggaaatggtgagggacactggggaatggtgaagggcactgggaaatggtgaagggcactgggaaatggtgaagggcactgggaaatggtgaagggcactgggaaatggtgaagggcactgggaaatggtgaagggcactgggaaatggtgaagggcactggggaatggtgaagggcactgggaaatggtgaggggcactgggaaatggtgagggacactgggaaatggtgaggggcactggggaatggtgaagggcactggggaatggtgagaggcactgggaaatggtgaagggcactggggaatggtgagaggcaaggctggagaagaaggggcaggaagacggtgtgtgacatagatcctgaaggcctag

SEQ ID NO: 13793 - DNA, 1076 bp, Artificial sequence
  DNA replication origin
gcgcggcgaggggcgcacgcgtccccggagtccccggccagcgcccggttcgcacccgggaggacagggaggggcgcccgccggggagcgggacggggacgctgtcgaggaccgctgagcccgcgactcttctgcgagggacgtcaaagccccgcagagggcacctcccgtccagctgtctgaaggggaaggccagcccctttggccgtcagtgtgccctgtttttcctgggaggatgcgtgagggaaggagaggggcggcagggacggccgctggcgccggtttctttgtctgagccggctgcgtcccgcgcccctcggggctcgcagtctgccagtccgggcggcccgcactcgttctgggaatccgcccgaggccgcgaaccgctaggggccctcgcgctcccttcccacccaggccccctgtccctcccgccgcggccgcccggcccctcgcggcagcgacagagcctcatctgtagaggattttaaaatgagattaagcgaaagtggaattggcagactcgagtggtgcctggaaatggtgatttgtgctgctcggttgtggggaattgtaaggcaggaagggctggcggagctaagatccgacaggctctcttcgccggactgttctgttattcattgcttctgggctcttcaggcagagatgggtgttgtaattttttaaatcagtgtttatttcctttaaatgtcggttatgaccaatggccctgaaatcgggggagggaaaaacgttcaggggagatgctggcagcggtgattgaagcgggtggtaatgagcggctgcacatgaactgcagggaagtgaaataatccataagcacgtttttaaccgaggacggctggcaggagccctgcggcatccggagatgggggagcggggttgccaggttttaatgcctctccccacccacccttggcttgccaccaagccagataaacccgcacgtacagaaatgagtagattataaaattggaagggatagtgcctttgcctgcatttgtggggcgaggggcggtgaaaatcagggtccaaggggagacctctgtaatcac

SEQ ID NO: 13794 - DNA, 1335 bp, Artificial sequence
  DNA replication origin
ggcagcctcctgagccgggagcatcgcggcggcggcggcggcggcagcggcggcggctccgggcattctccccctcctcctcctcctcctcctcctcctggtcctccgcctccccccgcctctcagcgcgcaggagacacactcacggagcctcgcgcgctgcaactcccctgcctccgcctcagcccagcagcaccagtttcagagtctgcatcctcgctcccggaaggagggcgggggagcgcggagcacccctccggctcgcctggcacagcctcccggctcccctccctccctcctggcccgggctccggccctcctcaccaccctccacccctcttcccgccgccgccgctgcagctgctgcagctgaaggcggcaaatccctcgtggagcaccgcggcgcgcaagcccggggcgcctcccgctctgcttcccgcctccctccccgctgcccggcccgcgctgccagtgcccaggggcgcagaggacagtgacgaccccggaacgcccatcaaggggtggacatgagccagagaagtgggcctggattaggagggcgagggtagtctaagaaggtggcaggagcacccacagggatcctagagacaaccccaggatcctggtgggtgtgagaggccgggctcgagaggctgattcagcgagcatttcatcaccgcacagaaacgtgcttcgacctctgcatctttgcagaggcacgaggggcagcgcggcaattgcaggcaagaggcgccaaggcagtggaggcatacagcccccaagagtctttcttgttaccacagaactgcccctggctaactcctcggttgccttcaggtccacaggtggagatagaagttgcgcaggagcctggcagacaataatgtaaaagacaaatctcaagggtggtctcacatcaagcacagctgagcttgcgtcctctttgcgtttttcccccaagcagccagctgaactgtagccaatggatgccccatactttcctttaggtcgtttccccgataattccttccatagattgggcctgtgtgtgcttggaagggactgtgtcacagaattttatagtttgtttgaaaacagggtagttcggccagtgttacacttactatacaaatattgacagctactctgtgcccagacgctgagctgggtggtaagggtacaaaaagacatagcagatggttaattgtccaggaacttccatctccccctacaacccaaagctaaccagagagctgttttcaggctaatttatcccggaattaccactatagaattccttacattttcacatggcattgctgttgtacacctgcc

SEQ ID NO: 13795 - DNA, 834 bp, Artificial sequence
  DNA replication origin
ggggtcgtcactgtcctctgcgcccctgggcactggcagcgcgggccgggcagcggggagggaggcgggaagcagagcgggaggcgccccgggcttgcgcgccgcggtgctccacgagggatttgccgccttcagctgcagcagctgcagcggcggcggcgggaagaggggtggagggtggtgaggagggccggagcccgggccaggagggagggaggggagccgggaggctgtgccaggcgagccggaggggtgctccgcgctcccccgccctccttccgggagcgaggatgcagactctgaaactggtgctgctgggctgaggcggaggcaggggagttgcagcgcgcgaggctccgtgagtgtgtctcctgcgcgctgagaggcggggggaggcggaggaccaggaggaggaggaggaggaggaggagggggagaatgcccggagccgccgccgctgccgccgccgccgccgccgcgatgctcccggctcaggaggctgccaagctgtaccacaccaactatgtgcggaactcgcgggccatcggcgtgctgtgggccatcttcaccatctgctttgccatcgtcaacgtggtgtgcttcatccagccctactggataggcgacggcgtggacaccccgcaagccggctatttcgggctcttccactactgcatcggcaacggcttctcccgggagctgacctgcaggggcagcttcacggacttctccacgctgccctcgggcgccttcaaagccgcctccttctttatcggcctctccatgatgctcatcattgcctgcatcatttgctttaccctcttcttcttctgc

SEQ ID NO: 13796 - DNA, 901 bp, Artificial sequence
  DNA replication origin
ctatttcgggctcttccactactgcatcggcaacggcttctcccgggagctgacctgcaggggcagcttcacggacttctccacgctgccctcgggcgccttcaaagccgcctccttctttatcggcctctccatgatgctcatcattgcctgcatcatttgctttaccctcttcttcttctgcaacacggccactgtgtacaagatatgtgcctggatgcagctcacctccggtgagtgcgcgctcacctccgcggaggcggaggaccccggggcgcccgagccggggaggggccagagtgggagggacgggggctgtgcgcgccgctgcgagccaagccgcctaatccgctcaggcgtcgaggtgtggggggcgggagcccagcgaggccggaacccccggggttccccagccccggcgctggcgcctcgtcccggggctttcgtgagcctcccaagtgtgggggacgcccactcagagggacgccccggaggcagggcggttgtggggccgagtccgctcagaactaaggatggtgggtggagaagtggccgcttagagagatggggccggggttccgtgctgagggactaaggagggactgacagggcgaagtgaaaagcggatttggagaggtcatagtggaaggagcagccagcctgccctgcccctcgctgctgggactatttctgtcattgatcctgggaaagggggcggggggcggtggctggagtgatactgtttctttccatcccgggcagttaaatatgtttactcctccatccggaggtgaagagatcttaattctgttttgggtttccccttgtaagaagaatgtagcttagaacattctttcgcaattcctcaatgtcaagtcttcagtttgcctccttgtccgtg

SEQ ID NO: 13797 - DNA, 1541 bp, Artificial sequence
  DNA replication origin
cacaattagctgaaaaaaaaattggcatggtggtggtgggaggattgcttgagcccaggaggttgaggctgcagtgagcagtgatcgtgccactgcgctccagcttgggtgacagagcaagatcctgtctcaaaaataaataaataaacaaactgacaaaagacagattaccaagaggaaaaaatatatatttaattacttacttatgcaaaggagttcacaaagaactgtgattcaaagaggccaatagaatttgggggcttatatattaccatctaacaggggatggggagaggcagatggacatttttgagagaacaaatgacttcttagaaagtgggtgaaggacagcacttagggaaaaacaaattactctttggaaagatacatgggcccttagcaacatagatggaagatatgatacttttgtgacaaatgtctgcttggatatggtgccaaccttctttgcctagcagagattaggggaggtgatttacaacagttgagttctttggggaggctctgtttttaggcagataagggattttagaaactcaaatgccttcagctcaaaataattcttaagccacagtggtttatcctagatgctttcaggtggccctattccaagcacagcatctgaactcttagcgcaacctgcagggtgatgttattctcatttctattttagagacagcactcagtccttagatgttaagaaacttgcccaaggtcacacagctggtagaaagagaaaaccaagggagtgcaaaagtagcagcagagaaatctgtaaggtggtgagcaatgagggtggcctggagtagggagcagcagtgagtcaaaaagatgaggtttgatatatattttttaggtggaagtacttgtggtggtatgtgtgaggagcaaggaggatgggaggaaagaatgattccaggtgtctggattaaggcatgggagcctttggttctgtgcctagacctgagctgcctggtgaaagaggcacagatggagtgttcgcaacctaaattttctgtttactgactccattatctggaagttctgtcacctcttggtacttaattaccttgggaataatagagcctctcctaacaagtgttgtaatgaaaaagaaataggataatgtatgtaaaaattctacatacatgtttgttaattgttttaaaagagagagcactttcagaggatccagaaacattcctggcctcccctctctctttcatttctcaggctgctaaatcaatgattagctctcaggccagctcccctggaaagcgcatgaaagggagagtgaacagaatggcttctctctcccaaggaggctgcctcatcagggtcacagcccctctgccaccagaaagcctggatctgggccagagccacaaaggctaacaaactcccttcatgtcggctgagagtaaagagttggggtccatctgggcccctctccccaactctctaggggcagcgagaggtgacagtgtgctggcagccttcacagcccttgctcactctcggcg

SEQ ID NO: 13798 - DNA, 1316 bp, Artificial sequence
  DNA replication origin
ctgatctgcttccacccgggactgcaactgaggaagagcaagattcagagcaggtgcctacctgggatcacaagagagaggtgcaggaagagacagggagagccctcaaaacacttctcactcctttcagatgtacctgggctatgcagggctagaggaggcagccagcgatgggctttgattcatggaagtcttgttgcacaactctggaggcgggggcgccattctcatagaatacaatgtaccactcaggcattgcacaggattgggaaagttctctgggaagtgaagcctatcagtaaggtggcaggggaggggagttttcccctgaggatatgcagctgtgcacctggcggttctgtgggtgggatcctgctgtgtccggaattggtgggttcttggtttcactgacttcaagaatgaagccgtggaccctcgccgtgagtgttatagttcttaaaggcggcgtgtccggagtttcttccttctggtggggttcgtggtctcgccggctcaggagtgaagctgcagatcttcgcggtgagtgttacagctcctaaggcggcgcatctggaattgttcgttcctcctggtgggttcgtggtctcgctggctttaggagtgaagctgcagactttcgcggtgagtgttacagctcttaaggccgcgcgtctggagttgttcgttcctcccggtgggtttgtggtctctctggctttaggagtgaagctgcagaccttcgccgtgagtgttacagctcacaaaggcaatgtggacccaaagagcgagcagcagcaagatttattgcaaagagcaaaagaacaaagctcccacagcccggaaggggaccggagaggattgccactgccagctggggcagcctgcttttattctattatctggccccacccacatcctgctgattggtccattttacagagagaggagtggtctgttttgacagggtgctgaatggtgcgtttacaatccctgagctagacacaaaggttctccacgtccccaccagattagctagatacagagtgttgattggtgcattcacaaaccctgagctagacacagggtgctgattggtgtgtttacaaatcttgagctagtacagagtgccgattggtgtatttacaatcccttagctagacaaaaagtttctccaagtccccaccagtcaggagcccagctggcttcacgcagtggattctgcacgggggcttcaggtggagctgcttgccagtcccacaccgtgcgcccgcactcctcagcccttgggtggtctatgggactgggcaccgtggagc

SEQ ID NO: 13799 - DNA, 1758 bp, Artificial sequence
  DNA replication origin
gccagactgggctgggggaggagggggagaggaacggggagacgggactggggttgtttgggagggggagaaggtgtatcgctttcggagggtgacgggagggagttcgttcccaagccctgctgtccttgttcgtgcacccaatactggcatgcccaagctcacctatatccagacttgagggccactgggggaaagggggaaagaaccagtcccaccgaataccgacacttcctcaaaccttcggtggattgttgaatgcatctgttgtcagaaagacagagattccgtccccctcaccgcctccagtttgctatcttcgagcctccgcggagaggcaacggcgggcggcagcccacaagcaaaatggcgccgggcagcttcatcccctccccctctgcccctgcggagcgggacgggcgtaccccgtgcacttgccgccgccgccgccgccgccgcggccgccgccgccgccgccgccattttcccagagcgagaggcagtgacactgagcgggcgcagggggccgagtcggagaccgtgccggagttcgggagcggcaacagagtgggcatagacactccgagcagcctcgccgtcgtctctgcgttcctgttgactgcctggctgccccctcccctactcctcggttcctggtgaagaggctgcgcgctgctgtttggggagggggtgtgtggagccgggtcctgtgtccgcagtggctgctgtcggggggtcgcctgttcgcggaggtgcggagagactccttgggggtcgagcacataacggggttcgggtgtctcgtgtgtgaacatcacaggttagtgcctgtcgtctccatgggagttcctggggcttgcggggttggggtacttgtgtttcaagggggagggaggtctctcatctttatccttaagctgggggagccgacgttgactctcaggtgtctttgccggcgcaagacgttgcttgcttaaatcgaatttattctttcttctccctgaccctagaaatggagcattatggcgggttttagggttgggaaaggggtaactggcagttaaacccccttgagagtgggggagttagggagggggcgcactcctcattggcagcgggttaaggccgcttgagtgaagacggaggcttgtgactgttagtagggtttgtgtcgaagtggtcccaggagctgccagcgctcccttttctcaaccgcgtcttgttcaggtgctgaaaagccatataggccccattttcttcttccatttcttgacgggcagtctctggtataatgtgcacatgaatacgaagggggtaagaagaacgccctgggcatctctctttgtgggagagcgagacagctagctcctcatcctctcctggagagggtaaacccgcccctgaagtggtcaccccagtacccagccttctcagtctcctcccccactccttttgcattaccgccgtcctttactgtgccggagccttaggatctacaatatggctcatttcagaaaagcttattttgaccaagggattggcacaaattctatggcagcagacacagatgagaaacaaacggttcactgtgctaaacggggtgggggtgagaaaaaaacaatccagagtgctctcttctactggccttagttccgtatagatccgtccttgctgggctctgtcttaagaacgatacaatttaaagtcaaagaggaatcgctagagttagctctagagtaaacctcgttttgcctattt

SEQ ID NO: 13800 - DNA, 1463 bp, Artificial sequence
  DNA replication origin
gcacctgtgctctgtgaattggaatctgtccaggcactggagatgcctgctgaggtccttgaaccccatgtggcagggccacagagccaggatgaggacagaaccctgaagcagtaggtgttggaatactgtttggtccttggggctggagatgaggacctgtgacaggtaatggacaatgtggccctgttccagaaggctggtgctggggtcccggtcccaaagtggtatgatgtgtagcttgtgagggatacggtggtacagttggatgagcactcgaaggaaaaagtggaggtccttgatgaggtgggtggtgtaaggcttgagctgatgtggtatgatgcccagaagccaaaacactggaaggtggcggcggagggggtggtgggggtgctgaatttacaacatgctggtgttgtgcttgtagaccttggagtcctgtggatggatggggtggtggatggtgatgaggggcaggaccaggagggggtgggggtgggggtaagtggtgtccagcagtttgagaatgaatatgcgacccaggggtgaccgcatgaacaggccctactacatgtgctacagagtgttgctgatgggaattcggctgttgtacaaggtgcggtcctggagcaggtggtggtggaggaggaggggggactacggcagcagcagtttgatggtgaatggtagggttctgagagggcaaaaaatgccctggagtcacgtggtgtcctggaactgtttgctggcttgtggtgccaggaagtgcttgatttggtcctgatgtaaacacagtttgttgagaaagactacctttgagctgattataattctgaaagtttgcagagggctgctggttttgatagtaagacgaagaaggaggtggaggaggtggagggggtggtgccgtgctgttcagactttgttggttaaactgactgtatgttgctgaagattgtcctgagggtgtctgtgtaaataatgttccagaagttgcctgctgagtattggctggaaggttctgtgctgctggataaaagtttctttgaggctctcgctgaggtgttccaacttgaggtgactgtgaatgatgaggcctgtagggagatcctaactgctgtgaaggaggctttggtgaaagataaccatgctgtacaggtgtgtgaggcgtggatgactttggaggattttctaggtgaggtgatggaggacagtgcaactttgttggcacagaaggcagcttttgtgaaagttgctcagatgaattacgaacgtgtgtctgaggaggatgattctttgaaagtgcttggttgttatttgatagctgtttttgttggagctctgtttttaggtgaacaccattttcagcttcggatgcactaactgtggagtcccattggggatctggttttgtgaatattttcccgtgtgcttgagcaggaattacagatccaggtgaacca

SEQ ID NO: 13801 - DNA, 913 bp, Artificial sequence
  DNA replication origin
cgcggcggaagcggggcggggggcttcgcgacggcgacgcgggcgccgagacgagctgggctgcagcctccactcgctccgccggccgggaggagacgagaaccgcgcctgcgccgccgccgccgccgccgctccagcagggacccagcaagacccgcccccgtccggccccgcccccgccccgcccccacccgccggccccgggggtcgggaccccagcgccgcgcgcccagcgccccgcgcccccgccccacccacctgtgcagaagtggccgccgcccatggccgcgctggccctcggcctcccccaccccagcccgcggcccgggcctccgcctcctgcgatcctgcggctggcccaggccgcccgcctctcccgggcaccggacccgcgggaccctccctccccgccgcggcctctcccctccgcaccccggccggtcgcgccgcccgctgctccatgcgcccgtccttggccggcgcctccgcgggtctcgcaccacctctcttcccgcggcctcttctctccctttgctcctctacatccttgcaaccccatgagcgccgcttcctcctctccggcaggcgtggaaagggcacacgaccaaaagctgggaaacctgggtccgcgattagcggtgtgaccttggagaagtcattttctctcccacctctaagtgccctccaggattgcatgagtttaatgaaggaaaagatacagatagcattcaaggtaggacaaaggttttgcacatgaattgaaactcgcttccgtaaacaccaggtgtataacaattcaaaacaacaatcacaccaagtagttattttctgcatcctacaatgaggaaactgagtcccaacgaggttaaaaagtttaaccagccaggatcgaaattcaggcctggccgtcgac

SEQ ID NO: 13802 - DNA, 835 bp, Artificial sequence
  DNA replication origin
cagccgccccgtccgggagggaggtgggggtcagccccccgcccggccagccgccccgtccgggaggtgaggggtgcctctgcccggccgcccttactgggaagtgaggagcccctctgcccggccagccgccccgtccgggagggaggtggggggggtcagccccccgcccggccagccgacccgtccgcgagggaggtggggggtcagccccccgcccggccagcctccccgtccaggaggtgaggggcgcctctgcccggccgcccctactgggaagtgaggagcccctgtgcccggccagccgccccgtccgggagggaggtggggggggtcagccccccgcccggccagccgccccgcccgggaggtgaggggcgcctctgcccggccgcccctactgggaagtgaggagcccctctgcctggccaccaccccgtctgggaggtgtacccaacagctcattgagaacgggccatgatgacaatggcggttttgtggaatagaaaggggggaaaggtggggaaaagattgagaaatcggatggttgctgtgtctgtgtagaaagaggtagacatgggagacttttcattttgttctgtactaagaaaaattcttatcctgttgatctgtgaccttacccccaaccctgtgctctctgaaacatgtgctgtgtccactcagggttaaatggattaagggcggtgcaagatgtgctttgttaaacagatgcttgaaggcagcatgctcgttaagagtcatcaccactccctaatctcaagtacccagggacacaaacactgcggaaggccgcagggtcctctgcctaggaaaa

SEQ ID NO: 13803 - DNA, 1264 bp, Artificial sequence
  DNA replication origin
acaaaaccgccattgtcatcatggcccgttctcaatgagctgttgggtacacctcccagacggggtggtggccaggcagaggggctcctcacttcccagtaggggcggccgggcagaggcgcccctcacctcccgggcggggcggctggccgggcggggggctgaccccccccacctccctcccggacggggcggctggccgggcacaggggctcctcacttcccagtaggggcggccgggcagaggcgcccctcacctcctggacggggaggctggccgggcggggggctgaccccccacctccctcgcggacgggtcggctggccgggcggggggctgaccccccccacctccctcccggacggggcggctggccgggcagaggggctcctcacttcccagtaagggcggccgggcagaggcacccctcacctcccggacggggcggctggccgggcggggggctgacccccacctccctcccggacggggcggctgctgggcggaggggctcctcacttctcagacgaggcggttgccaggcggagggtctcctcacttctcagacggggcagccaggcagagacgctcctcacctcccagacggggtcgcggccgggtagaggcgctcctcacatcccagacggggcgctccccacatctcagacgatgggcggctgggcagagacgctcctcacttcctagatgggatggcggccgggaagaggcgctcctcacttcctagatgggatggcggccgggcagagacgctcctcactttccagactgggcagccaggcagaggggctcctcacgtcccagacgatgggcggccaggcagagacgctcctcacttcccagacggggtggcagccgggcagaggctgcaatctcggcactttgggaggccaaggcaggcggctgggaggtggaggttgtagcgagctgagatcacgccactgcactccagcctgggcaccattgagcactgagtgaaccagactccgtctgcaatcccggcacctcgggaggccgaggctggcggatcactcgcggttaggagctggagatcagcccagccaacacagcgaaaccccatctccaccaaaaaaatacgaaaaccagtcaggcgtggcggcgcgtgcctgcaatcacaggcactcggcaggctgaggcaggagaatcaggcagggaggttgcagtgagccgagatggcagcagtacagtccagcttcggctcagcatcagagggagaccgtggaa

SEQ ID NO: 13804 - DNA, 1174 bp, Artificial sequence
  DNA replication origin
ggcgggttctttttgtgaacgctattcataccaggcattttagtgattttacaggctttgctactagaactcgagttcttacgcttttttccttctgatttgtcaaaagagaggggcagagaagacacagcattgtgtgaggccagagagaggtcccctgcgtggagcgcaagggagggcacagagaggggacaggagtcactgctgcctcccaccgcgcccacctgtctcactatgtccgcggggccgccgggcagcgaggtccgtcctgagggctccagtttggcactgagtgggctcaccccattgtttgagttgtgcacagacaggctgttatagggaggggccgcctgataggagttcaaagcagaactggcattcaaaacacagttctttttgtgaggccctgacagtggagacgagagggatgtctgcaaggaagaggaggaggaggaggaggaggaggaagtcgaagactgtggcttcctttttttgttacttggagactcgtcgctacgggtggacaggtctttgacttttgaggatttgctggttttggttttggatggcttgtgggatggggaagggatgacggctggtatcggggacacggcggatggggccttgaaggttgagtccatgatgctgagggttgcggccacatgagggaaagctgtggtgtgggacatgagggcgctcgggtccggcgatgtcacgaaagctgcgtttgagagcatggctgatgtcattatgtaagaagaggtgagcctcgagctgatgggagctgaaggaagatacacagcactggggttgctgaaaggctgcaaaacggatgctggaacgggggtggtgatgtgggctgctggcgagggcagggggctatctgccgcaggagggatcttcctaaacatgagagaagagtgaaagagaatcagtgagacatcgggttggcattgctcaggaggctcgatgacgtttgaggatcagggctacagaggacaccccggcagaaccagactatggagaatggagccttgaaggatgggagaatctgaagcatggcccctccttatggcaccccccattgcaacatccagcaacctaattttcatcacgcacagtctttcagatccttttctccaggcttggctactggagaaggcctgatttgggt

SEQ ID NO: 13805 - DNA, 1753 bp, Artificial sequence
  DNA replication origin
cattttttcatggaattttctctgctgacctaggatgctggagctaatgtcctaaggtgagctgtgttttgcattgtagctccagctatccacttgaacagaaactttaggagtccttccagttcttagaatcttgacaacttcaaaatatcagatggtgaatcaaaaaacctcataggccatctccagactgactttttaaaaatgaaaatacaaatgggaactgttgtttcatgggtatgaagtttcaattttgtaaggtgaaaagagttatgaagattggctacacaatcatgtgaatgtccttgacactactgaactttacacttgaaaatggttaagatggtatagtattttaccacaattttcttaaaaaaagaaaaagacaatacaggtatttcaaaaacaagatgcttagtcgaactataacactgctggttgaaagataacttaggaaagaaaaggggatgatatgatcgcttttcctccaccttgcctccagaagattctaatgcagctatgatgacaagacacatgtggaccatgggaagagtctgcagcagtgcaaggaggtgcgagatttgggggcaaagtacacgctgggcatggctagcatgcacagggtgcggagaaggtccaggcggggtggcccgagcggcagggtggcttccttagaaagtatggctggccctggggaaggaggatgaggggcaaggggaaggggagaaggggaagacactagatgcagagggcaggcagaggcagagaagggggcagggaaaggactccacttgtccaaagtgctgctgcaaagggcaggccacctgtccggataggaagggactgaggactttgaatgctgtgttaactggtcgatgagggagtgctgagaggttttcacttgaggaacaaactgatacatgtgaattttcagaagattaatttttgaagtggtgtgcagggaagatacagacaggaagaccaattaaatagctattataaaaatctaggtaggctatgaggcaggctagctgggatgggggtgggggagtggagagagatggagaggtgcagggaattgctaagatgggagggagggaggagaggaggagggggtctttctaaagatagtgatggggaaaacgcacaggctcggcttgctcttgggtctagtggagtctgagatgcacaatgacatctgtgaggggctgtctggtgcggcacccgggggtgggatgagcactctgtggaggagaggtcaggaaagctgcaggcatgtcagaatcgccacacacagggaccacctggggtgtgaacaggagccagggtccggagcaaatgcagagcaaaccgagggcaaagcctcacgctccaagggaggagctggcagaaagggcacaaaagcgggtgccatgaaaacttctgtgaagcaaatatgattttcaaaaagctgtagggttgtctactgtttaaagaaatgcccagtaactccatttggaaagcaaataagcccctactctgtttaaacctggcttgtgtaccgggtttgtgttctgccattaagtcttttgtctcagccactgaaagtggcaggactcatctgagtccctaattctctctgggtcctgccccgcttctgcaaaagatgatgaggaagggcacaatgatggaaggagtaactcaagggaacagaagcctggagtctggggacttggctaacagggctgttgtacatgggttggccaaatggatt

SEQ ID NO: 13806 - DNA, 1591 bp, Artificial sequence
  DNA replication origin
gggggagggagggaggaagggcgggatgggaggagggcggcggaggaggaggggagagggagcggaggaggggcgggcgctcgggctcccggagccggctcggtggggctcgcgcgcccgcggccgccaggggcagcagagaggcacctgcagtccgcgcccgcccgcccgccggggccgcccgcctgccggggaggggcagcgcggacgggcgagcgccgcgtgcgggagagcgaaggctgcagcgcgcccggcagccgggatgcagcggcgccgcccaagcctggggcgcaggggtcggggcacacggggataggcccgacgcggggccgaaggaagggtggtctttcccgcagagttgccgctggaggaccgaaagttttgcaggcagcccttgcttccagcttgtcgctctctccccgcgtccctgtcgcccaacgcgaggcgcccccgctggggtcccgacggcttggtggggaggagccgtgaggggttgcgccccccacccccacccgagccagggaagggaccctggtgacctcgcctcccagccctcacccccgtcacccctttcttctctttcctggaggactttggaccatggagattctgcagttgttgctctaggagctgaaaccagtgggtagatgtcgttctgaaacgcaggtgagtttggagcgctacgagctaccttcccatctcaggctgcggggcgtgcaaaactcaaaagttagggcccccggacccccgggttccccgcgcggtgcgtatctccggctctcagagaaccactgcatggactttgctccagggtcagcagagcgggagggcgaatttacggctcttggaagacgacgctaacgggcctagcccctgagccgtttccagcgctccctgccgtgagacgagggtggcccgggtttgcgcaggcaacctttggccaggaatctgattcctgggagaattcacttcaggcttaactgctctagccagctagaaagggagcgctagatttcctctggattttggacgttgggtgctttagttgagattttcaccctttaaagaaggctttaaaaagtcttctgttacttctttttaacaaatccttttgtttactagaattatctaaactatatggacaccgccctcaccccacaagcgacatatttttttttctctttcgccagcacccttttagctctcaccactgctgtttcccaagttgtcacagctgaagcgcactgattggaagttgctttgtactgactgagttctgccctggctgaaccatctaataatttccctgagcttggcaccctgtatcgctaagccagtgttaggatgggcgatgaaggaggagctgcggatttgcctttagttgtgatgtttgtgtgagtcggcttgtttgtgtcagactcagataaactgcatttgcctttgctctctttcgaagggctcctacatagctaaggtgtcgctgggtgaagaattcccattgtaagaattggtggtgttaacaaatatgtattacttgttgacctcttgttatatgctagaccctgggcttgacatttccttccttccttcc

SEQ ID NO: 13807 - DNA, 1136 bp, Artificial sequence
  DNA replication origin
cttctgccgcaggattcatctcgggccggaggacaggggccgcgcgccgcgagctccctggcgcggctgcgaggaaggagaaaaatgagcttcaccgcgctccgttgcttaagtcactgctcggtcggcggaggagggggagagggggaaacggagagaggggaggggtcagaggagggcgggcccgggagccgtgacgcggcgcgggtgacggctgcggcggctcgcgtgctcgcagtctgggagctctggcggactccccacctcggttcccccgccttcaccccgtcaccctccgggggccgagaaagggcggggcgcggcagcgcgctgcgcagtgcgcggaggcggggcggggaggaggacgtgatgcacgcgctcttcctcccagacgccagctctgggaagctggaggcagcggggcagccccggcgcgtgacccgggcgcttacctaagttcgagttcccggcacgggcgcgggagggcggggcctggagggggcgttcccagctttgccagtgccacgaggagccggttcgcccgccccgcctgggaccttccgtcctacccagtcctggccggttttctgggtcctcctgaagtcacgccacccggctagggggcgaggagcctcctactgcccatcttcccgtccaccacgcgcagttactcacctttgtctccggcctggattaaggatccagcctttcgcctccatccctcttgtccctcctgatcctcctgaccctgtctttaagatcccaggagctgcggtgaggagtgaggctgaggggcccctttcatctgatgcagcgactccgctttcctccggcggctctgtctatggctgagctctttgatcctttgagagatggtttgacttttcccgagcaaagagcctgcgttgaaaagcgggggtggaattcagtcctcacagataatgaggggacaagacctaattgaaccgagtattgccgggaaggaaaaggcaacgggccaagcctttgacagggtgcgacactgacttttatcatcgttatagtctttaaatcctgggaaacgagttggcaaccccaaaataaagaagtgtaatgacgtctgatgacttcacccaaatacagaccattccaagaaa

SEQ ID NO: 13808 - DNA, 1547 bp, Artificial sequence
  DNA replication origin
aagaaaacagattctaaagataatgtggaggttgctcatggattggatgtaggcagtgcgtatctcagatgattttctgagtttctggcatgtgcagctagatgaatggttatgcctgtaactaaataagatacggtgcaaagggtcatgtactaacaggaagattgtgagtttgttcttagacatgttgaatttgagatactaaaatagagatgtgtagttaagcagttggaaaacacatccagaacttaccaggatagttagaatagaaggtacaaattagagtactcaatgtctggagtattactgaaacttcaggtgtgaatgataccgaggaatgagagtttggagagagaaaagaggggaggagacaaggagagggaaggagagaaggagaggagagggaagaaggggagaaggagaggagagggaggaaggagaggagagggaaggagaggggagaagagggggagaggagagggaagataggagagaaggagatggggggagaagagagatgagtggaggggaggggagtagaggaggggagtggaggggggaaagaagaggagagaagggagaaggagtggagagagggggagagaagagcagaaaagacaaggagaggggaggagagaaataggagaggcaagaaggggaggagtggagagaaacagaggagagaaggagaagagaggcaagaaggggaggaatggagagaaggagagaaggggaaggggagaggaagaaaaaggttctgagacaaatccttggggaactctaaaatttatgccaaataaaagtaggatgagctgagtgagtctgaaaaaaaagtagccagaggggttttaaaaaatcaaaaatacgtaaataacccaggagattgtggtgtcatagaagttgtgggaaggagcagttcaagaaagtagtcattgctgttgaatactattgaaggaattgagtaagacaatgaataaaaaaagtcctctgatttgtggaagcagacatcactgctgaaccttgcaaaagctgtttctgtgggcttgatgggaatagaaaccagattggagtgcaggaagtgagtgaaggtgagaaatggaataattccctagttgatttctgggcttaccaaaggttaatgggactggttttgtttgttgtttaatttctctttaaagtgtgttgctttcctttcccttgatgtctcagcaacagtacttctattcttattagctacttgtattagtccgttttcatgctgctgataaagacatacctgagactaggaagtaaaagaggtttaattggacttacagttccacgtgtctgaagaggtctcagaatcatgacaggagacaaaaggaacttcttacatggtggtggcaagataaaatgaggcagaagcaaaagtggaaacccctgataaactcatcagatttcatgagacttattcactatcacgagaggagcacgggaaatacccaccctcatgattcaattacctcctctgggtccctcctgcaacatgtaggaattctgagagatac

SEQ ID NO: 13809 - DNA, 2324 bp, Artificial sequence
  DNA replication origin
attgtgcttagccagaaggcttcaggacccatggtaaacagaattatgctcttctccccaacccccaccaaagaatcatataataatcactgaaacctgtgaatacgtagacttacatggcaaaaagggactttactgatgtgattaagaatctcgagatgagaagattatcctgggttatttgaatatgcccagtgtaatcacaaagggcctgataagagggaggccggagactcaaaagcagaagaatgagatgaaacaatggaagcagagattgaaacgatggaagcagaggttggaatgatgaaagcagaggttggaacgatggaagcagaagttggaacgatggaagcagaagttggaatgatggaagcagaagttggaatgatggaagcagaggttggaatgatggaagcagaggttggaatgatagaagtagaggttggaatgatagaagcagaggttggaatgatggaagcagaggttggaatgatggaagcagaggttggaatgagggaagcagaagttggaatgatagaagcagaggttggattgagggaagaagaggttggaatgtggaagcagaggttggaacgatggaagcagaggttggaacgatggaagcagaagctggaatgagggaagcagaggttggaatgagggaagcagaggttagaatgagggaagcagaggttgcaatgatggaagcagaggttgcaatgatagaagcagaggatggactgacggaagcagaggttggaatgagggaagcagaggttggaatgagggaaggagaggttggaatgagggaaggagaggttggaatgagggaagcagaagtcggaatgagggaagcagaggttggaatgagggaaggagaggttggaatgagggaaggagaggttggaatgagggaagcagaagtcgcaatgagggaagaagaagtaggactgatggaagcagaggttggaatgatggaagcagaggttggaatgagggaagcagaaattggaatgatggaagcagaggttggattgatggaagcagaggttggaatgatggaagcagaggttggaatgagggaagaagaggttggtttgagggaagcagagattggaatgatggaagcggaggttggaatgatggaagcagaggttggaatgatggaagcagaggttggactgatggaagcagaggttggaatgagggaagcagaggttggaatgagggaagcagagattggaatgatggaagcaggggttggaatgatggaagcagaggttggaatggtggaggcagaggttggaattatagaagcagaggttggactgacagaagcagaggttggaatgagggaagcagaggttggaatgaggtaaggagaggttggaatgagggaaggagaggttggaatgagggaagcagaagtcggaatgagggaagaagaagttggactgatggaagcagaggttggaatgatggaagcagaggttggaatgagggaagaagaggttggaatgtggaagcagaggttgaactatggaagcagaggttggactgatggaagcagaggttggaatgagggaagcagagactggtttgagggaagcagaggttggactgatggaagcagaggttggactgagggaagcagaggttggaatgagggaaggagaggttggaatgagggaagcagaggttggaatgatggaagcagaggttggaatgatggaagcagaggctggaatgagggaagcagaggctggaatgagggaagcagagattggaatgatggaagcagaggttggaatgagggaagaagaggttggaatgatggaagcagaggttggaatgatggaagcagaggttggaatgatggaagcagaggttggaatgatggaagcggaagttggactgatggaagcagaggttgtaatgatggaagcagaggttggactgatggaagcagaggttggaatgagggaagcagaggttggaatgatagaagcagaggttggaatgaggtaaggagaggttggaatgagggaaggagaggttggaattgtggaagcagaggttggaatggtagaagcagaggttggaatggtggaggcagaggttggaatgatggaggcagaggttggaatgatggaggcagaggttggaatgatggaggcagatgttggaatggtggaggcagaggttggaatggtggaggcagaagttggaatgatggaggcagaggttggaatgagggaagcagaggttggaatgatggaggcagaggttggaaggatggaggcagaggttggaatgagggaagc

SEQ ID NO: 13810 - DNA, 762 bp, Artificial sequence
  DNA replication origin
gttcaaaggccatcacccaccccagcaccatcttccaggaactggcctctcccccatcagtccccgcccctcttctgagagcacccaatgggtggagtcggggctgcggtgggaggggcctgaggcgggcacatttaaagaaaggcagccggcgaaaagaggcaagagaggagaagaaagagaaaccaggggggcgaggcgccgtccaatgacaaagcccaggggtgggcgccggccgccatcttgtaccgggcagcaggatattcgcccgcgtcctccgccctcggagggggaggggcggcggcggaggcgagaaaagtagcgagagacgccagcagcagccgccgccgcggagccaacgcggactgggacggcggcggcagtagtgggacccggcgagcgtgagtggcccggagcggccttcgatgcggcgcagtatgaagaggcggcggcgccggcgcccggtcgccccggccacggccgcccggggcggcgactttagggcagaagacggggctgggttggaggcgcgggaggagaaggtggtgtactcgcggtcgcaactgtcgctggctgacagcaccaaggcgctgggcgacgccttcaagctcttcatgccccgcagcacggagttcatgagctcggacgcggagctctggagcttcctctgcagcctcaagcaccagttctccccgcacatcctgcgcagcaaggacgtctacggctactcctcctgccgggccctggtacccgaccccccgg

SEQ ID NO: 13811 - DNA, 1189 bp, Artificial sequence
  DNA replication origin
gtaccagggcccggcaggaggagtagccgtagacgtccttgctgcgcaggatgtgcggggagaactggtgcttgaggctgcagaggaagctccagagctccgcgtccgagctcatgaactccgtgctgcggggcatgaagagcttgaaggcgtcgcccagcgccttggtgctgtcagccagcgacagttgcgaccgcgagtacaccaccttctcctcccgcgcctccaacccagccccgtcttctgccctaaagtcgccgccccgggcggccgtggccggggcgaccgggcgccggcgccgccgcctcttcatactgcgccgcatcgaaggccgctccgggccactcacgctcgccgggtcccactactgccgccgccgtcccagtccgcgttggctccgcggcggcggctgctgctggcgtctctcgctacttttctcgcctccgccgccgcccctccccctccgagggcggaggacgcgggcgaatatcctgctgcccggtacaagatggcggccggcgcccacccctgggctttgtcattggacggcgcctcgcccccctggtttctctttcttctcctctcttgcctcttttcgccggctgcctttctttaaatgtgcccgcctcaggcccctcccaccgcagccccgactccacccattgggtgctctcagaagaggggcggggactgatgggggagaggccagttcctggaagatggtgctggggtgggtgatggcctttgaacgtaagtcaacggttgggtggatctaggagggctgccacgtctagagtaagagggtggatgttggctacaccatgggaagagtgactcttagagtgagggggtgtgcagttgtggattgagctgggagctctaccagtgtggataacaaagggagatttccctgaaggatgttcctggtatcatcacagctagggaatttgggtttaagtctaggggaaatgggcctttcgcaattcccatccaccctctcaaaggcctcttctggcatcttcattcaaaactcttccctgtcttgaccccagcccatctcaagaagccagtagtaatccagaatcattcaggtaatgtgcgtggctggcagctgagagattttagtctccctctggacactggagccatcttcatatttaagagagaccctgcttatccagaaagcaaa

SEQ ID NO: 13812 - DNA, 1056 bp, Artificial sequence
  DNA replication origin
gcgcggccgcggctggagcgggaggagcaggagatgctgccagccctcccggggccgcgctcgctcagccgccgccaccacacggagcagacgcgcgccgggagccgcgggccgggccagccgggccgccggggcccagtgcgccgcgctcgcagccggtagcgcgccagcgccgtaggcgctcgctcggcagccgcggggccctaggccgtgccggggagggggcgagggcggcgcccaggcgcctgccgccccggaggcaggatgagcatcgagatcccggcgggactgacggagctgctgcagggcttcacggtggaggtgctgaggcaccagcccgcggacctgctggagttcgcgctgcagcacttcacccgcctgcagcaggagaacgagcgcaaaggcaccgcgcgcttcggccatgagggcaggacctggggggacctgggcgccgctgccgggggcggcacccccagcaagggggtcaacttcgccgaggagcccatgcagtccgactccgaggacggggaggaggaggaggcggcgcccgcggacgcaggggcgttcaatggtgaggaccagaccccccacttcgcgcccccggatcccctcgctgccccccaccgctccccgctgtgctctcggatcttgccgctttgcgcacccacctctccccgcattctccacctttccctaccttcccatctcgcccaccccctcagcatccatttctgtctctcccactcgcccaccttcctactccgctctctgtcataccctcttcccttcctctagaggtgggagagctgggatgttacgcttccctcttaccctttgccccctctgcctgggccggttggggtgggcatctgctagaaagacaactttcgctgtggttggaggtatttcgcttagaggataccattgtgcataaagaaactggcccgcttggcgtcttctttcagcccttgtatttattaatggaatgtcgaaagagaaaaggagaaccgtgtttaatatgattggctttactgttgttaggacggtagattcgct

SEQ ID NO: 13813 - DNA, 914 bp, Artificial sequence
  DNA replication origin
tggctgtttatggcccggattgggtgctgcaagaggcttgggccgctctaagtgttagcagaggcccggaggaaaagaagaggcccaagctttaaaacactcccttcctccgccccctcccttttgtcccagacaccaaaacaaacgagctgatacacgtgtccctatgactcttgtttactatcaagactgcgctgtgcgagcgcctctgggatacgtagtccagctcttccccggccagcagtctcccacagccaaggaccaaggcttgagactacgaacccacaatccatttcggggacaaagtttggcttgggtccccggactctcggcaatagtccaatccgaagcacttactcttgtgattgacatgccatcttctccagtaaacacaacacaaaagtcaatacatgcccgccccccgagacggaccacggtaccacccaatgggaaaggggaagaaccgaatggcagttctgcagtccaataagagggcgaaagagctgggcggggctcaacccccagggggttgaggggagggggaagacgaagcttgaaagacttggtaatggcgacgggtttggtaagtaggaaagtttcggttgaggagtaagagctgccgcgggagcagtaacccgcgcgggggaggccgacgtcggtcggagagggggtacgagagctgctggtggtgttgtcgtggccggagcggcccgcgcctgggctgccggcacttcgcggcaggtttgttgtctttcagttagggaagaggtgggggtggggaagggaggggcaggagcgcgggggattgggcagactggagggctcgggtcctcgttccttcttctcggagggttgcccttggggtgggggcagttaaccgttcgattggtgcccgcggcgagcccaccggagca

SEQ ID NO: 13814 - DNA, 1459 bp, Artificial sequence
  DNA replication origin
ggcgacgggtttggtaagtaggaaagtttcggttgaggagtaagagctgccgcgggagcagtaacccgcgcgggggaggccgacgtcggtcggagagggggtacgagagctgctggtggtgttgtcgtggccggagcggcccgcgcctgggctgccggcacttcgcggcaggtttgttgtctttcagttagggaagaggtgggggtggggaagggaggggcaggagcgcgggggattgggcagactggagggctcgggtcctcgttccttcttctcggagggttgcccttggggtgggggcagttaaccgttcgattggtgcccgcggcgagcccaccggagcagcgtctcccgcgagctcacctgggcttcggggcggcggcgctagggggtctcgggcgggggccgggaggaggcagggggagggcgaagttccgggccaggtcgcgcggtgggtggccgggccgggtgtggagatggggcgggccagggcgggggaaggggccgacgcagcgccggggctgcccaggaaagtttgacttcaactccccgtttgtgggcggagggtcggagcttggccaggggtggggggctggccggaggtgggggaccccagtgaggcgccgcctccttctggactgagggggattctggctgagctgaggagctcgcggagccgctgggccccggggctcattgttacgcagttcgaatgaatgggctcccaggcgcctgcgcgctggggctgagccgaggggaaaaacaagcccggagtccgggctgcggtcacatgatggggggaagggaggggaacgcgatgaatggcgaaagagggtgggggatggacttggcgtgaaccgggaggcaccgctctgtgtgacccaaagaggaggcttggcaggcgattccagtctccgcctttcaacctatgctgccaccgcaggccgattgaaacaaaacaaaacaaaccaggcgaagtggacagccaggtttttgtagctttaaatgctgcgtgctgtctagggtgtttcactctccgctgtgcactctacactcgagttcattcttagggagttttcagctacagtcgtttttagaaggagcactgacagcgaggtaatactcaagttttctgtttgttttgtttttggctcatggtgccactgatgccaggacgagaggaggcttagaaaaggagttatacatactgggaagcgatggagtcctactaacagctcggatggaggctttagctttattaatacttccctctgaatagccgtaagcactcctaatagtggttttgaaattaaaggtactttttgagaattagaataattttaacattggaaatacttttctggtcatttaacagtgatctaaatctgcaatgtatgtcttgtacttttggtttttttttgctattttcctttatcttgcaaatgagtgtggtagagtc

SEQ ID NO: 13815 - DNA, 1079 bp, Artificial sequence
  DNA replication origin
cagaagaatttttcttagtacagaacagaatggagtctcctatgtctacttctttctacacagacacagcaacaatctgatttctctgtcttttccccacatttcccccttttctattagacaaaaccgccatcgtcatcatggcccgttctcaatgagctgttgggtacacctcccagatgaggtggcggccgggcagaggggctcctcacttcccagaaggggcggctgggcagaggcgtcccccacctccgggacggggcggtggccgggcggaggcgcccccacctccctccaggacggggcggctggccgggcgggggctgactccccacctccctcccggacggggcggctgccgggcggagacgctcctcacctcccagacggggtggctgccaggtggaggggctcctcacttctcagacggggcagctgccgggcggaggggctcctcacttctcagacggggcggccgggcagagacgctcctcacctcccagacggggtcgcggccaggcagaggcgctcctcacatcccagacggggcggcggggcagaggcactccccacgtctcagacgatgggctgccaggcagaggcgctcctcacttcctagatgggatggcggccgggcagagacgctcctcacttcccagaccgggcagccgggcagaggggctccccacatcccagacaatgggcggccaggcagagacgcccctcacctcccagagggggtggcggccgggcagaggctgcaatctcggcactttgggaggccaaggcaggcggctgggaggtggaggttgtagcgagccgagatcacgccactgcactccagcctgggcaacattgagcactgagtgaactagactccctctgcaatcccggcacctcgggaggccgaggctggcagatcactcccggttaggagctggagaccagcccggccaacacagcgaaaccccgtctccaccaaaaaaacacgaaaaccagtcaggcgtggaggcgcgcgcctgcaatagcaggcactcggcaggtcgaggcaggagaatcaggcagggaggctgcagcga

SEQ ID NO: 13816 - DNA, 791 bp, Artificial sequence
  DNA replication origin
cacctttaatgcacacttccaaaactaaagttttaaaaaacacacacacaatcaggccttttggaggctctgggtcagggcagccagggctgtcggcagtcctgcctttccatactcaccgcgccggcaggaaatgtgtggcggatgcaactgtgcaaactgagatggggcgaaaggttgagctacaagcctaatcccgggactccccggctggctgcgcttcctatctggattgctggaaggatgcggagtccccagggcctgccccttaggtctggacgggaggaggcgctagcagagcctcgaaccccgctctcagccctcacctgcaagtggctgacgatacagtagggttcgggcttgtgcagcccgcacgtcgaggtcaccgaaagcttctgtgctcggccgatgagaaggtcgcccgtggcgggatagcagctgccttctgcgcagccgtagctgaactcgggttcctgagcgcgcactcgggctctgcacagggctgcgggaaggacaggcaacagagttggggggacacaagcagggagtggagcccgaaaaaaacgaacaagcgggggcgggggagtgggtgcggagagaggacagtccattcggaagaaagcaaaatgcacagaaaagacaatggagagatgagcgcaggagaggctgggaaggcagggactccgaaaggagaaggacacggaaagaaacccacacacgtcatcaggtctgtccagcagcgagagcctccctcccgggaaacccaccgacgctcgcgcccaccctgatca

SEQ ID NO: 13817 - DNA, 1682 bp, Artificial sequence
  DNA replication origin
atatggcaggagaatgagatttgctttgttttctggaagtcagctttacaacagtcttctgctctggcgttgcttgctgtcatggatatctgtgctctgtggtaggaggtctctgaggaaaatgctcttgagtcctcagaaccatagaatcaacacagaagagagacagggtgagggaaatggttatttgttctctactatttatgaagaatgcactatggatgaaaatgtcctgttcaaatgcttagacatcaaacgcttagatgtgtttaggaagagcaaaatgtgaccttaaccaaagtttggagacaactgacaaaaaagctgttgggcctcgtgaaaacaaatctgttttaaatcctttgtgatgataagaaagactgggtaattgagggacagaggtaaaagaggaaggggaggtggatggcattaatgagaggtcacgtctggtcataccagatggggtggcactaaagagaggtcaaacgggggcagggagtggcgctaatgagcagtcataccaggtggggtggcggtaatgagaggtcataccgggtggggtggcggtaatgagaggtcataccgggtggggtggcggtaatgagaggtcatactgggtggggtggcggtaatgagaggtcataccgggtggggtggggtagtgagaggtcataccgggtggggtggcggtaatgagaggtcataccgggtggggtggggtagtgagaggtcataccgggtggggtggcggtaatgagaggtcataccaggtggggtggggtagtgagaggtcataccgggtggggtggcggtaatgagaggtcataccaggtggggtggggtagtgagaggtcataccgggtggggtggggtaatgagaggtcataccgggtggggtggcggtaatgagaggtcataccgggtggggtggggtaatgagaggtcataccaggtggggtggggtagtgagaggtcataccaggtggggtggggtaatgagaggtcataccagtagtacggggaagaagcgcagcatcaggacaccgcctatctcgtctgtttttcagtttgtgccataggaaaaaaattaagaaatataccttagaaatccagggtataaaagggagagatggtgtaatggtaggaagattgatgaaataactatagataaagttgagtccagtgtcctaaaattagcagaaatcagagaaagagagagaagtagatcatgaatgcagagtttaaaaattagccaatgataggctttcatgccaaatattgacatccttacaccgcggaaccgagaggagaggagaggagaggagaggaggagcaggagcaggagcaggggcagtggaagacggtgctttcacactggagttaacccagcagccccaaaggatgaagcattgtgaactgggaaaagggaggcagcgtaatggtaaactgaggcattctagaatgctggcagcatttgctcttacaggcgatgtgttaactaaggtcactagaggtgaatcaatatttgttctttttaatacatttatatgtaaaaagtgacaagaactggttgtgaccttgtcctgtctctccatcactggcacacaagaaggcccacctatcacgattcctcacctcaaactatctggcagttgctgctggaactgtaggcattacactgc

SEQ ID NO: 13818 - DNA, 1216 bp, Artificial sequence
  DNA replication origin
tttcttagtacagaacaaaatggagtctcctatgtctacttctttctacacagacacagtaacaatctgatctctctttcttttccccacatttcccccttttctattcaacaaaaccaccaccgtcatcatggcccgttctcaatgagctgttgggtacacctcccagacggggtggcggccgggcagaggggctcctcacttcccagaaggggcggccgggcagaggcgccccccacctcccggacggggtggctggccgggcgggggctgcccccacctccctcccggacggggcagctggccgggcgggggctgccccccacctccctcccggacagggcggctggctgggtgggggctgccccccacctcccggacggggcggctgccgggcggagacgctcctcacttcccagacggggcggctgccgggcggaggggctcctcacttctcagagggggcagcccggcagagacgctcctcacctcccagacggggtggcggtcgggcagagacactcctcagatcccagacggggtcgtggccgggcagaggcgctcctcacatcccagatggggcagcggggtagaggcgctccccacatctcagacgatgggcggccgggcagagacgctcctcacatcccagacgatgggcagccaggcagagacgctcctcacttcccagacggggtggcggccgggcagaggctgcaatctcggcactttgggaggccaaggcaggctgctgggaggtggaggttgtagcgagccgagatcacgccactgcactccagcctgggcaacattgagcactgagtgagcgagactccgtctgcaatcccggcacctcgggaggcccaggtgggcagatcactcgcggtcaggagctggagaccagcccagccaacacggcgaaaccccgtctccaccaaaaaatacaaaaacgagtcaggcgtggcggcgcacacctgcaatcccaggcactcggcaggctgaggcaggagaatcaggcagggagtttgcagtgagccgagatggcggcagtacagtccagcctctgctccgcatcagagggagaccgtggaaagtgggaggggcaggggggggagggggagagggagagggagaggctcactcagcatagttttgaggtttcatccatgccgcatgttgttgcatatatcagtagttcattctttgttattgctga

SEQ ID NO: 13819 - DNA, 1192 bp, Artificial sequence
  DNA replication origin
agcgtctctgcccggccgcccatcgtctgagatgtggggagcgcctctaccccgctgccccatctgggatgtgaggagcgcctctgcccggccacgaccccgtctgggatctgaggagtgtctctgcccgaccgccaccccgtctgggaggtgaggagcgtctctgccgggctgccccctctgagaagtgaggagcccctccgcccggcagccgccccgtctgggaagtgaggagcgtctccgcccggcagccgccccgtccgggaggtggggggcagcccccacccagccagccgccctgtccgggagggaggtggggggcagcccccgcccggccagctgccccgtccgggagggaggtgggggcagcccccgcccggccagccaccccgtccgggaggtggggggcgcctctgcccggccgccccttctgggaagtgaggagcccctctgcccggccgccaccccgtctgggaggtgtacccaacagctcattgagaacgggccatgatgacggtggtggttttgttgaatagaaaagggggaaatgtggggaaaagaaagagagatcagattgttactgtgtctgtgtagaaagaagtagacataggagactccattttgttctgtactaagaaaaattcttctgccttgggatgctgttaatctataaccttacccccaaccccgtgctctctgaaacatgtgctgtgtccactcagggttaaatggattaagggcggtgcaagatgtgctttgttaaacagatgcttgaaggcagcatgctcgttaagagtcatcaccactccctaatctcaagtacccagggacacaaacactgcggaaggccgcagggtcctctgcctaggaaaaccagagacccttgttcacatgtttatctgctgaccttccctccactattgtcctatgaccctgccaaatccccctctccgagaaacacccaagaatgatcaataaatactaaaaacaaacaacaacaaaaaaaacaactatgctgagtaaaaggagccagacccaaaagaccatctatgattctacttatatgaaatctttagaaatgcaaaagtatagccagcatggtggttcatacctgtaatcccagcaccttgggaggccaaggcgggcggattacttgagatcaggagtttgagaccagcctggccaacacggc

SEQ ID NO: 13820 - DNA, 1180 bp, Artificial sequence
  DNA replication origin
ggggctgcctggaaagattgctttcccagcccaggctcttagcggtgggatctggcatccgctccgcccgggatgctgtgttgagccaggagtgattacccgccctggagcatccatctcgcagcgagcgccatctgcgccgagcgccgcccccggccccctccacgccgcgcgggtgggcgctgccgcatcctggtcccaggcggttggccagctcagctactcccggcccgcatctgctagagtgcggagggggacggggtgtcgcagtagggtgagcaagggagtcgtcatttctcccaaagcggtgtcctcagggccgcaagcgctgctggagggctccccgggccccggggctggcgaacaggccgcttccttccccggatcgcctcccctcccgcccgcgcccgcggccacatcttcgtcccccgtacgctggcgggtggcccctgcgccgcgggcaccgagggagggcgccgagcggtggcgtttctttcgcaccccgcctctctccttcccttttcttcgcatcaggggctccagcccttggctaccaccggcgcagaactgtcctgagaagaaagctttcttttcctttccgagtcccagatggttaacgctcagaagtgcgggtctaagagactgggctcttcctcgccccaggcttttgcaggaggagatggagccaagtgtaatgaggcaggaagcattggttgtgcaccaggagctccccctggggtggtcctggaaaggaacacagtaacctctgaatacaaacctcggaggctgggctgctttatgggactgcattgtgctaaccatgccctgctgttaaaatattgtaataatggcagtacttgctgaagtactgaaatggagttaggcaactgatacttgctgctttaatggtaacgatagccaaccggttttgagagctttagatgtgctgggcgctgcgcatgttacatgtatcatctcatttaattctcacagcaaccccattttaaaaattaggaaatgaaggcttagagaaaccaagtaactttcccaaggccacacagctaggaagtaggggagtgggattgtttttgtccttgtgctttacaatccaagactgagactgtggccttttggaggcttatcagtttaggggaaacctaaaccactgagtgttcaaaac

SEQ ID NO: 13821 - DNA, 904 bp, Artificial sequence
  DNA replication origin
acgtaagtagctccttgcgcgtctggcggtgacactgggtcctgctcgggggtgacggctggagcggaggaggacgcgcgaggctgctgcgttgtcacttggacaccgccgcggggttcagccgagcgctcaccgggctggcagcgctgcaggaggggcaaagcagatctccaactcccttctcccctgcaggcccccgacactcccgcgggcgccgagagggagcagggggacctgcgcttgggtgaaggcacagctgaaatccagcagcgccggcacccaccaccccctccagcctgtggccaacttctgctccgcgcccgcaccccacgctttccgggaagccctgcccagagctcttgctcgtgggcagttgggcatggagagcctgcgggcccggcacggcggcttcccgggcttggacacggaggcgcggggcgtcacgccacagtgccggcggggcgaggagcgcgggggccgggccgggagcgcacgggcgtgtgcctgttcgggcccctgcggacacgtctgggcgtgggctttgttcggaagtgcgtacacctgtgctgaccacggagttcgggggcgaggccgacttcgcttctccagtcgctgcctggagagggctcggggaatcgaggcggaacgagagagacacggaggacagaggggtggggcgcttgcgggggctttgtcggccttacaggtgcgggtcccgggagtccctgcgccccgccctgcctccgagggctgggacttgtcggggccggcgcaccgggctgggggctgcctggaaagattgctttcccagcccaggctcttagcggtgggatctggcatccgctccgcccgggatgctgtgttgagccaggagtgattacccgccctggagcatccatctcgc

SEQ ID NO: 13822 - DNA, 1130 bp, Artificial sequence
  DNA replication origin
ggagctacttacgttctcgcgccgcgccctccgctcagctctggcgcgactgcccaggaccctggaccgccggtgtcctccgttctcgacgaagctatcccctctggctgctccagccaggcggcccctgcgccgtcccccgcgcccgcgcgtctgaggctcggactgcggcgcgcgtccgccagcgaccctggcgaagcgaggctggccccgcgccggcgcgcgcccccgccgctcccgccctctccgctccccctccccgcgccgtgcttttgcccctcccggctctccttagcgtcctcccgtccccctcccccgcactccctgcgggcgtcctccgcctcctcccctcctggccaaccccctcttgccctgctgctgcgacggcagcgaatgggctccagccgccggcgcctcgagggactgggtggcccctcacctgagcggccgccccaccgccaacctccgtcagcctgcgagcgcgtgtggcggcgggggtgggggtgcggggacggagggcgggagtgttccggggctaggatggctgggatttagctacaaaagatgttccagaaaatgggtagtttttgaatgccactctcatgggtttagctttctgtgggaggtctgtggtcttctagttttttcttttttaaaaagcactttcttcgaaattcatcagttggggtggttgagattgggtgagtggttttgggggttttgttttgtttttgcaaccgttctttccaaacactccccgccgccccccaccaccgcagaaaaaagagcttttagcataaggcggatgctatctatccgcggtagaaactgggtcttctggtcccaaggaatagggttagttcggatttgcttatttacaaatgggggagtattatggagattttttttttttttttttggcaatgtaaatcgagaattaagattttccaactgtatagtatttgagtaaacacactgcttgctgcatagttcaggctccgaagcgcacgtctccactctatcgtggatggtgttcaggatccttagcctgacccttgggtcctccgtaatctactccggtctgcacacaaattacttgtctgctgggtatcacccgacttgaccactta

SEQ ID NO: 13823 - DNA, 1353 bp, Artificial sequence
  DNA replication origin
ctactcttcattaaatgagttacttcatgtcaaaagcctcaaagagtaactagcacactgtaaactctcaataaatattagcatctttggtagacacatatcaacaaccccttttacagatggtttaattgaaaaaaaaaaaaaaaaagaaagtttaaataacttactaaatgtccagagctagaaagtagagaagctatgaatggcactgaagttgttctgacatcagaactcatgacctttccacattgctccatgatttctcgaagtataagaaagagaagagagaggaggagaaaagaggagaggaaaggaggggagaagaggggagaggaggggagggaagggggaaggaagggagtggaggagaggaggaggaaaggggaggggggacaacagcgggggaagtggaggagaggtggagggaaggaaaggaggggaggggacaggaggaggggagaggggaagggggagaagaggggaggaaaggagaccaggggaggggagaaggggaggggaaaggggaagggcgagagaagaggagagagtagaggagaggtggagggaaggggaaggagttgtggagaggtagaggcaaggggaggaggggaagggaagggtggagaagggaggagggggaggaggggagaatgggatttcattctgcctctggaattgggagttaaggaagtttacacagaggcaaggacacatgagctgggcttgaagaaggagagaccaggaggcaaagaacagcaacactaaattccaaatgaggggtgggagaaagtatatgcaaaataatcaaggctcaaatgcacccagcatattttgggtgataacatgtagtctagtatgattcaatacttaggagttcaagacaagatttgagagtgtggtggaaaagaaatgtatatgttaaaaacaatgcaatgttgaaaatgttgcctggaaacagattatgaagtgccttaaacaccatggtaattaacttgatgctcttgatacagattcattgttttaagaaggaaagagacatgattagagaaagtaatatggtagaagtgcagggaagaattgagatgcctagaggaaaaacattattaggagcctatttaaactagttgagaaatgaggcaacacatatgaagggaatgtcagaaacaacagaggaagagaaaggaaattgcgatgttaattctgatgtgctatcagcaagactcattgattgattcccgggagtgtgaaaaggaggagtcaaaaatggcaaggtttccagcaggagtgactgcaaagtaattctattaagaggatggagaaaacttacctgaagatagaaattagctgtgtgac

SEQ ID NO: 13824 - DNA, 1039 bp, Artificial sequence
  DNA replication origin
ttgccgccggcggagggcggggtctgcgcggggacttcccccgggctgagctgcgcagcgggtgcggagggcgggcgcccggcgtccggcggcgggtggggggctgtgaggctggcaggggtcggcgggcgcgtagccgccgacccttggtggtctcttgggctggggacccttccctgggagtcggccccggccccggcggggcgggcgttgccgggaggcggaggggtgcgcggccgcgagtcctgcgtgatcgcgagcatgtgtgcgtgcgcgtgtttatctgaggcgcgtgcggcggccaccccagcctagtcctcttcttggtgccactggctaactaggttgagaaaccggcgccacaggcggcacacctggcccggagctggcccgctcctccccgccgagccggcgccccaacaacgcgccctctcccagtcctcacaaaggggcctagtccggcccccggctctggccgtgagggagcgctgtgggggcgcgctgccttctgcctggaagtgttgggcaggtggtgggagagcgtcaggcttgaacaacatgattttaaagcacgtgtctgtctgtcgttttttacttttagggttttggccaaattgggcgagggcacaaaataaccacttaccccttctcaccgaggaagagcgggagaaagggtaagtaaggaatggtcaggggtggaaggacctaggactttatcctgagagcgagcgagagagagaagggctagatgtccagaactgctcgtggggaacttgggcccagattctaccttttcatcgggaactggaggacccaccttcaaagtcacaggctccaggccccggactgttttcagcctcacacagtctatagagtttaacagcttgggcatgtggatcccttttagccccttgacccgacagaaaactgcacttcccctttacctgtttttaccttggaacattggtcctctctagttgtctgtctccggcccctatcttattagccagctttgactaatccctgagaccatagcact

SEQ ID NO: 13825 - DNA, 1300 bp, Artificial sequence
  DNA replication origin
ctgggcagaggggctcctcacttcctagtaggggtggccgggcagaggcgcccctcacctcccggacggggcggctggccgggcggggggctgacccccccacctccctcccggacggggcggctggccgggcggggtgctgatccccccacttccctcccggactggtcggctggccgggcggggggctgagccccccacctccctcccggacggggtggctggcccggcagaggggctcctcacttcccagtaggggcggctgggcagaggcgcccctcacctcccggacggggcggctggccgggcggggggctgaccccacctccctcccagacggggcggctggccgggcggggggctgaccccccccacctccctcccggacgtggggctgacccccccacctccctcccggatggggcggctggctgggcggggggctgaccccccacctccctcctggacggggcggctgccgggcggagacactcctcacttcccagacggggtggctgccgggcagagggactcctcacctctcagacggggcggctgccgggcggagggtcccctcacctctcagacggggcggctgggcagagacgctccccacctcccagacggggtcgcagccgggcagaggcgctcctcacatcccagacggggcggcggggcagaggcgctccccacatctcagacgatgggcggccgggcagagacgctccccacctcccagatgggatggctgccgggaagaggcgctccccacctcccagacgggatggcggccgggcagagatgctccccaccctccagactgggcagccaggcagaggggctccccacgtcccagacgatgggcggccaggcagagacgctccccacctcccagacggggtggaggccgggcagaggctgcaatctcggcactctgggcggccaaggcaggcggccgggagatggaggctgcagcgagccgagaccacgccactgcactccagcctgggcaccaccgagcaccgagcgaaccagactccgtctgcaatcccggcaccctgggaggccaaggctggcggaccacccacggctaggagctggagaccagcccggccaacacagcgaaaccccgtctccaccaaaaaagtacgaaaaccagtcaggcgtggtggcgcgcgcccgcaatcgcaggcactcggcaggctgaggcaggagaatcaggcagggaggctgcagtgagccgagatggcagcagtacagtccagcttcggctcggcatcagagggagaccgtggaaaga

SEQ ID NO: 13826 - DNA, 998 bp, Artificial sequence
  DNA replication origin
gagtccctctgcccggcagccaccccgtctgggaagtgaggagtgtctccgcccggcagccgccccgtccaggagggaggtggggggtcagccccccgcccagccagccgccccatccgggagggaggtgggggggtcagccccacgtccgggagggaggtggggggggtcagccccccgcccggccagccgccccgtctgggagggaggtggggtcagccccccgcccggccagccgccccgtccgggaggtgaggggcgcctctgcccagccgcccctactgggaagtgaggagcccctctgccgggccagccaccccgtccgggagggaggtggggggctcagccccccgcccggccagccgaccagtccgggagggaagtggggggatcagcaccccgcccggccagccgccccgtccgggagggaggtgggggggtcagccccccgcccggccagccgccccgtccgggaggtgaggggcgcctctgcccggccacccctactaggaagtgaggagcccctctgcccagccaccacctcgtctgggaggtgtacccaacagctcattgagaacgggccgggatgacaatggcggctttgtggaatagaaaggggggaaaggtggggaaaagattgagaaatcggatggttgccgtgtctgtgtagaaagaagtagacatgggagacttttcattttgttctgtactaagataaattcttctgccttgggatcctgttgatcggtgaccttacccccaaccctgtgctctctgaaacatgtgctgtgtccactcagggttaaatggattaagggcggtgcaagatgtgctttgttaaacagatgcttgaaggcagcatgctcgttaagaatcatcaccactccctaatctcaagtacccagggacacaaacactgcggaaggccgcagggtcctctgcctaggaaaaccagagacctttgttcacttgtttatctgccaaccttccctccacta

SEQ ID NO: 13827 - DNA, 1304 bp, Artificial sequence
  DNA replication origin
ctgcgggcggcgcagtgtcaacgctgggctcgggagcctccagcgcagatcctgcccagcgcccgcagcccgcgcgaagccgctgggctccggcactgcagcgctgctcggggactgtgcattgttgtgagccggagaaggggcgcggggattacaaagcctgaagaccccggagcccctttagccatgtggatacctacggagcacgagaaatacggcgtgggtgagtctccgcggggcgaacttttattctgctctggcccgagcgagtgcgcatttctcgtccttgcccccgcgcccctctcgctccgcccggttgaaaatgcctaatcctggcatcgcgcagctggtacggggctttgccgagccagctccaggcagagggctgcgcaccaggctctcgccccgcaccgcctgctcggcgcgccccgcactggttcccgaagcgccgggacagcttgggggagcgcgcggccggcccgctagcttcgggctctgcctgcggagtttggagtggcgactgggcgtgtgtgtgtgtgtgtgtgtgtgtgtcaagttggaagaggaggcgaatggggtttctctccttccttacccttcttccccaaagcgacagggagctgcaacggttcctctgggtggagagggagacaacaacactcgggcagagagaacacccccaaaacagtagggaggcgcaaacccttccctctggctcggatcgacattcccggagtgtggaatgtggcagggtcctggagagagccgctctgacaagctgagccctctctgaccctcctccctctctgcgatcccggatttatggggtgtgtatgttgcggggcgggggcattggtaaatttcaacatctgcgccgctcggttctttggtctttggagaagaacgggtatttcagcagtgtttttacttctggccaccctctcgaccccgggtgagcgcagtgggggcggtgtggcggtacagggctgctgagtgataaatggggagggggatcggaaagcctggttcttgggggcagggagatagcttttaggaaagcataccctgacactggcgttcggagaaaaaggaacaggatagctctcgctgttctgtgtaaaggtgaacaacaaaggacattaatgttgactgatgaatacaggagtctcccttccttttcctcctcccatttcaggcgggttacagttcccgtttttgttgtttgatttcagctgggtcgccccttgacagttactccttttagggttgagactattaagaagccaggctctccgacaaggctg

SEQ ID NO: 13828 - DNA, 1351 bp, Artificial sequence
  DNA replication origin
accagctgcgcgatgccaggattaggcattttcaaccgggcggagcgagaggggcgcgggggcaaggacgagaaatgcgcactcgctcgggccagagcagaataaaagttcgccccgcggagactcacccacgccgtatttctcgtgctccgtaggtatccacatggctaaaggggctccggggtcttcaggctttgtaatccccgcgccccttctccggctcacaacaatgcacagtccccgagcagcgctgcagtgccggagcccagcggcttcgcgcgggctgcgggcgctgggcaggatctgcgctggaggctcccgagcccagcgttgacactgcgccgcccgcagctctcccggcggcggctgctcacagtcctccgacgcgctcccgggtacccggcggcgcagtcattgttctgattcactgaactaagcgaacacgccggggcactctccggcgcacccccgcccgccagcgcctagtccagccctcccgtcccagggccccgcagcacgctgggaattgtagttcttggcctccccatcccggaagtgggcgcggcaaatgtggttcggggcggggattcagttttactgattgcgtcctattggtccagagcgcggcgtaggtgtggagaaaacattacgtcgacggggagttcgcctccagtagcgtttctactggtgccaccccgcctccgacccgccctgcggccctcccttttcttttctgccgggtaatggctgcttccaagacccagggggctgtcgcccgaatgcaggaagaccgtgatgggagctgcagcacagtcgggggtgtaggttatgggggtgagtacggtgccccggaggcgcggctgatgtgtcttcctttctctatgaccgggtgtgcaacggacctctggtctgaccctaggagcccttcagctctggggccacctgggttcgactgggccccacgggtggtggcccagcgggatgggttggagccggtggcggctacttggttggggctgcccggggatggcggagaaaatgccatgggatggcggagaaaatgccatggaatggccttcccctccgccggggaagctccctgagcgtttgtcttctggtttggagctcccagctttgagctagctgctgagtgggtttggttcagatctggttcgcgcgcgtgtgtttataattttgggattagcagctctttctcctcaccagtacactgccttggtttgcttggtttgacctcgcaggtgtgttttatttagcttccggagtatttccagtcgcagactggtggtcactgctctccactctacagatttgcccagtttgtggctgaggt

SEQ ID NO: 13829 - DNA, 1196 bp, Artificial sequence
  DNA replication origin
cggacgcgtgcccggtgtttctgaggcgggcgcatgcccggtggctctaaggcgggcgcgtgcccggtgtttctgaggcagccgcgggcccagtgtttcagaggcggacgcgtgcccggtgtttctgaggcgggcgcgtgcccggtgtttctgaggcggacgcgtgcccggtggctctgaggcagacgcgtgcctggtatattgggagaacagcatagaacaaagtgagtgggagcaacgagagcaataagaaataaattagaaagctaaatcagctgagttaaataagtaataagttagataagttagataaccggttagaaccagttccagtttgaagatagtaagaatgagaagcttctgaaatatcgttggagtgaatatatccagtgggagtgggctctttgaatctggactttattaagcaaatatttcttgagcacgtgctatgtgctagacattgaaataagtgctaaggacatagaggtgaccccagacacagttattcttgtcttcaaggatctcaaaatcagacaagtaagcaaatgctgacaatacatacataactgcaatgataaggaataggaacaccgggcaccgggtatggtgtgctggggagggtgtcgaaggggcacctaacacaattattcggagtgagggggatcagggaagttttcctacaggagtgacctctaagccaagacttgaagtagaagcagtttgctccacaaaggagaaaatagtctgatttcttgacaagtgtgagaaccactgtgctcccaaacaatctacatagacctaggataagtaacaagacagacatttacatggggttgctgcttttcaaggcactgtccacatattattttatgaggccttcacgacgatcctgagaagtaagcagtgcagggttattatcaccattttacatgtgaccaggttgaggtccagagagatgaaatgactccccgaggacacaagaccagtacctgccagaaccagggcccgaatgtggttgatacatatgcagcacttactatgtgtccggcaatatattaagcactttacaagcagtaatctatttacttctgacaaaagtcctatgccatccccattttacagatgaggagactgaggcacagagaggttacaccttgcccaaggccacacagctagtaagcggtgaagccagaatt

SEQ ID NO: 13830 - DNA, 881 bp, Artificial sequence
  DNA replication origin
acgaactccacaactaagtagacgaaagcatccctttttttggggggggggggggatggggggcacataaccctgaaccacggtccaattacaggtacagtactgatgatggcttaagtagttcatggaactagttaaaactaaaaccatggaaatgttacccaggagaggtaaggctgcgtgcctggcaggtgccgcagggaagtaggggaaaggttaaggagaacaccagcctccggagaaagagaagcaaaggtgattgcatagctgccagctggaagccgactctcgtcatagggcatactcgccccactgtgcatcgccggtgcctacctcacccagttccaaggcgggggcgcgccgaggcaggggtggggtcaccaggagaaaagcaagtgggcagaaaagcccgttgggaagagacggctgggaggaggccccggccccagccttactacgtttcccagaattcagtgaggccacgaagacaggctccctgggcgcggacggaagactggccgcatgggatttgtaggtaggatccgcgccccgcccgacggaggcgtccagtggggaggtgtgcagggattggttgggaagcgctcaagccccgcccacagagtgacgtcaggtggcggtattgctacttaaggcgtcgtggcctcccctgccccgccttagctcccgcgctagagagaaacatgtatcgttttcgatcacagctcttcacggggatttctgctgccgccaccgcccactcttacccccgccgcttctcgactctgttgttagccgaagactcgcctctcagccgcccgccgcacagacgcacgagtaaaaagtgcagctccatcggctgatcctcgctaagctccgactct

SEQ ID NO: 13831 - DNA, 1180 bp, Artificial sequence
  DNA replication origin
tgggggtaaggtcacagatcaacaggatcccaaggcagaagaatttttcttagtacagaacaaaatgaaaagtctcccatgtctacttctttctacacagacacggcaaccatccgatttctcaatcttttccccacctttcccccgtttctattccacaaaaccgccattgtcatcatggcccgttctcaatgagctgttgggcacacctcccagacggggtggtggcctggcagaggggctcctcacttcccagtaggggcggccgggcagaggcgcccctcacctcccggacggggcggctggccgggcagggggctgacccccccacctccctcccggacggggcggctggccgggcggggggctgacccccccacctccctcccggacggggcggctggccgggcggggggctgacccccccacctccctcccggacagggtggctgccgggcggaggggctcctcacttcccagacggggtggctgccgggcggaggggctcctcacttctcagacggggcggttgccaggcagagggtctcctcacttctcagacagggtggccgggcagagacgctcctcacctcccagacggggtcgaggccgggcagaggcgctcctcacatcccagacggggcggaggggcagaggcagtccccacatctcagacgatgggcggccgggcagagacgctcctcacttcctagatgtgatggcggccgggaagaggcgctcctcacttcctagatgggatggcggccgggcagagacgctcctcactttccagactgggcagccaggcagaggggctcctcacatcccagacaatgggcggccaggcagagatgctcctcacttcccagacggggtggcggccgggcagaagctgcaatctcggcattttgggaggccaaggcaggcggctgggaggtggaggttgtagcgagccgagatcacgccactgcattccagcctgggcaccattgagcactgagtgaacgagactccgtctgcaatcccggcacctcgggaggccgaggctggcggatcactagcggttaggagctggagaccgacccggccaacacagcgaaaccccgtctccaccaaaaatatacgaaaaccagtcaggcctggcggcgcgtgcctgcaatcgcaggcactgggcaggagt

SEQ ID NO: 13832 - DNA, 901 bp, Artificial sequence
  DNA replication origin
gcccctccgccccgtctgggatgtgaggagcgcctctgcccggcctcgaccccgtctgggaggtgaggagcgtctctgcccggccaccctgtctgagaagtgaggagaccctctgcctggcaaccgccccgtctgagaagtgaggagcccctccgcccggcagccaccccgtctgggaagtgaggagcccctccgcccggcagccaccctgtccgggagggaggtgggggggtcagccccccgcccggccagccgccccgtccgggagggaggtgggggggtcagccccccgcccggccagccgccccgtccgggagggaggtgggggggtcagccccctgcccggccagccgccccgtccgggaggtgaggggcgcctctgcccggccgcccctactgggaagtgaggagcccctctgccaggccaccaccccgtctgggaggtgtgcccaacagctcattgagaacgggccatgatgacaatggcggttttgtggaatagaaacgggggaaaggtggggaaaagattgagaaatcggatggttgccgtgtctgtgtagaaagaagtagacatgggagacttttcattttgttctgtactaagaaaaattcttctgccttgggatcctgttgatctgtgaccttacccccaaccctgtgctctctgaaacatgtgctgtgtccactcagggttaaatggattaagggcggtgcaagatgtgctttgttaaacagatgcttgaaggcagcatgctcgttaagagtcatcaccactccctaatctcaagtacccagggacacaaacactgcggaaggccgcagggtcctctgcctaggaaaaccagagacctttgttcacttgtttatctgctgaccttccctccactattgtcctatgacc

SEQ ID NO: 13833 - DNA, 766 bp, Artificial sequence
  DNA replication origin
gtctgggatgtgaggagcccctctgcctggctgcccagtctgggaagtgaggagcgcctcttcccgaccgccatcccgtctgggaagtgaggagcgtctctgcccggccgcccatagtctgagatgtggggagcgcctctgccctgccgccccgtctgggaagtgaggagcccctccgcccggcagccgccctgtccgggagggaggcggggggcagcccccgcccagccagccgccccatccgggagggaggcagggggcagcccccgcccggccagccgccctgtccgggagggaggtggggggtgcctccgcccggccgccaccccgtccaggaggtggggggcgcctctgcccagctgccccttctgggaagtgaggagcccctctgcctggccaccaccccgtctgggaggtgtacccaacaactcattgaggatgggccatgatgatgatggtggttttgtcgaatagaaaagggggaaatgtggggaaaagatagagaaatcagattgttgctgtgtctgtgtagaagaagtagacataggagattccattttgttctgtactaagaaaaattcttctgccttgggatgctttaatctataaccttacccccaaccccgtgctctctgcaacatgagctgtgtccactcagggttaaatggattaagggcggtgcaagatgtgctttgttaaacagatgcttgaaggcagcatgctcgttaagagtcatcaaccactccctaatctcaagtatcgaggg

SEQ ID NO: 13834 - DNA, 1054 bp, Artificial sequence
  DNA replication origin
gttatagattaaagcatcccaaggcagaagaatttttcttagtacagaacaaaatggaatctcctatgtctacttcttctacacagacacagcaacaatctgatttctctatcttttccccacatttcccccttttctattcgacaaaaccaccatcatcatcatggcccatcctcaatgagttgttgggtacacctcccagacggggtggtggccaggcagaggggctcctcacttcccagaaggggcagctgggcagaggcgccccccacctcctggacggggtggcggccgggcggaggcaccccccacctccctcccggacagggcggctggccgggcgggggctgccccctgcctccctcccggatggggcggctggctgggcgggggctgccccccgcctccctcccggacagggcggctgccgggcggaggggctcctcacttcccagacggggcggcagggcagaggcgctccccacatctcagactatgggcggccgggcagagacgctcctcacttcccagacgggatggcggtcgggaagaggcgctcctcacttcccagactgggcagccaggcagaggggctcctcacatcccagacgatgggcagccaggcgagacgctcttcacttcccagacagggtggtggccgggcagaggctgcaatctcagcactttgggaggccaaggcaggcggctggaaggtggaggttgtagccagccaagatcacgccactgcactccatcctgggcaacattgagcactgagtgaacgagactccgtctgcaatcccggcacctcgagaggccaaggctggcagatcactcgcagttaggagctggagaccagcccggccaacacagcgaaaccccgtctccaccagaaaaatatgaaaaccagtcaggcgtggcagcgcgcgcctgcaatcccaggcactgggcaggctgaggcaggagaatccggcagggaggttgcagtgagcggagatggcggcagtacagtccagcttccgcttggcatcagagggagaccgtggagagagag

SEQ ID NO: 13835 - DNA, 1085 bp, Artificial sequence
  DNA replication origin
ccatccgatttctcaatcttttccccacctttcccccttttctattccacaaaaccgctattgtcatcatggcctgttctcagtgagctgttgggtacacctcccagatggggtggtggccgggcagaggggctcctcacttcccagtagggacggatggggcggctggcccggggggggggggctgacccccccacctccctcccggacggggtggctggccgggcgggggtctgaccccccacctccctcccggacggggcggctggcctggcgggggctgacccccacctccctcccagacagggtggctgccaggtggaggggctcctcacttctcagacagggcggctgccgggcggaggggctcctcacttctcagacggggcggccgggcagagacgctcctcacctcccagatggggtcatggccgggcagaggtgctcctcacatcccagacggggcggcggggcagaggcgctccccacatctcagacgatgggcggctgggtagagacactcctcacttcctagatgggatggcggccgggaagaggcgctcctcacttcctagatgggatggcggccgggcagagacgctcctcactttccagactgagcagccaggcagaggggctcctcacatcccagacgatgggcggccaggcagagacgctcctcacttcccagacagggtggcggctgggcagaggctgcaatctcggcactttgggaggccaaggcaggcagctgggaggtggaggttgtagcaagccgagatcatgccactgcactccagcctgggcaccattgagcactgagtgaatgagactccgtctgcaatcccggcacctcgggaggccgaggctgacggatcactcgcggttaggagctggagaccagcccggccaacacagcgaaaccccgtctccaccaaaaaaatacgaaaaccagtcaggcgtggcggcgcgcgcctgtaatcgcaggcactcggcaggctgatgcaggagaatcaggcagggaggttgcagtgagccgagatggcagcagtacagtccagcttcggctcggcatcagagggaga

SEQ ID NO: 13836 - DNA, 801 bp, Artificial sequence
  DNA replication origin
taggaagtgaggagtgtctctacccagccgcccatcgtctgagatgtggggagcgcctctgccccgccgccccgtctgggatgtgaggagcacctctgcccggccatgaccccatctgggaggtgaggagcgtctctgcccggccgccccgtctgagaagtgaggagcccctccgcccggcagccgccctgtctgagaagtgaggagcccctccacctggcagccaccctgtctgggagggaggtgggggtcagcccccgccaggccagccgccccgtccgggagggaggtggggggtcagacccccgcccggccagccaccccgtccgggagggaggtgggggggtcagccccccccccccgggccagccgccccatccgtccctactgggaagtgaggagcccctctgcccggccaccaccccatctgggaggtgtacccaacagctcactgagaacaggccatgatgacaatagcggttttgtggaatagaaaagggggaaaggtggggaaaagattgagaaatcggatggttgctatgtctgtgtagaaagaagtagacatgggagacttttcattttgttctgtactaagaaaaattcttctgccttgggatcctgttgatctatgaccttacccctaaccctgtgctctctgaaacatgtgctgtgtccactcagggttaaatggattaagggcggtgcaagatgtgctttgttaaacagatgcttgaaggcagcatgctccttaagagtcatcaccactccctaatctcaagtacccagggacacaaacactgc

SEQ ID NO: 13837 - DNA, 1870 bp, Artificial sequence
  DNA replication origin
ggctggggacaggggcttggagggggtggggactcaattcctttacaggcctagaactctcccgaagggccctcaaagaaaagggggcggggaggagcgcgtctgatgccgactagggggctcagaccaggcccgggagagcagcagcggctggggggacgtgcagatcctttacattttaatggtggcctctttggaggagggaagaggtgacaagcggttgggggtgatgaggcctccccttcctccctcactcagcgcgctgtttaccttctcggtacttcttgcggagccgccggtggacgctcttcaccacaccggagagcttctcctgctccagtttccgctcctgctcccggggcggcggagtgttcggggacccggccctctgcgcacgagcagtatttcggccgccggcccctggctccatatcgcagccgccgccgccgccgccgcccctcaggcccccgcagacgctccccagatggaggaggtggggtaggaggagggagctgcggaggcagcagccagaggaggcagaggaaccggagcgacagccttggaggtggaccctcacccaaaagtgcaaactgattggtggattttgagggctgggcggaaacggaaaaggctaagggccaatgggcagaaagcgccggcggcgaacccggttgtttgggaaggcgagcagctggaggaggcggagcttgcggggatagggaggctgaggcagtgggagctccaggcctgggtgctcatctcttccccaccctccccggattctgtgcgcaggcgctgtggctcggcctcgggagacgagctgtgagcaacgcgcttgcgcgtctcagtttgcttagtttgggcttttttacagctcggctttctgatgtcttccatcattttcatcccctacactttataatctgttgcgatgcggccagggtgctctgcttgaacctccgctgcaccttgtcacatgtaggttccctttagttacttgcgctttgagatgacgttacacttcagggacctcaagcacacaagcattctaaggctcaaggagaggtctggctaccaaatgctaatttaattctcaggtcgacaatggtttatgcctgcagtactactgctgggcaaaggacatagaaaatgcgaaaaggagagggccaagaaaagcaacaggagatgcaggaggacaataaggaacgatggaaaactcacagcagatgccctcaagaacttttgtagtgaccacggtgttaataagcagccttccctgatcttattcgcatcagcactctgagcttttatggtcagctcaggtgacctcctgtcctttaatttggagagttagtctatgcggagtgtatctaagtgggtttggtaacctgttcaccctcctccacttcttttccatctcttggggaacgcgattgttgacttctgtcccagaaaggtggaacactgctctctggagagaggtagactgcattggctcctgaagtggtactgaggctgctggagtgtcagagattgaatagactgagagcccctaatgagttgtgttggattgtgtaccacttccccattgcaggtgttggttacgtgacagtctatggaaatgattgcaatggtaacattttgataatgattttctaactacgaataaagcttgcattatgtaactgttttatatgctaccttctttatattgaatacgctgaagagcaaagaattatacacactgtctaggacacaggagaagcgggaggtgaagggagattgatggaatttaaaggcggaagatgtgtccctacagcacagtgaagagacagatcaaacacaaagacaaggacatataaacttcaaa

SEQ ID NO: 13838 - DNA, 1157 bp, Artificial sequence
  DNA replication origin
gaaggggccgccaagctgggacttagagagtctgaggttttcgggaagggtcctatcagtgactgaggggagcaaaagtaaccggaaagaaaggaaagaagaaacggtcagagcctgctccgcgcgcacttcaaagccgaggcgcccgcgtgggggatgcacgggcccagccgccagccctgggtcccggcttctatccaccgggtgtgacccggctgggcggcctgcttgggacccagggcggtgacaggggaaaggccgagggaggagagagcgggccccggaggggacgcacgaccggaatcttggcgaggggcttcctccggagccccagcccagaggggggccagcgctccctccccgccgtctccctccggtccctcccctgcccgcgggccgggcgactcttcgccggccgccttttccgcgcgccgcagactgagcccgctgctttgctcgcaagtcagtcgcaaagcgtggcgttccgagaggcgctgaaactttcctccaaatagctgcggccaataggccgtggtgaacagagcctggcccccggctgcttcccggccctcctccctggggaaagaacggccaacttgaacccctccggtggcagaagagggaggggtggtggtggttggggagacgggcgaaccgcactaacttgtgcctttgaatctttcctttcctgaaagagcagcgcgccctttctctaaagggcagtcgcgagctcacacacacacttggcaccaaccctttccttcagaacccgcggctctcccagggaggaagcagccctggcacccacgtcggtaaacacaccgtcagggtttttttagtgaaaccaattaagtcaaaaagccatggggctggccctgggaagatggcccctgccaggaggaagaggaacgaggtagagttggactttgaattgcggttctttccctgagcttttcaactccggcagtcctcaagtgctgtgcctacagactgtgttctcactcttttttaaatcgtctattttgaaatgcaggctgaacagtggacaaataatccgaatcttttaaaagtgggagcagagacagaaggaggaacagtcattatcattagaaaacgccagccccaaatggccctacctcgcccttttgaaaggtggg

SEQ ID NO: 13839 - DNA, 1278 bp, Artificial sequence
  DNA replication origin
agtcgcagctcggcccagcgtggaggtggctgggacagggtggggtgcggaggtgtagcgcgccagagtgagggccaagaaacttaccgcgaccggggacgccgtgggcagcgtcccgggaggtggcacccgcggcggcgaggcagaagcccccaaacaacacacccacgcgcgagtccgggcagctgctgccgcgagtggggggcgcgcccggggagggggggggccgaggaagccgcagccagcggacgcggccgccgcataaataaccggggcgggcgttcgcgggcgggctgcgggtggcgcggggctagagctagggcgaagcggcggccgcggagctgcacgcgccggcgtgtctcgcgctttctcggaggctcgcgctgtctcgcgcagccgctccccccacccggatctgtgtgtgtgtgtgtgtgtgtgtgtgtgtctgtgtgtctgtgtgtgtgaatgtgcgctggcaggcgcgcgcacccggccgcgcgcgcgtgttgttggcaatgcgaactgtacacacactgctcgcggggctgcctctcctcggaggggcggggtgggggacaggacgccgcagaggattctgaagtaccgccggaccacttgtttgttttgttttactttgcgttgttattgtcgttgttgttgttgataggtttggaaccagctggttaggatgcctttctcccccgtccacctatctccccccgttccctaacttctttaaggagggggaaacgcggggaagaatattgttcggatttgcagcggagcctcctggctgacgtcaggtccacctgctatgtaaacaacccgctggagaacttgtttgtgctacgccagaccttcccccacccccacccttctccccacctcctgctccgccttctccagctcgccccagacggcgagtcagggaagggggtggggagggaggcgagaacaaaaccgtatgctgtattggcaaagccgagttgtgtctgctgcttcttggcagtccccaaagtacgtcctctcagcagacggagctgctggcaaatgaaacaggggattccacttgaagtgcagaaagcctcgaagggatccaaagccctcggtggcagggagttaaaagtacatggtagtcggaaagggagacccgagcgtgcgttaaagcgctgattggcctttcttttcacggtgtgcgcctctgcggcctggggtggagagaggccgagtgtctttctcttcattgttgccctggttcctgtctcacttgggccaagg

SEQ ID NO: 13840 - DNA, 1202 bp, Artificial sequence
  DNA replication origin
gggccgcgaaggtgcgtgcggcgctcggtgattggcggcggcccggagctgcccggctgccattggctgcccggccccctttgttcccgggtccgggccgcaggcccgctgcggcggactgggcggcggaagttcgacggcgccgggcgagtggctgttgagcggcgccgcgggagttccgcaggtttcccgtgttcgcagcggagccggaggccagctgaacccggccgtgggatcccggataggaggaggaggggacccataggacgcgttaacatggacctggaaaacaaagtgaagaaggtaggggggcgctcgtggcgggcggcggctgcttcacctgcgcgggtcgcgcggcgcgcggcggccggaggtgccgaggtgggtggggctcgcgggccccccggtgtgagcccggctctgggtctgcggtgccccgggcccagggacctggccccctgggtagaggaggtgctcggcggccccgccagctccccacactcgggagcgacagaattggaagcgcgagcgagggcgggcgcgggactcttctctccagtctcacggaatcccagtggttgtaggtgttggaaactttacttaagatgtttcagctctgcctgtgcctcctcaaaaggaaaggacgagcttagggcgagtgcgggcgagaccgtgacacttcctggctcaggaagttgaatttcattaagcctttgtggtttggggctctgctgtgctttgacagctctgatctcctcccttccggctgggctgtctggggcgctctaaaatgagtgttgatttaatgcactgccttcgcacccgtgctggtgataacttctaatgtgatttttttttcggtcattcattacttgtctaccgaccgaggcagtgcctccctcttagggaattatctgtcaaagagcgcattctccttgtttggcaggtagtcccaaagggcggttgtcaccagcgtctcagcgcagggagacattttcagcttggctgctgcctcgcaggcactggaaccgacggccctacctgagccactcccgggttatgcggagcctggtgtcgcctgggagaaaagggtggggaccagactatgactcagaaggaatgctgatgtcacattcgagtgaattgccctgtgcgaaagttctcctcgttccaggggatttgctcatgttttactttgtggt

SEQ ID NO: 13841 - DNA, 1646 bp, Artificial sequence
  DNA replication origin
ttgggcccgcccgccccgggcttcaccttgagatgcgagttgagccggtggggatcccggtcctggtccgagtccgcgaacttctcggggtcggcgtactcgaggccgctgtggtggctgtaggagtcgtcgtccatgaagagctgtacgtccgccttctccgtctccagccccatcgcagccttggtgcgcggccgctgcagcccggctggcgcggtgcggctcccggtccgcgcggcctccccttcccgtagcgcccggccccgccccccctcgcctcgcctagccctgcgaggcccgggcggcggccgcttcccgctgtgggctccagctcccagcccggccgtcccgagccccgccccggcgccccgccgcccctccccgcccacctcccccgccggggcgcagggaaccgtccccacgagtcacagcccgggccctgcagtgggcggcgacgccggcagctgggacgaggagggcctcctggtcacccttctgggggcccgtactgtcatgcctcagagctggcaagtcgtcccagggaagacaacggccttcctggagggagggaaccttgtggttaggcgcatggggtgcgaagcaggtatgtgctcacctccggctgtgtttgccttgcgtgctgcggctcatggtgctggtattgagcctctgggaacctcagctgcctcgttggcaaaatgggggctgtggcatctgtttcaggggtgtccgtgagaattaaatgttaatttcacataaaattctaacacacatggcccatggcccgtaacacacagtgataaacttccaatcaacgttgttgctgctgtcgtgagaggtaaggagccacaatgtacctgagtgctaggtacctgagtgctaggtgacctgcaagtgcatgtggagttgggtaggcgaacgccctggccctagagtttgtgccttcagatctgaggtgtgaggggagatctgattttttttttttttttttttttacttcctaaactacaccgtgtgtgtgtgtgtgtgtgtgtttgtgtgtgtgtggcagagtttcgctcttgttgcccaggctggagtgcaatggcacgatctcggctcatcgcaacctctgcctcccgggttcaagcgattctcctgcctcagcctcccgagtagctgggattacaggcatgcaccaccacgcctggctaattttgtatttttagcagagacggggtttccccatgttggtcaggctggtttcgaactcccaacctcaggtgatccgcccgcctcggcctcccaaagtgctgggattgcaggcgtgagccaccgcgcccgacctccaccttttaattttcttgtgaaccagactgtcttgaaagattcaggaacttctaagatgcagtcacatctgtgattatcttgcaggcagcacggaaacagaaccctaacacaaagccacattgcaatggatgaattagcctgctgaccactcacgcaaaggttttcagaagggaggagtttgcatgttcataaagggctttagggtctggtagacatatacgtgtgtttggggaggaagggcacttagtgaaaatttgccaaaagcaaaacaatgagaactaggcttgaggtgcaggttgctcagagctcaaagtagg

SEQ ID NO: 13842 - DNA, 1371 bp, Artificial sequence
  DNA replication origin
ggaggtgggcggggaggggcggcggggcgccggggcggggctcgggacggccgggctgggagctggagcccacagcgggaagcggccgccgcccgggcctcgcagggctaggcgaggcgagggggggcggggccgggcgctacgggaaggggaggccgcgcggaccgggagccgcaccgcgccagccgggctgcagcggccgcgcaccaaggctgcgatggggctggagacggagaaggcggacgtacagctcttcatggacgacgactcctacagccaccacagcggcctcgagtacgccgaccccgagaagttcgcggactcggaccaggaccgggatccccaccggctcaactcgcatctcaaggtgaagcccggggcgggcgggcccaagtccccgctgaggccgggaggtgcgggcgcccctcagccccgccctaacccgtcccaccattgctaccgggtcggccccgcagggtctgagacccgcacccttccccggtcccacccgtcaccaggccgcccgcgtagccaggaattcttagccaggttcctgtgcgcccaccgtgaccctaagagaagaggcggacgccctggcacgtccttccctcctgcttcccccgcccaaagcgctcccggttcccggggcgtcaggttggctgacagttcggggtccctgcgtcctgtctcctcagctgggcttcgaggatgtgatcgcagagccggtgactacgcactcctttgacaaagtgtggatctgcagccatgccctctttgaaatcagcaaatacgtaatgtacaagttcctgacggtgttcctggccattcccctggccttcattgcgggaattctctttgccaccctcagctgtctgcacatctggtgagacggggcacaccgggtggaccggctttctgaaacatgggcatattctccgccacctgccccctactctcctcttatcccaggccggcgtcaggaggaggaacgcgcatcagttcccaagcagtaggaagaactggaaggccttgaaaggcaatgcgcttcctttagaataacagtttgggcttggagtttcaacaggagaaagaatgtcggtctttcctggggtgtgattttccttgcatacataaggctgggctgagtgtggaggcgggtacctggaagccacacttcttaccacaggctgctctcggggccctgttgtgactcgtacctgcggttctgggcaggactcttctttctttcattgccttttattcagtcactgcctgtgcttggggtaaaacaaaagtgatctctgagcagaatgccgctgacagtagaattggatgaggatgtcagacctggttaagcagtagtgtggaggg

SEQ ID NO: 13843 - DNA, 1075 bp, Artificial sequence
  DNA replication origin
agccacgggccagcatgtctgggggcaaatacgtagactcggaggtaggcatccgtgggggggcgccggctcgggcgtgcggggagtgtccgcttctgctatctgcctctccaaatatcccgactgctgccctggccccagccctctctccacttcggagcactcctctggcgttggcaccgctgaggaatgggcctgggcggggaggtgaagagaagccaggaatgttttatgttttcctaatggagagggggcctagggagcccctgagctaggaggacacggaaaaggggattggggtcctgagattgggtctgttgggcccaggacgcgttttctggatgggtctaggatgctcccttgtcgcgggacccccgcggtccggccctgcctgctgggggttcgaagaggtggagtgcagggtggaggtgttatttacccgagtcctggggacagtccccgggactctccgccaggcgcccagaccggcaggtcccgcaggcggcgcgcggtgtgtttgcactttccaaagttcttgaaccatctcaagaactccttctgcatcttggcgtctggcaggggtgttccgagagaggtagacctcccctccccaaactgccaccatcacttccaacgccctccacgcgctggagctctgcccgggtgtggaaacctcgtcttccaacacgtagctgcccttcagccacccgcccgcagcctgggagtgccctgagggtgggtcgggggagctgcgcaggtgagactgagttctaggacatttagggggtctggtgcctggctccgccaaaaatggggactttcgggattgtgatcatcacggcggattgagcagggagagccgtggagggacaagagagggccgaggcagggtggggggcgcgggcaggtgcgagggggatgcggccaagaagcagcgataaagggaacattccacgggtcgggcggctgctgttggatcttagataaagctggaagggattaccggggcaggggtaatagggaccggggacgggaacgcgaaacaggtgaagcgctcagggcgagagcgactcgg

SEQ ID NO: 13844 - DNA, 1026 bp, Artificial sequence
  DNA replication origin
tctggtgcctggctccgccaaaaatggggactttcgggattgtgatcatcacggcggattgagcagggagagccgtggagggacaagagagggccgaggcagggtggggggcgcgggcaggtgcgagggggatgcggccaagaagcagcgataaagggaacattccacgggtcgggcggctgctgttggatcttagataaagctggaagggattaccggggcaggggtaatagggaccggggacgggaacgcgaaacaggtgaagcgctcagggcgagagcgactcggcttagggagtccgggagaagcctgcggctgccccctcgccgccgaggtcctgcgggtcctgcgggtcctgcgtgctgagccggggcgtgcgcgggcgggggccttcggaccgcgcggcggggcctgccctgacccctggcggcgggcgggggaggcaggcgcgccctgcagagtacagaggggtgtggtgtcctctgcgagatcctcttaaaaagctggctacgcgcaggcggtttctgtgcacggagccgtagctgtcggagcggttagttcgatttcgagctcgaggtttcccccgccgccaggctgacttctcatcgcttgtttttctttttgcatttttcctcccaccgccgttgccgccctccccgtcctggccgtccgccctccgccctctgcagggacatctctacaccgttcccatccgggaacagggcaacatctacaagcccaacaacaaggccatggcagacgagctgagcgagaagcaagtgtacgacgcgcacaccaaggagatcgacctggtcaaccgcgaccctaaacacctcaacgatgacgtggtcaaggtaagccaaggcgaccaacagggaagggctgggacagctctcctctggcagttagcccgtgcatccttctttagcattgccgtgtacgcacaccccaccccgccccctacacgcgcacacacacacacacacagagttttgtgggtttgatgtgtgggagctcccgcagtcg

SEQ ID NO: 13845 - DNA, 1536 bp, Artificial sequence
  DNA replication origin
gggggaggagagcgcgcagccagggcgagaaaacttctccacctagaaagtttcaccttgtcgtgggcggggcagaggcgggaggaaacgcgacccccgcggggccaggcgcggcgcggacggcaggaagggcgggggccgatttccctctgggtggtgccagtccccacctcagcggtcctcggaacccgcggactaggggacggacagcacgcgaggcagacagacacgtgctggggcgggcaggcgagcgcctcagtctggtcgcctggcggtgcctccggccccaacgcgcccgggccgccgcgggccgcgcgcgccgatgcccggctgagtcactggcagggcagcgcgcgtgtgggaaggggcggagggagtgcggccggcgggcgggcggggcgctgggctcagcccggccgcaggtgacccggaggccctcgccgcccgcggcgccccgagcgctttgtgagcagatgcggagccgagtggagggcgcgagccagatgcggggcgacagctgacttgctgagaggaggcggggaggcgcggagcgcgcgtgtggtccttgcgccgctgacttctccactggttcctgggcaccgaaaggtaaaattgcagcccctttcagatccagtacccaatccctcgcctcaggggttctgctttctttgttcccctaagagacctgactgctgttccagggggcaaaaccacgtaggtgggctagagtttaggggcttcggaaactgaagagacgtggccacggcgaggacgaaactagaatggggcttgtctttttagggggttgcttctgatggccacctgtatgacttaggagggagaggggcgctgggacagtgggtgatgtgtgactgttacggcccagcaagttttaaagctgggatctgactcagcccttacaaaagggatccggtcatcctcgtcccaccgtgatgcagctggcaaggtttgagccgagctgtttccttgttcccagccttgctttatctgtgttatgttggggtccttccaaggggcaggtgtttctgtgaaagtctgaattcatttctggcaatcacgcggggcttgtgatccatcaattttccatcgtaccttatctctttctggggcttgtggtggacatctatcttattaggtgaaatagattataaccagaggctgagcgatgtggccagtcgtagtgctgacccgataattaaagcaccagtgaaagtactttccctgactattgtcaatgcagaatttactccgaagtacggtttcccattcatatctttcatgttttaaaagagccatttgctaatttggcagttggagagggctccaatggctcacgcatgaatagttgcccagtgtattttaccttatcacagttttatgttcaaaggagccctcgggcagaatgaaatattgtcaactctcttaggcaaaataatcaagatactttaattgctatgttaagatggtccatgaatgtgagaggattgtaagaactgacgttggaggcaatataga

SEQ ID NO: 13846 - DNA, 812 bp, Artificial sequence
  DNA replication origin
acggaaacggggaagtcaggtggccgctgccgccgccgccgccgcggtttgtcgccagaaggaagatggcggatctggaggagcagttgtctgatgaagagaaggtaagagtcgcgggggcgacggcgcgggctgtcaggagccggctcagcccgggcgggtgggcccggagtctggtcgcgggggaagggcattggcccgcagctggccttgccctcggctgcccttcctcccccatccttactgcgcccagtgcctgcccctgtccgtcacccgaggccccgcgcgggggcaggtctctgccaggcctgctcgctccgctccttgtagggtgtgtactccgaaaataggaagcgggagccgggcgacggcgggcgggggcgcgggcgcgggggagggcggcggctgcccaggaccctctcctgctgtcgggccgcggggcctccgccggggccggggaccggggaccagggacgcaaaggggtttgcgtccgtgcgtgggagcggcccaagggcagtgcccagcgcggcggcctggcctgtgagtgtagcggcgggtgaggggaagggaaaaatcgcttaggaagcagaccttcacttctcccttctacttccccctcctcaaagcaaaatgcttccttttctgatcctctacggtttatccttttttttccctttccccatggaggcatctctccctccttctctctttcctttcgtggctctagcagtaagcttgcagctcccatgttccccaggaggcagcggagttgctcacaaaaagacgaccccctccccatagttgttttctg

SEQ ID NO: 13847 - DNA, 737 bp, Artificial sequence
  DNA replication origin
ttaagacctcggaccccagaatacaccactgcaattgaattttggttccaccttaaggtaaactacgcagctgctgtgagcctcagtttccctacctatagaaagaggatcgtagtggggaattgttgcaggggttaaatgagattgtacggatcgtggagcagcgcctggcgtgtggtaaacgctcaacttatgcgggttgtaactgcctgaggcgtttccttcggcgcgccacttggccttctctttctaaatattagcataataaatataaatggacccagaacgcgagggggcaggggccacgtgatcgctccacgaaagccacttgtagggacctttagagagttagcaataaggctggagaaggaaaagccggcgcgcccgcggcccgcgcgatttcccgccgagcccgcgtccccggcggcgggcgggctccgggggcgcccgggccgcggcggcggcggcggcgcgagctgcgcctccgggccggtgaatcatcccggcagacaccaagagccgcggcagcagagaggagcgctgaaacatggctgaagcggccacgggctttctggagcagctcaagtcctgcatagtttggtcttggacgtatctgtggaccgtgtggttcttcatcgtgctattcctggtctacatcctgcgggtgcctttgaaaatcaacgacaacttgagcacaggtaaggcctgggagccgggcccgcggcgcccacccctcc

SEQ ID NO: 13848 - DNA, 871 bp, Artificial sequence
  DNA replication origin
ccaggcgcgcgctcggggacgcgccggggcccgcgcaccggaggcccgcggctacccgccagcaacgcggcggcttaggcggcggggccgggcagctgggcgcgcgggggcggccggtggccttcacggccccgcggaggaagagctgcgccgcgcacagcccgcaaggcgggccgggccgggccggcagccgccctgctgcgtcgctggtggtcgggagacggagaagaacgggtgtcgcgggcgaaggagttcccaggacaccccctcgggtgtctgcgccggaactccgagggttccccggagttagaccgagtccttcctcacgccctcccggctgtgggtgccaagcggccgaagtgtggtcggggaggcgccctcccgcccggccgcggaggcccgagggcggctgccggagggtgctcggcggcgaagccccctgacccggccgggctgtccgggcggcgccctccgtggcccggagttgcgtcttgccgggcgtggggctgtctctctggttgggtagtggggagaggggttcccgaaggcactcttgggagtgtatggatgacgtgtcaggtcaccaaatggattgtcgaagggaccggagggaagaggggagagctggaatttctgagggtttcggttgcagttttcagtgatctttgctcgtctcccttccctgtaaagctacatatgctcagcaagtgccgcgtgcctcccatccttggtcggtggtaaatgcaggaggtaattaacaggatcttcacaaacttggagccagcccactgagtcgttaaaaaaacacccgcaaagaaaacacacgagccttaacactccagagagttccgaaacacaaagtaaatttcga

SEQ ID NO: 13849 - DNA, 1278 bp, Artificial sequence
  DNA replication origin
ctccgagagcccacggatgctctttggcctggagcttccctaaaggttcctgtattcgcgtgtgctcgtaaccatgcagcgatgttcccccttccccgcctcacctcatccccagacatctcttgccatcatttcatgcacccgtgtctaaaaccccgcgtttctccccacccccgccaggcgcagcaccccctccctcggctgcgcccggaggggagcagagcggacggggcgcgcgggaggcgcgcagagctttcgggctgcaggcgctcgctgcgcctggggaattgggctgtgggcgaggcggtccgggctggcctttatcgctcgctgggcccatcgtttgaaactttatcagcgagtctcgccactcgtcgcagacgcgagcggggggcgggggcgcggcgaggcgccggcggccgtgacgaggcgctcccggagctgagcgcttctgctctgggcacgcatggcgcccgcacacggagtctgacctgatgcagacgcaagggggttaatatgaacgcccctctcggtggaatctggctctggctccctctgctcttgacctggctcacccccgaggtcaactcttcatggtggtaagtccacgcgcacgggcgcgggggattttggagatcggaatggggaccgcattggccacatagacccttcctggctgcgttcccccgcggccgcagcagtctcggattctggcccgaaccctggctactgccctcttatcgccccatggtgagccccttctcttttcccagaagatcatttcagctttgacaactccataaaaccacattccccctcaaatgagagctccgatgtttggtttatttggatccagctgagcgacagcaaaatcagccaatttcttatcctgttgagagacgtgctagcctggtctccagctctagcacagacgtgtgtgtgtgtgtgtgtgtgtgtgtgtgtgtgtgtaaattcaccttgaaaactacaaccgcctcccccatcccagcccccaccccgccaaaactgcctcaaggtaaatcgacgggccaattcagccagtcaggagttgtagaacctaaagcgtgtgactttgtattatttcccgtccttccacattccaggttcaccccagtggggcggaagaacattttgctgcctccagttagagactatggctttaatgcaaagctacagaccccggggtctgtctctaagatgttaccttgttcacaaccgtccccgcgaagagtaactttgctgctttcctttgtacgt

SEQ ID NO: 13850 - DNA, 1436 bp, Artificial sequence
  DNA replication origin
cttttcctggggcggagggactcactgcccgcccgaggagcgtgctctggggaatagagtatgcgcctgtgtgtatgtgtgggaggcgaattgttcgcagggcgtgggggagggggtgccgcccagatcggaaggacgggctctccctctctccagcccaccctcgggcctggactggccagagcgtcagccctcgccggcagcgagcgcggtgagaggctggacgaggcgaagctcagagacgccaaaaacctgaaagatgctgtcatcgccacccccttcccccacgctggtccctggcaggtccggcccctcccaggctgacccagatacatccccgtttgggtccggaaagggaggggagggaaacaagcaccgcgccacccacgactcgggaagagcagggctcctcgccagggccgctccgtatcgctgggccgcgacccagggaagttctgcttggtctgcgtcggtcgggcgggaggtgcagggagggcgcgtggggcggcaggcagcggggcgggggagcgtttctgctcgccgtgtgtgcacgccggccatggggagggtatgataggcaccaaagagcaacacgcctctcatgtacttacatgcttatgctcacaaacctccttcccccgtgaagcaggggaataaacgaaagcttacctccacccttctttgtcccgcattttcttgaagtaaatccagacacttaggaaagaaaaggtggttggctccgaggaaccagaaacattgccaaaatttcacttctaccgtgaataaagtaggagtgtggatgtgtatgttgggaaaggtagacagttgtatgattctctcatggagattatgatttgaaaccacctaaaaaactccaactcaagttccacccatctcagcacatcgtgtcctcacagctaaggggtgttagaagtacatggaatgtgaccatcagcttacaggcccttgctctccgcccagggaattagtgagtggccaggagacctgcccttcagttgatggtgaggccaatggaatgacctaaacctgaaacagacctcctggaaaagaaatggaccatccccaaaagctaattaaatccacgccagaggacttcatcctggggcaggaggaggaggagtgccacatgtctcacagagaagaaattggttttggtgaaaggcaaaaggctgaaaatgttcgagtgaagctaaatccagatgtgaaaaaggggtccacccaaacaccccttcctgacctgtctagaggccgtctggactcaatgacttgtctcttccagatctgtgattccatttccctcccattctccacccctttcacttatgaaccattacttagccccagtataacttattttcctgccaagaaggcctttactccctccttgtctgtacctattctctcgatggacccct

SEQ ID NO: 13851 - DNA, 1153 bp, Artificial sequence
  DNA replication origin
agcttggttcttttctccgacacgcaaaggaagcgctaaggtaaatgcatcagacccacactgccgcggaacttttcggctctctaaggctgtattttgatatacgaaaggcacattttccttcccttttcaaaatgcaccttgcaaacgtaacaggaacccgactaggatcatcgggaaaaggaggaggaggaggaaggcaggctccggggaagctggtggcagcgggtcctgggtctggcggaccctgacgcgaaggagggtctaggaagctctccggggagccggttctcccgccggtggcttcttctgtcctccagcgttgccaactggacctaaagagaggccgcgactgtcgcccacctgcgggatgggcctggtgctgggcggtaaggacacggacctggaaggagcgcgcgcgagggagggaggctgggagtcagaatcgggaaagggaggtgcggggcggcgagggagcgaaggaggagaggaggaaggagcgggaggggtgctggcgggggtgcgtagtgggtggagaaagccgctagagcaaatttggggccggaccaggcagcactcggcttttaacctgggcagtgaaggcgggggaaagagcaaaaggaaggggtggtgtgcggagtaggggtgggtggggggaattggaagcaaatgacatcacagcaggtcagagaaaaagggttgagcggcaggcacccagagtagtaggtctttggcattaggagcttgagcccagacggccctagcagggaccccagcgcccgagagaccatgcagaggtcgcctctggaaaaggccagcgttgtctccaaactttttttcaggtgagaaggtggccaaccgagcttcggaaagacacgtgcccacgaaagaggagggcgtgtgtatgggttgggtttggggtaaaggaataagcagtttttaaaaagatgcgctatcattcattgttttgaaagaaaatgtgggtattgtagaataaaacagaaagcattaagaagagatggaagaatgaactgaagctgattgaatagagagccacatctacttgcaactgaaaagttagaatctcaagactcaagtacgctactatgcacttgttttatttcatttttctaagaaactaaaaatacttgtt

SEQ ID NO: 13852 - DNA, 1299 bp, Artificial sequence
  DNA replication origin
aggaagatggcgacggacggcgcgagctgcgagcccgacttgtcccgggccccggaggacgcggcgggggccgcggcggaggcggcggtaaccgagttcccggggcgggcgcggggctagtgtagacgcgggccgggggcggcgccggggtcccagccggacccgacttcgcacccccggggcgttccgtaagcccgggactctccggtgccccttcatcggggccccccttcctcgggatgcccacacggcggaggccgcgggggggagcggagcggccaccctggctggggatccctcctgtcccttccgcgccccacgggaagcggccccgggtcgcccggttctcccagctccctgtctgcgtccagtgcgacccctatgcccactccctccgctgcggtcgcttctggccgggggagaaggctgggacgtgtttcctggcgaatttgaccccccattgttcacctctcgctgcgcgcgtggttgccagcgcgtgtctcgggggtgcctggtaccgctcagcggacccgggagagcagcttgggggaggtgggccatcgcccagcaggtgtggggatgcccattgtgtgcatctggtcctgtgccttcgggaggcccactgggagagggccgtgtccagatgtgggcgctgctgccgctgaggccagcgctttaggtcctagcagcctgctgccccattacttggtggtagtgattggggtggggtggatggattggttcttcccgagacgatgctcaggagaggtggaggttctgcacctggtttcaagacattgttctccttctctggagtctagaggccgaatgcgctaccattcttgactggtccttactttcacccccttaatattccggtgtagagactcgctggtggtttccagcctctactttggggaagggctggacccacatttcctgggtggaaaaggttctcggtgtttgggaagcagcttcgcaggagctgcaaggagctgcagagaaaggcagatctgggagcgcctcccactcttggccagatctggctgctcccgccgaaggatggggtgggatggagcgagcggggcgtggacgcccccctcttcctatcaagacctgagcagaatcagtgcaggagagggcagggccgggcgtaaacagcgggggccgctttaacttcctcccaccctctggaggtagggctttctggagagggagaggagagatgtggaggaaggtacttggggtgagaggagctgagcctggcaatggaaggagaaacggggaggaggactgcta

SEQ ID NO: 13853 - DNA, 1607 bp, Artificial sequence
  DNA replication origin
tctgcttccgcgcagaacgcgccgctcccgcggtacatacctggccaagtgcgcgccggggcttagttgcatagagactttctcctcgccgtgcacccggaaagggaagaggagagaaagcagctcgcgagcagccgaatccgatgcgccgagagagcataaataaagctcaagcgagctcttctttcccttcccccatccctccgtgcctccctcctccttttcaccttccaaaagccaggcgcaggcgagcagagcagcagcaacaagttcaaaaggtgcgggggaggcgagaacggaggggactcgctcctgccaacttactgcggggccactgtcgcgggagcctggccagcgcggtgcggggctgcggggcggcggggctgcggggcggccgggcgggcggcgttggcgcggtggggccggggccggggccggcacgggctctcgtccgagcgcggaggcagaaggcgctcggcagcgcgggggcgcgggagggctgctagctgcttccccgccagtgggtggtcctgcatctccccgggctccccgcgctgctctgctagtgcgatcaataaataaggagaaaataaataaataaccgcgcgcacgccccgccacgcaggttaggaaaggcgtctcctgcctttccctcggcttgacctttctccgcccccgccccctcgggctcctctcgctccaccccagccacccaccaaccccggcgcaaaatgtcaccgagggagagcatccaggtggatctgctggggagaaaagcgagcctcggatgaacaaagggaagcttcacgtgctgggctgcggtggtttggtggaggagaggagaaaggggacccgtgccttgcttctgcctctcgagtcccggttcaaggcgagcgtgggaaaatggggggaaagagagcgagagaagctgggaaggagggtgagcggagcggaatgcgcaggaattggttgtcttctgggggcgactggaaggcaagacccgcaaagctccgacgcggaatttttaagtgcatttcctctttctgtttttatttattttcaaaaccagattgttaacgttgcagggattgatatgccatctgtccaacttgccaaaaaatcagagactctcctcgatcgaggtcttgacacaactccttttcccgtcctttacgaataacagggatgtggagcccttttctaaatgtcatcgtcaaggggcgtgcgtctctgaaagtttgcgtccccttcatcctctctgcgcatcactgcgcatatttaaaatagttaaaagagttaaaggtgttcgtatgaggggttactgaggtagagagacacaggaaaattgtcgctaccaacctttttgtttttcgcgtaccccgcccccgagtcattaggaatcatccttaaaaccaaacgtaacacatacaagccactagatggcgtggatggcgagaagttaaatctgcacctaaggtttggatgctttaggaaggtgaaggatcaaaattaactggtccaacagagagtcagatcacataaacatccccaaaccccttcgctgccacccaccttttttgtgtttatgtgacatatactacttaggc

SEQ ID NO: 13854 - DNA, 786 bp, Artificial sequence
  DNA replication origin
ggtcccctttctcctctcctccaccaaaccaccgcagcccagcacgtgaagcttccctttgttcatccgaggctcgcttttctccccagcagatccacctggatgctctccctcggtgacattttgcgccggggttggtgggtggctggggtggagcgagaggagcccgagggggcgggggcggagaaaggtcaagccgagggaaaggcaggagacgcctttcctaacctgcgtggcggggcgtgcgcgcggttatttatttattttctccttatttattgatcgcactagcagagcagcgcggggagcccggggagatgcaggaccacccactggcggggaagcagctagcagccctcccgcgcccccgcgctgccgagcgccttctgcctccgcgctcggacgagagcccgtgccggccccggccccggccccaccgcgccaacgccgcccgcccggccgccccgcagccccgccgccccgcagccccgcaccgcgctggccaggctcccgcgacagtggccccgcagtaagttggcaggagcgagtcccctccgttctcgcctcccccgcaccttttgaacttgttgctgctgctctgctcgcctgcgcctggcttttggaaggtgaaaaggaggagggaggcacggagggatgggggaagggaaagaagagctcgcttgagctttatttatgctctctcggcgcatcggattcggctgctcgcgagctgctttctctcctcttccctttccgggtgcacggcgaggagaaagtctctatgca

SEQ ID NO: 13855 - DNA, 1168 bp, Artificial sequence
  DNA replication origin
gcccgtgccggccccggccccggccccaccgcgccaacgccgcccgcccggccgccccgcagccccgccgccccgcagccccgcaccgcgctggccaggctcccgcgacagtggccccgcagtaagttggcaggagcgagtcccctccgttctcgcctcccccgcaccttttgaacttgttgctgctgctctgctcgcctgcgcctggcttttggaaggtgaaaaggaggagggaggcacggagggatgggggaagggaaagaagagctcgcttgagctttatttatgctctctcggcgcatcggattcggctgctcgcgagctgctttctctcctcttccctttccgggtgcacggcgaggagaaagtctctatgcaactaagccccggcgcgcacttggccaggtatgtaccgcgggagcggcgcgttctgcgcggaagcagatgctgctgccgccacggcggcggcggctgccagctcctgagctctgtaactgtcacactgcacctgagctgaacttgaaaagagagtgaaggggcgattgggcgaacgcttttggcagacacagagggtgtttgtagacgtgggggaggagaatctctattaacgccccccaccgtaaccactgcacatcacctccatctctgcaaatacagcccgaggagtagaggcagcagcagctggacccccaaagagagacgtggggcagcggctgtgaccgcatctcctgagctacaacaacaggtcgcctttttgagactcctttggcgggaagggctacttggaaaggaaggtttgaaagagtgagaagggtaggtgtaagggttccctaattcgtcgaaagaattctattgggtgactctcgttcgtcttctctatcctacactccacatactgaccctatattatccagactgtgccggggagaaatcaaaaacacctgtttgaagaaacggctgcacctgtgtgcttatttgtgccagagggtggcctagcccacctgcaggaagagatttggctgggttctgttgagggtgattgttaggacgttgtattttgttgccattattccaaatacctgtcttggagggaaagttgcccttctgagaactgtgactttaccaggagccctatcttggaataagagttacacctctggaccacgtt

SEQ ID NO: 13856 - DNA, 1236 bp, Artificial sequence
  DNA replication origin
aaaggaagattagaaaaactcagcaacacttagggttgggactgaggggacaggcaggagggaaagatggaagatctgggatgagttgcattgggaacagagactagcgagggaccaatgtgtaaaagaatgcctggacgtcaggcacctcagaccatttgcccattttacgacaagaattatttagatcttgtaggatggaaaaattgaaagtgctgttttctggctatttggaaccactgtcgagtttgtattggggtcaagcagcattgcaggagaaaataaggcatttaggctttaggtcaggtgtgagttgaggaggttttaggtttttaagaacacaggctaagggagaagaagggagaatggagggcggaatcttgcccctagtgaaggaggcaagcctagagaaaagagagagtagagacatggaaagaaggggtcgggggggtggttcttgccccctagaaaagtgggaaaggggttggggcatggaaataaggggttggggtgcagagataagaggtcggggcatggaaataaggaatcagggcacagagataagaggtcaggacttggaaataaaggattggggggttcttgcccccagaaaagcagagaaggggtagagacacggagagaaggagttggggggtgcttgccccctagaaaagcagtacttgccgctaagggtgaaggagaaggggttggggggttcttgccccctagaaaagtggagaaggggtacagacacggagagaagaggttgggggattcttgccccacagaaaagcggtacttgccactaagggtgaaggaccaaggcaggcgtccccgcatggtcagacacctctgaaatgtgggtgaataatcaggcaggcgtccccccgtgattaaacaccaaggtaagactgtcttcctgagtccatgactggcgccggagttttgggtccacggataaaatgcgtctcctgtctctatcagaaaaggaaaggaactgaaatgaagagaagggagagattgaagggtggagccaagattgaaaggagaaagtggttgagggatagtgacagaagttggagaagagagtaagaagaggctgcttacccgatttacaattggtgagatgttccttgggttggtgggtctgaggacccgaggtcgtaggtggatctttttcatggagcaaagagcaggaggacagggaattgatctcccaagggaggtcccctgacc

SEQ ID NO: 13857 - DNA, 944 bp, Artificial sequence
  DNA replication origin
cgaggggaagcgccggcggcagggagccccagagccagcccttaagtagtttagcacacagcgcggagggcagccgccggcgggctggcgggacagcgggcaggaaaggcgacagacgcgtggccacttaccgtcggcgctgggcccggtgccccacgcccgcctggggatagtcggggacgcacggcgggggctcatcggggcagggaacttcttcgcggagagccggagggctgcattggcttcagctggagacgcttctttctcttcctctccccccgccgccgccgtcgccgcctcctgggaaaaagaaaaaaaaaaaaaaaagtcctgggcagcagttgctggaaagtctctgctaagccacctcccagcgccgctgtccctcccaagtcctctccgagtccggacgaggcagcggcggcagccagggccagctgcacaaactctcagcgcatgctcgagccgctggctgccggggttgggtcctagtgggtgtttcttgtccctctcacccagcgagagtccccaaagggacgcttcacctctgcaggatagggtccagaagataatgcctaggaacttgggagaagtccgtgcagtaaatccctttaaaatggtggcgtcgaaggaatggaggctgggttataagcatagagaagcaggcttttattatatgataatatttgtgtttgagaaggggggtgaaggggtggcccaacccaattcctgcaatgagaaactagttttcacaacctttatggagccacctcctgtgatttgttattaacatggtgccctatgatccttcttattgctttgttgccctcccggatttttttttttttaagttctttcccactttcatagtgcactaatagcatttacggaaacatcagagtaatcatgtgcagtctgacatgcagaagaggaggaaagaacat

SEQ ID NO: 13858 - DNA, 1197 bp, Artificial sequence
  DNA replication origin
cagtgtatagatcgaagtgagatcgtgcgtgcgtatgtgtgtttgtgtgtgtgtgtgtgtgtgtgagagagagagagacagagacagagacagagagagacagtcagagacagcgagagaggaataatctggagaaagccgcacggtggtggggcccggggccgctagccgaggcgcatgtcctccggcgtgcgggactttgcctctttcgccggctgcggcggccgcggtctgagcgctccgagagcagcgaagcctcagtgccgggtgcgcgctccagcccggctgtgcgcgccgcggctcctggagggggcgggggcgcaggaccgctccgctgggagcgtgcctcggacccggggtcgcgcggggggcggaggggcgcggctgccgctctgggtccggatcccagggtagcaattcacacaccgacaatcctccctctgtccgctgccagtggtttcgctgccctggagttagagggatccgctggggtttccagtgttcgcagaacattggaactccttcatcacttcggaagggaagggaagggaaggccggacacccattgtcccgcacagccagaggttgacctttgagtttcacctctaagagtttttttcattttattgttttctgcagatgcttaagtgggtccaatcagaatgcggtgggggcgcctgggtacattgtttccctcccttttttctttccattttcctaataaagcagtagaccccattgcctttgggagagttgactccaaaaaatctccagccctgattgtgaccagtctgaccctgccctttccctagaccccaacgaaactgccgtgctgggcacagctgtctggggggactttcaacacggcggtggtcctgccagaccgaaccacacaagtgcctcctcccacagggtcgaacgggaagattttttattgcttgattgaagggtatgcaaaaaatgtataatgcataccttctgctgccttagagctggaaatgtcaccctcatgtgctcttttctttggtggtgttcagaattagactgtgagcgccttgatggcagggagtttacctttattactataaccccagatcctagcaaaatggccttaaaaaaaatcaataggtgttccctgaatatttgttgaattaatttgaagccaaaaggaaataatgagaaggtaattggtggtag

SEQ ID NO: 13859 - DNA, 991 bp, Artificial sequence
  DNA replication origin
gagacagaaggatcttggggaggagcaggggccgggcatgacgtagcaactggcagcgccgccgattggcagatgagaaggttgttccctcagggcggctgctgattggctacgggaggcagaggcgtgacgtcctcagaagttgagcaaacacctcctacttcccggccttccatcccagtttcttctaggaattcggagcctcccctgcagcgactcggaagattcgaggcggcgggggacaagtcggcgccccagagcggacgaggtgaggagaggagaggtccccgcggagagctgagcagacgcgcgggtgggctcagcctgtgagatgcggtggagatagcgggccgggctcgggctgtcgctgggaggggcccgcgagcctggccttcgggtcccggcgccgcgaggcgaccccggccgggccgagagagggagaaggcggcgagcattcgggcctccctgcgaggaatggagggagagcggaaacgcagagagtttcactgcgaggaagggagggagagcggtcagcgcagctccagcatttctaagtagaaaggcgagggattgcaattcggatttcttttctttcttttttggcggacagtggtggtgctgtggctggggaataaagaactgatgaagctgaggaaacaacggcttgttaatttgtggacggcgtgcttagaggggacggctggctgagggggcggtggatggagatttcggggtggttctttcccccttccctccccacgcccagcttagccaaactgatcacaaacttctctccttgtccatcttgggctgcccactctccgagacacagacccattctccagcaaggatcggagatgggtggaagttgggcgccttgcaagtctgggtttcctgaactcttcagcccctgcgggactatgcagcccattgtgagcgctcgcgcgggacggggcgcggggagaagcagtttacccaccctcctcggttg

SEQ ID NO: 13860 - DNA, 1046 bp, Artificial sequence
  DNA replication origin
agaagctgggcgctttctttcatgtaatgctgcagctgagcctgggacaggtctttgaaagctactccagaagggtatttctccaccgccgggaccaccagtttattcctttcggctaaatacgtttttggctgcgggtgcaaaggggaactgaggaagtaggaggccaccgggtggatgttcacgccggctgccgggtggcatgggccgtcacctcggttcaggtagcacaaggcgcccatggcgtggaatgaagagtggttgaccacacgcggccttaccagcttgtactgctgcagcggcagcgcgtcgcgggccaggtcgcccttgagactcagtgcgcagttgagcaggtcgctgcagctgaatgcgggagccgagggcaccgccgcgggcgccgccggggcctccagactggccttccgcggctcggagcccgtcactcctgccttggggctcgtgtcgtaggccacaggcacgaaggggatcatgcaggggatcgacgagttgagatgcagagagtgcttgggttcccccttgggtaaggctccctgcaggaagtgggggactggcagggccttgggctctggggtgcgcgccatgattcgttcaatggagaaagccaagggtttggacgtgctcatcatgttgccccgagctggagcagtcgctaacattttggtagtcgcgttgtggcagctactgtccatgtctgagtcgccagcgtccgtcagccggggctgggttgcgccgtccgttgccttgttccctgcttgtcacagacctgcggagagggggacgggcaccatcaccaccagtagcctcctcctcctcctcctccccagcatcaccagccgaacctgcctgcccagcccaatggactcctgccagcccatcgcagagttcttggcgcaccaatgactcggggacaatcactacttatttctatcaatagaaagtgttgtgtcaataacgcagccaagatctcgccaatcgttaacttccaagaggagaaggtaaactagataattgctcaattcgcttcc

SEQ ID NO: 13861 - DNA, 1182 bp, Artificial sequence
  DNA replication origin
acagaaataaggggttggggcacggaaataagggattggggcacagagataagggattggggcgcagagataagaggtcggggcatggaaataagggattggggtgcagagatataagaggttggggcatggaaataagggattggggcgcagagatacgaggttggggtaattgcccctctagaaaagcaggacttgccgctaagagtgaaggagaaggggttgaggggtacttgcccctcccgcagaaaagcagagaaggggtagagacaaggagagaagggattggggtacttgcccctttcccagaaaagcaggacttgccactaagggtgaaggaccaaggcaggcatccctgggtggtctgacacctttgaaacgtgggtgaataatcagagaggcgtccctgcaatgattaaacaccaagggaaggctgccttcccagtctgtgaccggcgccagagttttgggtccacggataaaacgtgtcgcctttgtctctcccagaaaatgaaaggaattgaaattaagagaagggagagattgaagagtggaaaggagaaagtggttgagggacagtgatgagagaggttggagaagagaataagaagaggccgcttacctgatttaaaattggtgagatgttccttgggctggtcagtctgaggacctgaggttgtaggtggatctttctcatggagcaaagaacaggaggacaggggattgatctcccaagggaggtccccccatccgagtcacagcaccaaatttcatgtgcgtccgtttgaagagaccaccaaacaggctttgtgtgagcaacatggctgcttatttcacctgggtgcaggcgggctgagtctgaaaagagagttagcgaagggagatatgggtggggccgttttataggatttgagtaggtaaaggaaaattacagtcaaaggggggttctctggcgggcaggagtgggggtcgcaaggtgttcagtgggggtgctttttgagccaggatgagccaggaaaaggactttcacaaggtaatgccatcatttaaggcaaggatcggccatttacacttcttttgtggtggaatgtcatcagttaaggtggggcagggcatattcacttcttttatgattcttcagttacttcaggccatctgggcatatacgtgcaagtcacaggg

SEQ ID NO: 13862 - DNA, 1518 bp, Artificial sequence
  DNA replication origin
ggttaattaaatcctgttgtggggtttgagggctggaatttaatttttggagttttatttaatgtcgggagcagattgggtaataaaatgtattttgagaataagacggccttttgaccttttagggtctagggctgtaaagcgtctcagggttgctgccaaacaagtcatgagctgggctggatttttatatttgttgaaaaagtgcctaaatgctgtctgatttgggataaagaaaaaggagcattaaccttgactatgcctttagctccagccacctttttaagagtaaattgctgggcaggatggggagggctagtcagggaacaaaactgtaagctggaccaggtgtgaggaggggaggtgataaaaagattatagggtggaggagcagatgctgaggaagaattgggacctagctcggcctggcaaggagcagcctggggaggaagggagaggtcagatgggtctgtagaaaaggaagattagaaagactcagtgatgcttggggttggtactgaggggacaggcgggagggaaagaaggaagatttgggacgagttgcactgggcacagagactaggaagggactgacgtgtaaaagaatgcctggacgtcaggcacctcagaccgtttgcctattttacgacaagaattatttagatcttgcaggatggaaaaattcaaagtgccattttctggctatttggaactactgtcgagtttgtattggggtcaagtggcattgcagaagaaaataaggcatttaggttttaggtcaggtgtgagttgaagaggttttaagtttttgagaacagaggccaagggagtagaaggaggaatggagggtggaaggttgcccatagtgaaggaagcaagcctagagaaaagagggagtagagaaatggagggaaggggttcgggggttcttaccttccagaaaagtaggaaaaggggttggggtgcagagataagaggttggggcatggaaataagggatggggcacagaaataagggatggggtgcagaaataaggggtcggggcatggaaataaggggtcagggcacggaaataaagggtcggggcacagaaataaggggttggggcacggaaataagggattggggcacagagataagggattggggcgcagagataagaggtcggggcatggaaataagggattggggtgcagagatataagaggttggggcatggaaataagggattggggcgcagagatacgaggttggggtaattgcccctctagaaaagcaggacttgccgctaagagtgaaggagaaggggttgaggggtacttgcccctcccgcagaaaagcagagaaggggtagagacaaggagagaagggattggggtacttgcccctttcccagaaaagcaggacttgccactaagggtgaaggaccaaggcaggcatccctgggtggtctgacacctttgaaacgtgggtgaataatcagagaggcgtccctgcaatgattaaacaccaaggga

SEQ ID NO: 13863 - DNA, 1002 bp, Artificial sequence
  DNA replication origin
cctgccatgtttcttctccccgccccctcgcctctggctcctcccccttttccctatcgcgttcctcctttgcagcccccatccccctcctctggctcctcttcttccctaccgcgatcctccttccagaccccggcccccagcccgcctctagctccttcccttatttcctgccgcgctcctccttcccgacaccgcccctccgcctctggctactcctcttctctcctgccgcactcctccttcccggccccacctccccgcctctggctcatccccttctcttctgccgccctcctccttcccggccccgcccccagtctttggctcctccccctaccctgccgcgctcctccttcccggcccctccccgctgccctcttctggctcctcccccccacccgcctctggctcctctccttcccacccctgccgtgctccggcaggaagaggtggtgccagggccgttgctaggatacgaccaacagctgagaacgcggcgagtatggaagctgcgtcttaggagcctgggaaagcacttcgacgagaatagtttggtttcgtacacaggtaggagaacagattttgactgcggcctcctggtccgacgcttagatccagcctagagccggtgacagccgcgctggactctgggttctgtgtgctgggcagtgattcccacctgagcgcctggggctgcctagtcggtcaggaatgttccgactttactttaaaaaccgtgcgaagcatctcatctttctcggctccttttttggcttcccctctctgatttgggacttgaaccagcagcatcaagctaggaggtacacctcacctcacaccctgggtgcttgtcacggtaattgcatagaagatgtgtgtataacccacacctggcactagagactcttagccttccgtggccaccattctcatattaagtcgagagattttagactttcctcacctggcactctcactccttcctctccacccttggtc

SEQ ID NO: 13864 - DNA, 1329 bp, Artificial sequence
  DNA replication origin
cggaaggctaagagtctctagtgccaggtgtgggttatacacacatcttctatgcaattaccgtgacaagcacccagggtgtgaggtgaggtgtacctcctagcttgatgctgctggttcaagtcccaaatcagagaggggaagccaaaaaaggagccgagaaagatgagatgcttcgcacggtttttaaagtaaagtcggaacattcctgaccgactaggcagccccaggcgctcaggtgggaatcactgcccagcacacagaacccagagtccagcgcggctgtcaccggctctaggctggatctaagcgtcggaccaggaggccgcagtcaaaatctgttctcctacctgtgtacgaaaccaaactattctcgtcgaagtgctttcccaggctcctaagacgcagcttccatactcgccgcgttctcagctgttggtcgtatcctagcaacggccctggcaccacctcttcctgccggagcacggcaggggtgggaaggagaggagccagaggcgggtgggggggaggagccagaagagggcagcggggaggggccgggaaggaggagcgcggcagggtagggggaggagccaaagactgggggcggggccgggaaggaggagggcggcagaagagaaggggatgagccagaggcggggaggtggggccgggaaggaggagtgcggcaggagagaagaggagtagccagaggcggaggggcggtgtcgggaaggaggagcgcggcaggaaataagggaaggagctagaggcgggctgggggccggggtctggaaggaggatcgcggtagggaagaagaggagccagaggagggggatgggggctgcaaaggaggaacgcgatagggaaaagggggaggagccagaggcgagggggcggggagaagaaacatggcaggagaaaggggaggagccagaggcgaagagacaggaagagggacgcgtcagggagaaggggaggagtcagaggcgagcgggcgtggaggagggaagcggcagggagaaggggcggggccagaggcgaaggggcggggaggagggacgcggcagggagaaggggaggagccagaggcggaggctgttaccaactggctacctagatccaagtgaatcaggacactaacttctctccaagatcttttacacttgtgaaacggcacagctctctaaaccaaacactgacagcagtttaattttacagatataaaaaaaatccgagtcagagaaatcatcacgatgaagtcagaggcgagaaactgtcaggtgcctacttgcttttgttaaactaacaacttggctctcagcttc

SEQ ID NO: 13865 - DNA, 726 bp, Artificial sequence
  DNA replication origin
cgcccttgctgctggttaaaactttattctcaggccacaaggggattttcttgcaagagccgcttggtcctagaatctgggcccttgttctagctctcgcttcacctcttactgcttgatctgggggtacgttccttaacaatgccaggtttgaggagtggataggtcggggaaggaaggtggtttttaatctcccattaggattccaggagggaatgaagtcgagtgcaagagcctgggctctcttcggattagagagggtgcaagaaatgttattgctcttcgttaaagagaaacaagatttatttctctagcaaccttgcctaggcctggtttctactctccttcccactgattttttttttccccccattggtgggagggggtgctgctctccccgcagccatgcgcagggaaacctcaatctctggtagctcttggcttttggggccgagaatgattcttagtttggtgctgtgcggccaattccaaccccagatggccggttgggagcgagcagttctgctgtgggaaggggaatgtgtgttgttgacggaagcattcattacattggctgctggcaattctgggggtggggaggttctgctctgtggtgtaggccttgtcgggatcatactgcggtgactgggttgaagtgtggtttgttgaaatactggctggatccctttctctccactttgctagcacctgcagagtatgtgccac

SEQ ID NO: 13866 - DNA, 1586 bp, Artificial sequence
  DNA replication origin
tatgaagaagtgctttccgttgtctaaatagcagttatggagaaagagtgcatttgtttgtaatatctgataaattgggcccaggattgagtttatttaatgaaataaaaactcaaaataaacattaatctagtagtacaaacatctagtatttactattaaatgatcacgatcagttattattgataataatcataagtaggctttatgaaggcataatagattattatcattttaactagattacacacttcttaaagagagcatcttataaccctttattttcccagtgtaggcatagcaaggtgctcacaaaaatgtttacattatttcccttcaatgtatttgctcaggcacttgggcaactagatcaaacctggtttgcaacaagtttgatgaacctgctacctgacatttctgtccctcacatgaaaacttcctgacattcctgtccctgacatgaaagtttctcttaattcacagtcaacttagctaccacagattggaacgtgaggggctgaaataggcaaggagacagcgtgaggaggaggttgccttagaaatagaggatcagcctcattatgtctattcgccagaaggaaaaaaaaaaattccccagaaagcctttcatcaagggaggatctaaactctaacacagaactgttatctatccgcacatgaatttcgggggaaggaggagaaagagggaggtaatcggtataattcacccccgaggctctttccagttccaagactgattcaaaattggagagaatggtggaaccaacacaccaacattctgaaccccttccactctctcaaccaaggaaggaaggaaggaaggaaggaaggaaggaaggaaggaaggaaggagataaagagggaggaagggagagagagagggagggagggattggaggggaggggaggggaggggaggaagtagggaatgagggaagggagaagaggggagaggtgaagggagggagggaaaagatagaaaaagataaaccctggccctttatgtcactctccatttctgggatgacctagttctgccaaaagaagaacccagcagcggggtgtgccaggacgaggtactattctccacctgagaccccacagtagctagaacaaagcatttcctcttctccacaccccaacccaacccaactggcctgaaatcatttcacaaattctgggggacatcgaatctctgtccttggccttgagtaaacccagaaaagtagatgggccaagaaatagattggaaaagtggatcaggccccgcggcagcaatttagatggagggtaacgcaggggcgggcaggcgtggagtctcgagtttattctctatgactgggacacagctggctttgaataagaacattaagtatacagcaccatattttggtcttgagcccagcctccagcccgtggcactcagccattcgtctccgccagccaggccctggccctgattgccgcgatgcagggaatgcccatcaacttgcagtcacacctgttaggtgtttctccactcagtgcctccgcccagcaagcgccccccgcacgaccggagcccc

SEQ ID NO: 13867 - DNA, 1056 bp, Artificial sequence
  DNA replication origin
agtctaaatgctaactgatttgggagaggtcagataaagaaaaaggagcattaaccttgactatgcctttagcttcagccacatttttaagaggaaattgctgggcaggtgggggagggctactcacggaatgaaactgtaaaccggaccaggtgtgaggaggggatgtgataaaaagattatagggtggaggagcagaggctgaggaagaattgggacttagctcggcctggtgatgagcagcctgaggaggaggggaaaggtcagatgggtctgtagaaaagtaagactggaaagactcagagatgcttggggttgggactgaggggacaggcgggagggaagaaggaggatttgggaggagtcacattggaaacagagactagagagggactgatgtgtaaaagaatgcctggacatcaggcaactcagaccatttgcccattttatgacaagaattatttagatcttgtaggatggaaaattgaaagtgccattttctggctatttggaactactgttgagtttgtattggggtcaagcggcatttcagaagaaaataagatgcttagattttaggtcaggtgagagttgaagaggttttaagttcttaagaacacaggctaagggagaagaaggaggaatggagggtggaagtttgcccatagtgaaggaggcaagcccagagaaaagagagagtagagacatggaggcaaggggttcaggggtccttaccctccagaaaagcaggaaaggggtcggggcacagagatatgaggttggggtgtggaaataagggattggggtgcagagatataagaagttggggcacggaaataagggattggggcatagagatgtaagaggttggggcatggaaataagggatcggggcagagagatatataaggggttggggtacttgccccttccctagaaaagcgggacttgccgctaaggcaagcgtctctgcgtggtctgatgcctctgaaacctggctgaataatcagagaggcatccctgcaatgattaaacaccaagggaaggttgccttcc

SEQ ID NO: 13868 - DNA, 1081 bp, Artificial sequence
  DNA replication origin
cggttccccgctacccgggcgggggtgagtatgtgacatgtgcctaactctcagcagcaacttcggcagcaggtgtcgatcctaactaagcaggagctgcggctgccgggtgtgccctcaccaagccatgcgagccccgggcgcgcttctcgcccgcatgtcgcggctactgcttctgctactgctcaaggtgtctgcctcttctgccctcggggtcgcccctgcgtccagaaacgaaacttgtctgggggagagctgtgcacctacagtgatccagcgccgcggcagggacgcctggggaccgggaaattctgcaagagacgttctgcgagcccgagcacccagggaggagcagggggcagcgtttcttgcgggaccctcctgggacctgccggcggccccgggccgtgacccggctgcaggcagaggggcggaggcgtcggcagccggacccccgggacctccaaccaggccacctggcccctggaggtggaaaggtgctcggggtcaggagccttctgaaactttggggagagggaaccccacggccctccagctcttccttcagatctcagaggaggaagagaagggtcccagaggcgctggcatttccgggcgtagccaggagcagagtgtgaagacagtccccggagccagcgatcttttttactggccaaggagagccgggaaactccagggttcccaccacaagcccctgtccaagacggccaatggactggcggggcacgaagggtggacaattgcactcccgggccgggcgctggcccagaatggatccttgggtgaaggaatccatgagcctgggggtccccgccggggaaacagcacgaaccggcgtgtgagactgaagaaccccttctacccgctgacccaggagtcctatggagcctacgcggtcatgtgtctgtccgtggtgatcttcgggaccggcatcattggcaacctggcggtgatgtgcatcgtgtgccacaactactacatgcggagcatctccaactccctcttggccaacctggccttctgggactttctcatcatcttcttctgccttccgctggtc

SEQ ID NO: 13869 - DNA, 1025 bp, Artificial sequence
  DNA replication origin
agagggcgccgctcgtcggtggacagtgccgctagccgcgggagctagtcactgccacagcgggctcagcccggacgggaagggtggtgcctggaaccgccgcgggccaggcagtgcgcggccgggaaggggaggtggcccggcctcgcccccgcgctccagccgctgcgcgcgcccgcgaagctcgactctcggctcgttgcctcctcccactccttcgcctcctcctcggagagatactggtttgtggggagacgggatcccctggtggttcaccactcactaaacccacacacgtttcattcaagccatttgtagcggcttccactcggaggagctgggagggaacaagggcggaggcgcggagcctgcgcggctcgaggctagggatgggcgggacaggttaattccccagctgtcgaaaccagcctgacaggtccccgagcccgggctaggggcgggtgcggggcgggagtggggggtgggggtgggaacgggaatatgagagcggtcgggggagggaagagaggagggtagcaggggagtgagcagcagggtcccctccaatctgttgcggctgatgcgcatgcccaggtctcagctctggggggcgaggggcggggcgggggaggggcggacgggggttgggccgcggggagtaagaaggtgaaacctcacctcctcaggtattccctagagataggagagaatgggagctcagaggtgtcagtcatagagaattaccagttccaggattgagatgcagagcgagaaagctcaggatgcaccattacctttaacactgagttgggaagcatcctaccatgggttacttcgtaccacccagagcatagtgaggtagttgtatttgatgaagtagtgggaaatgactggaggcagaaaattactcgaacagcactcccagcacggctgtccatgcctttccaacctttctactatatcccacaaccctgtcaaaactgtcagggcatagctaataaaatagacaaattaatgaagagaaa

SEQ ID NO: 13870 - DNA, 949 bp, Artificial sequence
  DNA replication origin
ggttcttaccttccagaaaagcaggaaaggggtcagggtgcagaaataaggggttggggcacagagataagaggtcggggtgtggaaataaggggttggggcacagatataagaggtcggggcatagaaataagggatcggggtgcagagtcaagaggtcggggtgtggaaataagggattggggtgcagagataaaaggtcagggttcctgcctctcccctagaaaagtgggacttgctgctaagggtgaaggggcaggggttgaggggttcttacccctcccccagaaaagcagagaaggggtagagacatggagagaaggggttggggttcttgcctcttccttagaaaagcaggacttgccactaagggtgaaggagcaaggcaggtgtccctgtgtggtctgacacctctgaaacctgggcgaataatcagagaggtgtccctgcaatgattaaacaccaagggaaggctgccttcccagtccgtgaccagcgccggagttttgggtccaaggataaaacgtgtctcttttgtctctaccagaaaatgaaaggaattgaaattaacagaagggagagattgaagtgtggcaccaagattgaaaggataaagaggttgagggatagtgagggaggttggagaacagagtaagaagaggccgcttaccggatttgaaattggtgagatgttccttgggctggtgggtctgaggaccagaggtcataggtggatctttctcatggagcaaagagcaggaggaaggataagggattgatctcctaagggaggtcccccaatccccggttttggcaccaaatttcatgagcgtcgatgtgaagagaccaccaaacaggctttgtgtgagcaataaggctttcaatcacctgggtgcaggctggctaaatccaaaaagagagtcagcaaagggagatggggtggggccat

SEQ ID NO: 13871 - DNA, 1514 bp, Artificial sequence
  DNA replication origin
aggaggttctggaggaaccccttgcagctgtggttcaggcatttggagttcttgtgtgctggagatgtggctggggtttgtctcacagtggaggcaaggaattgcaacttagaaatacattgctacttggctgcctctactctattattgtgcaccttgaaggtgaggttaattaagtcctgttgtggggtttgagggccagaatttaatttttggagttttatttaatgtcaggagcagattggataataaaatgtatattgagaataagacggccttttgaccttttagggtctagggctgtaaggcgtctcagggctgctgccaaatgaaccatgaactgggctgtgtttttatatttgatgaaaaagagcctaaacactatctaatttgggaaaggttggataaagaaaaaggaccattaaccttgactatgcctttagctctagccacctttttaagaggaaattgctgggcaggtgggggagggctagtcacggaaggaaactgtaagctggaccaggtgtgaggaggggaggtgataaaaggattatagggtggaggagcagaggatgaggaagaattgggacctagcttggcctggcgaggaggggagaggtcccatgggtctctagaaaaggaagattagaaagactcagcgacacttggggttgggactgaggggaccggtgggagggaaagaaggaagattgggacgagttgcattgggcacagactaggaagggactgatgtgtaaaagaatgcctggatgtcaggcacctcagactgtttgcccattttatgacaagaattatttagatcttgcaggatggaaaaattgagagtgccattttctggctatttggaaccactgtcgagtttgtgttggggtcaagcagcattgcagaagaaaataaggcatttaggttttaggtcaggtgtgagttgaagaggttttaggtttttaagaacacaggctaagggagaagaaggaagaatggagggtggaaagttgcctatagtgaaggaggcaagcccagagaaaagagagtagagacacggagtgaaggggttcgggggttcttaccttccagaaaagcaggaaaggggtcagggtgcagaaataaggggttggggcacagagataagaggtcggggtgtggaaataaggggttggggcacagatataagaggtcggggcatagaaataagggatcggggtgcagagtcaagaggtcggggtgtggaaataagggattggggtgcagagataaaaggtcagggttcctgcctctcccctagaaaagtgggacttgctgctaagggtgaaggggcaggggttgaggggttcttacccctcccccagaaaagcagagaaggggtagagacatggagagaaggggttggggttcttgcctcttccttagaaaagcaggacttgccactaagggtgaaggagcaaggcaggtgtccctgtgtggtctgacacctctgaaacctgggcgaataatca

SEQ ID NO: 13872 - DNA, 1194 bp, Artificial sequence
  DNA replication origin
gaaggaggaggagcagatggaaggaggaggaagagatggaggaggaggaggaagagatggaggaggaggagtaagagaaaggaggaggaggaggaagaagaaaggggaggaggaagagggaggaggaggaagaggaaggagggggaagaaggggaaggaggagaaggagaaagcagaagcagaagaggcagaagaagaaataatacataattataaattataataagccctgtgaggaagagcaaaggaatttaatttagattgaggactgctcagggaaagccaccctaaagttgtgtaatgtagttgagatcaaaaggatgagagcatgggaaagggcaggaaagggccaggggagtcagtgaatgagggtgagaggagtgggcaacaaaaatgagatggagataagggtccaattgtgtgtggctctgcagggcctgtggaagactatgaataattaaatgcttaactttctcactaaatgtttctatttcttcgatctttgagtggcccataggaatatgtctcatgtatgagcattgcactccacggaagaaaaatggatgacgatcgctgatacagagggcagcctgaagtgggatgaacaggaggcaatgagccaagcaaggaggtattggaataggcagtgggaaatgatgactgagccagcgctactggtgctggggaggagcagctggagctaaggcagaatctctgagttagaatcaatggggctttgtattgatttgatgtaagtagggaagcaatgggaaaccgctaagtatgactccaaggatttggtctttgtgaccagttatgtgatggtatcattaaacaagtgggaaatccaggaggataaggaggaggaaagaatgattttgattggaagcaggttgtcttcaaagtatgcatggaatgtcaaactgaaaaagtgaatctggagctaaagagagagaagggaattgtaatactttcgtcaggggctgataggttaggtatttgaagtgttgtggggcaaagaggtcactgagagagaatatttaaatcagcaatagaaaaggtgaattatagaactctgaaaaaaatcaggtttggagaaggaggaaaggagtgattaaatattttgagaaaacttttggaatgaagtctagaggtaagttgaagactatgtataatttatttaaaatgcaaaca

SEQ ID NO: 13873 - DNA, 2233 bp, Artificial sequence
  DNA replication origin
cttttccttcttttttcttttccccctgagacagagtctcactctgtcacccaggctgtagtgcagtggcacaaccttggctcactgcaatatccgcttcctgggttcaagtgattctcatgccttagcctcccaagtagctaagattacagtcatgcaccaccacacccagctagctttttgtattattactattttttagtagagacaagatttcaccacgttacccaggctcatctcaaactcctggcctcaagagatccacctgccttggcctcctgaagtgctgggattataggcgtgggccaccgtgcccagccaatgttttattttctttctgttcacagtttatttccaggaagccttctctaatcttcatcccctcctcttcccacccaagttagatttctcttctatgtattctgtcaaatgaaaacaaatccagacttagataaggagggattttattcaaaagaaagaccattgccacagagagaatgctccaacctcagaaattgtcaagtgtcacaaaatcaaaaagaaagaggcttccattatatagggtagggagagataagcaaaagcttaattaaaattgtaaaagggattaagcaatggagggatgaccagtggaacgggggaatgaccagtgggatggggtgatgaccagtggggcgaggtgatgaccagtgggacggggggatgactagtgggatggtggggggggtcatcagtgggacggggaatgatcagtgggatgggggatggtcagtgggatggggggatgaccagtgggatggcggggatgatcagtgggttggagggggagtcatcagtgggccggcggggaatgatgagtgggccggcgggggggtcattggcgggacggccggggggtcgccagccagacggcgggatgaccagtgggaccgcgggggtggggagtcatcagtgggacggcggagggatgatcagtgggacgggagggatgaccagtgggaggaggggatgatcagtgggatggcaggggggtcatcagaggatcagtgggatgggaggatgatcagtgggatggtggggtgggtcataagtgggacgggggatgatgagtgggacaggggagcatgacgagtgggatggggggatgacgagtgggatggggtggatgatgagtgggatggggatgaccagtgggatggtggtgggggggatgaccagtgggatggtggtggggggatgactagtcatcagtgagacggggatggtggtgggggggatgaccagtgggatggtggtggggggatgaccagtcatcagtgagacggggatggtggtggggggatgaccagtgggatgggaggatgatcagtgggatggttgaggggaatgatcagtgggacagggggatgatcagtggaactgggggatggccagtgggatggggaggatgatcagtggggtatgacaggaattgtcctgctgtggtcagctgattctcagtgcaagctaataagggggccacattccagtgtttagtgctttctcaggcttggggccaagtagaattcagggacctgtaggaaggagagaatcctgactaaagttctgtcaaggcaaagtaagagggtaagaggtgaaccactgtgaacacttggtcagtttctgaggtcccatgcagacatcttaccactttttaaattattcccttctttttcttcagaggtggaaagcataccacagacatctttcattagcactgtagctgcactgtctagaagataatctgagagtgcttgttgaatgaaggaatagatggacatggcaggtgagtgcatgctggagacaggacatcaggaagtaggtagcttggagaaagtcagatggcgtggctaacagtccacataaaaattgttctgtagcagaggatgggaccctgccctagggtcagggctcagcatctcattctgtttagcaacagttgagagacatgggatctgggttctggggcatgccagtgccgcaaccggagggcacatgggaaggaaggagagccgggaatcagaattagggacaggtttcagttgggaaacagaagcagtagcttaagtacatgatagcaggattgacacccaggttgctaaacttgaatctgaaaaccagaaccagatagtagatctaccattcttagattaagaaccagagatctgctatgtcagacaaatagagtggatgc

SEQ ID NO: 13874 - DNA, 1545 bp, Artificial sequence
  DNA replication origin
tttttaaaaatcagaactattgacatttctggtctcctcgtcgcttcaggctgaagagcggagggggatccgcgggccgagggtccccctccctgcccgcgccagggccgctgggtgacaccgaaatccagaggctcccgcccctcgggggttcctcctcccgcttcccgaggtgactggttggcgcgaagcgattggcgatcccgggcgcgatcctggccgcggctccccgcgccgcgccgggtgaatggccgcgggcggaggatcgggaggcgccgggcgcagaccaatcgcggccgccggtgggagtatttgttattcacatggaagagacttggcgcctgctaggccagctcagccccctcagcccagagatcagccacaagtgcggccgctgtgctcgcctcacgcggcggcggcggcggcggcggcggcgctgacatggagctgcgggcccccggcgggcttcctcaccgcgccctctgcggggagcagggtaagactcgccgcccggcagcagaaagcggctccgaggaaagcaagtgccgaaccacgggacaaaaagcccctggcccccaaacttccccaaaacgccctgcttgttggaaaaggagaatccccccgttttattcccctttccgttttcttctctaaaacctttcagcggacagccaggtgcaccattccttctcatatcactctagtgatttgtttttcctgagcacaagtagatggccctgcatgtccgtagtctgtgagagaaatagcgggcggaggtgacgggaatggggggagaaggagagtgggcaccagggggcgaggggctggccgggcattggagcttgattgggtgtctgttgattttacgttgcaaagaacaaggcagccacccctcttgtctgcccatgattacattacagtaaagaggttcagaaaagagggagactttacccggaactcccaaggcttggagatgtgatcccccaaaagtttagtcggcgaatgggagactgaagggtgacgggaagggggcaggcgcgctcggcgctctgactgggcgtgcggcggcaggattttaaagcgctctgcctcggatcgtctgccctgggtgacctcccggacctgccctggtggaatccggacttgccccgccgagatgacgaggtaccttcgtttcgcgaacctaacaggagggatttctgaagttagcggcttccgggatgagtcggggtaacccccgccctctgagcgtgggctggatggatgtctaaccaggatctagggaggatgggggtcgcgggggaagccgggcgcttcggggtcctcgacacccacatccccgcacggcgcacgctctgcctcgagtttgcgttctccgagttagcacggcgagcttgggatttccgtgcccctcttttgtggctttcgagaaacgccggagttccgtgtcctgctgggggttggggggatggagaaaaggtctcggggatcttgtttaaaaagcaaaggcaaacgcaccccaacagctcctcggtagctcccgcg

SEQ ID NO: 13875 - DNA, 841 bp, Artificial sequence
  DNA replication origin
gtgtttccaagccaaacttgctcatcagaggagtcctacatcttccatgaacgtgccaccaccaacaccccgtgctgtgcccgctcactgactgggagtagtgccagagaagcatggcttcagtgcaaacccagcagtgtatgccttgggaaggcagggggacctgtcagtcacttccgctccgtggagcaggagatctgagaggccatggtcaccacagacaagactgtagagaggatgcggattctaatgatgacatggtctagaactgtggtagcaaggactgattctgaaggggagaaataattactggagatgaagttacaggaaggaggggactggatgttggagttcaagttcaaccacagttgtgcataacacaactccaagttgtgtcaagcaccccacagtcactgaggatttggacagttattaaaacaatcttctggcagatggcaatatttggggttgtggcgggggggtggggaggtgggcggggggaaactagtttgtcgatgccaggatttgaggtgaaggttcaagtaggagctagtctttgaagaactaatcatgacaaaactcactaggaataggaaatctataaattacaggctgaaaggaaaaggatggtattgtccagtgacaagattctcaaagaagccgggattttggcaggcagaggacgtgctgctctgcgaacaaccacgactcgcacggaggccgcccccagcctgtccctaaggcacgtggtcctctagagggcttcgcgggagagttctggctcaaaccagggacggcgagggcaaggggtgaaaggggtttgaggcgaggcagaggactc

SEQ ID NO: 13876 - DNA, 999 bp, Artificial sequence
  DNA replication origin
agcgcggaggacgccgtgagccgccgccgcagtcgtctcggcccgcggagggacgtggtgagctgtggcgcttccgcgtcagcgccggcggggactctttgggagcgcgtcgggcccgagtccgggttcccccgcgtggtcagcggaggctgcgccaggtggggcccgcagccgcctcccacgccaggctgtccccgcggccgcccggcctgccttccttccttccgcccgcccgccggcccgccctaagagttgagtaagttgggcgcacttggttgtggggacggggtctccgccagggagaccccaacgcacgtgcgtagcgggagggcgcggcgtgggccagcagccggcgggagcggcacctccgtagtcccggagcccggcggtgcccgccgcgctctgcgctccgtttccgcgcgcccgcccgggacggcgaggccgcagccgcccgcgctgccggccaggccttcgccctgcgctgcgcacccgaggctgcgtttccgggtagggcgatgaacctgtgtggggagtttgggctgcaggagggtttgtgcgtctttctgttttcttttcgagagggaggtgcgggtccgtggagggaaagcggagagctgatgatgggaacgtatctggaaaatgcagccagtgccccccaggaagttcagggcgagtgacgggtttgtgcttctttcaacagccacgccgcaatgaagagcttcttacagtgaaagcaaagtaggtcgagtccactgaaaatgcctttaagggacaaatactgtcagactgaccaccatcatcacggatgctgtgaaccaggtagacccctcttcgtccgcagttgctttgccctccatcagagccactctgccttctctttttttctagctttttttcctcctgccccagtagtcattcttaagcaggctatgatattccctagcataagccagttatgaagctaaaagcttgtacaaacaagaggtctcccctgcttga

SEQ ID NO: 13877 - DNA, 1076 bp, Artificial sequence
  DNA replication origin
cggagaaaaatgggggtctcccccaaccttgggccttttcggtggtagttgttgtttcaggaaactttattaagtcagcctctcttttactctgtcgccccctcctccggagagcccgagctaccgccgcggagcgcgtaggaagggggaagcagagactctccggcagcgacagggagcgactgactgaccccggacggagatggggcgagggcaggaagtgacaagctcaccgagtgggtggggggagtgtggccggcacgcccgggagcgccgcgcgcatgcgcccggccggcgcccccgcctgtgggtaggcgacgcgctgtgcccgccgcggccggtggggaggggaccggggccgccggcgcgagggccgtgtccgaggggagggaaccggggcgggggacaccagggccgcggccggagtctcgggccgaccgagagccgaagcccaaagtgaggtgtgaggcccgcgatgcggcgtgcgcgcccacggagacgggctgctcggccaccaaactgttgctctcgctgttctctgttcagtggaactgaaactcggggagggttgggagaggacttaggaagcggtgggcagatgtatgagccataagtagtgatgatccccaaaaggctgtcagtgcattgctaaatggcaaaagttgaacatttttttcctgccaacaattttcgaagcatgcctcccggaacttggggattcttttatcaggcccaagggagggaaagcatctattggtagcagatgggtatttatcctggcagctccgcttctcaaacttgaaagtggagttgggtcacgtgggctcacgcactttccctcctcttctgcgccccgatcctgcttggaaaatcctcgaagatcccagtcatctgtcaaattctgccaaccaagggccgcttcttgggggcgagagagccgcctccgttgtttcctcccagctcctggaacgtaattcttgctcttggtgacatcaagcaaatatgtgtccaccgcccgtcaggaaattttaagagaataaagcccattcgccttgtctccgatcctccccaagatc

SEQ ID NO: 13878 - DNA, 924 bp, Artificial sequence
  DNA replication origin
tctgcctcacccatgagaatccgcatctgcttcttcccgaagatccgcgaaaagagcgcggacacggtgaggcccatggcggggcccggggaggggcgcgggcaccgacgcggggtgcgggctggaactggccggccgcggggggatggggcgcagcagcagcaggaggaggctccgccgccgcctccgcgcgtcgctgccctcccgacgtcaccgcgggcccgcccccgtccgggccccgcccccggctctcggccccgcctcccccggctctggctcctaggggagctgaagctccgcgagttgccgctgctggcctgggtcccgtgcggcccttacttgggaacgggtctaggtctctaacgcgcctgccaggcctgtggccgccgaaccggcagcccgagcgcggctgaggaaaggattcatcgctccgcagcggcccctgcccccattttcagtggccggccgctgggctttggtttgttgcgtccaggcccctaggggctccggttttagcccttgggaaccagtagcactgaacgtgtgcaccactctcctttggggagtggaagctgcgattaggggtcttggtcctccctttactgcctcatcttccaccgagggacttgcgcgtagtaggtggtcgtgtgaagagtgcgcgggaggtaggggaaggtgcccgagtgctagctagcttccatggttcctcaaaacgcctacttcctaattcccaatccgcagaaccagtgtaagattcccggccttgggcggcggggtcacagacccactcctgggctgttggagaagtccaccttcgtttggatcgccctgcgggccccgcctctcagtccaggcgctggccgctttgccgaagttcctcactttgccacagacttgtggacctggcttattcttgcacatcca

SEQ ID NO: 13879 - DNA, 1369 bp, Artificial sequence
  DNA replication origin
catgtgcatgggagcatgacagcggccacagcaggtggaattggtgggtatatactctcgaagccaccaggctagccacagaatgtcacaatcacagttccaagggttgtggtgtagatgcaactccaccaggtacctcagcggggtaaagaggtcatggggcaaagaagagaggttattgtgggccaagttgagttccacaagtgaagccagcccgtcaaaagcattccgctcaatcaggctgacctgtgagttcatgacccagagcttcttgagggagctcaggccatggaaggagccaggcctgatctcagggaagtggttccctgacatctccagctcctccagccccaccaggggggtgagattgggcatgtctttaatgttgcacatgcccaagttcagatacttgaggttgaacagcccctcaaaagctccctcagagatatactccagcttcttgagctcccccaagtccaggcgcatgagggagggcacccggttgaaggcgtaagaggggatgctttcgatggggttgttgcgaagccagagctcccgcagcttggacaggtattcaaaggccccgctagggatgactgtcagccagttgtcgaacagctccagggtgttgaggctggccaggccgttgaaggcccccacctcaatctgccggatggagttcctgcccaactgcaggacctccaggtggtggaggtggcggaaggtgtcggcctggatcatctggatgttgttctccatgaggttgaggtaccgggtgttcgagggaataccctgcgggacctcggagaggccccggcgcgtgcacaccaccttgctgaactggttactgcacgagcagacggaggggcagttctggggcccggctgaggcggcagcagcgatggctgcacacagaatccacacttgcgccgtgaggtagacgaacgggagcaggatggcattccaggtgtggtggtgcacagttacctgccacaagagcttcatggtgtggcacgttcataattcaccatcgcctgggattttggctcggaaaggagaaccagccctaccccggcttaagtgagctaggagctcctctttccatctggagaaggaggtggggagggggcgattagagagacggagcggatcggccgaaaaaaatcctgccaaactcgagcggcccctggtctcccaacccaccctcaaggcaagccctccgaaagctacgactctcccacactgcaaccgtccccacccagttcgccgtcacctacctcggaaggaaggcaggaaagcactggcgtggtgtccttaagctttctccacgggagctgggcacctcgttcccattccgacttcttagttt

SEQ ID NO: 13880 - DNA, 890 bp, Artificial sequence
  DNA replication origin
taacgccggcgccttccagcgccgcgccggccggcgccgcgcagccccgcgcctccggccgcccgtcttcctctttcctccttccttcctcctctcttcctctctccccctcccccctcccccctccccgggccgcttcctccccgccccctctagacgagcggagcggggccagggcgagcgggcgagcgagccggagtgagcgtcaagtgaggggccgcgcgcaagtcgcaggcgttcgcagctattttgggccggtcggagggagcagttgggtggccgctgataggctggagcggcgcggggctgcggcgggagagcccgcgccggcccccgccctccggcccgcacccggggccccctggctctgaagagcggggctcaggggcccggcggcccgcggcggggctgctgcatttggcctgcctctcgcccggcccgcgtcatcctcacccccgctgactgctgacggggcgcggactcgcgttcggagttcggaactgcgtggtggggactcgggggacggcggccggggccacgaggctcccaggaccgagagcccgggcttcgctgctgcactgccgccagcccctccttcgctttgcctcacccctcctgtgctctcactggggctttaaatgagggtttccttaatgagggttgcgggggcgggaaacagtggcaggaatgaccaagtgtgatgagctggggaatggcaacctgggacagcacagaggccggcaggaaggattgaggtgaactcccggagcccacgacacagcccgttcattcatggagctgcagccgcggcttctcagtcttcgctggccggagtcgccccttgctccccgctgcccccagagaactgggggaagggaggcgggcggctg

SEQ ID NO: 13881 - DNA, 929 bp, Artificial sequence
  DNA replication origin
ggactcgcgttcggagttcggaactgcgtggtggggactcgggggacggcggccggggccacgaggctcccaggaccgagagcccgggcttcgctgctgcactgccgccagcccctccttcgctttgcctcacccctcctgtgctctcactggggctttaaatgagggtttccttaatgagggttgcgggggcgggaaacagtggcaggaatgaccaagtgtgatgagctggggaatggcaacctgggacagcacagaggccggcaggaaggattgaggtgaactcccggagcccacgacacagcccgttcattcatggagctgcagccgcggcttctcagtcttcgctggccggagtcgccccttgctccccgctgcccccagagaactgggggaagggaggcgggcggctgagccccctgccctgtgagctcgccagcccttccttggctaggactctgagaagaactgcgtagcagccaggggtagcgattgggagtgggggtggaattcttgctcctatttctggtaggagaccctaaggcatttgacagactagtgtaggagaaggggactaggtcagctttttcccacccccctgaaaaaagactgcccctttctctgccgactgtgggtgaggcaatctagctgagccctgggaagccggtccagtagaatatagcatggtttaatatcccttcccttcaagagctgcctccagactcctcaacccacccctctccccgtgtgatttctggcaggctcgcttgataaaccctcatcacctgcgcgtgggctgttgcttaagaacgaggaggtcccagatttctcagctctctggtttctaccacacctatttctgagtattgtcttttgcccagtaacctgaacctctttaaatacgccatggaatacttgaagtcctggaa

SEQ ID NO: 13882 - DNA, 1066 bp, Artificial sequence
  DNA replication origin
aagagagttctccagaagcaggaagagttaaggccctgaacctggaggtggctccttgggcatttcctgaagaccaagcttccattttcctctggtgccttccaggccagcaggccctggagcagcgcttctcaaactttaacttgcttgtgaatcatctggggatcttgttagaatgcacattctccttcagtaagtatggggcagggccaagaatctgcatttctaaccggctcccaggaggtgctttgggccaaaggaccaccctgaggagctatcccctccccagccctttcaggccagaggctaccagcaggaggtagtaggtagagaagcccacctggttcccacagagggctcctgggaggtctgaccaaggcctgagtttggaggcagggagcaaacaagactcatgctacctaaagccagaaatataagggaaagagccagaccctggcacagctctgcaggagaagctgcctgaggagaggggctggggctgaggctggtgaagaatctctgctctaggagctccagggccaacatagagtgcaggcagagctaagctctggagtgtaggctctctagactgtacacctccaaaatgatcatgatgtcagcagcagctcaagatctgtgtgctcccacaagggctaagcactttatgggtagtcttatcagggaaggacccttcccccggttttacagatatcctctggaagacaggcctagagtccatgacttgcaagtattcaataaatgatttatgagtgaatgactaaaagtgcagctgagtcctggcagagggcatggggtcccacccagagacaggcagagaaagttgaagtcccaggattggaggccgttcttcctcacctccccaccaggcccaggcagggcttgatctgaacggaggcctgggaacctgtggccagcctttacttgttggaaaagagcagtccttaagctcaattgctccaggttgatgcttccctacttttttttatttatttatttttattattattttttttttattgagacggagtcttactctgttgccagg

SEQ ID NO: 13883 - DNA, 1018 bp, Artificial sequence
  DNA replication origin
ggtagaggaacaaggagactaagctccggacggtgaagcaatgggactctttgcagctggggtggcgggagagccggtgaccccagggagtctgggcttccagcatccggaggctgcagtctgggcctccgcgtctccgagcgcccgaggctgcccccgcgaagttaagcggtctcgtgggggtgggctgcgccgcgtcgcacggaacccgcctcctggacgcaccctgaagaggcccggagacctcccgggattgctgccatctccagctgcagcccggcccggtctgcgagcgttgaggggcccagcccggtgcagcgcccccgatcctggcgctcctttcagctccaaggggcgcgcacgcagcccaggaaccgcgatcgctcagccagccgcggctccgagctccgcgatttcagccgcgcggtcgggctcttgagtgtatgcgtcgaggggggcccctctgcagctgcgctgggggccgaagcggggcacagggggcaggaggctgcgggccgagggcgcgttgccgagagccagaccccgggttccaaaccccgccctgcaaagaatgagctctccgaccttggccaagtcgcttcctttcctcggctcagtttcttcatctgtaaaatgggggtggggacgatgatctccgtttctgaggctctgaggatctaggacgtggaaggcacagagaagctcctgcactaaccattccgggatcccctgacctttgcttgcaacccggaagagggtgaccttggaagaaccgcctctcgccctccgtccttggctgcctcccccataggcagcatccgcactgcccgcgctcggctccacagccgctcaccgcccggcctctcctgggcctcaggggacgccgtttccgggccacgggcgtggttgccggatcggagtcccacctcggtttgcgaccttggaccagggtacgaccctggaccacagcaacctggccgcaggatacagcgtgtgatgtgcttggcacagagcccgg

SEQ ID NO: 13884 - DNA, 905 bp, Artificial sequence
  DNA replication origin
ctgagccgaggaaaggaagcgacttggccaaggtcggagagctcattctttgcagggcggggtttggaacccggggtctggctctcggcaacgcgccctcggcccgcagcctcctgccccctgtgccccgcttcggcccccagcgcagctgcagaggggcccccctcgacgcatacactcaagagcccgaccgcgcggctgaaatcgcggagctcggagccgcggctggctgagcgatcgcggttcctgggctgcgtgcgcgccccttggagctgaaaggagcgccaggatcgggggcgctgcaccgggctgggcccctcaacgctcgcagaccgggccgggctgcagctggagatggcagcaatcccgggaggtctccgggcctcttcagggtgcgtccaggaggcgggttccgtgcgacgcggcgcagcccacccccacgagaccgcttaacttcgcgggggcagcctcgggcgctcggagacgcggaggcccagactgcagcctccggatgctggaagcccagactccctggggtcaccggctctcccgccaccccagctgcaaagagtcccattgcttcaccgtccggagcttagtctccttgttcctctaccagtccctccctccgcaggtctctggggacttctgaccgcctgttcttactctccccctgcccccatacttcccgcccttgtctcaggaacggtgatacagtcatcggattgctctccatctcctgttagtctacactgcacacaactcaataatccgctcccttcatccgggtgacagagacacagataatctgagctagtggtgctcaaagtaccggtcccagaacagcagcatcagcatctcttgggaacttgttaaaaatgagaatttgggccgggcgcggtggc

SEQ ID NO: 13885 - DNA, 1232 bp, Artificial sequence
  DNA replication origin
ccctgcccccatacttcccgcccttgtctcaggaacggtgatacagtcatcggattgctctccatctcctgttagtctacactgcacacaactcaataatccgctcccttcatccgggtgacagagacacagataatctgagctagtggtgctcaaagtaccggtcccagaacagcagcatcagcatctcttgggaacttgttaaaaatgagaatttgggccgggcgcggtggctcacgcctgtaatcccagcactttgggaggccgaggcgggcggatcacgaggtcaggagatcgagaccatcccggctaaaacggtgaaaccccgtctctactaaaaatacaaaaaattagccgggcgtagtggcgggcgcctgtagtcccagctacttgggaggctgaggcaggagaatggcgtgaacccgggaggcggagcttgcagtgagccgagatcccgccactgcactccagcctgggcgacagagcgagactccgtctcaaaaaaaaaaatgcgaatttgggggccccaccccagatctactgaacagaaactctgtggagcccagcagatgattcccatgcacactaaagtttgcgagccactgatctaaacattctttcatccattcattcttcacctggcccacccagcattgccagtgggagagacacccgcaaagcaccaggctgtgagccccaccgccgtgcactctgagacactgtccactagctttgggatggcaggcagaggtactccagcttggtctagtgcagacctgggaatcaggacctggaaaggaggccccaggtgccagccggcaggttagctaatggcggccaagggttaccccggagtggggagtggggagaagctgcctggtttggcccgtgctgctgcactcaaagcacctacctttcaaagtgcaagaacaggaaagtgaccctcctctgcccccagtaagtgatgacggagtctctggaaggccagacagatgggatcttgctctttgcagcagtgagctatcctgactgggtgggtaaccaaggagaagggctttctgcaggagaggaaattcattcctctcttccaaagtaagggcttctatggctgtctgcctggaaggaaaccaaggcaaagagattaaatgtggaaaaggtcaacgttctgaaagggaagctttatggggtccttcccatacaacgaaggaactaggggcagccacataagccag

SEQ ID NO: 13886 - DNA, 941 bp, Artificial sequence
  DNA replication origin
cagtatggagaggcgctggcaggggacgagggagcagtatggagaggcgctggcaggggacgagggagcagtatggagaggcgctggcaggggacgagggagcagtatggagaggcgctggcaggggacgagggagcagtatggagaggcgctggcaggggacgagggagcagtatggagaggtgctggcaggggtgagggagcagtatggagaggtgctggcaggggtgagggagcagtatggagaggcattggcaggggtgagggagcattatggagaggcgctggcaggggatgagggagcgctggcaggggatgagggagcagtatggagaggcactggcaggggtgagggagcagtatggagaggcactggcaggggtgagggagcagtatggagaggcgctggcaggggacgagggagcagtatggagaggcgctggcaggggacgagggagcagtatggagaggcgctggcaggggacgagggagcagtatggagaggcgctggcaggggcgagggagcagtatggagaggcgctggcaggggtaagggagcaggagaggagagcagggctttactcccctggctcctttctcccctcaaaacgtgtctcattcacttaggccttctttgctcaacttttcaggtgacagcaagccaggtcagctgcctgatggccctcatgcagctcctctcaaagggtgccattaactgtgtccagtctctgctacttcaggcctctgggtggtaaccactgctctctcttgctggccccgggtactgtaccatctcttgttgatttccctaaactctgcccatatgcttttgtgcatattcctttattgaatggaatgtgttgtgtttcctgctggacccctgactgatgatatagtatctgatatgttaaaggaatacataaaatgatgggccagactac

SEQ ID NO: 13887 - DNA, 1273 bp, Artificial sequence
  DNA replication origin
aaaaaggagcaagggcatctgtcagtgaagagtgagggagtgtcagagattttaggagaggagagaagatgagaaatgctcaatgaggaggagagtggagtgaactgagcgcagaagcaatgccagaaatcagttggcccctttggagggctgccttcatggaattaaaggagtgccaggtggggcgcctcacgcctgtaatcccagcactttgggaggccaaggcgggcggatcacctgaaatcaggaggtcgagaccagcctggccaacatggtgaaacctggtctctactaaaagtacaaaacttagccaggcgtggtggtaggcgtctgtaatcccaactacttggaaggctgaggcaggagaatcgcttgaacccgggaggcggaggttgcagtgagctgagatcgcgccattgcactccagcctgggtgacaagagcgaaattccgtctcaaaaaaaaaaaaagaagtaccgacagtcagctctcttcagtgcctcaggagggtgtggaagacgcgaagctctggatttaatcaaagttggagtttggttaggaaaatacagtgagggggcgggacaccgaaagtgaaggatgtatgcaagggagcgattagaaacacgtgcgtcagaacaccagcgggagcttgatgaaaatttaggaggtggtggtggtcgagcgggatggttgaaatgtaaattttggagggatgtgggaattaataaggacaacgtctatgacatgaccgtggagcggctaccgcgcgggggtagaaattactggagaagagaccagggatcaagaggtggaagagctggatggattgtctacgtggatttcggagcctgttattttggcagtcacctttctaattttctaaattcttacttgttcccctttgaaaagcattctgttcttgttctgtggctataaaattttctgaatctttctaaggatattagagcgtctccctctctctctctccacacacacacacacacacacacacacacacacacttttgttcttcaaatcatctttttctttggagttggttgcactcctggtttatctagatcattctcatttgatgaaacaccgtggtgaaaaccctcctacctagtgcttcgccctcatcacgattatccatgtggtgagtctttaaaggccaggtgacggcccttccccctctcctgggaaatcacgccagcgctgatcctgctaggagaggggagaggggagagaatatgaatgagaccttgaaagcagaa

SEQ ID NO: 13888 - DNA, 1264 bp, Artificial sequence
  DNA replication origin
tttggggtcatatttggaaaagcccctgtcttcagcagccacagaagctccccctgggacctcctcaagccaggagcaggctgtgagaggtttccctggaatgggggtctgggtgccccccacccccgtttccacctcccgcctgcaccgccgggagctccggaggagttcccggggacctagaaacagcggcgagagcgtgagaggggaagagctgggggtccgggccaaaaggaggatggaggggctaggcttctagagcgtgggaaggggtcccagggaccgagccaagtggaaggcttgtccaggcccccgcctgctcccctggatctggagggagcctccacgtgcttccggctggggcggcaccgcgcagtgccgggagcgcccacgagggggcgcgcgagctcggcggcggcggcggcgccccagcgggagcgggaggccgcggggcacaaagagtggcggggcggaccctggggcgcccgggttccctgtcccgtgggtccccagcaaaccgcagcggtaggagaggtgggctttgcctctgaagcacagcaggcccttaacaagttttcacggactgaatgcgtgagctatgtaagccctgccgcatcgcgacgttagaggtttcccaagttacgcccccgcaggcgctctgatgctgacatattaaaagaagcccggaggaagagggcgacgcacgcgggtggctttaggccgcctatttggggaataaatgacagaaggggcgtggtggggtggggaggaagcgggtccccgcgccctgggttccgattctggcccgaggctcagctaggatggccccagatcccagagaacgtcctacctagtgcccgtttctacacctccccctcccgccccagagttacgggttaaggagaaagacttggtcagagaaaacgtgagacggcgccggggcagggaccctcctcccgcagcacacatcccaccctccttgctcagacacaggctttttctggctgcttgtgcttctaggaggcgccactgcgggagtcagccgtaggaggggtgggctttgcctctgaagcacagcaggcccttaacaagttttcacggactgaatgcatgagctatgtacgccctgcagcaccgcgacgttaggacccccttctccaggaggggtccttaaccagctccccctcctctgtggtgatgacagtgacaaccccaggttcaaatccctgttaaccggccgggcgcggcggatcatgcctgtaat

SEQ ID NO: 13889 - DNA, 731 bp, Artificial sequence
  DNA replication origin
ggggaccagttgctctcgccggctccacaatcgtttgggccgggtagcgaccgacttttgtgagcgtcctctctctgcggctctccgccggccaggcgggcagagttcctttactagctgtcccttcttcccagcctgggcccttgacccagtctctctccgagggtgaggagaatgcgcctccagatcgaaatggcaaacgcggagcctcggaatgtcggcggaggcggggaggcggcgcgcggagccgcggaactccgagggcggtcgagggcgcgccggctgggcagagcgggttccgcgggctccctcacacacctgagtagatgcgggaagcagggaagagcatttgagagggcattagccttccccttcctcccaaaggccgctcccgggcattggcgttccccttcctcccagaggaaccgggtgaagggcgcagagaggtccctgttggttcatttcaccctgggcttgtctcgcccagggtgagattttttctggcggggggtggcggggggttagagggtgtaagagtgtgcctgagatttagggaaacgtcccccaaggtctctgtgcatgcacagagcctactgatgtcttgcacagcacgccgttcccccagccccctgaccccaggtattctcctattggcctttgttccttgctgaccacagagatgatgagcaggcaaccacgcactgaccttcgtggacaaacaaacccagctg

SEQ ID NO: 13890 - DNA, 911 bp, Artificial sequence
  DNA replication origin
cttattttaatgaactgaggtgggaaagggagcctgtagcagggctgtagcagtctctcttcagtcactgccctttggagaaagacaggctgtgatgtggtgacgcctgccagtcagtttcagagatttcccaggcaggttctggccctgggtgctcctggccacccgacagaagtccgggatgggaaggccggatgtgtgtttgtgttgggggcagggaagagggtctaggatagggtactggagctagctggaagctataaaggccagggcgggggcgttccaggccagggcaaggaaagaggcccctcagggccaggtggggagctgtccggatcctggtgctgaaaaccgagagcggcgatcaagggggcggagagcacccagcagagcttgcgcctccgccctaggtgagggggtcgcgggggatggaaacggattcctccccatcccctcttctactcactctccaaggagggaagggcacaacgagttggggcgagaaggcaggatgagcactaagaagtgtgcagccgccggaagctgcggctatggggaaagtgggccgcgacccgggtgtgagtagggtgtaatctgggccagctggagggatgagcagggaagagaccctggagcagggccgctccctcgctggcttcctactctccgggcaagtaccatgggtgcacgaggtgttcccacgcctatggcacagacacgcatgcacagaggacttccgtgggcgcatacacaccccgtggacacacggggtacgctcccagaagtgacacacaccaagcacacgcaggcagccccgtacacgcaccctgcagtgggcaccagctcccaccaggctgccgaggctcccgccccagcccgcgtcctctggcctggacgcccctccagctttg

SEQ ID NO: 13891 - DNA, 1418 bp, Artificial sequence
  DNA replication origin
tttttaaaagaggaaaggccatcttcctaaatattaacagtgattctgtctctctggttggtgaaatcgtgggtactttctattgttttctttgtctttatctctattttccaaattgtctatcatgagcatgagaattcgccatgagaacaaaaattaactttataattatttttaggtaatgatgtgtaacaggaagaacagaaacgcaaagtgcaggagggggcagggctcgtctggggtgggggcgtgtgggcgggcaggaggcctcgcggcccagatgtcccttgcggtgcctgggaggacagagccaccgtcacaaaaagaaaccagaaggaggagctaattttggggcaaggaggaaatgttaatctggtgcttggattccttgaatttgagggcccaataaggcggcaggggaagagtcccgcccagagccagagcccgaagctggagctcccagagcctctgagttagggcaggaggatttgaggagctgagagcagagcagagggaccaccaagggtggaggggggaggagagggggtcccaggacagcccgctggggactgggacggggcccagggatgaggaggagctagagatggggagcaggctggtaatccggggtcagattaggagagtgtaatggacgcctggtaggggaggaggaggaggacaaggggaagaagagggggatggtggggaggagggacggtgccagccgaggagagagggctctgaggaaggacgtgagcagccatggggacctcaagagagcagcttcagggaaataaacccccgcagagcccacagtaagggcttgagtaaggggaaaggggaaagtcaaggagcccaaggggttttgttttatttagaagcttccgggtcaggggaatggaagctgggaagctgctgcgcgcagctgctgggaagggtgatggttgaggagagctgttgctgtggggaaggaagcaatgctggggaaaatgattaaaaacagaagaaaatgcaagacgtttaaggagtcaagcgggtatggggcccagggcttaaatgaagcacttggaagcccattgaaaatactgacacattttgagaaaaaacagaatacagtgaatgatgcttcaatgtggcgagaaagggctggtgggctccaatcccgagaaggtgcagtggcgaataatacgccattcacacaagagctcacatttacacaatagcaggcacatctgttcctgggacagcccatgacaaagaagccattattttccccatttttacagaagaagaaactgaggtacagataggtaacatgaaacatccagggttctacaactagtaagtagcagagctgggatctgaacccagacagtaagtctggctgacatgtctcattcttaaccactacactacga

SEQ ID NO: 13892 - DNA, 1371 bp, Artificial sequence
  DNA replication origin
taattggatggagcccacccacatggtggagggtaatctgctttactcaaagcccaccggcttaaatgttaatctcatccaaaacaccctcacagaaacacccagaatagtgtttggccagctatctggtactgtggcccagccagtttgatataaaattaaccatcacagtaagggatgtagggaaggggaggcaaattgttgagtcccaaacactatttcagctgtcccagctcccttcataatgaaacaggagtaaaatggagcaatgggtggatgggaagatggagatggatgggcagataagtggatgggaggatggatggataggaggatgggtggatgagaggatgaacggatggatggatggatggggggatgggtggatggatggaaggatggatggatagaaggatggatggataggaggatggagatggatggaaggatggagatggatgggaggatggatgaataggaggatggatgaatggtaggatgaatgggtgggaggatggatggatgaaaggatggatggatgaaaggatggatggatggaaggatggatggatgggaagatggatggatgaaagaatgaatggatgggaggatgggtggatggaaggatggatggatgaatgggaggatggaaggatggaaggatggacaataggaggatggaaggatggacaataggaggatggaaggatggatggatgggaggatggatgggtggatgggaggatggagatggatgggaggaagaatgaatgggagggtggatggatgggaggatggagatgggtgggaagatggatgaagaggaggatgaatgaatgagaggatgaatggatgggaggatggatggatgggaggatggatgatggaaggatggatggatgggaggatggatgatggaaggatggatgatgggaggatggatggatggaaggatggatggattctgggaagatggatggatgaacatagacagatgggtggatggggcggtgtctatgtagataatagacagggatagacagacactagtactggcaacttttcagacactattagatggaaattttcaaaaatacaaaattggagactgacagagcagaaaggccaactgacccaactctaaatttccacatgaggaaaatgacacccagagaagagtgacttcctcaagctcacacatgggttaatggcagaggttctattacctcctggcctggttactgagattggcataggaatgaagtatgtacacaccagatcaaatgaggctaaactgcaggagcaaactacctctgaaatctcagaggccttgcacctcccaggcttcttgcgtgcttacacaatgcgccc

SEQ ID NO: 13893 - DNA, 1451 bp, Artificial sequence
  DNA replication origin
gccccggcgcatttctagcgccagctcccgccccgcccctcagggtagcgacgtgccgggcggctgctagccctgggcccgcagtgtgcacctcgcggggcctcgagggagggcctcggcgcgccaggagccacgcgcgcacccttgggtacctcccaaaaatttgggggtggctggtaggagcgagaaatccttgatgtccctccagaggctccggcgcgactatggcgcaaggaccagccccttgggaaggtgcttcgagccgcgcggggcgcggtcggggcgggggtggctgtgaggggctccgcggagcgggctggggcatacggctgcgccctcgttggtcctggcgcggcttcggggtgggagcgaatcgggactcggccccgacggccctggacgccagggaagcccagggttagagggagcggcccgcagtgcgccaggctccccgacccagattgcggggttgggggttctgaagtcccaccccttctctggcacgcggagaatcgagttccaagcctcagggcaagttgtctctggctggcaccccagggagtgcacgctctctggagggctccaggcgggcactgtggcctttggggacactctggacatactgtgggtctccatcctcaactccgtatttcctacgtacaaagtgggggttggggggtggtcccagatgtagccacgtttttgtcatcatagcctgtgagtggtgtggtaggcatgtttcacctgtatcgtttgtagttccccgctttacatgatgggttggtttgttttgttttgttttgttttgttttacccttgggcttcagggatgaggaatctaaggtccagcgaggttaaatgactttccttagaatccacagctggtaaggaatagcaatgggctaggaacccaggcctattctggtccccactgcgcagagcagctccaaaaacaaaccactccattgagaaccaacccagccaggcgtggtagctcaagcctgtaatcccagcactttgggaggccaaggtgggtggatcacctgaggtcaggatttcgagaccagcctggccaacatggtgaaacctcatctctactaaaaatacaaaattagccaggtgtggtggtgagtgtctgtaatcccagctacttgagaggctgaggcaggagaatggcttgaacctgggaagtggaggttgcagtgagccaagatcagaccattgcactacagcctgggcaacaagagtgaaactctgtctcaataaaaaaaacaaaacaaaacaaaacccataacataaagcggggaactgcaaatgacgttggtgaaccgagcctgccactgccgggtttggtaatgcccaaaagctaagaatggtttctacatttgtaaaagtttgaaaaaaaaaaatcaaaagaagaggccagatgcagtggctcatgcttgtaatct

SEQ ID NO: 13894 - DNA, 1202 bp, Artificial sequence
  DNA replication origin
cagtatgttcagtggaagaagccagaaacaaagggccacatgctatgtgattccatctgtagacagtgttcaggatgagtaaatccatagagacagaaagcgggttggtatttgccagggttgggagagggaatgggcaataactgctaataggcagaagttctttttggggtgataaaaatgctgtggaatgagacagcagtgactgttgcacaatcttgtgaatatatcaagacccattgaattttgtactttaaaatggtgaattgtatggtatatgaattatatctcaattttttaaaaagagaggccctgagttccactgagcaactgaatgaagcgcagctcccttggcatgaaagggggagttgggccaggccagatcacacaaggtccacttcaaatggactttgtgctgagggctgggggaaccagtagaaggctctaagctaagaggtgacatggtcagatttgcactttaggaaggtcactgtggctgaagtgtggagaatgcactgggtgggggatagatagaccagttaggaggctgctgccccagtccagatgagggatcctggtgaccagaaccagtggtagcagggaaggagaaaagaaggcttcaagggagaggcaggagcagaatggacagctttggtgattgctgggtgcaggggtagggtgagaagagtggctgaggcaaatgggactggggaccactgattgtgggaggagtggggaagaggggctgagctccatgggcttgggccaggtagagtttgaggcacctgcaagagccccaaggggacttgaggaggaggtgttctgctccgggggtggcactgaggagacagcctagataggcagggagatctgggggcgaggcaccagcaggcaggatcaccctgccctgggagagtgtgggggagagagggccgagggccaggaagagccctggggaatcccaaaatgtgaggaacaaggagagaggaagcagaaaccaggaaccaatcagaagagagggctacatgggggcccagagaggcaatgtcttgagaatatggcagtgccagctatgcagagcgtcaatggagatcacacaggtgggattcggggacagttcagttgcttggagaacctgaggaggacagcttcagcactgtggttggactaaaaggagaccaaagtatattgaggagggagag

SEQ ID NO: 13895 - DNA, 1265 bp, Artificial sequence
  DNA replication origin
tttccatgaaggacttgactcctaactagtccccagccaattgtctaccaggacctgaagccaactcctaagaatgcaggcatttccaccaatgacagtagagtttctgcctcacctcccagggcgatgtcccatctctgtgaaaagccacttcccaacgattcagaagagtcttcaaggggctgctcccagtaaccccactcatcccagaaacaggacaagactcgttggtcttgtatgaaggtccctggggtctggaatggacccaccccacccaagagctgcttctcttccactagtgatggaatcactggtgctgttgctcaattgagttttcccaaaaaagtcagaccttgctcctctgaaaatattttattgataaattaagagcattcccctcccacccaactgctataaagtctcctagatgggtcatggacccctgtgggtgtcacatggaggaaagggagtcccattcacacaggggtgggattcctaggcatggcagaggtgggtaggggggcctgaggcaggtcccagggtcctctgaggacagcccctctcactcagcaccagagtggggagtggtggtcaggagtggagcaccttggagctttattgctggtgaatgccaaggaaaatgggacccctgccaacctagatttgcagctgagggcatcagcacccagggctccagagaaggtggcactgattcccaatcgatagagcctggctgctgacccacccacccagggacccctggatggggaaggaatctggagaggtatctgagccagggaggattggggaaggattacagtgtgcaggtctcgggcagggcaggcgccagaaaggggcatatcgcagggtagcaaggtggccacctcttcacaggtctatggtgtcgctgcccacgctcagctcgtcgatctgtcggcaggcgtccaggaactgctcctgcagcaaggcctcctcggcctgcagctcagaagcaggctctggggagtcgcgagagggtggggacagggcctggtaggatcctgaggccgggaggctggggctgcttcctgagggccgcgggggactgaggacgcagaccagagggcagcgcgggggcctgtcggggctggaacacagcagcatggacgagctgtcccgcgagagtccgcagaacgagccagatgagacgctgctgcctgcgggccaagccccaggggaggggagctccgggggcgcagcggggccagaggcctcccctgatctct

SEQ ID NO: 13896 - DNA, 1135 bp, Artificial sequence
  DNA replication origin
cagggcgtgcagcacctcatagccctgcagggctccgctcagcagcccgaaggtgcccgccaccggggccgtgcgcgccgcgcgccgccaggactcccgaggggcgaaggggctgcgcccctgcggcaggggtgtggcgcccttgaagcccgaccctcccaggggcgccccggcccgccgccgccgcccgccccagcaggagagcgccagcagcagcccggaaaggaaagcggcgagaaaggcgtgcagcccgcgcgaggcgagccgcaggggccgcagcgggcgatgcgcggcgctcccgagggcggcggcggccgccagccccagccccaggagcagcagcgcagccaggccggtggggcaccgcggcgggcgcggccgggccagcagcaggcaggccagccccaggccggcagccaagcagggcagcggaaggtcctgcagcagcagccaggcgagcgcgggcagtcgatccctgtgcccataggcgtcgtagaagagcgggaaggcccgcgtggtcccggccgacagcagcagcaggtccagcagcgccaggcagggggcgccgggcgggcaccgccagggcaagagggccagagccagcagcgccagcaaggcaaccaggccgaagagcgcgcctaccccgtacacgtgggcctcccaggccagcccccagcgagccctggcctctgcccagtcggcctccagggtcaggaaaaagaggggcctcggcgcctcgggaggctgcccctcgcgttcaggcaattctcccacgctgcaggaccctggcccacactctggctgccccgaagggttcccgaggctggcgggaggagagaggtcatctgggccagagatggggactgtggggtctgtgggcaaagaacgtttggcttgaggcaatgatgcagccctccccttacccaccccacaagcagtagcctgaatgccagtcagagtcccctaccgtatccaggacacacttgtcttacatatgagactcaccccacctcttggcctctcacctttccctcccccgcgcccctattcaatgtcttcgctggagtttgagctgtcatccttcccctcttccttctcctacttctcgcgctctgcctcggccccccagctccct

SEQ ID NO: 13897 - DNA, 957 bp, Artificial sequence
  DNA replication origin
tgtgtgcgcgcgcgcgtgcaggggcaggggggtatgtgacgggtgagtgtgtcacgggcgctagatgtggctatgtgtgtgatgtaagggtgccgggtgcatgtgtgtccctggctcaccctcccttcccccaccagatgtgtgcgcacagaggagagagttctggggagggggtaggagtccgccgcagctgcctgcagttcgcccagcttgcctgcctggcgttctcctccaggaagccggagatcgccaagctgcccctcccccgaatacttcaagggtcctagggaagggaacaggcccagccccaggaaacgggaggggcgggagggagggtgcttctgccagattgggaaccttgcttctctggccagagcctgggcggccttctgactgggccagatcactcagctctggctttacccctcccgaggccctgtgccccctggggtctgagagtgagggcgccagcacttctggctggggcgggaggtgggggttggaataggtcaagacatcggaagggcttgcttgttcacagttatatgcccagaagggtgcttggcaaacggtaagcctgcgtaaagacttgaggctcagcagagggaaggaagagaggaatccatgtctggaagcccaagtccatcccttttgctactagttaaggatgagggcccctggttgcagtcagaccccagcttctgcatgagcagagggggaaggaggaacccccaggcagggatttgtgctggggcctgaaggtacaggaagggcccggcaagaagagccagagccatggacaggacactttgcatcctgcccacactacctgcttctctgagatcagaagcctctctctgggacatccgatcctgggaaagggaagaggggggccacagccagggctcacagggcctctcctctctccaggaccttcctcctcaaaagctgctgaac

SEQ ID NO: 13898 - DNA, 1178 bp, Artificial sequence
  DNA replication origin
gtgtgtgctgggccgccctgggagtgtgtgattgctctcgccaggctcacagcgaggcgcccgccgcggctgattgacagcgctgggtgaatgagcgcgcgtggaggcgcccggcaccgaggtggccgcggctccgcgctgctgtgagcgcctgcctgcccgcccgggtgtggggggaccgcgggtggcgggctgggtgggaggaggaggaggaggaggaggagagagggcgcgggagcgagggcgggcggacgggagggccgtcagagccggctgccgcggagccccggcgcgggcggcttcgccggggagcgaggctcggagccaggaggcggcgccgctgggagggagcgcggagtgcggagtgcggagcgcggggcctggccgcccgcctggtgagagcgctgcgggccggggctgggccgggggcggctcaggggcagcggggcggcgaggctgcggtctctggactaggcgaggggccgccgggggctggaggtccggatcttcagtcggggcgctgggcacaacagagagaagcggtgagataccacgaagcgttgcccagctgggcgccagggccgccacgaccgccccttttcggaggctcggcgaggagacctgcctgcgggagagaccccggggagcaggtcggccggtccgggctgggggtgtgtgtgcgtgtgcgcgcgcgtgtgtgcatgtgtgcctgcgaggggtggtgggcgtgtacgagtgtggggggatggcggtgtgtggcatgtctgtgtgtgtgaatgtgtgtagggggtgtgcatctctgtacagtacatgccgtgtgtgtgtgtgtgtgtgtgtgtgtgtgtgtgtgtgagagagagagagagagagagagagagacaggggaggccgggggctcacagagcttgggtttgaacccatgcagggaggagagtggctcggcaggacggagtgtgtgtgtgtgtgtgcgcgcgcgcgtgcaggggcaggggggtatgtgacgggtgagtgtgtcacgggcgctagatgtggctatgtgtgtgatgtaagggtgccgggtgcatgtgtgtccctggctcaccctcccttcccccaccagatgtgtgcgcacagaggagagagttctggggagggggtaggagtccgccgcagctgcctgcagttcgcccagcttgcct

SEQ ID NO: 13899 - DNA, 1136 bp, Artificial sequence
  DNA replication origin
gcaggcagctgggggcgtgcgcgcggcgcggctgagccctttgtgcggcgcgggcggaggcggcggtttccgcgggaggggcgagaagggcgggaggggcgggaggacagggcggcgccctggcccgccctgccgctgccgcagcccccgcccccgcccccggcccgcccggcccgcggcagcagcgtggccgcggcgcggcgtcagcagtagcagcagcagcagcggcggcagcggcgggcggccgcgcgggtgtttatgtcgggtcgcggggtctcgcggcagcatggcggactacctgatcagcggcggcaccggctacgtgcccgaggatgggctcaccgcgcagcagctcttcgccagcgccgacggcctcacctacaagtaagcgccgggtctcgtacccctaggtgcgcgcatccacgcgccgcgacccccgggccggccctgcacgtgcgcggctcccccggcgttccctgcccggtgcgagtgcctgctgtgggcgctgggggctgggcacgggaaggaaggaggcccgcgccggagcagacggacgtggcacggcgacaccgcggccctcagagccctgacccgtttctggccagatccgggttcggcctgtccccttcctcctctcagcggcatggaggggccctcgggcgtgtgggaactggagatgtgggcattatggggagacttttcccagccgctggtccaggacgccccctcccagcctcaccacgagggcagagggtccccggagccaagcttaagcagccgcttccgcatggccccaggagaggcccagccaggtggttggggtggcttcttttccaactgtctagtccagcgctttttccagttgtgtccctccctgcccacaggttggtattggtgcccctcccaaggcgcgaattattctgtgactgctacccctaagcccaccctacatggggttttggaggaggacacagacccacccgtctgcctctggcttcatttgccttttccgtggtccctaggccagttgccctgcgtgctgcaggcctggcactagctctgcctcctggctgcaggactgtgcccctgccaggaaggagcatcagaaggggcagagtggggatgctggccagtca

SEQ ID NO: 13900 - DNA, 1237 bp, Artificial sequence
  DNA replication origin
tctgtgcctgcagttggcatgatagctctgttcttctgtggccagaaaggtaccccagagcagctctgaatggtcaggcactttctgtggctggtctcactgctctgctccacgtggccagtgaaaggtcctagtgctggtgctcctcaggacgctcccctggtcccccatgtggcccgggctccctgcatgagcccaagaatgctgaaggttcagaggtgcttcccacacatcgctggcaatccggccccagcctcccctctgcacacagatggaacagtctgtgttttcctggcagggtcccgggggcatcaatgggggaggctgggcatcccagggaacctcgtggcttggaggccaagcctcccctgggcctagctgccatcacactgctgagaagtaaataaacccagcctcccagggccacagccagccaccaagccagggaggggactgtgtcccacaccaccttattctcttctccccaagtgagctgtgggagccacaggaggacacagggaggaggctgtggagtctgggtggggggacccactcttggtctgggaagagcactggcagttctggtcccataagagggaaggggatctacttcctaccaccccacctttccccatgtgaacctatctgtacccagtcactgcccccatgtagaaatctggatcttgctgggcacccagggccaccaacttctgctttggggatttttcagaagttccctagcccctgttcttatttgtatgcacacttgtctaagccaggcttatgatcctcccccatcttcccaccgcaggaccctcccaaataacaaaccgctctctgagattaaaagccctggtaccaacaccattttctcagccggagatagggcggtgagccgaagcactgggccatgaatcagaagcagtacccctcccttcctttccgaactatagattttgcctctgtcaagggaatgggtacccaatacttgtcaattaatagattgtggagttaatgtgctcatttatgaaaaatgctttgtaaactgcagagggccccaaggccacccaaaggtcaaggagtgtcattatgaagaatgccggctccctaggatgtcgggatggggcatagcgatccaacctcaaagtccttagtgctgggtagctgagagcccagaccggtttctcagggctccgggccttgatcagggtccgcggaagagtattggggattgggg

SEQ ID NO: 13901 - DNA, 1933 bp, Artificial sequence
  DNA replication origin
ggacacctctccccctcatcccccgatgtaccctcgctgaatctgggatgggagagacgaaccgagtctaggcatctgcgtagcagcgccggggagagcggggagcccagggcggagcccagtcgactcccggattcccctgccccgcccccggcacgaggccccgccccggcggccccgcccctcctcgggactcgaccgggctgcgctcactgcccagccggggccccgggagcctccaggctcccgcccgccctgagctgcggcctccgcatggaggggccactcactccaccaccgctgcagggaggcggagccgccgctgttccggagcccggagcccggcaacacccgggacacgagacggcggcgcagcggtacagcgcccgactgctgcaggccggctacgagcccgagaggtgacgcccagggcagagcgcgcggggcgcatccggggcgggcggccgaggagggcgcggcggctccgggaacccggcgacgctgcgggggaggggcaggccccacaaacccttcccctattaccgcctcagcctctaacttcccgaaacgccacgctcccggctttggttgggggatgcagacgggcactgtgcgaagggttaggtgcttcgttgcacgggggagcggaggagagggaacaggtcgtaaaaaccttccctaaaatcttagccctagattggacctcgctacacacccgacgacaccccgttcaggtggctccaactcctggggttcaaacagtgcttgctggagtcctgtccgactgacttggcttacccctccttagctgtttcctcctagaactatcttcagtggtcttactggcaggtgttggtgtccagatggatcgccttcgcagggctaggtgaggacactctcccctcctcaccatgcactgagatctgagaggctgccagtgcagctcacctcaaggtctctccgaagacgcaggcccccatgctggggtctgtaggggaatgagggacactggaggaagagtagggtagtgagctgggccccagggggactggctgaaaaggagacagcagctaatctctggattgtatcgcagcttgaaatgcaatcccactgtccttccggtccagaggatttggacttctttctctgcccatctgctggtgttcagcagcttggggaggtgacctggcagctgggttagatgggggtggtctgggggaattagcccggcagctctgcccaggggttggccgcttatgtaagaacttttaacggcttaaggggctcctcggcagtggggctgctgagttaggcccccctgtcctggcaggctgcctctctagaattgactcaggcttaggcaactcccagcctttctcctgtcctagaaatccagctcctggggttcaggccgcagggcgatagggaggggccacaggggctgaatgagccggttggggcttgacagaggcagtgcttggttagagtaggggttgcaaacataatgtttcagagctcaggccggagccatgtgagtgcatcctttctccagattgcacttctgcatcaaggggccatccctacccccacccccaaccgacccgcaccccccacttgggctcagggagcctgtgtaaacctgagccccagccaggtggtgtagtgagattcaaaacctgctggccagacctccacctgccttcgccaacctggagctgtgggaagaggacaggattctgtgagcagtcctgggtttgaatccagtgttattgctctctggcttgaacttggacaggctatgcccccgacccagctcaacagtgctaatgttactaccttttctgcccttcccccatcttcccctcaagagtgttttgaaatcttgttccttcaaatagccccaggcctgatagagccctcggggttccctgcc

SEQ ID NO: 13902 - DNA, 1057 bp, Artificial sequence
  DNA replication origin
gccgggagcgtggcgtttcgggaagttagaggctgaggcggtaataggggaagggtttgtggggcctgcccctcccccgcagcgtcgccgggttcccggagccgccgcgccctcctcggccgcccgccccggatgcgccccgcgcgctctgccctgggcgtcacctctcgggctcgtagccggcctgcagcagtcgggcgctgtaccgctgcgccgccgtctcgtgtcccgggtgttgccgggctccgggctccggaacagcggcggctccgcctccctgcagcggtggtggagtgagtggcccctccatgcggaggccgcagctcagggcgggcgggagcctggaggctcccggggccccggctgggcagtgagcgcagcccggtcgagtcccgaggaggggcggggccgccggggcggggcctcgtgccgggggcggggcaggggaatccgggagtcgactgggctccgccctgggctccccgctctccccggcgctgctacgcagatgcctagactcggttcgtctctcccatcccagattcagcgagggtacatcgggggatgagggggagaggtgtccctacacgggtgggactggaaagaaccccgtccccttccctgccgtccggaccttccagtgtctcctggccccttccgaggaaaaccagaagaggaaaggagctggactccagaggcagggcttctccttgcgtctcaggtccgctcctctcttgcacgccgacgatgccaggtcccctggagcgcctcatacccgcagaccgcagacctcccgcgctggggcgagagagtcgtgctcagccgactccacgttagagagcggggagagggatctccacagcctgtaatctgccagggaacgaacagaacagacaaggctgcgggctccttaaggaacaggacctagtcttgcctcgttgtggaggtactttaccttgttatgttaccccgtaacaagggagtggggcagagcagtgtactcaaacttgtttgtccacttactagaaggcgcactttttcctactgttatcattgt

SEQ ID NO: 13903 - DNA, 966 bp, Artificial sequence
  DNA replication origin
ccacacaccacaaacacagacacacacacccccacacaccatatccccccccccccacacacatatacacttttaggcctgcctggaaggtagggtaggattatgtcaagggttccacagccctgatgtgggatagggtgaaaaaccacatgggacttgtaatggaagggtgacaaggagcagtgaagagtgcttcctgtgctcccaatgagatctcacatggcctggggtcatcaggcccacctctgtaccttcaagggggtagaggtgttgcctgccctccccacttcacaggtggctctgggctgagctgcagaggcacctgagcgggggtggggggaggggtggggaatggcagtgctgtggatacagctcctggcctcaggtaattaattagatggggctggaggcctagggcaggagggcctggggatcagccaagagacccaggtctccaggcaggaaaccctgggcacccactcacacccacaaccaccctgaggaccgaggggtggaaacaggagcacagggaattcctctccaggtattggctcctgggagggagtaggttgggcaggagggagatagaacagctgtgggaaccaacaaggtctcaaggcctggaagtagggtggggaggtgtcactttcagatgtgcccttggactgatcaggcaagtgggaggctatgcctggggatggagggaggcttgggggaatgaggtgggcctgtgactacctgtcatgtggctgggaccctacccttctcctccctctctcccaccttgagaaggaagccccgttccacctccctgccccctgccctctgttctaaaacacagcagcctgcttgtaccctatgacctgccaagaggcagggacttaggcgacatggagggagggtggggttctttttgaacttggggcccaattgccctcctgaacatggaccagaacaacttctgac

SEQ ID NO: 13904 - DNA, 1236 bp, Artificial sequence
  DNA replication origin
ggtaatgactctttaacgagcatgctgccttcaagcatctgtttaacaaagcacatcttgcaccgcccttaatccatttaaccctgagttgacacagcatatgtttcagagagcacggggttgggggtaaggttatagattaacagcatcccaaggcagaagaatttttcttagtacagaacaaaatggagtctcctatgtctacttctttctacacagacacagtaacaatctgatctctctttcttttccccacatttcccccttttctattcgacaaaaccgccatcgtcatcatggcccgttctcaatgagctgttgggtacacctcccagacggggtggcagccgggcagtggggctccccacttcccagacgtggcggctgggcagaggcgcgccccccacctcccagacggggcggctgccgggcgggggcgcccccccacctgccagacggggcggctgccgggcagaggggctcctcacttctcagacggggtggccgggcagaggggctcctcacttctcagacggggcagccgggcagaggcgctcctcagttccctgacggggtggtggccgggtagagacgctcctcacctcctagacagggcggccgggcagaggcgctccccacatcccagacgatgggcggccaggcagagacgctcctcacttcctagacaggatggcagccgggaagaggcgctcctcacttcccagactgggcggccaggcagaggggctcctcacatcccagacgatgggcggccaggcagagacgctcctcacttcctagacggggtggcggccgggcagaggctgcaatctcagcactttgggaggccaaggcaggtggctgggaggtggagattgtagcgagcagagatcacgccactgcactccagcctgggcaacattgagcactgagtgagcaagactccctctgcaatcccggcacctcgggaggccagggcgggcagatcactcgtggtcaggagctggagaccagcccggccaacacggcgaaaccccgtctccaccaaaaaatacaaaaaccagtcaggcgtggtggcgcgcgcctgcaatcccaggcactcagcaggctgaggcaggagaatcaggcagggaggttgcagtgagccgagatcgcagcagtacagtccagcctcggcaacagagggagaccgtggaaagcgggagacggagacgagggagagggggagaccgtgga

SEQ ID NO: 13905 - DNA, 1337 bp, Artificial sequence
  DNA replication origin
ggcccggaggacccgccgccgcctttgtgtcaccagcccccgccccgctggactggcccgggccggggcggttgggccggcgctgaagaggcttggccgcccgggtccacccgttcccggatccgcctcggcggcccccgcgcccgcccaacccctgcccaacccctcggctccgcgagtttgggtgagaagtgcggcggcttttcccagggatggagtttagaggacgctaatcctatgtgcgagcggcggaccccgcccggatttcccggaggcgcccggttagtgaggcgacggcgcccacccgcgttcgcgggctcccgaccgccactccccggagccgccggcccgccccagccccgcgcgtcgccccggagggcgggctgcactccctccacgcacctggctggcagagcgtctccagggacaaaaggtgccctggcatcaaagccgagcccccgcccccgccgggatgctgccctccggaaggaggggcgctgcccccaaggtactctccccgggcacccagggggaggttccatttcaacctccgatgaaaaacacggccctcccgggtatttaggagggtctgagggtaagtgccaagatggagaaaacacaccggcccctcacagagtatctcctgaggaatgacaactatctagtgggcaaggagggcttcctgcatagcagagggcaccccctctgatcccccaacgccaagggaaaaaaatcactcttcaccggctcccctgagccaggacaggctccagtgcagccacccaccttataattttccgcggatgctgccttgatcagatagatctgaagatgactttaaggactacaagcaaatctcaagggaaaaattcagaccttgaacaacagccttgaactttttcagggttagacaagtactcccctgtggagtttctgcccttatttcttcgttcttctgttaattcttccatattttaacagaacacagacctgccgaaacgacacaggatggcgctttgctttttgttagttctccaaccttccaaacccttggggcacatgcaagcactgtggaaaaactccattaaaccaagagtcatcttactccagatcccagactgcttgggaagttggacatgcatattcccaaagagaacagtgttggaaggagacaggagagcagctcgggggttgggggtagagggtaggaaaagagggcaagatggatgactaccactcgaggccagcctccactgcctgttagggcagtagaacctaagagccggtccaaggcaacacaaaagacagtgaggctaggtctttcattgcagccaacg

SEQ ID NO: 13906 - DNA, 1349 bp, Artificial sequence
  DNA replication origin
cggggggttgcggcgctcaggggaggccccggctccgccccgggcctgcccagggggagagcggagcggcccgcagccgggtcgggtcggggcccctcccgggaggagcgtggagcggcggcggcggcaggtgagaggctgagccccgggcgggggagggcgccaggcctggggcattaaccgtcccggggacccttttggcctgaggagcctgcgacctgggcccagctcggtgtcggctccggaccgcagctcctgggcgctgaggcgggaggggctccctgagggctgcgggtcgctgaggggccgggcagaagatgggggaggcccaggcggccccggcctgggattggggccggcggccggaggagagactggggcccctcggcagctggaggcctcggcagcctcccgggcgcccccgagagccggccctcccttcctccgtgacaggtgggcctggagttggggaaagtttggagccggcgaggggcgccgggaccaggccccatcgctcctgcttcctggctgtgggctgcagggaggatcccagtccaaggccccgctggaattagacggagtggctatttccttaacatgagttggcattaaacggaataaccgccggggcgtcattttccgggccgggcctggggaatggaggtttggtaagtgttgcgagagaccttggggtttgggagagactgcagcctctgccattccgacctcgacctcgacctcgattagggcagggcaagacgcaaggaaggccacgggggaaactcattctcccagtctctttttttccttctttttctttttgcgaagatgcatttcagcctttctgagaatttcctaattctctctctaacctgcacttgcatgtgtgggtgaaactttaatttgtcaccttttcattcccctttgccccaggctctcaatccaggaagggaaatgaaattgaaggacttgtaagggggttgttactggagattgtagagttgttggattgcagaggagaatgttcgattcatcttttcagtaactttaaaatcacaccaaccattccaactacttaataatgtgttcgaaggggttctatgtaatatgtttcttttccactgttaatattaaagagaggttttcaatgggttgtgtaggagttggtctcttgcaaaggatggacatatttgctgaaagtagcctgtgcattaattggttatggaagtttaaaaatggtgtcctcctgcccctccctgcttggaagaagggctaaaagcagatgtccagaatcaagagaaaactaatgcagggagtggtcagaaaaagattttttaaagggattgtta

SEQ ID NO: 13907 - DNA, 1002 bp, Artificial sequence
  DNA replication origin
tgcccggccgcccctactgggaagtgaggatcccctctgcccggccagccgccccgtccgggaaggaggtgggggggtcagccccccgcccggccagccgccccatccgggaggaagatgggggggtcagccccccacccggccagccaccccgtccgggagggaggtgggggggtcagctccccgcccggccagccgccccgtccgggaggtgaggggcgcctctgcccggccgcccctactgggaagtaaggagcccctctgcccggccagccgcccagtccgggagggaggtggggggtcagccccccacccggccagccgccccgtccaggagggaggtggggggggtcagccccccacccagccagccgccccgtccaggagggaggtgggggggtcagccccccgcccggccagccgcccggtccgggaggtgaggggcgcctctgcccggctgcccctactgggaagtgaggagcccctctgcccagccaccaccccgtctgggaggtgtacccaacagctcattgagaacgggccatgatgacaatggcggttttgtggaatagaaaggggggaaaggcggggaaaggattgagaaatcgggtggttgccatgtctgtgtagaaagaggtagacacgggagacttttcattttgttctgtactaagaaaaattcttctgccttgtgatcctgttgatcggtgaccctacccccaaccctgtgctctctgaaacatgtgctgtgtccactcagggttaaatggattaagagtggtgcaagatgtgctttgttaaacagatgcttgaaggcagcatgctcgttaagagtcatcaccactccctaatctcaagtacccagggacacaaacactgcggaaggccgcagggtcctctgcataggaaaaccagagacctttgttcacttgtttatctgctgaccctccctccactattgtcctatgaccctgccaaatccccctctgtgagaaacaccca

SEQ ID NO: 13908 - DNA, 949 bp, Artificial sequence
  DNA replication origin
cccacctccctcccggactgggcggctggccgggcagaggggctccttacttcccagtaggggcggccgggcagaggcgcccctcacctcccggacggggcggctggccgggcggggagctgacccccccacctccctcccggacggggtggctggccgggtggggggctgacccccccatcttcctcccggatggggcggctggccgggcggggggctgacccccccacctccttcccggacggggcggctggccgggcagaggggatcctcacttcccagtaggggcggccgggcagaggcgcccctcacctcccggacggggtggctggccgggcagggggctgacccccccacctccctcccagacggggcggctggccgggcggggggctgatccccccacctccctcccggatggggtgggtgccgggcagagacgctcctcacttcccagacggggtggctgccgggcggaggggctcctcacttctcatatggggcggttgccaggcggagggtctcctcacttctcagacggggtggcggccgggcagaggctgcaatcttggcactttgggaggccaaggcaggcggctgggaggtggaggttgtagcgagccgagatcacgccactgcactctagcctgggcaccattgagcactgagtgaaccagactccgtctgcaatcccggcacctcaggaggccgaggctggcggatcacttgcagttaggagctggagaccagcccggccaacacagcgaaaccccgtctccaccaaaaaaatacgaaaaccagtcaggcgtggtggcgcgcgcctgcaatcgcaggcactcggcaggctgaggcaggagaatcaggcagggaggctgcagtgagccgagatggcagcagtacagtccagctttggctcggcatcagtgggagaccgtggaaagagagggag

SEQ ID NO: 13909 - DNA, 1332 bp, Artificial sequence
  DNA replication origin
gcctggaaaaagcccctgggaggcaagagcagggcctgcagaggctgttctcaagtcaaagctgggcctgttcatgccactgggaagcagaaggtgggcctggagagtttgacttgaggaagttttgggcctacattggccgccatgagctggacaggaactgggccaaaaaaggctgttgtgaggcagcagttgtgcctgtagacccagccaagaggaagaggtgggcctggagaagcccccatgacgtagaggttgggcctgtagacgctgacaggaggcaggagctgggcctggaaaggtcaacttgaggagattttgggccttcataggccaccaggaggcagcagttgggactacagagtctgacttgagtaagttttgggcccggagatgacgtcctgggacaggagttgggcctggagaggccaccgtgaggcataagctgcatgtagagaggccctgggcctgtctaggctgctgggagacaggcaggaatctggccagggaaggttgccatgagacaaaagttgggcctggaaaggcccttgtgaagcatgagcttggcctaaagaggccactgggtggcaggagctgggtgtgtagaagctgctgaaaggttgggagcttggcttggggggtccacagtgaggcagatgctgggcgtgaagaatctgctgtgaggcagatgttgggactgtagaggccgacgggaggcagaggctgggcctggaggggccaccaagatgcaggagctgggcctggagaggctgcaaagaagcatgagctgggcctggtgaggtcgacttgagaaagttcagggcctggagagaaggctgggaggcaggagctgggtctaaagaggccattgtaacgatggagctgtgcctgtggaggctgttgtggggcagtaggctcatctgcggagactgccgtgacgtagggtatgggcctaaataggccattgtgagtcatgagcttggtctgtagaggctgattggagaaagttctgggcctggagaggctgccgggaggtaggagctgggccaaaagatgtaagcacatttgcatttattaggcactttatttccattattacactgtaatatataataaaataattatagaactcaccataatgtagaatcagtgggcgtcttaagcttgttttcctgcaactggatggtcccacctgagcgtgatgggagaaagtgacagatcaataggtattagattctcataaggacagcgcaacctagatctctcacatgcacagttcacaacagggtgcgttctcctatgagaatctaatgctgctgctgatctgagaag

SEQ ID NO: 13910 - DNA, 1652 bp, Artificial sequence
  DNA replication origin
cagccgggaggaagagctgggcccggagaggacgctgggaggctgcaagtgggtctgagaggccgacttgaggaggcccggcctctgcctcccgcatggcccagctgttcctcctggctgcatctcccgcctcccagcaaacaagctcttttggctcagctcccgccggcctttgtagaccccgaagtttctgcaaccaagctcttcagacccacatcccttctcccagtgactgaacagtcccagctccagctggagaagggtgtctgcagaccccgctgttgcctcccaggggagtctccaggcccagctctcgccccaccgcgacctcccaggcccaagtccctgcctacctcccagcagcccgcgtgcgaccctgctcctccctcacggtggcctgttgaggcaggggctcacactgacctctctcagcgtgggaggggccggtgtgaggcaaggggctcaggctgacctctgtccgcgtgggaggggccggtgtgaggcaaggggctcaggctgacctctgtccgcgtgggagggtgggcatcaacaggccaccgtgagagaggagctgggccgcacgtgggctgctgggaggcaggcagggacttggccccgggaggccgccgtgggggcaagagctgcgcctggagaggcccctggtaggcaagggcggggcctgcagaggctgttctccaaccagtgctgggcctgtacaggccaccaggaggcaggaggtgggccctcagagcttggctggagaaagttcggggcctagaaaggcggttgggagctgggcaggagttgagccaaaagagcttgcttacttgctgggaggcagggccaggagaggccgacttcaggacaacttgggcctgcagcggtcgccgggaggcccaagcttggcgtggaggagcccaccgaccggagaccatttggggcctggagatgccatcggagggcaggagctcatcctggagaggccaccgtgaggcctgacctgggcctggggagcttggcttgaggaagctgtgggccgaccaatgccgccaggagatgggtaggcactgagtccaaagaggttgttgagaggcaggagtcgggcctggagacgcaaccaggaagaagagctgggcccggagaggacgcccggagggtgcaagtggctctggagaggccgacttgaggaggttctgggcccggagaggccgccggaagggaaaaactgggcctggaaaggccgttgtgaggaacgagccccatgggcctgaagaggccactggcaggtgggagctgggcctgccgaagcggccgagaggcaggagctttggactcgggaggccgcaatgaggcgacagctagctgggcgtggagagtccgctgtgaggcagaggctgggcctgtgcaggccttcgggaggcaggaggctgggccttgtcgaggcctgcagaggccaccgaaagtcaaaagcggggcttgggaaggccgccgggaggcatgagctgggctgggccgaaagaggccactgggaggcaggaggagctgggcctggagaggctgccgaaaggcaggagcttcgactgaggatgccacagtgagacaccatctgggtctggagggtccactgtgaggcagaggctggcctgtagagt

SEQ ID NO: 13911 - DNA, 965 bp, Artificial sequence
  DNA replication origin
ggccaaggccaaggccaggcccgtgcaggcctttgagaggcaggaggccgggcctgcaaaggccgactggagatcaagttctgcgcctgaagaggctgccaaaagtcaaaagcggggcctgggaaggccgccgagagccatgaactgggctgggccgaaagaggccactgggaggcaggaagagctgggcctggagaggctgactcgaggaagttttgcacctggagaggccgccgagaggacggagctgggcccggggaggccgacttgctgctcttccaggcccacttccaggccgacttgaggacgacttgggcctgcagaggccgctgggaggccggagctgggcctggagaggccgacttcgggacgatttgggcctgcagaggccaccgggaggcccaagctgggcctagagaagcccaccaaccggaggccgtttggggcctgcagatgccatcggagggcaggagctgagcctggagaggccaccgtgaggcctgagctgggcctggggagcttggcttagggaagttgtgggcctaccagggcctctgggagctgggcaggagctgagtccaaagacgttgttgggacctggagtcgggccagagtccggcctggagacgcagccgggaggaagagctgggcccggagaggacgctgggaggctgcaagtgggtctgagaggccgacttgaggaggcccggcctctgcctcccgcatggcccagctgttcctcctggctgcatctcccgcctcccagcaaacaagctcttttggctcagctcccgccggcctttgtagaccccgaagtttctgcaaccaagctcttcagacccacatcccttctcccagtgactgaacagtcccagctccagctggagaagggtgtctgcagaccccgctgttgcctcccaggggagtctccaggcccagctctcgccccaccgcgacctcccagg

SEQ ID NO: 13912 - DNA, 955 bp, Artificial sequence
  DNA replication origin
ccagacggggtggcggctgggcagaagctgcaatctcggcactttggaaggccaaggtaggcggctgggaggtggaggttgtagcgagccgagatcacgccactgcactccagcctgggcaacattgagcactgagtgaacaagactccatctgcaatcccggcacctcgggaggctgaggctggcggatcactcgaggttaggagctggagaccagcccggccaacacagcgaaaccccgtctccaccaaaaaaatacgaaaaccagtcaggcgtggtggcgcgcgcctgcaatcgcaggcactcggcaggctgaggcaggagaatcaggcagggaggttgcagtgagcagagatggcggcagcacagtccagcttcggctcggcatcagagggagacggtggaaagagagggagagggagactgtggggagagggaggggggagggggagggggaggggagggggaggggggaccgttattattaaaagcaaaaagatggttctacagaatgggggcagagaggagtaggaatggtactcagaggaaactgagatgcctctttacagctcttgcccagtcaaaagaagatcacacaactctacatgtgcaaaaccatcaagggcttaggattttcaggagtgaaagtttgtggactccctaccagggaatgaacccagtcaaagcaagaggtacctggaatggtagtataggagggaagtaagaaatgacaactactactgacttgtaaccaagaagcagaaagaactaaaacttccacctgtatttctttctttgcagtgatgtatgttatttaaattaaatccttctctcattttgtgcatagggtatgcttgtggcgtttatatttactgtttggtctagaagttttgtgatacaaaggtaaggaagaaaccaggggggccaggcgcggtggctcacgcctgtaatccca

SEQ ID NO: 13913 - DNA, 1339 bp, Artificial sequence
  DNA replication origin
ggacacagcacatgtttcagagagcatggggttgggggtaaggtcatagatcaacagcatcccaaggcagaagaatttttcttagtacagaacaaaatgaagtctcccatgtctacttctttctgcacagacacagcaacaatctgatttctctaacttttccccacctttcccccttttctattccacaaaaccgccatcgtcatcatggcccgttctcaatgagctgttgggtacacctcccagacggggtggtggccgggcagaggggctcctcacttcctagtaggggcggccgggcagaggtgccccccacctcccggacggggcggctggctgggcgggggctgaccccccacctccctcccggacggggtggctggccggcgggggctgacccccacctccctcccggacggggtggctgccgggcggggacgctcctcacttcccagacggggcggctgtcgggcggaggggctcctcacttcccagacggggtggctgccgggcggaggggctcctcacttctcagacggggcggctgccgggcggaggggctcctcacttctcagacggggcggctgccgggcggaggggctcctcacttctcagacggggcggctgccgggcggaggggctcctcacttctcagatggggcggccaggcagagacgctcctcacctcccagtcggggtcacggccgggcagaggcgctcctcacatcccagacggggcagaggcgctccccacatctcagacgatgggcggccgggcagagatgctcctcagttcctagatgggatggcggccggtaagaggtgctcctcacttcccagactgggcagccgggcagaggggctcctcgcatcccagacgatgggcggctaggcagagacgcttctcacttcccagacggggtggcggctgggcagaagctgcaatctcggcactttggaaggccaaggtaggcggctgggaggtggaggttgtagcgagccgagatcacgccactgcactccagcctgggcaacattgagcactgagtgaacaagactccatctgcaatcccggcacctcgggaggctgaggctggcggatcactcgaggttaggagctggagaccagcccggccaacacagcgaaaccccgtctccaccaaaaaaatacgaaaaccagtcaggcgtggtggcgcgcgcctgcaatcgcaggcactcggcaggctgaggcaggagaatcaggcagggaggttgcagtgagcagagatggcggcagcacagtccagcttcggctcggcatcagagggagacggtggaaagagagggagagggagactgt

SEQ ID NO: 13914 - DNA, 868 bp, Artificial sequence
  DNA replication origin
cgtgaccccgactgggaggtgaggagcgtctctgcctggccgccccatctgagaagtgaggagcccctccgcccggcagccgccccgtctgagaagtgaggagcccctccgcccggcagccgccccgtctgagaagtgaggagcccctccgcccggcagccgccccgtctgagaagtgaggagcccctccgcccggcagccaccccgtctgggaagtgaggagcccctccgcccgacagccgccccgtctgggaagtgaggagcgtccccgcccggcagccaccccgtccgggagggaggtgggggtcagcccccgccggccagccaccccgtccgggagggaggtggggggtcagcccccgcccagccagccgccccgtccgggaggtggggggcacctctgcccggccgcccctactaggaagtgaggagcccctctgcccggccaccaccccgtctgggaggtgtacccaacagctcattgagaacgggccatgatgacgatggcggttttgtggaatagaaaagggggaaaggtggggaaaagttagagaaatcagattgttgctgtgtctgtgcagaaagaagtagacatgggagacttcattttgttctgtactaagaaaaattcttctgccttgggatgctgttgatctatgaccttacccccaaccccatgctctctgaaacatgtgctgtgtccactcagggttaaatggattaagggcagtgcaagatgtgctttgttaaacagatgcttgaaggcagcatgctcgttaagagtcatcaccactccctaatctcaagtactcagggacacaaacactgcggaaggccgcagggtcctctgcctaggaaaaccagacct

SEQ ID NO: 13915 - DNA, 1041 bp, Artificial sequence
  DNA replication origin
ccgggcctcctgacaccgccccccgccgctcgccgccgcccggaagccctcccagcactcgggagctccgagcccgtgcagggggcggcgcgggagggtgagcgcgaccccggatacgccccaaggctctcccctagagagcgcggggagccgcggggcccggacagcgtcaggagctcctaggcttatggctgccccaagagggaggagcgagatcccctggttctggcggcgggtccccccggggtctgctgtgcccagggacccttctgcaccaggtgtcagggcccggtcatgctcagcaatggggacggcaaaggacgaggtgggactgtttcctccaaaagcgcagacacgcgcgcccctccttccctccctcccccgcccggccggcgcccccacctagcagtccgcgctgactccggccccaggccctgcccacccctgcccggtggcccctcggcagcctgggggccggaggagggaagtcgaggcccggatgggcgaacggcagggccctgacctctccgctttccgcgaccccccaccgagccagggccaaggaccctcttaggaggagccctccggtggccccatcaagcctcagggccggaagaccccctctcctccgccctgtcttcccttccggtcccacacccggtgggctgcgagccacgcccccacagtagcccgctcagagtgggcacgactgatgttcactctcgtggaagggagatttggaagcccagggggcttatttcacgtcttcaaccattcgtttattcaggctatgactactgggtgccggctcttgaagaggcagttctcacatctcggcaggtctcggcaaggatagaagtgggcacagttgggaacaggggctccccagcacatccaggaaatggctggaagattcctaagccagggacacacgcggatcccctctctggcacatccactcacaggtcgagggctagtattgtctgcgttccccccgctgcaggaaagggatccggatccagaccgcaacagagggttctt

SEQ ID NO: 13916 - DNA, 771 bp, Artificial sequence
  DNA replication origin
tttcctggatgtgctggggagcccctgttcccaactgtgcccacttctatccttgccgagacctgccgagatgtgagaactgcctcttcaagagccggcacccagtagtcatagcctgaataaacgaatggttgaagacgtgaaataagccccctgggcttccaaatctcccttccacgagagtgaacatcagtcgtgcccactctgagcgggctactgtgggggcgtggctcgcagcccaccgggtgtgggaccggaagggaagacagggcggaggagagggggtcttccggccctgaggcttgatggggccaccggagggctcctcctaagagggtccttggccctggctcggtggggggtcgcggaaagcggagaggtcagggccctgccgttcgcccatccgggcctcgacttccctcctccggcccccaggctgccgaggggccaccgggcaggggtgggcagggcctggggccggagtcagcgcggactgctaggtgggggcgccggccgggcgggggagggagggaaggaggggcgcgcgtgtctgcgcttttggaggaaacagtcccacctcgtcctttgccgtccccattgctgagcatgaccgggccctgacacctggtgcagaagggtccctgggcacagcagaccccggggggacccgccgccagaaccaggggatctcgctcctccctcttggggcagccataagcctaggagctcctgacgctgtccgggccccgcggctccccgcgctctctaggg

SEQ ID NO: 13917 - DNA, 1894 bp, Artificial sequence
  DNA replication origin
tccctgctgcatgtcacaaggtctcctctcccctagctgagccatatgaggcccctcctactctgctgaccacaaagtagatttcaggggaagttttaggctgtacttgtgtgtaaaagaaagcctaccattttaatgcattaaaaaaactggggtttggtgctggcccccagcctctggttgtgagcacccgctcctttactgcaacgcagtccctataaatagcaaaatgttgtctggatggtgattgtttgctttgttttaaaattctgaatctctggtcttactttatctaatatcagcagccttaggttcaactgggacccttcgtgccatctgtcccccttagggggagcaggtttgcccatactgaatgtgcaacgtgcaacacttcacaggaagtactggcaaatggaccagcgtccttccaggggcctggtgttggcagcaactgccaagtcacatgggtgtggtggggatacacgtgtgttgggaggatggcctcacgcgccccctcctaggctctctctttcaggcaataaggtatcctaaagaaccaaagccacaggcttccattcgaagttaatgttggtggccccagaaagacaattcacatgcccagttccttgctttttaaaataagagacagcttgggatctgggtcggcaggcagtgaggacaaaccccctgctgaaaggctgcttcaaagctctgtccaacaaggcctctttctctgtctggcagctccctcgggacacataacctggttagctggggggtgattggggtcccgaagggatgcatcctgaacttctgtcaaagcctgagccctgggaagggctggagctctgagctgcaggaagaggggctaagatgaactgagggaagggctgtgtcctggctcagaggcctgggggtcagagggaggaaagaagggaattaagggaggaggggaggggaaagaaagaagccttttgggaaaactcaccctccatagcttgcatcccccgtcgttccagggacccccagcgttggcccttcttcctctcacagccctcggaagcctcataggagcctagagtggtcactgtgggtcctgagagcagggagaaaggaggggctggggggtggggggctggctgcgggctggggtgcagaggaaagaaggggacatgtcttccagctcctcgaggctctgggatctgtaatcccagtggaggtgcctgactcactctggcggctctgcgactcctctctctcggccacctctcagccctgcctcccagcctcctcagaacccgctgttccaggaccctcttgcttgcacagaaagaaagagggggtgtgcgtatttagtccggggggacagggaggagagggccaagactgaaagagggcgggagccagtgaagaagaggctgaaaggctgaggtggcctacagatggagggagggaggagtggggggcgtgcgggaaggggtagggctgcgaccgctcccctcccctctcctcccattctctcgctggaccttgcccaccccaccctcgccccgcgctcaggagtctccggggctgcaggaggtgtagggtctgcagtcccgaaggctggaagcaccgtcggactgaagtggagagacgcgctggggagggaccaccaggcaggatgcggccggtgcgcggaagcctcagtcccaggccggaaggatggagaccgggccccggtggaggccaggatggagggaggaagactttgggcggagaaaggggagccgcggaggccgggagcacctgggggtctggaaggaggagggatggaggagagaaaggaggggcggtagacaggtgacggaggggcggctctgacctgggcccgggcagctccagcccgcggctc

SEQ ID NO: 13918 - DNA, 1572 bp, Artificial sequence
  DNA replication origin
gagtagccgctgttgttcatcatgctggcgcgggctgggggtgcggccggggctagggccgcggtttgggctatcgggggctgtcgggcgctgttggggcgcgaccacgggactcgctgcgctgcgctgctctcctctccaacttctctcgcgccggggctggcggggctcggcgaggctcggcgggcctcctaggcgctcggccgctctctggctctctctccctccagggccggagcggtgctcgggaagggcgggctgggccggggcggggggtttaagaagcccccggaccgccgcccccccgccgcgcccgcggcccccgggtccacgtcagagcgccggcctcccaggaatgccgcccggcccgcgggtgggggccgcgccgcacaggacgccccgcccccgccgcccctcccccgcgccgcccgggcggcgggacggggttgagggcgcccaccccctgggcccccggtgccgccgcgctggaaggtggcggggagggccgacagttctccatccacacccaacacaccaaactgtcaggaatgaaatatgctccctccacaccccgcacgggctgaagaggtaaatggggaaactgaggccagtgattagggcaaaacccactgatctggtgttcacagaattttctagactagttggtggcaggctgttgacagggcctgcgagggctggctcctagcccagggcattgtccacctgtggacagggaagggaagtgtgtgtgcttgtgcagagacggcctgagaggaagcagggaccttgcccgggccaatgaaggagaagcctgcgggggggcggggggttgtgtgtgcctcccagccattgcttgactttacagatagaaaagcctcatgtagggcccaaatccagaggcccaggagtaagaccggggcccctgcccctgactcagtgtccctgtcaccagcccgtttggcctcatcgcctcggtatgaagctgagctcaggaaaagggtacccagtgactcacactgtgtatccccctcccccaagtctgactcaactgagatgataagaggggaaggagagactcttcccccatagtgccagggagccccctgggcaacatgcccatttgggccacagggcagatcctgccagggaaagggtgggtcagccaggcagaaacagggagagccccagccagagcagccagggggaaatgtgaccaggtgggtaggcaggaccaggggcagagtggtcagggagagcctaagggagccagctgggatgcccaggcaaagctgcactcagggcaagccaaaggctgcaggcctggggaatagaacagcagggaaaccgaggcacccaaacagactctggcctggggtgaggagaaagagctagagaacgtatttctttttcttttttcttttttttttttttttttttttgagatggagttttgctcttgttacccaggctggagtgcaatggcatgatctctgctcaccgcaacctctgtctcccaggttcaagcaattctcctgccttagcctcccaaatagctgggattacaggcatgca

SEQ ID NO: 13919 - DNA, 1326 bp, Artificial sequence
  DNA replication origin
gtttccccatttacctcttcagcccgtgcggggtgtggagggagcatatttcattcctgacagtttggtgtgttgggtgtggatggagaactgtcggccctccccgccaccttccagcgcggcggcaccgggggcccagggggtgggcgccctcaaccccgtcccgccgcccgggcggcgcgggggaggggcggcgggggcggggcgtcctgtgcggcgcggcccccacccgcgggccgggcggcattcctgggaggccggcgctctgacgtggacccgggggccgcgggcgcggcgggggggcggcggtccgggggcttcttaaaccccccgccccggcccagcccgcccttcccgagcaccgctccggccctggagggagagagagccagagagcggccgagcgcctaggaggcccgccgagcctcgccgagccccgccagccccggcgcgagagaagttggagaggagagcagcgcagcgcagcgagtcccgtggtcgcgccccaacagcgcccgacagcccccgatagcccaaaccgcggccctagccccggccgcacccccagcccgcgccagcatgatgaacaacagcggctactcagacgccggcctcggcctgggcgatgagacagacgagatgccgtccacggagaaggacctggcggaggacgcgccgtggaagaagatccagcagaacacattcacgcgctggtgcaatgagcacctcaagtgcgtgggcaagcgcctgaccgacctgcagcgcgacctcagcgacgggctccggctcatcgcgctgctcgaggtgctcagccagaagcgcatgtaccgcaagttccatccgcgccccaacttccgccaaatgaagctggagaacgtgtccgtggccctcgagttcctcgagcgcgagcacatcaagctcgtgtccataggtcagtgccgggggcgagggcacgggcgctgcggggatagggtcgtcccatggggcaggggcacaggtgcggggtgggcgcgcggggagctgagagacagggcggagggcaccccccggtatagagagaagaccctggccccggccctcccacccatcgacaagggccatgggcactgcctgcacacccctctggggacagcgagcactccctgggtgccccggggagtccaggccttagggtttgcgagccctccagctgccgcctccccatgcacattcccacctcccgcctcggctcaccgttccctttccttccatcgggcaaccctagcccacactcgggaggacagaaccagtgcctgtcactgattcctgggggcatctccccgcccc

SEQ ID NO: 13920 - DNA, 1671 bp, Artificial sequence
  DNA replication origin
ggcgctgcggggatagggtcgtcccatggggcaggggcacaggtgcggggtgggcgcgcggggagctgagagacagggcggagggcaccccccggtatagagagaagaccctggccccggccctcccacccatcgacaagggccatgggcactgcctgcacacccctctggggacagcgagcactccctgggtgccccggggagtccaggccttagggtttgcgagccctccagctgccgcctccccatgcacattcccacctcccgcctcggctcaccgttccctttccttccatcgggcaaccctagcccacactcgggaggacagaaccagtgcctgtcactgattcctgggggcatctccccgcccccaacaaaacaagtggcttcccagcttcacagcccctccgcgggctgggagagggctgaagacaggtccccaaccactgcccgcgtctgcgggctctggggccgaggggagctggcgcgggaggccctcttcgtgcatgtgctcagcagctgggttcaggcccgggggccaggacaggcagggcccagcctcagaaacctaaaaaggcactgagcgagcgcggggagacttaacccctgtctgtcctcctcctgcttcagcctgcggtggagggggcttccgcaagtccaggccctgccccagcccaccccctaccgcgggattggctgcagctaacggtctgggctgcggggagggagggaaaggcctgtggaagggaggaagtctttgagtgtaaccagatttggaaggtgtgtagtgcagggtgggggcggggaggcactctagtcttgggagcagagacgccaagggtgggcttggagtggcaggaggctgtcctgccctcagagtcctgcagtcatccctgaggctgggggcctggggaagatccccccgcccacccctgtggagagctcttaagaaccctgctgggatttgcaggacgaggtccttggacggtgcaccccacggccccaggaggggagtttcatgtggggccaggtgggccccacacaggatgttccctgagatttctccagatgacttgatgtctgtcagccccactctcccttggggccatctctaggcctcctgatatagcagctgaggtcagcccagggccctttgccccgtccagtcccctccctagcccttaccccctcctgccccaatactgcccccccaccccacccgcctgccctgtcctggaaatagccctgcctccgtgacacagcagatgtctctgagctttccagaaggacaaggctgagggcagggggtgggggagggagcctggagtgtgtagtgagactgagggctacgtgatggaggctgaggggtcagagaggagtcagtcctgggccggcatcctcagcaggctgggttttgaaaggcaggactgactgtaccaggtggggtctgggggaagagccggaggcttcggcaagacatataggaaaccgctcagccttcccctcccctccagtctgcgggggctctcggcccctctccaggcctcgtccttcctgagcacacctctcccctcccccgtggcggtgcctggctccagcccccttggctcagcagaggaggggctggctcagagcagaggggaagaagcaaaagctggtttgagggtggga

SEQ ID NO: 13921 - DNA, 1266 bp, Artificial sequence
  DNA replication origin
gctagctcccctactccatttagtggtggaaaggggctatccatggggccaccttctgagtattgtctcagcaccgaaatcgagcatctgggcacctcagggggtgtcagaaagactccccacttctctttccaggagggaagtcagggtctggagtagcagctgggatccaagcccacctgaagaaggggcactgagcccaggttaaaggagctgtgcccttcatatcctcaccaccttgtcctggccccccgttgcccctcgttccctccgaacaaagaggcctatgaggcagctctgtctcgcagctgttccccagttgctattccttctcctggagccaacaaccaagggaggggcgggagggggcagcagctgtcccagcacctccctaggcccagccctctcctccccctccatttgaggcctggggtggcctcgggaactagctgtctggctcctcccactcctttgggggtatccctaggcagatggagaagtggcttggtgagccctggtggcgctgagctcctctcctctgcctggcctccgagagggaggagggagagggaggtcattgcttccagagtgggacttggggccccactgcccttctcctgccccaagcctggaccacttgctgtctggcccagggccagttgctggggagaaacttccctctccagcaaatatgaatgaccaccctccccatatacacaccgccccccccaacccctgcagcctcaaggcttcctgcccaggggtctggctccagtttgcaagaagtacttctgggcgtgtgagctttggaggctgtcggggttgtgagaggctgggggcactggggcatccagactgtgtgaaagtgttggagcctgtgtgtttgagagaaagcaccgggaggcagggagtgagtgtgtcatggaatctgaaagctgccaaaccattgtgctgcagtggagccaggggaagggggtgggctggggagctgctggggaaggaaggatgaatcagtgacagggtgggggagcccaggcggccagagccccagccagagggacagggagactgaggcacccctcccggggcaggtgggagtggggcaggggatgccctggatttcccaggctctcggtctcctaacactttccccaagacctggggaagggtggaggggagaagatgtgtaaggggaaggctccactccaccctctcccatctctcgggcaacatcagtaaacaagactgtcttccacccccttccag

SEQ ID NO: 13922 - DNA, 938 bp, Artificial sequence
  DNA replication origin
acggcagagggatgcaagacccaggcccacagcctggtgggtgactcaagtgaacagagaatgtcactacatggagaagggagtgaaggcagaggctggagctcacagaggtgcaggggagggtgtggggcccaggctccgattagaggagcagcctgggagttggggagtgggagaggagggggagaggagggtgagaggaggggaagaggaggggaagaggagagggagaggagagggaaaggagggggagaggagagggagcatctgtgtgaaggctgcccccacccctgctgaacacgccacccctgggctccaggtgtcctgcgggaggtgaccactgagttcactgtggatgcaagatccctaacagccacaggcggcaaccacgtgacggctcgtgtgctcaacccctcgggggccaagacagacacctatgtgacagacaatggggacggcacctaccgagtgcagtacaccgcctacgaggagggtgagggccggtgggccaggctagtgggcagggctgggcaagtgggcagggccgggatctgatgatattgccctcggggcaggaggggtggtgggggcgcacactccctgattgatgcccctgtggctggcttccaggcgtgcatctggtggaggtcctgtatgatgaggtcgctgtgcccaagagccccttccgagtgggcgtgaccgagggctgtgatcccacccgcgtccgagccttcgggccaggcctggagggtggcttggtcaacaaggccaaccgattcactgtggagaccaggtatcctccccctttgctagcctaaatctgtgaccaccctttcccagcccctggccctcctcgctcatccctctgcctgggcctcagccccaccccatcctctctcaggggtgaggcaggagcagaccccctccaggaccccaga

SEQ ID NO: 13923 - DNA, 897 bp, Artificial sequence
  DNA replication origin
atcgagctctgccccatccggcgtggacaccgtgcatgtcaccttcccctcaccggctgccttggcatccaccgtgatcaccgtctcctgcccaatctggattcgagggcccaggcaggcacctgccatgcgggagatcctgctcagggagctggtgggctggagccagccctctctgttcccgctgcccgccccctaccgccaaccaccctggcccacaccaagaagaggagagaaagggcactcacccaggccatggcctccaatggacactggaaagagagaagagtgtgaggccaggcggtgctcaacgtgggctggggcattgggcgggggtgagggagggaggggccagggctagggcatgtgtgctctccgaccagcagacccctggggaccaggccagggttctggaggggctttgaggggctgggtggtgagcagggcacgggcagcgggtgggcacccacctgtgacgaggcacttgctggcatccccagtgggcagagcatggatgcggaagggcgagtaggggatctcatcaccgccatacttgatggtgatggtgtaccggccactcatgtccggcaggtaggacacagtgtacgtgccatccccattgtcccggatgttggccttcttgggcttaccctcggggtcctgagggagaagcagaggtcaaggcccgcctgtgcctggagcatgacctgcggggtgggatgcacagagactcaccaagatctggacagtgagcaacccctcgcccgcgtcccgtgcgtcgatggtgaactccacaggcaggctggcagggatgccagaggcgttgaggcctgggccgctggcccgcaccttgctggcatcatgagctgggaggaccttgatcttgaaggggcttga

SEQ ID NO: 13924 - DNA, 1027 bp, Artificial sequence
  DNA replication origin
atccttcggcagcatcacccggcagcaggagggtgagcaccgcacactgggccggccgggtcctcacggcgggatgggagggtgctgcggaccaggcttgatgctggcagactggccccgaaggccagggcaggtctgagcagaggaggaggtttaactgatgggggagggaagggccagggctaggaggaatcccagtgttgccctgacatcccccaaaccctgcaggtgaggccagctctcaggacatgactgcacaggtgaccagcccatcgggcaaggtggaagccgcagagatcgtcgagggcgaggacagcgcctacagcgtgcgctttgtgccccaggaaatggggccccatacggtcgctgtcaagtaccgtggccagcacgtgcccggcagcccctttcagttcactgtggggccgctgggtgaaggtggtgcccacaaggtgcgggccggaggcacagggctggagcgaggtgtggccggcgtgccaggtaaggggcaggtggccaggagtggggatgaagtcagggcagccagtgtgaggggcgatgatgctgaagtccactaccttgcctgtccccagccgagttcagcatctggacccgggaggctggcgctgggggcctgtccattgctgtggagggtcctagcaaagcggagattgcatttgaggatcgcaaagatggctcctgcggcgtctcctatgtcgtccaggaaccaggtgggcgtccacactggcagtggggctgggcctgcctgaccttccagactgggtttctgcccactggccaggcaggagatgcttggggccacagaactcccctccccggagccccctgctcttcctctgccccgtctccctctaccccacaccctcagaaacatgtgtctgcctccagatctgagcgctgaccacagagcctttcctgggataaggccagggtggggaggctcccgccctgccaacctccatcccggaacctgtgctgactggtctctctccccaggtgactatgaggt

SEQ ID NO: 13925 - DNA, 1076 bp, Artificial sequence
  DNA replication origin
cacccagggccacactgtggctggctggaagcaggcaggctggaggtctgtgagcttatcagccacacacaggtggaggcagccgaagctgagggggaaattagcacatctaggggtgagggtgagggtgaggggggcagagagtgaggatgggtgtgtgggagggtgtgagggaagagggaggaagcacagagcctggtgagagaggtggggaggtcagggattaggagttggggactcgtgggtttttctgccaagcccaccaccatgtgctgaaatgcccaggtgggtctagattgtgggatcagttgaatgaaagacttcttttccctgctgcagctactcagctgctcatttattcattcatacccattcactcactcattcacacccagggccagggagctccatctggtggggagccgtggatacatggccacagctcagggtcgtaactgcaactagagatgtgtcccagggcagtttgggagctgggggcactgatccaggaggggtagggaggggtccaggaaaacttcctgttggccaggaagatgaagagggtggggaggcaaaggtgtttccgggcaagggcccaaattacagcatgggtgcccagaggtaatgaaggggggttggaggtggagggcacaatggagagtgggcctgctgcccaactcatatggctggggaggctgctgtctgaacctgggtggccctggagaccttgtcaggaagaggagactttactctggagcaggagggagtcacagatggccctaaaccagagaggggcatatactatctttaaagtgacccccccgccaagctgcagcatggaggggaggttggagggagctggccagggcagggctgttgcaggagttcaggagggaggccctgtgcaagcttagtgctggaaaggggcatgaaacaggccaagttgattcaggaactgactagggggaaggtgctgagtctgcaggtggttctgcctgcctgctggttgaggaatattcctgtttgagtcagtgctcactgttttaaagtcttaatttgaaaaacatccttgaggt

SEQ ID NO: 13926 - DNA, 753 bp, Artificial sequence
  DNA replication origin
agagagacctgggtgatttccaggtttctggcctgtgcagcacatggatgggagtaacattgccaagaaagtgacctctgtaagatgagcaggctgaaggggaaggagccactctttcctcctcccttttaacaaatcagcactcccggtgtctggcatggggtttgtgagtttggagtgcttgagacgtgcccgtggtctggtctagcgattgtatgtgtgataagcttgggattcgggcacacctgggtttcaatctgtgccccactacttaaaggtacggtttcagactcatcactgaaattcccagggccttggtttcttcagatggtagtagccccacctcatagggctgttatgaggattaatgaggaagggcctgtaaggctcagcacccagggccacactgtggctggctggaagcaggcaggctggaggtctgtgagcttatcagccacacacaggtggaggcagccgaagctgagggggaaattagcacatctaggggtgagggtgagggtgaggggggcagagagtgaggatgggtgtgtgggagggtgtgagggaagagggaggaagcacagagcctggtgagagaggtggggaggtcagggattaggagttggggactcgtgggtttttctgccaagcccaccaccatgtgctgaaatgcccaggtgggtctagattgtgggatcagttgaatgaaagacttcttttccctgctgcagctactcagctgctcatttattc

SEQ ID NO: 13927 - DNA, 1876 bp, Artificial sequence
  DNA replication origin
aggtgacggctctgcagcggctgctggagctgcacagcgcggccaggcggcagcgccgccggcgggaccgtgagcagcagcggctccgggtgtgtccccacgccgggatcggggcctgcctggagcgggcggggcaccgaggggcggccggacgctgactgccgcctctgcaggtcctggaacgcctccacatcgccaggaaccgccactgccgggttcaccccgtggggctcccgcccagtccggctcaactcccgccacaggcaagacccctagaaggcggtggggccacaaggagcctgcgcggggcaggggccgagcttagcgcgcccgggtccctttgaagtgagcgcactgcactctggcagtgactcggcggggcgcgaggggcaggtgtgccaggtgctgccccgcccgccccactgagccgcggacgctcagcgctccgcaccgccaggaggacgcggctgggcggcggcgcgccctgcgggagcagctggagcaaatgcatcgggagaggacggagcggctgcgggccctcggggccaggtgaggggcgggcaaggaggggtgtggcggtggcaggaggcccctttccctggcctccgaaatgacaagccgctctctccccaggaacacccagaacttcctggaactactgtgttcccctggtgctgaggatcccgtgcctgcgaagtagtgctcgcccttcccagcaccctctggtcattgctgagtcctcaaagggatgattaaagtgatgagggttacggaaaaagcaagagggcaacttgcaggtctgatagtttcagaaaggcctgaatgcaacctcagggacagggagagcagaggggcacagacacacacagcagctttgccccaccaggaggcctgttatttcttcttccctcccctaagcccacacctggcccacggtcagagggccaggtctcggggatcaagcagtgcgaaggccccgttcttgcggaagaatgactcaatgcggcacatcttgcaggagaccagttcttgcttcactggggggcctgggaaaagatgtcagaggccaagcatgggttcctgagggagggacacgcagagcatgggagccctgtctgtctgcacagccctaggaatccgtcagtggagtagccactttgtgggaagaaatagaaagtgctttggaggaatgggagctatgggcaaatactgggagctggctggatgccaggatacagcagccatctgccatcattaccctagcttcaggatcctctacctgcagggaggggggccaccctagcctgcttgtcacagggacagactgtggagagatgagatttccttcggcctcctgctccccgcttctagggctcgcctcctgcttttgttagaaagttatttccctgacttcccctttaggggcctgggggaaagggatgtttgggggcaaaatctcaactgagtcaatccccaaccatccaccttttctgcaagacactcaagcagctggagaagggtacagggctgaggagtctcacttgacattcatgagcacagacagcaatgggacgtgcagcaacatcgcccagcagccctgcctggcacatgcctgttccacacctttcctcttcatctctagttactccactgcctcagctcagctccctccccgctgatggccttgactcaacctcacagaaaaaagactcagccgagatggacaggcttcctgccaatgacatcccctacccgctctggctcagccctcctgcccccactcccatcagattccagcaacttgagctccctaggagatctcatggatttaaatagcacctataggccagccggtggctcatgcctgtaatcccag

SEQ ID NO: 13928 - DNA, 1577 bp, Artificial sequence
  DNA replication origin
acgtctgtatattgcacaagagaacaagatgcagtattcttgggaaagttctcaatttcagaccttatgaaatcccttttaactggtttttatggatgcagaacagctctccttcctccacagctgcaggggagcggcaacacatcatctctttttttagatttcttttgttaattatgaacacttgcagtttttaggccaggctctggcctaaaatttcatcttgaatttcctttgattttgctgtcagaaacaaagaaaaggctaaggaaggtttttctgaataagagtaaaaagtaagacgcccagagcgggtttcttctctgggcctgatgggcacaccagggcaaagtgggagtggccggtgctgaggaacccaggcacccagcaccgtgacccttctcactcccaggcctcctgtggtggtcttgaggaaggggctgtgcaggtccctctggagtggtctgccttggctgggaggatgagaaagatggggcaggctgttggcaggcacacctgacaggtgcatggctggctgattgatgaactgtgacagcctgaggttcagacagcgccctcagggcacccctagccatgcactgggactccctaaacttcctggctctagtctaggtgaactgtgcatgaggggctgggacatgagctcccaatactggtctttcttcctcaggctccttacaagagctcaaccccactaccaggaggagttttggggtgccaggtagctcagagtgcaaggtgaaaaggtcaagggtctcaggttggggatggcaggggtgggtctgcctgggaggaggctgctggggtgaggaggaggctcttcagtgaagcaccttccacactacataaaatggctttaacaaattcaggaatcaggcaaaggctggcccctggggtctgcaggttccctctcaaacctgggcccaaagtgcttttcctttccaggacctggcccagagggaagagaggagtgaggcagagcctgagacccagaaaagaaagctcactcccgggacccctgggccgggggacctgccctcccaaaacctgccttcccaagatgcccttgaagggctgggctcggacccgcacctgggccaggagagagcagaacttcaaagaccaccaaggatggacacccctgagtctgagaggaggaccctcaggatcagaaagcggagacccctcagcgtaagagagccgaggcctcctggggcgagatcaaagatgctcctcagagtcagaaggtgaagacacacgggggccagagcccaagggctcctcagggtcagagggaggagtcgaagagaatttagtcctaagtgccagggaaaggcgagtccccagagtccagggaagaagatgctgcggtcttgggaaggcaatatctcacaagcctgggaggtggctcccggagaggccactgtgcagcccccagaggaaggcgacccccatagccatccgagggactcctgcgggtccctgaaagcacagactccaaagcctgtgggcagggagagcccaaacctccggagaaggactaccacgctgacgca

SEQ ID NO: 13929 - DNA, 1126 bp, Artificial sequence
  DNA replication origin
ctcttggtttcctgtcctccgcttccctccaggctccgcatggtgcaggcagccaccccgggggcctcagggctcccctgcagccccagacaggccttggctttgtaccagtatctcttctggtgccccgcaagcccaggccagctcagggctgcactttggcaggtgagggaggggcactgcctcagaaggaaggagacaggcggggacctgacaccatcttgcccctccaggtgcaagagggccgcgggtatcccccagggctggagctgccccctgtactgctgcagatggagtggagccggcgggcccaggagcaggtaagggctggctgggggtgtggctgaggccagggtgggtgccccctcacgccctggcaccccatcttcctgcagctcctgtgggacttggaactgctgactggtgtggagctgggcctcttctggccaccccaggcccagtttttcggtccgaggggccaggcccagcaagcatggagccagtgctgtcagccaggtggtagcacaggtggggaccctgagcagccggtgagtgggtgagggggcacggcggggacagaggttctgggaacactggggccctgctgtggtgagggcaagcggaaggggcagggttttagagacagggctgggtttgaatctccacactgaccacccccgtgggctctgagtttacctttcctcagctagaaaatgcccacgaggccaggcgtggtggctcacgcctgtaatcccagcactttgggaggccgaggtgggcggatcacctgaggtcgggagttcgagaccagcctgaccaacatggagaaaccccgtctctactaaaaatacaaaaattatccaggtgtgacagcatatgcctgtacctgtaatcccagctactcaggaggctgaggcagcagaatcagttgaacctgggaggtgaaggttgcagtgagccgagatcgcaccattgtactccaatgtgggcaacaagaaccaaactccgtttcccccaagccccccggccaaaaaaaaaaaaaagaaaaaaaaagaaaacgcccacaagaagagatctttctctaagggctgtcgggaggaagagtggactcatgggctatgcctgg

SEQ ID NO: 13930 - DNA, 1902 bp, Artificial sequence
  DNA replication origin
accactgccctctcatccctttctgtccctcccctcggcctctctgtctcttctctgaaaggctgtgagtacctgggggagtcctacctgagtaaccaggagttcccagacccccgagaaccctgcaacctgtgtacctgtcttggaggcttcgtgacctgcggccgccggccctgtgagcctccgggctgcagccacccactcatcccctctgggcactgctgcccgacctgccagggtagagccacacctgcccttccattccccctgctggggctcccggggtgcctttctcaccgattccactttcctcccagccctcccactgcctgccgctccaccatacttttctctcactctccgactccctcacctttgatagaggtcccgggcacggctgtgtgtttgtatgtatgtgtgtgtgtatgtgtggctctgtgtgtgtgtggctgtgtatgtgtgtgtgtctgtatgtgtgtgtgtgtgtctggctgtgtgtgtgtggctctgtgtgtgtgtggccgtgtgtatatgtgtgtgtatgtatgtgttgctgtatgtgtgtatgtgtgtatctgtgtgtggctgtgtgtgttggcctgtgtgggtgtatctgtgtatctgtgtgtgtgtgttgctctgtgtgtgtgtggccgtgtgtatatgtgtgtgtatgtgttgctgtatgtgtgtatgtgtgtatctgtgtgtggctgtgtgtgttggcctgtgtgtttgggtgtatctgtgtatgtgtgtgtgtgtgtgtgtgttgctctgtgtgggtgtatctgtgtgtgtgtgttgctctgtgtgtgtgacagtgtatgtgtgtctgtgtacgtgtgtgtgtgaccgtatgtgtgtctgtgtatctgtgtgtgtggctgtgtatctgtgtgtgtatgtgtgactgtgtgtatatgtgtgtttgtgtggctgtgtatgtgtgtgtggccctgtgtgtgtgtgtgtgtgtgtatggctgtagctgtgtgtatgtgggtatgtgtgtgtgtgtctgtatttgtgtctgtgtatgtgggatgtgtgtgtgtgtgtgtgtatgtgtgtgtgtggctgtgtgtgggtgtgtatgtgggggggtctctgtgtgtgggtgtgtgtgcatctgtgtatgtggggatgtgtgtgtggctatgtgtttgtatggctgtgtgtgtgggtgtgtatgtgtatgtgtgtgcgtggctatgtgtatgtttgtgtggctgtgtgtaggtgggtatgtgtgtatgtgtgtgtgtgtgtgtgtatgtggctgtgtatatgggtatgtgtgtatgtgggtgcgtgtatgtgtgtgtgtggctgtgtgtttatgtgtgtgtgtatgagagtgtgggtgtggctgtgtgtgtctatggctgtgtgtgtatatgggtatatgtgtgtatgtgtgtgtgtggctgtatgtatatgtgggtgtggttgtgtatgtatgtgtgtgtggctgtgtgtgggggggtgtaggtgtggctgtgtgtgtatgtgtggagggggaggggctgtgtgtgtatgtgacagtggcagttctgttgatggcaggttttctgttgcactcccacctgctgtgtgtatatgcgtgtatgtatgtgtgtggctgtgtgtgtgtatgtggttgtgggtgtggctgtgtatatgggtatgtgtgtgtgtggctatgtgtgtgtctgtggctgtggctgtgtatgtgtggagggggaggggctgtgtgtgtgtgtgacagtggaggttctgttgatggcagctcttctgttggactccccgctctgccaggatgccgctaccatggcgtcactactgcctccggagagacccttcctgacccacttgaccctacctgctccctctgcacctgccaggtgaggcagccccttt

SEQ ID NO: 13931 - DNA, 938 bp, Artificial sequence
  DNA replication origin
agcaggacaggctctggacagggcagcggcacgcagcggcgggccaggcactgcacgttgccgctctacggaccgacagacgcaccacgggtcagtgggttagttgggggaggccgaggagacccctcccacccagtgccaccaggtcccacccctcccacctgggcgggcctctcctggcctctgcaagtcccgcctccactcccctgggcgcctcccacccaggtgcagactcaccagacagcgacacagacggcaggggtcagaggggtgggggaagtccgctccgctggggtactctttcccgccaaaggcacagcctgggggagggaggggctatagcctgggagagggcgactgccccagggcgtgctgccttccgggggccatgccatcccatcccagaaggccgccctgacccgcccacctcaccgctgcagtcgttcgggcagcaggtcccaggcagcgggtgggcacagggggccctggggcaggggcgaggctggcagtgggcatggccttcctggcatcggcactcctggcaggggtctcgggggtgggagaagctctcgccgtccacaaacacctcttcctccaggatgcagtctgggcagtggatggtgggggcaggtatgagggcaaagcctgacagtccctccagccctggagtccagagccgccacacaagtgcccacttggaagctgactcgaggggaaagaggaggaagtggccatgtgcacatgtgtgcaggcatgtgtatcgttgtgagcacacacgagtgtgcgtgcgcattgggggtcattcacctgcaggcagatgtgtgtctctgaggggaagaaggggagtgcttacacatgtgtgtacctgtgtttgacacacgccctcacacagactctctatgcgggcagggacgtgtcccatgcatcccagcacccgg

SEQ ID NO: 13932 - DNA, 1093 bp, Artificial sequence
  DNA replication origin
tgtgtgtacctgtgtttgacacacgccctcacacagactctctatgcgggcagggacgtgtcccatgcatcccagcacccggcctcctacgtggcaggctcaagtgcctgctcatgaacctgtgttatccaggtagatacatgggtttacctggggggtaggggggtgggggccctagcgtggtggggcggggggcagtagttactagaagaggaaatggagcatgggaggagagggtggtgtaggtacaggcaggaataaacaaatctctctactctccctcccacccacaccccgtgagttccagagagttctaagctctgaaacaagactgaaacaattcagaaggccattgctttctaaggtacctgttgggcccatggggctgtgggacagcagcctctggggccctgatcccctcaggcccagtgagtgcccacatacctgggcacctggggcaacactggcctggtccactctggggcctggcacaggtcgtgggagggcagtcaaccaaggagcatgtcacagttccatcctgcgagagagcaggggagagagcaatcggggcatgcccaggaggggctcagcagggcagcagcaaggctgggcagttacctgacagtggcaggcatggcaagggctgtctgcatccgtgaagttctgcccattggcatacacttggctgtggtaggtgcagctgtcacagctggggcagcaggcacctgggtggggcaggctggtcagggtgagctgggtaatgcaggggaagaaagccaggatcagcccaggcactcaccagggggctgggtggggtgctggcagggggctggggggcagagcacagccccgcacttgggtaccccatcttgacagacgcaggcggtgcagggccgaccatcaggctcccactggactccctcagcaaactcctctccatccagctcacaggctgtagtaagggggctgtcacatggcagcctacacacctcccacccatccctgtccttcccaggacacagggaccccaccttcgccatccccgctgacactgtagaatggctagtggacttagcaacccgtaccccgtcct

SEQ ID NO: 13933 - DNA, 922 bp, Artificial sequence
  DNA replication origin
acacacaattcaacccataaacacatctaataagtggatagctgggattctaatgccatttccacctctcagttgagccctgtcggccccttcccctgttcattctccccaccaggagggtcacatccagtgccgccagcgagaatgtgccagcctgtgtccatacccagcccggcccctcccaggcacctgctgccctgtgtgtgatggtgagtcagtgggtagggcagaggcctgaccatggtgggcaacctggagaaaattgatgggtggccctgctcgggggcccatgaaggccaggagagggtggggaggggcccctgaggaacatctaaggccccccttcccaacaggctgtttcctaaacgggcgggagcaccgcagcggggagcctgtgggctcaggggacccctgctcgcactgccgctgtgctgtgagtgtggctgcctggcagggagggcctggctccggggcctgcctctggcgtgctgaccaggccctgttggcagaatgggagtgtccagtgtgagcctctgccctgcccgccagtgccctgcagacacccaggcaagatccctgggcagtgctgccctgtctgcgatggtgagtgggggccggggtctctgcgggaggggcaggccttggctgcagagaggctgtaggtgtgggggatttgcttctcttggacctaagcccctgttaccctgttcccaaagtgagtcctcaccacaccttctcatggcaaactggcaccatgctggggcctgcgcttctgtggcatagctgtggggggcagggggctgctggcagggcgccctggagaactcggctgggtcttctttgtcagggtgggggttggacacctcagggtgacgtgaagcttcccctctgcctccagccctatacccccacgcccctgtca

SEQ ID NO: 13934 - DNA, 1858 bp, Artificial sequence
  DNA replication origin
gagctgctctctggggtcaggaccggccgggcccggggcgggtggaggtgtgcatgggaaaggcgcgcgcggtggggggtttgagccctccctgaacaaagcctgggtgggagcggcctgtgtgtccccaccccgccttccccagcgcctgctgagccgcgacgacagacggcgagccgagcgaggcggagctagcatggccggggtcggggccgctgcgctgtcccttctcctgcacctcggggccctggcgctggccgcgggcgcggaaggtgagtccaggtgcgggaggcttggggtccggccaggtgcgccccctccctcctatcagcccggcctgagggggccgagaggggctgggggctctgctcttagccctgcctgaggttcgcgcgcctccctggccagctccgtcctccccgtcgggggagcgagcagggtggggaagaccacggccaaagcagggggttcaggagaggggggcggttcctgcagccggcggcgggagagagtgcggctgccctggcatctgggagtctgaagttaattatttgtcttgacgaaggagggggagaaaaggggcccgctgtggaagctgactttgcatctgtgtctggccctccccggagcaggacaggcgggaatggagggctcggtgccggcacggggccaggggaggctaagaggggaacccgggacaattccttggggaccagccaagtttgtgccactcggagctctttctgcaggtctctccaggcgaggctggccctagcttcacctaggggtcccagaggattcagcttctcccgggctcccatatcctgcctgcctacttaagcagaactggaggagtggcctgggaggaggggccctgggcagcaggatgaggccccacgggagtctagattgggtagaaggtttcagatgctgagacgcccatcgtggccgccctctgtgtgcttgggaaggactgagaccgggtgccattccgggtgacaggatccccagtagagggacggagatgggaaagggcacctggggtttgagggccagtattcgcccagggtgcgggaactgagttagaatccctgatataagccagaagtagcggggctggaaaggtgggcggtgcttgtgatccatcccagcgggacttgctcctgggagacttcggctgtgtgattcagaaaggtcgagtggagagaaggggcacagatggaggcagggacgctttgtcttcagccttctgaatggagatggtggagagaggagaagggggggatgtattaggggacaactcaggcaacaaaataggggagctgagccccagctttctggcttaagtaactgggtatgtgtgatggcattaaccaagccagggaacttgggacaaagcaagttcaattttagcctagaatcccctctgcctttgatggtgacagtgggtgacattgttcccctgtctcacaggcctagtgtctgtgagaaacccttttaagccactccaggcctggcctcactaatgagctgccatggtgggaaagacccatccctctccctcctcctctctctgttcctattgcctccgctccagaccctcaacttccctgcccatccctgcctggaggagggacctatgtctgcctcttcccctcctgcctttactttctgggctgcaggagaaggatcaaagtgaaaaggtgaaagtggccgcccctaaccccaggccagagctcagaggtgccccgtccctctttcctggacatagtgtcttctagaagcagggacaggctgtcttcactggatctggtgtgttcaaagttagcaggggccttgccagcacatttctcacacc

SEQ ID NO: 13935 - DNA, 1387 bp, Artificial sequence
  DNA replication origin
gctgggctgcaggctgggtggacctcccccaaaccggcactcaccagtgaccttggccttgaaggggctgcccacgatgtgctgggggccaccgtacttgatggcaatgaggtagttgccaggggccatgggagtgtcagtgaccacgtggccctcaggacactcccaacagtccagctgcaccttggtggggccatcaatggtgacagacaaggtccccgagcaggcgttcagggcgttcacatgatctctgatgacacacctgggggccagaggtagcaaggctgagggcaggaagggcttgtggcccaagatgggctgtgcctcagctccctgggcagcctctgtgaggggctgccactgccccatgcccagcctggcccctgcctgccagcccagcctgggggcaggaggaaccagggtccagtgtgcagtccacggcacgtacctgctctgaggggcactggcctagctgtgctgggtaccaggcaaatgagaggtgatatgccctgtcctggctgaggaaggcagagccccacactgtgtgaagcagtctgagggcagaaggcaagtgcctgatgggctgtgtcagctctggacgcatgagcactaaaatgtgggaagctgagtgtggctggactaacctgggagagctttggggaggaggcggatcaatggggaggactggaaaggctctaggggaaaaggaaataaacttgttgggggagccccagacctggaatatgaggaggggatgcacaagggctcccgacgggctggtaaaatctcacagccaaccccagggccccagtggagtcccaggcgacagtcccctcactccaggagctgcaaggctttggtaccagggggctgctaggggaggaagtgccacagcagtcctagtaagagtggccagacggcaggcgccctgctgcctccagggttgttctgggtcgcatgtctccttgcaaacccacacccagctcagggagaggacaaaggttttgctgcattgggcctgatcctaaatcccacccctccaggtgagctgtccacaccccaggccctgctgcttgcctggtccaaacaggctgaggctctggggcagcaggtgcccagaaagaagcttctttcggcttcctccgagaggcaaggtgggggaagaccagggtacagggggaaaacccccaagtagggccttcagatgaaagggggtgatttcccagtgactccctagactcttggatcccctcagccccagccccaggcccgacagctacggggtagggggaggatggaggtagggggaggggaggtcttgacagttttctctgtggacacagccggtgcactttcaggccctggggactgggtccacgggggccca

SEQ ID NO: 13936 - DNA, 880 bp, Artificial sequence
  DNA replication origin
agccacgcaggagcatcgcagacaggtgggtcccggccgccgctctctcctctccgcgtccccgcgtccccgcgtccccgcgtccggaaggtggtgggagcggtaccggctgttgcccacccacaagtctaggcctcaaccagggcccgcgcccctcaggcacctgcgggcgaccggatgaagactggagtagggcggggtccgcgtccagctgcgcctggagaccgagcttcggtgggtgcctacagcagggcgcgccccgccggcctgggacctcccaggcgcccctcacgccccgatccgtttgaggtgctggcgcccagggaaccccaaggcccaggcggcgaggtcggcaccgcagctgggggcgcaggctctgctgctcccacccccccacccccaccccgccatcgcccagaatgggggctcccaggcgccctgctggaggctggcttggtccacagaggagcgaggcccgatccttactttcgatgcactcgccctcgctcttcccgggtcaccctaaccctttcggaaaaaaaggtggaggtttaaagcgttcatcccccgggatcttcaggccaatggcaggaattgtgcaagagtttgggggaagatagtgtcaggtagaggctccgtccgtccctgggctcgcggccgggaatggtagacgccggcccccagagcagcggagaaggatggggcgcaatagttcctgggctggtttctgtaggtcttgtcccagaacttaagaaggcaacaatgaagaggctgaacgtggaggaaaagtgagactagcatggctgggatttggaggaagatggcgaggaccagcgctggccttgagcggttgtctccggacccgggagggcgggagcag

SEQ ID NO: 13937 - DNA, 1310 bp, Artificial sequence
  DNA replication origin
ccttcaggtggaaccccactttcccatgaagacccagctcaaaggacccattgtctgtaaaggccccctgactgcccagcctcgacgggcttcccctgcctcctgtgccctcctctggcaaaatacacactgcactgccttctacacctcctcttaatctgctcattgggtcttcaatcttgtggtagcttggctatgagcttatcttctcaactagattggaggctccctgagggcaggaaaaagattttgtgcctgtttccccatggtctctggctcagtcccaggccagagccagtatctgctgacttgtgtatgggttctgcactcccctggccactgtcaggagtgagtgggtaggcacccctgggcatgtcccaggctcgctgactctcaggtggcaggccgtggctgtggacatgcaggagatggggctgaggctggcaggaggctgacctggctcacagtgcaggcagcatgctcctggctcagggcagggtcctcttgggcatggcttctggttgcaagtgatggtcccttcctgtgggagcagactgaggtggctgcacaggcatcagagccctggagggcagggcctctggaagcaaaacctcagcccaggcggggacatgtcataggggcaagaggatgagttggctctgtggatgtgggctaccctctgtgtaaaggcagaaaagagacatcctgccccaacccgagtcgtctcttgatgttttttgttttgttttgtttgagacaggttctcaatgtattgcccaggctagaatacagtggctccatcatggctcactgcagtctcgacctccccatctcaagtgatcctcccgcctcagcctccagagtagcttgggactgcaggcgctcaccatgacgcctggctaatttctttttattatttttgtagggactgggtctccttatgttgcccatgctggtcagcttctggactcaagcaatcctcctgcctggccttcccaaagtgctgagattacaggcgcaagccaccacctggcatcctaatgctcttgacccgggaaaccatctctttcaggtgccagagctcaacgatagcatggactggggaagacctgcggacccttcagagctggggggagtcggggggcggggcgcggagcggaatttgaggttatggaattactatttccctgttccagactgccgaagaagcccagtggtcgtctaggccaccgcgctatctgtctggcgtctccttacaggccctgggcctggcccaatgctccctccaggtcagtagtcaccggtaagtg

SEQ ID NO: 13938 - DNA, 987 bp, Artificial sequence
  DNA replication origin
taagctgattcgagtggaaatcagacatcaaaattgaaacccgctgaattttccaaaaagccagatgctcatagaactgaagcttgagacacttacatcagtacacctgctgcctgttgaccaattcctcttccttgtccctcctgttttccttccctgctatataagcccctaactttagtcaaggggagggatggattggaggtttgtctcccctctcaacagctcactggctgatgtcaccggaataaagtcttccctggcaatactcgctgtctcagtgataggctttctgtgcggtgagcagccagacctggaccaaacccctggcaatccataacaaaatcataagcaaaatcaaccaggaagctatttgcaccctggaaccccacctgggaggggaagtcaaggcagactttccagagaaggcgatgctgaaaatttcagaaacagaaattttgaagagcaagagttaccaagcgaagaacattccatgagaaggaacaggaggtgtgtgaaggtggaggttctggggtgaggttctttatggaatcgaaaacggttcagaaccacaggtcgacggtcaaggtagtagtgagaggaggtgggacaggcgaccacgccgctgcccctgggatgactggaaggcgacttaggggagctggggcgagacaggtgcagggtttgaggatgagaaaggcacagagtgactagaggattcccgcctgcaagcacatctggaaggggtgtctggatcctgggggcagcgactgtgttctagggcgagagccaccctcgccaggggtgtaggcaggcgagaggagggcctggagctgtgggtcggccacactgcgccctcatttgtgtgcagccccggaggaccagagtggggaagcaccccaccctctcccagggcccaactgagcactgcagcgggaggtacggggttgtcaaatgacagttttgccattccagattgccaaaaga

SEQ ID NO: 13939 - DNA, 966 bp, Artificial sequence
  DNA replication origin
gcccggcaggttggcggaccggcgggaggcgcagcctgggcagagctcagcttggtcccgccgcccggccggtgctccctggcgcagccacgcaggcgcaccgcagacaggtgggtcccggccgccgcgctctcctctctgcgtccgcgcccggcgcgccccgagggtggcgggagcggtgccggctactgcccccaagtctaggcctagactgggccccgcgccccccaggcacctgcgggcggcgggatgaagactggagtagggcggggtccgcgtccagctgcgcctggaaagcgagctcgggtgggtgcctacagcagggtgcgcccggccggcctgggacttccaaagcgcctcccacgccccgatcggtttggggtgctggcgcccggggagcccagtgacccaggcggcggagtgggcagcgctgcggggggcgccggctctgctgctctccctccccctcgccatcgcccagaatgggggttcccgggagccccgctggaggctggcttggaccacagaggagcgaggcccgatccttactttcgatgcactcgcccttgctcttaccgggccaccctcaccctttcggaaaagaggttgaggttaaagcgttcatcccccgggatcttcaggccaatggcaggaactgtgcaagagtttgggggaagatggtgtcaggtagaggctgcgtccctgggctcgcggccgggaatggcagactctcgtcccccgagcagcggaaaaggatggggcgcaatagttcctgggctggtttcctcaggtcctgtcccagaacttaagaaggcaacaatgaagaggctaaacgtggaggaaaagtgaggctagcatggccgggatgcgtggggagatggttgtctccggaccccgggaggggcgggagcgggtacctgggagcagaggctggagtgggggactttcccagcctcgcggccacgc

SEQ ID NO: 13940 - DNA, 1665 bp, Artificial sequence
  DNA replication origin
tccagccctgccctggcctcagaacacgcgggctcagttccgctttctgccccagcctccacccggccccaggggaaacgaaagtggctagaccgggacaactcagaaaccagactcactgtgggctgagggagggagccgagtgggtcccccagaccaaatttccaacctcccacccagagctgttccccgcaccccaaacttgcagacagtttttgtgcatttagtgtggtttataacatgggtgtgcacccacccatagttgtatctgtagacccctgagaggccttggccctagaatagaggggtgccagtcaccagcggcacacaattctggccgagcaagggtggacagaggaagctctgtctgcacagaatcggggagagcttccctaatgaccccctgggctgaggccgtgcaggcgctggtgccgttggggagctcagagggtccggctgcctgccccctactgtcagtccagcagtctggccctgcccaacacggctgtttaatacagagcaaggttttgaaatgataactccgacctcagtgtcagagggccgcgtccatacaggcagcttagggaggggtgtggaggaggagctcccgtgacaagcccggctgtgatgagcgagagtctgtccaccatgccacagaagggactcagcctcaaggcttttgcctgcagctaggtccacacgagctctaacccgaacagcatccatcctcctagaagctcccttctgcccagaaaagggctaggtctaattcagaccaccccaatcaaggcccatgactttggaagttcggtgtcagaacaggtctgcctgccaggctccggagtctctgggtgaaatgtatggagccctagacctaagtcaatggacctgagccccggaaggtggggaaatccaacagcctgaggaagtccctacaattgtgtgaggcagcgaagcatccagtgggcagccctagaggacctgctgaggtggggtaagcccacagctcaccccagggccatgctggagtcccaggagacagtgcccccaccaccacccaggagctgcaattcatgggcaccagggacccactaggggaggaagtgccacagcagtcctagtaagagtggccagacagcaggcgccctgctgctcccagggttggtctgggtcacatgtctccttgcaaacccacacccagctcagggagaggacaaggggttccctgtacaggccctgacccccaaatcccacccctccgggtcagctgcccacaccctgggccctgctgcccacctggtccagacaggctgaggctctggggcaaaaggtgcccagaaagaagcttctttcagcttcctcccagggtcagggtaggggaagaccagggtacaggggaaaaaccccaaagtagggcctttagataaaaaggggtgatttcccagtgcttcccttgactcttggaacccctcagccccagcaccccaggccccataactactgggggtgggggcaggaaggggaggtcttgccagagggcctcctgaggggctacagtttcctacatcgatacagccgagccctctctggttctggtcacttatccccattctgggccctcgaggagcccaggcccagcccagtcctccgcccctgctcccccct

SEQ ID NO: 13941 - DNA, 1430 bp, Artificial sequence
  DNA replication origin
acaggtggggccgggaggtggtggttgggggtctagtatacagagaagctataggtaccataggtacctggaagggggctgatgggaggctagggtggcccagggctgggaggaggtgtgcctgggaggcagttcgtggaggtggcactgacagccgtccacacgcactctctgtagatgcagtgcagtctggcccccacatgacaccctattctttactcaaagaggatgtcaagtggccgcccactctgcagccgcccactctgcggccgcctactctgcagccgcccactctgcagccgcccgtggtgctgggtccccctgctccagaccccagccccctggctcctccccctggcaaccctgctggcttcagggagcttctctctgaggtcctggagcctgggcccctgcctgccagcctgccccctgcaggcgaacagctcctgccagacctgctgatcagcccccacatgctgcctcgtaaggacccatggctgggcacggggaagcagtgctgggggattggggtaggattggcaaggagggtggagggtgctggactcccttgggtgggaaaagtgggagggcggatggggctgggcctggccactgggctgcagaatggggaggcgtggggctcaaggacgggatgggcctgccttctgccccacagtgaccgacctggagatcaagtttcagtaccgggggcggccaccccgggccctcaccatcagcaacccccatggctgccggctcttctacagccagctggaggccacccaggagcaggtggaactcttcggccccataagcctggagcaagtgcgcttccccagccctgaggacatccccagtgacaagcagcgcttctacacgaaccagctgctggatgtcctggaccgcgggctcatcctccagctacagggccaggacctttatgccatccgcctgtgtcagtgcaaggtgttctggagcgggccttgtgcctcagcccatgactcatgccccaaccccatccagcgggaggtcaagaccaagcttttcagcctggagcattttctcaatggtgagggcccaaagctgtgatcctcctggctgcctcttgcccagggcatggttccagcctctgactagggaccttgattttgatgcagagctcatcctgttccaaaagggccagaccaacaccccaccacccttcgagatcttcttctgctttggggaagaatggcctgaccgcaaaccccgagagaagaagctcattactgtacaggtacatctcccctatcccaaagtcggccttggcttgaaaactggggaatcctggggctaggcccttgccccaggctggaggctcagggctccctgagcagtgtgaacttggcggccagagaccatcaaggctcagagccggagaatgcggtcta

SEQ ID NO: 13942 - DNA, 1205 bp, Artificial sequence
  DNA replication origin
cgccagcctgtcctcagctggaagggcggggcgtggacagggacggtgggcaggtcaccagcgggacgcggggagcctggccactgttacacggcggtgcgcgtgggtgtgccgggctggttcagccccagggttttacacaactagcaggcaaaatccgcttctttcacctcggaccgcttgatgaaggcgtggtttgtgagcatctttaggtccgcccgctccgttgggtttttgatgaggcatttattgacaaactcctggaagtcgggggtgaacacaccgttgggcagcttaggaggcggctctttcacaatatagtccagcagttcgaagatggccatggcgggcaggctgtccatcccgtaaccgctgttggggcgcccgggggaccctggccaagaggagatgctgtgaggctctccttcttccctgtcgaccacgggctggccaaagatggcctccagctccttggcgtcgggcggggggatggggtacctttcgatggccagctccaccagggacaggtccatgctccagatgaccgactgcaccgagtaatgtgtgccctgcaaccgctccggagccatgtaggagcgcgtgcccacgaaggagttggccatggagtcgatgagctggccgctcaccccgaagtcacacagcttgatctcccctctagagttcacgaggatgttggagggcttcacatttcggtgcatgatctggtgcttctctcggaggtacgccaagccccggagaaccgcaatgctgactttccccaggatgtcctcgggaatcctcttggcctctttcagcccctggtccagggagccgccatccatgtgctccatgcagatgctgatctccctgtcacagtagaaggccccgtagaagcccacgatgtacggtgagttgcactcgtgcaggacctggtgctcgcggatgatctggttccggatggccggcttgatctcaaggtggatcagcttcctggccatgatgaggcccgagggtctgtgctggactttggtgaccaccccgccgttgcccgcgtccagctctgaggtcctttcgaagtcatcgtctttgagttcgccgaccttggctttctgggtgagaaaggcttccagccgcttctgctgctcgtcaagttccagctcctccagcttcttctgcaggtccaccaggtttgcctcggaggcgcc

SEQ ID NO: 13943 - DNA, 1078 bp, Artificial sequence
  DNA replication origin
cccgggccacccttccaccccgcggggggaccccgccgcccaggtgccctcgaccccgagactcacccagaagagcatgttgaagaagaagagcaggtatttcaccagcgggctgacgaaggagaactcctccccggaggcggccggcgcccggggtctccgcgccatggccccgccgccgccaccgcccccgggggcctatttcccagcggctgccggccggcctgtgtgccccgcgcccgggggcatgagccgagccgcgccgcgcaggagcccggccggcgggggagcctgcgctgcggcgggaggcgcccgagccggggggccgggagcggcgcgggccggggaaccgcgcctggagctgctggagccgcggtgggcagcgcgagcggacgagactcacccgcggccgcaggaccagcccggccagccaggcgcccaggaaacccggcccgcccccggccgctcattggcgcgacggctggagcccgacttcccattggctcgtggctgatgtcactaagtatccagccatccctctccaccgagagtcgggggagacacctgttctgtgagggataacttgttaaagggtcagcggttctgcctctcccctacccctaagggaaagcatccaggctgcagctgctcaaaggaacaagagtgaggagaaggaatgcacagtgcatcccacacccacgtcctccgcccagctgctgtgcacatatgcaaacacacatacattaaaatcaacaagtacgcacaccgtgtgttgagcaatgcgccgaaagctctgggaacgcgggagaacagaaacaatccctgggggatgacaataaaatcagggagacaaaactaacctacacataacaattagaccaagggtagatgcaatcttgtttagtaactatacattttaaatgcttatttcagaagctctacaacccaacagtggaaatttggaaacatcaccgccaatcccgccatcctaattcattgctgtctcaattcccgcccccgcagcccctcttcccttggtctacttgcagacaccgtttttaacatgctgatccggcac

SEQ ID NO: 13944 - DNA, 1450 bp, Artificial sequence
  DNA replication origin
gctccagccgtcgcgccaatgagcggccgggggcgggccgggtttcctgggcgcctggctggccgggctggtcctgcggccgcgggtgagtctcgtccgctcgcgctgcccaccgcggctccagcagctccaggcgcggttccccggcccgcgccgctcccggccccccggctcgggcgcctcccgccgcagcgcaggctcccccgccggccgggctcctgcgcggcgcggctcggctcatgcccccgggcgcggggcacacaggccggccggcagccgctgggaaataggcccccgggggcggtggcggcggcggggccatggcgcggagaccccgggcgccggccgcctccggggaggagttctccttcgtcagcccgctggtgaaatacctgctcttcttcttcaacatgctcttctgggtgagtctcggggtcgagggcacctgggcggcggggtccccccgcggggtggaagggtggcccggggtgccccacgcgcgggagccgcactgccgagttttctgggctgacggcactttgggggaatttatcctggggagggacaccccggggacgccgcgtctgcagggggcgttgtagggaggagggtatgccagggaatcagtaaagactgatgggtattctcggggcgtcggaggagggtctgtgttaggctagaaatgtgggtttgagggagcctgttggcccaaggcggacccactgacacattcatgatgggggtcgggggtggcggctgactttcaggcctgggggcctggaggcccggctggcaaagaaagaagaggaaggaaaaacccaaacctctctctccaccacctcagagaggatgggttactggcatcatctcttccttttgcaggcctcatctacccccacctccacccccccaaagtctaggaagaatggcctccaggtgcagatgtctttcccatcccagcactgccccaaactttgtcccctccctgccacccttctcaggaccagacttcacccctggagcctggcaatcaccagtgtctttaaacaggaccccgtgttgggccggagggccaggggtcctttcagaatcttctgcttggggtggaaaaagtattgggctgggactccggacacctggattcccatcccactctgccgttcattgttgacttgaccgacctaagcatgtatgttcatgtctgcaggccttgactccctcccccacaaatccaacccagtgtgatcaggggtggcagaaagactgctgaagctgagaattgagctgaaccagatcatgcaatgccagctcgaccctgtttcctggctagagagtcctggaggtcctggggtgtgagaacatagggacatccttcccccattcacctcctcttctggctcctaccacaccagagctgctgcttctggagcccaccatccttgcccacttc

SEQ ID NO: 13945 - DNA, 1443 bp, Artificial sequence
  DNA replication origin
ccagcggctgctggaaaggcgccttcctaggagcagaaggctcgcttaggagacactgggggcagggagcgaactcgcggctctttgtccccgcagcagttcggtcgaggctatttcccgccaggccgagcccctggtctgagcgcccgatagcggggtgcggcgaggagactccgggaacactcgctgggcaagcagctagcacagccccccatctcctccgggttgggggacgcaggcgcgggcctaggccgccgcgggggcggggaccacccacgaagtccagcgccccgccccggacgcgcccgccccgcctgcctcgcgcgctcctcccggcgccaggaggcccagcgcaccgcgccgagcttcctcggagtcctccctacagccgactcagggagaaggtcctggagggcccgggtaggggaagagagggccttcttcctcctcattccccgtcccggccccagcggagtgctcatgtccctcctccccatccccctcctgttttgggtgacaaattaattttaattagaaaaacacagatcaggttttggaacaaaattatgctgttcctagattggaactgggactctttcgacctaatttagagcagagggcgaggctgtgggagggtggcaatgcatcggttgaaggagacgcgcgtgtggcgggcagcaagggggaggtgtgtggcgtttaggagagtctccagtgccgtcctctgcagggcccttctacacctccccttccagttgccagaatggaaaattcatggagtcccgcgtagcccaggtcaacacgcttttattgccacttctggctcccctcgtcccagcaagattcctacctcttaccctgtaggaatactgagctccgatgcaggggaatggggtgggggtgttaccacttctcctctgcacactgccaagttaaagaaaaccctgcttgctggagagggagggccagacagggaggaattcaagggcatgtatggctcagtcccacttctgactgcagagtatagggaccagggttccaaactttttttcgaagtaagggaggtggggaagaatttggctgctgttgtaccccgtgtcctagctgccatgtttccatggaaatgaaggcggggcaggatgtagctcactctgactacctgggaggatggcaggacaggcatttggtaaacatatctccctccactcctacctagcacatacggctgtccccagccgacccccaggctctctcctcactgcctgctccactcccttcccttctggagctggtatcatgccaagtggagtccaggcagggctgccagtgctactctccacagccaggtctcactggcacgttaggatctaagtatgtccgccaagctcaggagcatccctgctagagctggtggtggcagtgcctcggtgaaaaggcagcagc

SEQ ID NO: 13946 - DNA, 1219 bp, Artificial sequence
  DNA replication origin
tcgcaatccaagttgtcttcagccctaggagacccctgggcccccaatccccagccccattccctctcccaccattaaagccacctccccgccccgcgagggaggccagacgcgggccgggggtgcgagtgcagctccggctccgcccccgcgccagcccgcggcccagcagccaccttcgccccagcgcgccgcagccccccgaactctccccgccggcgacccggctcctttgttgctctagctcgctgggctctctggaatgcacgggcctcgcggagccaagcccggcccccctgcgccgaggctgggggagggactggacgaaggagcggagaggtggggaggggaggcgagagaggaagagcgcgagcgtcagcgtccctggcgcctggaggggcccgggctagggggatctggtgaccccgcctgccgccgccccgcgcccgggggaaagagatgagtggaaatcgtgggccggacctgcaaggagagactcggcgggcaccttgcttggtctgaggtcgtctgcaggaagcggacttttctcctggctcaggatgggaaagacaggggatgcctgaagtcaacggggacttctgttccatctctgccccgttctccaggcccgccagtttttcctgctttggttagattttccaacgtatcccggggccccatggagaagaacctgggtttggggtttgcgcttctccaaatccttccagctcgggacctttgagagagacgacctcagagtcactcacggcagctgctctggctgctgttacctgcgggaacaggtgtctgggaaataaacttgccaacatcaagcctttactgctacaaatatgtgaagtctgaactgtggttcccagggactggccttggttatgtgagaaggaaaccagtccttctttgatggccctgctgctcatctgctctgggaggtttctgctgctcctcttccccactctgctcattttgcctttcctcactcctttgagcatcacacttttggtcaccacacttaatttcccacttcagcagtttacacctgcacaaccaagtataacccagcataaccacaaggctccaaacaggagagtagacttgcactgagcaactttttccttgttgctgatcgggctgcacaccagggtgggttttcctttcttacccctggaagacttgctcatggcctagcggtagtggacta

SEQ ID NO: 13947 - DNA, 1516 bp, Artificial sequence
  DNA replication origin
ttccgggcctccgcagcccaacatgggccccgggttccaaagtttgcgaagttgggcgccgaggggccggggcgcgcggagcgtccgggggggcccgggcccggattctctgggcgcacaggtcgcctgagccgcctccgcggccgccgaggtcgtgcgtgtggccggggggctccgaggagcaggcgggggcgccggggcttttgctgagttggcggggttggccatggccgctgcccgcccagcgcgggggccggagctcccgctcctggggctgctgctgctgctgctgctgggggacccgggccggggggcggcctcgagcgggaacgcgaccgggcctgggcctcggagcgcgggcgggagcgcgaggaggagcgcggcggtgactggccctccgccgccgctgagccactgcggccgggctgccccctgcgagccgctgcgctacaacgtgtgcctgggctcggtgctgccctacggggccacctccacactgctggccggagactcggactcccaggaggaagcgcacggcaagctcgtgctctggtcgggtaagtgcggcggagccgggtctggggggcgggaggtgccgcggtaagatgggggcacccttggaaagaacaggctcaggcctgagttttggagagggcggggacagcacccgggagagttggagggacagatcccgaaactttgggggcaggttacgtgcaggatgggaccctcggtcatgggaaaaggagggcaaggaagttgacgaagcgggtcacaaagggcctgagctggtgggtgagcaaaggatggcggggatgaggggcccgtgaggaggtggctctaagccacgggaaaagacattttgtaagaagaggagatgctccacctattctggaagcagggtgccgggggattcaaggaggtgttgaagaccctggggaaattggagttggagaggaaaaggggagggatgacggaggaagaggtttagacatttggagggaagggtagggggacatgatcgagtgaagttttgaaggaaaagaaacctccctagtgatgaattattaaaaggtaaccagaaagttctggaaatcttgatttgggagacaggaatgaagcctagagaactgtgatcttgtctggctttcacgggagatttcattcagtttgtgcatctgaaaaaccggccctctgacgcatgcaggaggttatgaaggaataagacctttctaacagttatttgtgttttctttggaaatttggttaccgaggctggtcagggctgtggaaggacgcttaagtctggagtgttgagagcctgtggacacttccatggtggtttgaagtcccaaagccccctcactggagtggcagagtctgaaaaactgcacactgaacccaaatgtccttccttagcagtgtggagtatactctcccccacctgtcacttttctagatgaggcttggagggtgctgaggaagggagctggccttatcagccctcgcttctagc

SEQ ID NO: 13948 - DNA, 1556 bp, Artificial sequence
  DNA replication origin
gggccgggactggcgggcggagaaagggggtgggagaggaggcgatggaggggaggagtggggacatgggggagggaagaggaagggaggtgggaggcggggccgaccaagagcaggagctggagtctgagccggtggttgcagcggaggcggtgatgtcggtgcaggttgtgtcagccgcggctgccgccaaggtgcctgaggtggagctgaaggacctgagcccctccgaggcggagtcgcaactaggactgagcacggccgccgtgggcgccatggcccccccggcgggcggtggagaccctgaggctccagctcccgccgcggagcggcccccggtccccggcccgggctcggggcccgccgccgctctcagccccgccgccgggaaggtgcctcaggcgtcggccatgaagcggagcgacccacatcaccagcaccagcggcaccgcgacggcggcgaggccctggtcagccccgacggcaccgtcaccgaggcgccgcgcacagtcaagaaggtactggggccgggctgcctctctaggagaggaagggaggggaggggaactgcagatcctctcggcacggcggcaccaccctccacgccctcctttctgatcgcaggaccggagataccccttgtccccttaaacccactctctcagagatgccccccagccggcccctcgtgctgggagcggagactccaggaggcacggccgtacttcgctctgaataacatggaggtagcgctctcccctactacttggaataggcagcgggaggagagacacctaatagtacgtcccgcggccccaacacgctcccgggtgtgattttccagcctatcggggaagagacctcgatagtatagaaaaaccttaccgctcacgggagttcacacagcaataaggatgaaaagatctttaatacttggagaacgagtaaggtgtagtcaccttgcatagaaatcgtcagagttgtctggtttccatacagttgatgactttctgcctttctgtggccaaccgtggccatacagcaacacgatgctgtgcccttcatttccagcgactgcgatattctctcttccctgaatatgtaaaagggtaatggagagattctcctcactctttcgtgttaagagctttgtcctccctgctgggtatagttggtcaccaggattattaggctgtgtatgaagagaatgaatgtcttattgattgctttattataatctgaaagtgataggaagaaatgctgctacttttgggaaagacgatctttgtggggttttcggtcttaggcgtcagcttctttcagacagttttgaggaggtctcagaataccaagaagtaactgcctaggtggatgatagccctgtattacccgtacattgtctatccatagttgtctgtctctctcaaagcttgtctttctttctctcttaaagctgaatcagcacagaaaaacagggcaagtattggaaaagacagaagtgtggatcatataaaaagggcttacagcttcaatttcgtagacacagtatgggcaca

SEQ ID NO: 13949 - DNA, 861 bp, Artificial sequence
  DNA replication origin
tgaggagtgcctctgcccggccgcgaccctgtctgggagctgaggagcgtctctgcctggccgccccatctgagaagtgaggagcccctccgcccggcagccgccccatctgagaagtgaggagcccctccgcccggcagccgccccgtctgagaagtgaggagcccctccgcccggcagccgccccgtctgagaagtgaggagcccctccgcccggcagccgccccgtctgagaagtgaggagcccctccgcccggcagccgccgcatctgggaagtgaggagcgtctctgcccggcagccgccccgcccgggagggaggtggggggcagcccccgcccggccagccgccccgtccgggagggaggtggggggcagcccccgcccggccagccgccccgtccgggaggaggggggcacctctgcctggccaccccttctgggaagtggggagcccctctgcccggccgccaccccctctgggaggtgtacccaacagctcattgggagcgggccatgacgacgatggcggttttgtccaatagagaggggggaaatgtggggaaaagatggggaaatcagattgttgctgtgtctgtgtagaaagaggcgggcatgggagactccatttcgttctgtactaggagaaattcttctgccttgggatgctgttgatctatgaccttgcccccaacccggtgctctctgaaacatgtgctgtgtccactcagggttaaatggattaagggcggtgcaagatgtgctttgttaaacagatgcttgaaggcagcatgctcgttaagagtcatcaccactccctaatctcaagtacccagggacacaaacactgcggtaggccgca

SEQ ID NO: 13950 - DNA, 1289 bp, Artificial sequence
  DNA replication origin
caaggtcatagatcaacagcatcccaaggcagaagaatttctcctagtacagaacgaaatggagtctcccatgcccgcctctttctacacagacacagcaacaatctgatttccccatcttttccccacatttcccccctctctattggacaaaaccgccatcgtcgtcatggcccgctcccaatgagctgttgggtacacctcccagagggggtggcggccgggcagaggggctccccacttcccagaaggggtggccaggcagaggtgcccccctcctcccggacggggcggctggccgggcgggggctgccccccacctccctcccggacggggcggctggccgggcgggggctgccccccacctccctcccgggcggggcggctgccgggcagagacgctcctcacttcccagatgcggcggctgccgggcggaggggctcctcacttctcagacggggcggctgccgggcggaggggctcctcacttctcagacggggcggctgccgggcggaggggctcctcacttctcagacggggcggctgccgggcggaggggctcctcacttctcagatggggcggctgccgggcggaggggctcctcacttctcagatggggcggccaggcagagacgctcctcagctcccagacagggtcgcggccgggcagaggcactcctcacatcccagacggggcggaggggcagaggtgctccccacatctcacgatgggcggccgggcagagacgctcctcacttcctagactggatggcggccgggaagaggcactcctcacttcccagactgggcagccgggcagaggggctccttgcatcccagacgatgggcagccgggcagagacgctcttcacttcccagacggggtggcggccgggcagaggctgcaatctcggcactttgggaggccaaggcaggcggctgggaggtggaggttgtagctagccgagatcacgccactgcactccagcctgggcaacattgagcactgagtgaacgagactccgtctgcaatcccggcacctcgggagaccgaggctggcagatcactcgcggttaggagctggagaccagcccggccaacacagcgaaaccccgtctccaccaaaaaaatacgaaaaccagtcaggcgtggcggcgcgcgcctgcaatcgcaggcactcggcaggctgaggcaggagaatcaggcagggaggttgcagtgagcggagatggcagcagtacagtccagcttccgctcggcatcagagggagaccgtggaaaga

SEQ ID NO: 13951 - DNA, 1145 bp, Artificial sequence
  DNA replication origin
ccctgggccctgaaagaaatggcagttggctgggcacagtggctcacacctgtaatcccagcaatttgagaggccaaggcgggcggatcccttgagcccaggcgtttgagaccagcctgggcaacatggcgaaaccctgtctctactaaaaatacagagattagccaggcatggtgatgcctgcctacggtccgagctacttgggaggctgaggcgggaggatcacttgagcctcagagatggaggctgcagtcagctgtgatcacaccactgtactccagcctgtgtgacaaagtaagaccctgtcaaaaaaaaaaaaaaaaaaggtaatagctctttacctttaatagctcatggaatgactctcaaaccaagaaatttttacttaatccttttacacgaaacaaactggaaagaacacagaaacttaatgatttctacactagagtctaatgaggaataaggctttccaaggaaaaacaggcaaagcaccagaggtgaggtgcaaagggctgtgggcgctgaaggagcgatggggaagcaggaggcagggtccttctgatccaagcctcaaagaaaacggatcaagacagggaaggcgcaaggggcttccagaagaacgcgggtttagtgtgggatgcagggtttttgttcgttttgtttgttgttgtttagcagagaagatatggcagagaaagctcgaggttgaggcccctttagcaagggctctgtgcgcccagctcaagcgtgcagtacttagtttagcagacaatgatgcctccctgaggacttggggcaggggctggaaggtcacagcccttctggaaagagcagcgagggttggaaggaggtcgtaagtgactggatgagggctgagaacaggaatgctgttgacagcaaggtggtggtaccaggctcactctctgcttcctgagtctgcagagcagtggagaatcccgcgcgggcacccagggtggctacggcagctaacagctcggacccgtcactgtgggcatggcctggcgccctgacgtgccacaccacggtgccaccctccctttattttccacatcaaccgtctgggtgtgggggctgctcaacaggaccacgacctaaaacctggaaagacggctggcctgactccg

SEQ ID NO: 13952 - DNA, 1311 bp, Artificial sequence
  DNA replication origin
cgcatcctcggggtggcggtttggctgggccgggccggggccccccgcccgaggcgggccgaatccggcgggggcccaggcccagagccgggggcggcagggtgccggctgcggggcgggccggccggccggcgggcgggcggcgtgttgcggctgcgccggggctgaaatagctggagattgcgcggtagggcactcacctcagagcggctgcgctaccgtgggcctgcgccgtggagactgcgaccgcgccggctcctcgcagcctcctgccaccagcggcaatggcgagcgctgccgcttctgccgccgccgccgccgccgaggagggggaggggagggagagggcacgcacgcgacgcacggcccggcttccccgcccggccgccgccatgatgaggaggtcggcgcggctgtgctgcgggcaggcagcggagagggctcgcggcgagggctccagcttaccccgccgccgcgtcgcgtgcacggagcgcttcagaggtttggagggggccggaacctcaaaagcaactggatgagcacaacgcggacgccccggagaagcggcgcaagcgggcccaaaatggttgctgatcagacgagtggcatctctcgcccccctaccgcgggaattgggacctccagactgtgcctgggggatcggcaagtggttcccctctggttttttcggcgctgccttcccggtggtatcctcactctctctctttgaaatgacctctgctttcctatctctaactcttcccagatatttgaaagcaagtttttgtacaaagcaacatatgaatgtattcagccattcgatcgttcggcgaacatttctaggtgtctcgtgctgtgccagatattgttctgagtgcgctgaagatgcacctgttagcaagacaaagtcctggctcccacggagcttattcgaagcaataggggcccccaagcaggtgcctgagaagtagggaggggtggacagtgggaaaacaacctaacggtggagacacacgaggggtctttttttacttttagaaacgggggtgggtggtcaccctatgttgcctaggctggtctcgaactcctgggcccaagcgatcctcccgactcagcctcccaaagtgctggtattacaggacaccatgcccggcagaggggtcgtttttgttgtttttttagtgtcgtcaggagactccctccatcagaattactcaggctgattgttttgagtcctgggacccagttggtatccagaatcttggcttgtttgcctaggaacctgcattttcacatccccatctccacacc

SEQ ID NO: 13953 - DNA, 1598 bp, Artificial sequence
  DNA replication origin
gcccgcccgccggccggccggcccgccccgcagccggcaccctgccgcccccggctctgggcctgggcccccgccggattcggcccgcctcgggcggggggccccggcccggcccagccaaaccgccaccccgaggatgcgcaggccgcactaggccccaggcgtcctggcgggctcgggagggaggcgctgccctcccgagagccccagggttccggcctcctccgccgcctggggctctcggggccgcggccttctccccgccgtggaacccggggcccggccttcccgcagctcgggagcgggaggcgcgggagagtgcgccgggcccgggagcgggaggtgggcgggctgcgcgggaccggagccgcggctctcggctcgccccctcggcccttcccggctctcgtacgcgggcgggcgggcgggcggcgcggtggggccgggctggggcgcgggagccgctgtctcctgcgggagaggaggctggctctttgggcgacctccgaagcttccctcctgccggggtggcgtgggcttgttacccaggtagactgggggacgctggaatatggcgcgttgcccaccttcttgcaagttaggaggtggccggggcggcagttcgaggaggagggcgcaaagtccttttgtacgcagaaataaggagcgacattgtgttttcttccccagctgagatgtgcccgcggaggggccgcggttcttcctgtgcctggggtggtggtcccctgggtgagggagagggggagtggcacgcccctccgaaggaacagaaccttttgccactggaaagacaggggctctgagatggccgtgtgcatggtattttcccatatccccagaccttttcgggtttgtcattgaatgttgtgcactccatcgtgcaatgatgtctgctgcctctctcacctgttgtgtcgtggctgctggtcccaaagtttctgcagtgtatttggctgtgcccaccagaacttgaagttgtttaaaaatcttaatacttggggggcttccagtgatatctgctccaaccagttggaggagctgttgcctgctctccattcttcttaagcattagattagaatatattaattgcttattttagagctggtgtcaatcgtgctgatttctttatgtggtcagagcaaaattcacatttttttaagtgttcagagactgcgtattgagagacgcataaggagaaaggtagtgtgagtgagcctgtcagcttgggcagtgttgggcagagcttttgtcccgggacatcatctgtgctcacagtgatcctttttcccattccatctcagcctagccttttaaaaaattatttttcctttgggcttgaccagtaagtaattgggaaaggggggtgctggagtcttggagatgctgtttgtgtgtgtgtgtgtgtttgattcattagtatcccgactccctaaaattgtatttgacagttcttgacaggttaccccgtaagacagtgaaaatatgactagttctctccgtgcatctgagtgtaatttccttattttatgagtccgaaagcagacataattatcacatgcaatgtagaatatttatt

SEQ ID NO: 13954 - DNA, 1068 bp, Artificial sequence
  DNA replication origin
ttaacagcatcccaaggcagaagaatttttcttagtacagaacaaaatggagtctcctatgtctacttctttctacacagacacagtacaaatctgacctctcttccttttccccacatttcccccttttcttttcgacaaaaccgccatcgtcatcatggcccgctctcgatggtcgctgtctcttcggagctgttgggtacacttcccagacggggcggccgagcagaggcgctccccacttcccagacggggtggccgggcagaggcgcacctcacttcccagacggggtggtggccggacagaggcgctcctcacctcccagacggggtggcggccgggcagaggcgctcctcacatcccagacaatgggcggccgagcagaggtgctcctcacctcccagacggggcggccgggcagaggcgctccccacctcccagacggggtggccgggcagagggctgctcacatcccagacgatgggcggccaggcagagacgctcctcacttcctagacggggtggcggctgggcagaggcgctcctcacttcccagacggggcgggcgggcagaggggctcctcacatcccagacgatgggcggccaggcagagacgctgctcacttcctagacggggtggcgggcgggcagaggctgtaatcttagcactttgggaggccaaggcaggcagctgggaggtggaggttgtagcgagccaagatcacgccactgtactccagcctgggcaacattgagcattgagtgagcgagactccgtctgcaatcccagcacctcgggaggccgaggtgggcagatcacccgaggccaggagctggagaccagtccggtcaacacggcgaaaccccgtctccaccaaaaatacgaaaaccagtcaggagtggcggcgtgtgcctggaatcccaggcactcgccaggccgaggcaggagaatcaccggagcccagggcagggaggttgcagggagcggagatcttggcagtacagtccaggctccccaagagagggagacagtggagacgggaaagggggagggggagggggaaag

SEQ ID NO: 13955 - DNA, 814 bp, Artificial sequence
  DNA replication origin
tgtggagacctcctaggatgtgtaggacccccacacaccctgtgagtccctggctgcccagcctggcctgcaagttgcatctcttttggtcctcttccattgccaggcgctgacgcccagcgggtgtgggagaccttgtcttcatcttcccactccagaagcggatttctgtgcctttgatctcaaggtcagggctgtgtcctgcagggagggcagaagaggctgctatcctgacctgcgccaagccataggcctctgttttcccttttgagattccgagtggggattctgctgctgatgtcggagagctcctcttacccgcttttcgagagagctgggagaccttgcttccctagggcccaggccccagcctccctccaccaggatggagaggccccagcgggcgtggcaccccccaggcactgcggcacttgggcttcctgtcgcatttgggttaggaggggtgaggcaggcgcaggggaggaacctggcccagccgactagaactggaagtggagagggatttggctttgcgagctgctccctgtattccatcctatgtcagttacaaagatgaggaaaacagaccaaggagctcgacagagatgccacaatttgaaggagcgtacgtgtttggctgctttgttacagggctctctcctctacctggggtcccttttattccttcctgggctggggagagcagaatccctggctccatctgttctccagctctaaggcctctgtggctccttggttgcaaggtgctgcgtgttccccttccctaacacctgcctctccccatccttggctg

SEQ ID NO: 13956 - DNA, 2366 bp, Artificial sequence
  DNA replication origin
ctctggtgtggactccgcgcggagctgagaggcggctgtgcgcccagcctggagccggcgcaggtgagtgtctggggccgggagcgggggggcgggccgggcggagccagagcggggctcagtagaggaggcggaggcgggcgcccgggaccggccgcactagaacccgggtgcagggcagaagtcccggcgcagctggctttcggggatgacgcggcagtgcctactcgctcttccgcgccttcaggcggaggcgcccacggggcgcctgggtcccgggtccgccagtggcgtctgcccagcgcccagcgctgttcccgggcgggggcgggggcgggagcggctgcggtccgagtgcggccggtgcttgcgaggtgcctacccgcgaggagtttggctggggtcgggctgcgtttcgccgccctggtgggctcaggcggaagcgccaggctgggagggggctgcggagagcgccggggccccggagctggcccctccagcgtcttgtcagggctgcgcggctggttcgaggctgcttccgtggcccggagccgccccgcccagtctctgggggaaagcggctctcagacctcccgtgtgcctccacttcgcggccactcatcccgggaaccccggcgcacgcgaatgagacaccgttccccgccctcaactgccccattcctgttaatagcgctagtggcacccaggttcccagcccttccccaagatcggcggctggacggcttgcctctggcgcctcaccggtcagcgcatcccaggactatgggcagtgagggtgtcacccggggtcaggggtcgcccgattccacggtgtcctccaggctgagccattcgtttgctcttccaacccgggctcccggacaccgtgtacagtaatacccgccgggggcaggggcactgaggccggctctgagcgattagggccgagggcgggcggtgccgtaatcgacctccccacccccacaggcaaggtgcggcggcgcctcccaggtttgcgcccgtcttcgcaaagctcctgagggcgaaaatcctgcgagccaggtggcggattctcgggccgggtcactcagctctacgggtgcgcatcaccctctacctgtcacccagtgagcccgaccgatgggcaccgagtcggcggatctctgatccgaggccgagccttcggagaaatctgtcctagtggcctcatcgtggcctgagcgaacgcaaaggaacctgccccaagcccagctctcagcctcgacccccacattccccgcgcggctctcggttcggacctgggctcggagcggcagcctccaccactgctcgtttctttaccgctcaaggccgccccttcatgctcctgcgggggagttagcgggacctctggagtcggccttacgcaaagaagagaaaattctaggatgccggcctcacttgtgaggatttcgtttattctttttctcctaccggggcccagtggctcttggagtgagctccgcaccccagacacctgagtatttatttaatgggtcggtggcggcctgggcttcggggaaaggagctctgggcccctctcccagcacctcatggggacacaggatgacaggcgcagcgtccagggcatgcccgttcaagggccccagcagcctctagcccctgggacctcaggggcatttgatagagactggagggatcaggaccagaccggttgtgggtggcgcggctgggaccctggactccagattcgttgtgtagaggtggagaggagagccaggagtcgagcggtaggctatgtgctgtctaaggaccccggagtacccatagcccagagtcctgcaacactcacctctaacactggaaggggttgggggcctgccctttgcattgggcaccagtgcccaggaagggacacccctaggggaaaggggactcgagttttaagaaggcccaagtagagttcaggagggtggggctgagagcgaccgaaggtgggagggggcgctttgtggagacctcctaggatgtgtaggacccccacacaccctgtgagtccctggctgcccagcctggcctgcaagttgcatctcttttggtcctcttccattgccaggcgctgacgcccagcgggtgtgggagaccttgtcttcatcttcccactccagaagcggatttctgtgcctttgatctcaaggtcagggctgtgtcctgcagggagggcagaagaggctgctatcctgacctgcgccaagccataggcctctgttttcccttttgagattccgagtggggattctgctgctgatgtcggagagctcctcttacccgcttttcgagagagctgggagaccttgcttccctag

SEQ ID NO: 13957 - DNA, 1787 bp, Artificial sequence
  DNA replication origin
atccagggtatcaggtccccgggggccgccccctcaccgtccgagtccagctccggttacctgcctggcctgctccttaaaatatgtatgaggcccttgcgggtgcagtttcgcggcccctcccggagtggggctgggggactcagggtgcgaggggagctgaggggggaggaagcgacgcgagctccccggccggggccttctcgactttcagcagcgcatttaagaaaaggtggaaatcggatctgtctcggcggcgccccagccccgcccgctccgacggccggacctcgcggcccagcggctagctttctgctgcgcggtgtctggttctcgacagcaggtgaatgggccagggcggggcgcccggagcgcggggggcggggcgcgcgttataaaggggagcagcaggccgcgggggccactcgcagtccgcaaggcctgcgcttcccgctttgcggtcctgggcacacccggcccgggttgcccagcatcgcatgggtctgaggaccaggtagggcgcgggtgcagagacagccagggaggctcgaggcgacctagatgggcgggggaatgctagtaggacggggaggggttaatgtggagctatcacccccttttggcccgttgggctctgtgacgtgctcattatctccgctgtccgggttctcgctcaccgtgcccatccctggctgcatggggagaggggccccgaggccctgagactcgtccagttatccacctggggtgggaatcttgcttcccgatccatctggctgcgacatctacggcttcagcaggccctgcccgggagtcgggcatattgaagggttcgtatccttgccgtcacccttggcccctcccggctcggcaggagctgggggtggggaaactatagatttcccgggccccgcttccactgcctcacccccttcttttgctcgagcccaagacaaggtgttaacggtcttcaagtgcaagggttaggtttggtgggagcataggctaagcaccaccctcattttacaggggcttctagggtgccagatctgcgggggtcgattgggaagaactagaagctaaaaaggagaagggcggattaacgttttattttaatctggttttgagctgccgttgccgtctggggcggccgggcggggcggagctgggactgccaagggcagccaaagcagcagggagggagggggcgctccggtgctcaggatgctggggaagaaggaagaggccaccccaacgctgacagcttggaggacctagcccctgccccccggtcccttctgaatgctccgggtggtgtcagaccaaaggacggttgagaaggatctaatccgcgtccgcgccccagccccggctggccccgccccctcccgagggagccactgtcgcagtggggggagggggagatgggaacgggtctggggggcggctcccctccccctccctctcttgggacagacagcctttgttcccggcggcggcggcagcggtggccagacacctgtgaggccgcagaactggccgagggtgggcgtgtgaggacatggaggccccttgtccccattccagccctgcgcccctgggtccgggtgcgccccctgagacaggtcagccttgagcacctttctgcggggagactgcagagatcgtccagtggccctacggtgcgccccagctcccaacgcacttcccctcccccctcccagggtcggatttccaagcacgccacgccacacacacctcggctagctccgggctcagagggcgct

SEQ ID NO: 13958 - DNA, 1357 bp, Artificial sequence
  DNA replication origin
agaccccatgttttcctcattcttttaaagagctgggtcgattccgaagacagaatctcctttcatttgacagtctctgtgtttctccttctttcgaatctctgcatcctccgaccccgcagccgggaaggaaccactccagcctcccgtccaaacagaaccctacagggccctacctcgatcagaggaaaaacgcacagaagcacacgcatacggttttcgaaaaatgtcgggaagttcgttgggtttccagtgactttgttgacccacgagaatctagatgctagagcaaaggaccgagggctaagggctgggccaagatcgaaagactcccgctttggcttccccggcacgtggccctggcggaggaagcaccagggacacagcggctggggcgggcacccggcggcagtcgcgcggacgagggtgcagggcgtgctgaggccatctcgctgggcctgcagtttgcagagatctccgggtcgccaagtacccacgtgctcacatgtgcattttcttcatccccagaggtgcgagtcattctgcccattttgcaaatgggaaactgaggcttagagaggtgaagtgaatccctcgagatcgagatcacagagggactggagcaggggaggactggaactctgggttcctctcactggggttatactagttatgccatggggccagggttagcaggagaacctcaccattcggagaggggccaatggcagaaccacggccgcatcagtgggtctgcgtgaggggcttgtatcccgggcacctttccccctagtcctgccgccggaggaatgggaagggaggggaagaccgatggttacttctttgcccaaggtcttcagcacgagtgggattgtcatggagctggcgaagggagccgtgtggggtagggactaggagggagcaagccagagggacaagccgcgacaccattaaaaaggacggagcgcaaggcgccgagtctcctaggtgggggcagcaaggaagacagcgggtctttcctaaacctggccaagcgtcgaggaacccaaaactacccgtcccggggcgcacgactccgggcagcgtgggacgcctgtggcgaggcggaagggatctctccagcgagagggaatggggcaattgccagacggacattggatctgcagaaggagggggtaggatacacgcgggcttaggatgcgctggacaggccagcaaagtgaggaccccaggtcgtcctgagccacctcttcccccgcctgagccctgagccgtaagggatccagggtatcaggtccccgggggccgccccctcaccgtccgagtccagctccggttacctgcctggcctgctcct

SEQ ID NO: 13959 - DNA, 1399 bp, Artificial sequence
  DNA replication origin
ctgggcacagatgtgtcttgggaggatctgggggcagcggatcatgtcacatgagagcaccggaccaggattcggcctgacccctccctcctgtgactctgagccctcaggctgtgggggctgactgtcccaccgcccaggtcattctcggcactgccccagagccatagcggaggcagggctggcataaagggggccctgggacgaccccaggccctaaggcctccaggcctgtccgggccgcccagctagggaggctgagatggccgctcggccccagccagcatatgcattagtaatggccactgatcctgctggccccgcgccctgtttccagagtggggcagtaatctgagcccggctgcccactgcctccaggctccaccctacgttgctggggccattgaatgcctctacttttccttgttctcagctctgcatcgaaatgaagagaaacacaaaccagcgatgtctcctcaacgtcctgggcgttagctgttcccaccatcacttcatagagaggtttctggatgggaagcgttaggaaagacccagggaggcctctgaggacaccttgcgcagatgtgaggccttcctgggctgggcctcagtttccttactgggggtggacaggtctgttctgaggctgtcactggcactgatgttctggggtcctggggcccattgcttgccctaatgtggggggtcactctggtggaggggacccggtcagaccatagcaggctagaccgtgtgtggtgacagcaacacggcccagtggcagaggctcctgggggtgggggcattaggggatgaagcaggcctggaggatgggtggatccagagagcactggtgagtggggggggtgcctcagctcagggggcaggcctgcgggatggggggacccctgggacatttatccagcctgagactggaggcagctcttcttaccttcctgggaagggccttcagccctgcctctccccctgcacccacctggcaaacctttcactcccagcagctctgggatgtctctcgagggacccaggctccgtcctgagcctgtggcctgtctccggcagctgcccttgggtgggaaggtcctggctggccccagaggtttttcctaagagcctgtaattctccccggagagataaggcatggttacatggactcatatcacactggcagagaaagcgcctccaggaattaggccaccagccaggggatgggcaggcctgtgtaggaagggcagcctctcagttggaggaagtgggggtgtgggacagccgagggcactgagaaagtggggaagaccacatcttcatgggagggtgggaccagcccaggctgtgggagtggcctgctgtgtgacctcagagaggccacgatcccta

SEQ ID NO: 13960 - DNA, 1478 bp, Artificial sequence
  DNA replication origin
tgggaatctagggcagaacccagaacctcccaatccgcggagaatgttccaggtactggaagggtggacggcgcacccagtccggtccctgggggcggactgggtggccaggccggagctggcagtcaggggagcctgggcagcgcctcggtccccttggggccttgacttccaggacgtgagaacgccgccagtcctgcctcgtgggccggagcctagcaggccccggtaaaggaatcactctgtgggttacacctgtcctccgcggaactgaagctgcccgggctccaggcgtggacagcgcagcccagtaggtgagcaggcaggggcgagcagggcggagcgggtgggattgggctgggcgggcggggtggggcggggctgcggagtccgcgcggcagtccccgccacggccaccagggggcgtacgtgcttcgtgcttcggcacccgctcgcgggcgggagtctgggtggggcggggttggccggggcagggcggtccaagtggcccgcgggcgtggacccgggaggcctctggcatctgccccacctgagaggtgggaaccgggctgggagggacgtagattcctcatcgacgtgaccctggtagggaaagagcccccaaaacagggagttcggtagaggcgccagagctgacatgggcactgccgcagtgccagccacggccaccaaactctcccagcacggctgggcggccaaggcaggggtgacgacgagaggggcggctcagcccacctcccccgctgatctgtcgggaaaggaggaagaagggtcatgaaagcctcacacaccgctaggagggggcatcctggagcagggggctggatcaggacccggctggatgggaaggagctgggtaaagggagggcacccgggtagggcgtggcccgggctgtgcggggagcggggagcggggagtggactcagggggaggggtcagcgttctggctggcccgggggcacgtggccggggggcagggtgggaagagggtgggatggtggggtgctggcttggggccaggtcaggcatcagaggcacaaagtaaaggatacagagagaggggaagggagaaagggagagacagagacctgaagcgggagggccgagcggcagggcgggaggcgaggatagtgggtggggctcgggctgcagggctggagcctgggggatctggagcacaggggcaggaggaagggaccggaaggatacctgggcctgcagggcgttccctgcggagattgattgagtgaagactgcgacgtccaccttcagggctctctctagctccctcttcctgtctcctatcacttgctctgggggaagccagcgggttgttttgagctgccctctcctttggagagccccacctggctgggaaccgaagccctgaaccaacagccagcaagagctgaggcttggcgaccaccagcgcgtgagccggctgtggatgcccgga

SEQ ID NO: 13961 - DNA, 1022 bp, Artificial sequence
  DNA replication origin
ctacaactcccagaactccccgggaaagcccacgccgcggcggcgccccacccctctcagcgaccagacccgcccctccgatgacgtcacagaggtgacgtcacggcgcccagagcgaggctggggtagggaggccgactgagcaggagtcgtccgcttatagtggaggctgctaggagccggtcagagggtgagtggggagcaggcgagcgagccacagcaggcaggagggagcgtcgcgcggcgcagaggagcgccggggcagggccgcggcggaaccacagccggagaggggcagcccgagccgggcgccgcagggtccccacccccacccggccggacagtgcccggtgttcccccgtgcggggggcggcggcggcggctgacgggaccgccgggaccgcgggggtgttgccacctccaccgaggagccggcgcggccgcgggctcctcagagccggggccccgggcccgtgacagacgggccgaggaagggagagaggcggcggcgacaccatgtcatctcccagtccgggcaagaggcggatggacacggacgtggtcaagctgtatccttcgtggaggggaattcgggctgtgtgtggggggcggtgtggggatgcccagggcacccccggaaccactgcaagggccctggggcactccaggccactgtccgagactcccctcctcccccagtgcctacggcggctccttggcacctcccaggggccgagagccttttcagctcgccttttctccgcagcaccccgaaatacgcgttgctgctcgctcttcctgtatccccagagcctgtgactttcctccgcgacgtttggactcccgagacggccttttttctttttgcacgaccagtcgcctcactctctaccaccgagcccattttcagggtttctctctcctgtttgctcgctttggatttagggaatcaaggcagaaattcccgagagggaagcctttctccgtttcttgagatgcccccatttcctccaaccacaatg

SEQ ID NO: 13962 - DNA, 1124 bp, Artificial sequence
  DNA replication origin
ccagagcggacgatgagagctaggagtggctgcttctgcctttctctccccctacttttttttttttagccatagctatggttaccacgtttctctccgcctcccgccacctaccaagaaaacgactgaccattggctgcctttcaccaaggcggtaagtcattggtctctggtgggaccgggcgctgcccccttcccctgtctcctgggtctctggaggagcccaggaaggaggctccgctggttccgctgggtcaggcgctgacgggaccgggctgcggcaatcgttagcgggtcatgtcggccgcccagggctgggacaggaaccgccggaggggaggaggcgccgccggcgctggtggcggaggtagcggggccggcgggggcagtgggggcagcgggggtcgggggactggccagctcaaccgcttcgtgcaactctccgggcggccgcacctgccaggtgagtcgtgggacagggtcctgaccgcttgcgggcgggaaggtgactgctaccttttctttttctccctggcttgcttttccttgggaggaggaaaggcaggccccacgcatagcagagggactggggatcagagaaaagggaaggtgtctttgaggtcagggagggaacaggagcacagcgaagaaaagtatctgtgctctgttgaaagctctgtgctgagagttgtgttttcttttcaaaggagaggccactgtctcattgacatttccaaatgtttcggttactcgattcccaatctcttccccttccgcagtttgatcttgtaaatgaaagacattggcgcctagctgtgggaaattatttcaaaaagggtgccaagttaaggagagaagaaggaaacgcattccaaggagtgattttgtaaaaactacacggggcgtgtgtgtaagaggcattctgaaacggaagaaaggggtgggggagtgttggctggggagtgtatgggaaagagaacctagaggattagggaaaactagttggattattaatattttggaatgttcagagacaggataatggtgtctaggttttaaggggagaaagtgaagatcaaaaatatacttagtgacacaattatgctgtgtttacaatataaaaa

SEQ ID NO: 13963 - DNA, 904 bp, Artificial sequence
  DNA replication origin
attggcaggccaagacaagacaaattcagtgatttgccaagggccagagaagggagtccaagtctgcaagcttgcaaggtcgcgttcatgagaactttcatcctcctgggacccggcggcaggcacatgggcctggatagttactgagaaaattctttcagaagggctttcggggacgtgaagtcacccctggcttcccgggattctgggttgggagcagccgcgcaggggcggtgaagccaggggccagggcggtccgtgctgcgggcggctccccaaggcccggtgcgctgggctacccgcccgctggccatggacttgccgcctgcagcgcacatggctggggaggaagagccgtggatttcagtctgtacacccagacgactaagaagctgccgcccgctagcggggaggggactcggccgggaggtggcccccgcagcccggcgccgccgcgcgtcccatcctcgaggccaccgtcgctcaccgaacatctggcacgtgccattggtgctggggtgctgcgtgagcgggccctgccttcgggaagtttccattggggaggaggcgatcgatcagaccacagcaaacgagcaagatgaccacagtggcccatggagggggaataggagctgtgtggcgtagaaacaaggaaagcctcccgcccggtgtgcacggggagctagaaagtgtgaccagagtgttcggggcagggacaaaacccagcttctggtgtcttctgcaaggggaagaagccttgcggtgggagccaggggaatccccgcgaagaggcggccccgcacctatcccggggctgggacgaagggtttggcttctctaaacgcagcgggaagctttaagccagagccacacagagcatccctgtcgcaggagagtgcccggg

SEQ ID NO: 13964 - DNA, 2086 bp, Artificial sequence
  DNA replication origin
ccccgcgaagaggcggccccgcacctatcccggggctgggacgaagggtttggcttctctaaacgcagcgggaagctttaagccagagccacacagagcatccctgtcgcaggagagtgcccgggggtcccaggagggcgaaagcacctttggggccgagacacttctgctcccatcacccccgccccagcagggcgcccctgtgcggggaacagccagcaatcagggacagcgccccaggccccgctgcgccagcactggcaggagggacgcatggaggccggacggaactggggagggggtgctggccagggtgggctcaggccctccccactaaggccagctcggcccagggcctccctgcgcagcccagcgcgccttgtcggagaggctcctaggaccggaggggaagccgctctgaaccggaatgatctggtttggagcgggttggctccctccctgctcccccgcccactgctctccctctcctccagcgacgggctggtttttgccgcagtccctgaccaaggtaaacaggagggaagaggaaagaaggctgtttccatggcaacccaggggataggcgctgtggctctccgggatatgcgggggtgacttcagggagaagaaaaggctccccggaaaagccacagggaggaaggaccctcccatgcacacggtggggtgcgttcagaagtggggggatggagggaaaaggagaggggtcaggcaccctcggtgaagtggagaattgagcaggggcctggggacacagagacacataagggccaggggtcataccgaaaatgcaagcacacaggctcttctggccactcaacccagggagcagaaaacagaggtgccagagctctcagagattccgaaatccacacctctctggtcctttccagaaaacccttccagggggcagctcagcctggggacaaccacagaagtgggacctgggcccaaagacaggtgtcacctgaaacaggccactgttgtccgcctgcagtatgctgggaggaccagctcccgctccaccctgctccccctgggaggaaggctgacccctgcgtgggagtgtgactgctggaaaggcatccttgctgcagctgtgagtgtgatgggacagcagagtcactcctgcatgggattctagggctgggggtcccagaggggtggcctccgcccctcctgggggccgaggactgtcaccatgtcactacggcactctccagctgctgaccaaagccctcgctaaccgcagccctgccatactctgggtctttcctctggagcaaggtgaagagactgcagcgaggcgtggaattgggaagctcttctggttttattaaaaactcgttccaccacaggagtcagcctggccactcaggtgtggggcgggtctctcctcatttagctttcacctgcgtgcccagggataggagaaaaacggcacagagggaggttgtagggagtaagcatcctgccctggcaaagctgagtgaacgtgggtagcttcagcccagtgaagcagcagcagggacgcctgtggaaacctgggtggaggtgccttctgaccttggtttgtctgggccagggggcgaatgcttctggcagtggagcttccaggcccggaaaacccaggcctcttctcctcacgtgggccctcaggtgcttgtggactgcccggagacagaacagaactgagggtgggagggcctgcttttgcctgcagaacaccctgaaatgtcccatttacccagctctctccagggcccgcacagtccaaacttctctggcctcaactcctaccactgtgcctttgctcactctcgaccagccacggtggcttccttgctgctccttgagcggtcaagcgtgctccctctttctggaggtctcctcctccagtatccacatggctgtgtgcctggcctccttcagttttttaatgtggtcttctcaatgaggcagagccagggctagggtgaggcgagtgaggcagcaagggctttcctgccctctctggttaaaactgtatagtcttcccctctgctcaggactctccactccctgtcct

SEQ ID NO: 13965 - DNA, 1726 bp, Artificial sequence
  DNA replication origin
gtggtcacttaggtttgctgttctcctgccagaagcttctctgccctggctggggtggggagggaagagtccgtgtggtctggcccggccctggcctctgcccgagtgccccccaggaagaccctggctgccagcgcgccagccccttccccgccggagccactcccagtggggaccgcaggcagagtctgctcggggcccagtggctgccacccctggctgaactcttttcttccctgcatccgtgttctccgtctgcaaaaagagatcaaaaatccccggctctgagtcagggggccgtaaccaggggcctctgctcctccgcacagcacagccctcaggaggcagggacgcagtttgtctccaaaggcgaaaacgggctgagtgagccactgtctgctcctgcccgtgctgcctgcctgcgtgcgtggcaaacgtgccctgcctggagtcacagttcctaagtccccgtcacagactcccacgcagggcagggggccatgggcctctggtgtatctggggaatgtggttgcagtgtgagggtgtggtgtgtggtgcatggtgcgtatgtttgtgtggggtgtatgtggtttgtggtgtatgtggtttgtgtaggtgtggggtgtgtagaggggtgtgagggtgtatttgtgtggtgcatatggtgtgtgcaatacatgtatggggctgtgtatatggtgtgtgtgtgtttctggtttgtggtgtatgtggtatgtgtagctccaatgtgtatgcgtggtatatggtgtgtgggggttagcaggttgtatgggtgagtgttgggtggtgtttgtgtgatgtgtggtgtgtgtggtttgtggtatgtatctgtggcttgtgtgtgtgtgtgtggtctgcagtgtgtgtggcttgcggtgtgtgatgtgtatttgtgtggtgtgtgttttgtggtatgtttgtgtggcttgcagtgtgtgtgtgtgtgtgatgtgtgtgcggcttgtggtgtgtgtgatgtggtatgttgtttctggtgtgtgtttctgtgatgtgggtggcttgtggtgtgtgatgtgtgtgtggcttgtatgtgtggcttgtagtgtgtggttttttatttgtggtgtgtgtggcctgtggtgtgtgtgtttgtgtgatgtggtgtatgtggcttatggtgtgtgtttgtgatgtgtgtgtggcttgtgtgtggtttgtggtctgtggtgtatgtggcttgtgatgtgtgtatgatgtggcatgtgtggcttgtatgtgtggcttgtggtatgtgtggcttgtgtgtgtggcttgtgtgtgtaatgtgtgtgtggcttgtgtgtggtttgtggtctgtggtgtgtgtgtgatgtgtgtgtgaggtgtgtgtggcttgtggtgtgtgtgatgtgtgtgtgtgatgtgtgtgtggcttgtgtgtggtttgtggtctgtggtgtgtatgtgatgtgtgtgtgagatgtgtgtgtggcttgtggtgtgtgtgtgatgtggtgtgtgatgtgtgtgtggcttgtgtgtgatgtgtgtgtggtctgtggtgtgtgtgatgtggtgtgtgtgtgatgtgtgtgtggtttgtggtgtgatgtgtttgtgtgatgtgtggcctgtggtgtgtgtgtgtgtgatgtgtgtgtggcctgtggcgtgtgtgtgtctgatgtggtatgtgtggcttgtggcatgtgtgatgtggtttgtgtggcctgtggcgtgttt

SEQ ID NO: 13966 - DNA, 1320 bp, Artificial sequence
  DNA replication origin
tggctcattacaatctccaactcccaggttcaagggattcttgtgcctcagcctctggagtagctgggattacaggtgcccgctaccacacccagcttatttatttatttatttatttgtatttttagtagagagagggtttcaccacattggccagactggtctcgaattcctgacctcaagtgatctgtctgcctctgtctcctaaagtgccgggattacagacgtgagccaccatgcctggccacccattctaacagacttttaaattaagtatctattatatgttaagcattatgccaagcactggagacataatgtgcccacacagaactctttaatagaagagatgaacaggaaggcaaatgaacttttgtatgatgtgtgcaatagtaggctatacatggtacagaagtattagaaagtcgggggatccgatggaagtggagtcaggaaaaacttcatgtaagaggagggtagggttgtaaagactggttgccaggtagctagagaaggagaaaaaggatggggcattctcatagccaacagcatatgcaaaggcatagaagtataaaattgcgtgatgggttctgggagctacaagtaggttgagatcgctgaaatgaaagaggaagaaaagggagttggggaagttcagggttttgtgtgccgtggtaaggagtttaggtttaatccagaggattctaaaagccatcggggggttttcagcaggacggtgagggaattgaggcattgtgtttagctaaaacatagcagcagtgtggatggagtgatgagggactgcagtagagacatcccataggaagaggaggaggagttcaggtgagagacaatggcccaaactacagcaggtccagtgacgatggaagagatttaggagataaagccaagaagctttgtcatttattggatggggagaggtcctcactgaaagtcattggtgccactcactgagggagaagtccaggaaggtgaaagaggggtgaggttgcaaagataatgagttcagctgtggacatattgaggctgagctccttgtagggtattcaaatggagatggtctgtaggttttggactacatgccctgggattctgtgcagagagagatttgggaagagttggcatagagtgggtggttggaccagtagagcagggggaacatttggagtgagaggaaccctgggcaaagcagggagcaaggtgttaggcagcagaaggggttagcagcaagggctgggcagaaaggcagagaaccctggatgtcagaaaccaggggagaagtaattattaaaaaggagg

SEQ ID NO: 13967 - DNA, 1075 bp, Artificial sequence
  DNA replication origin
ccggtcccgggttggatgccccgcggtccagcaccgaacctttcggggtgcagagttgcagagccgcggagggcccgggccgtgcgcagccgaagggaggcctgcagcgccccctctggatgcagcgggcaccggccggccgccccgctcacccgctcgcaccccacgtttgttcaccagtatttcagtttacggtcagaaaatgaacacagacacttcgtgatactctacacttttcaaaggcgtaagggatgccttttaaaggattatggattagaaaaattcctccctctttcttgtgcctctgggcccttgcattgtgattctatcttacgtaaataaagggggctttgctctcctaattgtgcccactgttctgtgcagcgcggaccggcgcatgcagcgagcggggctgcgagggcgctgctgtggccaggcgtctggcatgctgaccacgtcgcgctgctgtaaaggaaacctgccccgcgcagcggcggtggctggagcgggagaaaccggactttgtgcaactttggccatagtggccatcccatgaatctgtttactagcttggtggtgggtccaacagagcttgttgctccctagccgcttgctcgtgcccttggtggttaccggtagttaagcttagggcgcatagggccctcgtggctcgccacctctcacggttcagtacccacgcttcgaacgagggatgggagcaggcgccacggccggcaccccagagccctgctgccccttagttcgagcggccatcctcctgtggggcttgtgggcagcctgtggggtttgtgggcggcctgtggggtttgtgggtggtctaaggaaagagttggggcactcaggggtctgctgtttttgcccgtggccttaactcatcaggggagggtttctgcagcagaatctcgggctcagggttggcggttaacgagggagcagcggggtcttggggagggggctcgacacccctgaaggtgccccctaaaggagccactgttagaggggcaccccatctttgtggccatggcggtggtagagcggctgggaggggctctgc

SEQ ID NO: 13968 - DNA, 1547 bp, Artificial sequence
  DNA replication origin
cgggctcagggttggcggttaacgagggagcagcggggtcttggggagggggctcgacacccctgaaggtgccccctaaaggagccactgttagaggggcaccccatctttgtggccatggcggtggtagagcggctgggaggggctctgcggcgagcaagggagcaggcggtaggggttctgcggcgatgggcgggctaggggcggggcgcgggtgggctctaaaagtcggtgcccactcgctccgcgctgccgcggcaaccagcacaccccggcacctcctctgcggcagctgcgcctcgcaagcgcagtgccgcagcgcacgccggagtggctgtagctgcccggcgcggcgccgccctgcgcgggctgtgggctgcgggctgcgcccccgctgctggccagctctgcacggctgcgggctctgcggcgcccggtgctctgcaacgctgcggcgggcggcatgggataacgcggccatggtgcgccgagatcgcctccgcaggtgagtgtgcggtgggaacgagggggtgtggctggcggccctgggactagggcgcaggcgagcggaggactgtgtgcccgtgtccgagctggggctgcctctgggcgaaaactctaccgacaggcggcacgcattccgcgcccgctctgcctacttgaggagggggtgtcactcctgcccgcaatggaatgttcagaacgcgggacctccttgggttaggatttctagaccccgggatcgtcgtggtgagatttaggatttctggaccccagcgtcatcttgatatgacttaggatccataatgaccctggtctcaccctgatgcgaattgggatttttagatcctggcatcaccctggtgcgatttaggatttttatactcagtcattgctgcagcatgatttaggatttctaacccccagcatcgccctggtttgatttaggatatttagactccggcttccctctggtgcgattcaggattcttagactccgccgttgccgtggcgcgatttaggatttatagatcccggcaaagccctggtgcgatgtaggatttttagaaccccagcatcgctctggtgcgacttaaaggataggccccagcatcgccctggtgcgatgtaggatttttagaaccccggtgtctccgtggcgcaccttaggatttcaagaacgggataatcgcagtgccgagatcgccgcggtgcagcttaggatttcaagacccaggtatcacggtggcgggagtcaccgcagtgactagaactcgcagtgcccgtcagccgccttaagtatttttcagatttcagtaacaagcgcgagtgagaacggcgatgtgaccaaactgtcatgttgcgcagggattgttcaccttggtttcgcgggttttcaaagtggttcgtctcgcggcgacgccatcaggtgggcggcaggttgggtggtattattacgggagtgtgtttttctgtttacaagatgaagaaatcaaggctcagaaatttttggaaagtttgttactggagtttgcttattgtctccg

SEQ ID NO: 13969 - DNA, 2524 bp, Artificial sequence
  DNA replication origin
tcagctgggcgtggtggtggatgcctgtaatcccagctacttgggaggctgaggcaggagaattgcttgaagtccagaggtgagggtgcagtgagccgagatcgcaccactgcactccagccttgggcgacagagtgaaactcttctctcaaaaaaaaaaaaaaagaaggctccaggcctcaaacgggagactgaagtgcagggagtccaggtggccatagggagtcaaggtggctgtccacatcagtgattcttatctgaggtggggggtgggtttcacccgagggagggctgggggcatggacccccaggcaggcctatccaatcatctgaagggtgagcagtgttcagctcagaaaaagtaaaggaaaaaaaaagcaatctctaaaaggaacatagacaatagcaaaagaagaaaccgagcccaaaagatgcttctgataggccgccttggggtcctgcatcctcgggtgagaatcactggtggatgtgggaggatggagagccgggcagatacgtggagtgcgaggggaagacgcacgtgcagtggggctgatggaggccatcagggtcaagactgtcaggtgtgggaacacagttcccgacagaccaggacaaggatgacagctaacaaatggatgtagctgaaaaggcaatgggaccacggtggtgcagctggggtttccaacgcctcggtcccagactcaaggactcaggtggaggagtgaggcccagagaagggcccagtgactcagaggaagtgggctgtgcgggtgagagcagagagcaggggatctgttgtcacggggaggaaaggcacaaaggggaatggagacagcgtggaaggagagcgtcttgaagacatcggtgctaaggagggaggaggcaggaggagggtgggactgacaggagcacccaggaggagcggaggagccgggtctcaggcagggcgggagagtcaggttgagactgggtgcgtttgtgctggcggggcagggggatgagggtgggtaggtggaggcgggacaggagtgagcgctgatgacaaaagtgctgtggtgacaggaagaaggtaggaaattcacaggcgcatgttccccagagtgttttcacaagaatgtgaaagaaaggatgcaaagggaattgagaaggttttggggagtcagggttgtggggtgctggaaggtacccatagcctggaccactgggatgtggacactgatagctgggcagagcaggtggattcagtgcagtacgtgtgatgcagagatgactgcatctggtggagcagcgggtgcggggccaggtcaagaagggaggaggtacctgagttcacgacttaggccagtgggagaatcacagattgtgctgaaaaaatgcaggagggtgcaggtgggacagtaccgtgctatgcagtagaggaggaaagcaggagaaacgaccaacctgcgccccaggggctgactgctgggacatcaggggatgagtttgcaacacatgggagaggaggacagaggagaggtgttccctaatgggcaagaagaatgagtcggagcaggcaatggagcccagcagctaagagaggagagcctgttgagagcaggagggatgcgctgcagtaaaggaggcatgccaggcgccaagagggagggagcggatgcagagaatccagggactttaccccagatggggcaaagtgtgtgacgcagttcatggatgacaaagcatagtgtgggtaagataagcaaggaatgaaagagaggtgggaggaggccaagggagaagcagggcatagaagtgctgctaccttggaaacacaggggaccacgtgtcaatgaagggtgtggtgagatgatgaaaggtcaggtggattgagttcgacagaggaaaggactgtgtccgccatggtggaacagacaaggtaggatggtttcaaacagcagatggactcagtacagcatgctggggataaagaggctgtggcaatggtggcagcagtgagggtagggaaggaagaattggatgctgaagacgaagtggagggtgtctggaagagaacagtgggagaaaatgggtggatgagtgatgcaaggttttaatgtgaatcctgaggagaaaaagagagacgtgggagtggggcagccatttgaggtggcatatgggatgcatgttgggtcacgtaagtgaataggaaaagaaagggactgaaagcatttaacaggagacaacctcacaaatctgtgggggtgatgaatgctggtcaaggggccaaggtggaaaagtgaggggaatgcagagttctcaaactggggcactgacagatctcatgtgaaaagttggtttcatgaccgtcatcaaggccagactgtaggatcagagcagatgcaagagcccaggaatatgcggaactaggtccacaggagaatgtgggggatggggacaaatgactcaggttaaatgaaggaaatagcatcactgcatggtaagatggcactgggcatggtaacctcagggacttggcaat

SEQ ID NO: 13970 - DNA, 3182 bp, Artificial sequence
  DNA replication origin
cttcaagaaagaatgtggaagtgggacgataaggcagcgcaacgggggagtcacctacagaagacagggtggaggggcccccagggaaggatggagggcagaaagcgtggtggaagggagctgggcaggacagccacaggcaggacagccataggtggagtgaggtgaaggggcaggtcccagagtaggaacaaaggaatttggagtgctcagagcagcctgcaaggttcagcatggggaagggaaagtataagaggggtggacagcaatgggcaggaaggaatgactgctcttaaagccttgaactttgttgcaaaggtgtgaatcttgggccaggctctttactacggatccggcgggaaagggtgggtggtggggatggggttcggggtgggatttgggattgggtttgggatggggtttgggtgggggttgggagcagtgggattgcaagtgggaaaggggtggggatatgggtgggggtgggaatgggggtggggggaggcaaaccaaactctaggcatttgaaaaaccatcttacttaattgagctggtggactattacatgttgactactgggggtgatggatactggctggagaagacctctgaatccagtagagtagcttcaggtagggtggaagttcaaagtaaagagactgaggcaaacaggaagcccctggaaggacctgatgggtgtccataacacctgacagtcatatgggtaggtggggccacaagtgtgtctgtagggattttaaagaacaaatctctcatacagagtggattttgagacatgtgtgtttcagtgagtagacagggaggagaacaaggtgatttcaagcagagagtgcctggcatacatgggggtaagggagggaaatgctaaggtctttgagtaggaagtgtagctggaactgcaaagtaataaatgctggaaatggcagagtaaaggccagggagtcaaggtggctgtccacagcagtgattcttatctggggtggggggtgggtttcacccgagggagggctgggggcatggacccccaggcaggcctatccaatcatctgaagggtgagcagtgttcagctcagaaaaagtaaggggaaaaaaaagcaatctctaaaaggaacatagacaatagcaaaagaagaaaccgagcccaaaagatgcttctgataggccgccttggggtcctgcatcctcgggtgagaatcactggtggacacgggaggatggagagccgggcagatacgtggagtgcgaggggaagatgcatgtgtggcagggctgatggaggcatcagggtcaagactgtcaggtgttagaacacagttcctgacagaccaggacaaggatgacagcgaacaaatggatgtagctgaaaaggcaatgggaccacggtggtgcagctggggtttccaacgcctcggtcccagactcaaggactcaggtggaggagtgaggcccagagaagggcccagtgactcagaggaagtgggctgtgcgggtgagagcagagagcaggggatctgttgtcacggggaggaaaggcgcaaaggggaatggagacagcgtggaagaagagcgtcttgaagacatcggtgctaaggagggaggaggcaggaggagggtgggactgacaggaggacccaggaggagcggaggagccgggtttcaggcagggcgggagagtcaggttgagactgggtgcgtttgtacccgtgggatgtgggggaagagggtgggcaggtggagtggggacagcagtgagcgctgatgacaaaagtgctgtggtgacaggaagaaggtaggaaattcacaggcgcatgttccccagagtgttttcacaagaatgtgaaagaaaggatgcaaagggaattgagaaggttttggggagtcagggttgtggggtgctggaaggtacccatagcctggaccactgggatgtggacactgatagctgggcagagcaggtggattcagtgcagtacgtgtgatgcagagatgactgcatctggcggagcagcgggtgcggggccaggtcaagaagggaggaggtacctgagatcacgaattaggccagtgggagaatcacagatcgtgctgagagaatgcaggagggtgcaggtgggacagtaccgtgctatgcagtagaggaggaaagcaggagagacgaccaacctgcgccccaggggctgactgctgggacatcaggggatgagtttgcaacacatgggagaggaggacagaggagaggtgttccctaatgggcaagaagaatgagtcggagcaggcaatggagcccagcagctaagagaggagagcttgttgagagcaggagggatgcgctgcagtaaaggaggcatgccaggcgccaagagggagggagcggatgcagagaatccagggactttaccccagatggggcaaagtgtgtgacgcagttcatggatgacaaagcatagtgtgggtaagataagcaaggaatgaaggacaggagggaggatggcaatagacaaggaggatgtagaagatgctggcaccttggaaaagctgggcaccacagtgtcaatgaagggcatgggaactgatgaaatgtcaggtggattgactttgagacaggaaacaattgtctccagcatagtagaaccaaaaatgtaggacggttaagggtgccttaagatagcagatggatccaatgctgcatattgtggataaaaaggatggcaatgttggcagcagcaagggcagggcaggaagggagctgacatcaaggaaatgactgcagagtgcagtcattgacttagaaagtggcagaggagggagtggatgctgaagatgaagctgagggtctctggaaaataacagtagggggatgtgcagtacatcttaactagaaaaacagaaactgctctaaagtcctcaaggcatgatgtcagactcaagatgggtccaggaagttgatggacataaaaaaggacagaaggtgcatgatagggggagaatctcatgaatttgagggtctcaacattggtaaaggggccaagtgaatagaggggaggcagaattcagagtcccaaactgaggtgtccgcagatctcaggatacgttggtggtatgcctggtattaagaccagaccacagaggcagaatgaagcaatagctccagcagcctttag

SEQ ID NO: 13971 - DNA, 2576 bp, Artificial sequence
  DNA replication origin
tggaagtgggacgatgaggcagtgcaacaggggagtcacctacagaagacagacagggtggaggggcccccagggaaggatggagggcagaaagagtggtggaagggagctgggcaggacagccacaggtggagtgaggtgaaggggcaggtcccagagtaggaacaaaggaatttggagtgctcagagcagcctgcaaggttcggcatagggaacggaaagtgtaaaaggggtggacagcaatagacaggaaggaatggctgtttttaaagccttgaactttgttgcaaaggtgtgaatcttgggccaggctctttactacggatccggtggggaagggtgggtggtggggatggggttcggggtggggtttgggtctgggttggggatggggtttgggtgggggttgcatgggagggcagggttgggaatggtgggagtggggcagggcatggggagagggaatcagggtgggtggggggtggggagtggggtatgttgagccaagcccccagcattgagaacaccactgtatttaactgatagattatatatgttcagggttgagggtgatgaattcaggctagggaagaccctgaatccagggaaaaaagaaagtagcctcacgtagggtgcaaggtcaaggtaaggggctggattcttacaaacaaaaaggattatgtggatcaaaagggaagtctcttagaggggggcaccttaccacaaaagtggtgattaaggaaaagggacaatagtcaacacccagaagaacaggtggaggccaaaggtaaggacagagtacctgagagtcctatcaggtggcagggaggggcacaaagggtggggtgggaggcactgaaagaacaactctcacaaagagtgggattccacctatgttgtatttcagagagaaaataaggaagggaatgcggtagttccacgtggagagtgccaggcctatttgagaggggcagaggaggaaatgctgagatatttgattaagaagttaaaggaaagcactagaatgctccaggcctgaaactggagagactgaagtgcagggaaccaaggtggtcgcagggagtcaaggtggccgtccacagcagtgattcttatctgggatgggggggtgggtttcacccgagggagggctgggggcacggacccccaggcaggcctatccaatcatctgaggggtaagcagtgttcagctcagaaaaagtaagggaaaaaatcaatctctaaaatgaacgcagacaatagcgaaagagaaaaccgagcccaaaagatgcctctgataggccgccttggggtcctgcatcctcgggtgagaatcactggtggacacgggaggatggagagccgggcagacatgtagagtgagaggggaagacgcacgtgcagcagggttgatggaggcatcagggtcaagactgtcaggtgtgggaacatagttcccgacagaccaggacaaggatgacagcaaacaaatggatgtagctgcaaaggcaatgggaccacggtggtgcagctggggtttccaacgcctcggtcccagactggaggactcaggtggaggagtgaggcccagagaagggtccagtgacacagaggatgtgggctgtgcgggtgagagcagacagcaggggatctgttgtcatggggagggaaggcgcaaaggggaatggagacagcgtggaaggagagcgtcttgaagatatgggcgctaaggagggaggaggcaggaggagggtgggactgacaggagcacccaggtggagcggaggagccgggtctcaggcagggcaggagagtcaggttgagactgggtgcatttgtgtggatgtgaggaggagggtggggggagataagagtgagtgctgatgacaaaactgctgtggtgacaggaagaaggcaggggattcagaggcagaggctccccagaatgtttccacatggtgtgagagagaagggtgtgaaaggtatcgggaaggcttctgggagtcagggttgtggtgtgctggaaaagtcccatagccttggccactggatcgtgagcatggacagcagaggaggtggattcggtgcagtacgtgtgacgcagagatgactgcatctggtggagcagtgggtgcggggcctggtcaagaaaggaggacacacctgagaacatgaattaggccagtggcagaatcacagatcgtgctgagagaatgcaggatggtgcaggtgggacagtaccatgctatgcagtagaggaggaaagcaggagaaatgaccaacctaggcccaggagctgggagcttggagagcagagggtgagtttgcagcacgtggaaaagcaggacagaggagaggtgtttcccaatgggcaagaagaatgagttggagcaggttatggagccgagcagcttagagaggtgagcttgttgagaggatcagggaatatgttccagcaagggagaatttgcatcaaaatccttggttttgctgttcaggaatggcagaaatgaatggaggtgtagcttgtgaagcaaaatattcacaaggagaaagagacagcctgaagctctaag

SEQ ID NO: 13972 - DNA, 1101 bp, Artificial sequence
  DNA replication origin
aagaaaggaggacacacctgagaacatgaattaggccagtggcagaatcacagatcgtgctgagagaatgcaggatggtgcaggtgggacagtaccatgctatgcagtagaggaggaaagcaggagaaatgaccaacctaggcccaggagctgggagcttggagagcagagggtgagtttgcagcacgtggaaaagcaggacagaggagaggtgtttcccaatgggcaagaagaatgagttggagcaggttatggagccgagcagcttagagaggtgagcttgttgagaggatcagggaatatgttccagcaagggagaatttgcatcaaaatccttggttttgctgttcaggaatggcagaaatgaatggaggtgtagcttgtgaagcaaaatattcacaaggagaaagagacagcctgaagctctaaggtgtaggggttggggcacaagggtgggggtgggaggtcctatgccaaggaccaataaggagggagagacatggggaatccagagactttacaaagtctatgaagaagcccatggaggagaaatcatggtacaggtaagacaagcaaagaatgagggagaggtgggaggagaccaaagtggaaggagggtgcagcggtttggcacctcagaaatgttgggacaatgtatcagtgagggagaaggtgagaggaaggaaggtcggggggatgccatctagagaggaaaccagtgtctccctagtggcagaacggagaaggtagaatgatcagagctcaaatcagacagtagatgaatgaatacagcatgttagggacaaagaagctggcagtggcaacaacagtgagggcaggtcaggctgggagcagacattaaggaaaagactcctgagtgcactgactgaccctgaggtggtagggaacatggactagatgctgaagaccaatcagagggtttcataaagacaacagtgtaagaaaaggcagaggatggctggtgaaagggtccacactttatccagtctggagtcagaaggcactatgtgggtcgtgagatgggtcagtgatgttgatggaaaaagaaagggacaggaggggcgtaagaggagaaataac

SEQ ID NO: 13973 - DNA, 1485 bp, Artificial sequence
  DNA replication origin
gaggaaggaaggtcggggggatgccatctagagaggaaaccagtgtctccctagtggcagaacggagaaggtagaatgatcagagctcaaatcagacagtagatgaatgaatacagcatgttagggacaaagaagctggcagtggcaacaacagtgagggcaggtcaggctgggagcagacattaaggaaaagactcctgagtgcactgactgaccctgaggtggtagggaacatggactagatgctgaagaccaatcagagggtttcataaagacaacagtgtaagaaaaggcagaggatggctggtgaaagggtccacactttatccagtctggagtcagaaggcactatgtgggtcgtgagatgggtcagtgatgttgatggaaaaagaaagggacaggaggggcgtaagaggagaaataacctcatgaatttattggggtggggtggggggggtggagcagagttgagctttgatagaggaaccaacatggaaaacaggaagatggaacaaagaattcccaaaatgggggtgcgccagacctcatggtgcaaattgttgaaataagcagtattaaagccagatcataagagcagagcagatcgaagaagcaagagcctgggcatttttgcaaattgaggcccttaggagaaaatgggggaaagggccaaagtaactggggttacagagagggcatcaggaatcactgcacatgaagacagcacctccacagaaaccaccggcagggaactcagggacttggtgatggactcatatcgtttgagtccagcatgtggggagaaagatgcttataaaatggcagaggagggactgctaagcaatgcacagaagacaatttgcagtaatcacttaatccttggttttgctatccaagagtgggagaaagatatggaggtgcagctttcgaagcaaaatatccacagatgtcatgaggctccaatgggggtggggggcacaggcttcatacctagtggagcatcataggattagtgggaaaagtaggtcggtagcaaatggggatgcagcaatacagagtaaatccagtggtagtcagggtggcagagatgggtagaggcaagggtaattctttcttggaggcaagagtggaggaaaggtagaacaggacggaggccagaacctgtgtaagaaggtcttaaatcctaaacacaggtgtagtaaaggtagtgtggccaagagggaaagaggaaacggtggatctggacagccacaatagcaagcaatatgggcaggggtgcatgggctcactggggccctatccaaggtaaatggaaataatggagatgaagaaaggaggaagaggaggaagtagcgggactggctatagagttttgtaggaactcacttcatggaacagaaagagaaaagaggaaacaaggctggagtggaagaggggaaggaaaaggcagccgtaagggaaggcgctggcctgaatcagtggaag

SEQ ID NO: 13974 - DNA, 3145 bp, Artificial sequence
  DNA replication origin
caaagagaagaaatgtggatgcaaggggaaaggcttcaagaaagaatgtggaagtgggacaatgaggcagcgccgacaggggagtcacctacagaagacagacagggtggaggggcctccagggaaggatggagggcagaaagcgtggtggaagggagctgggcaggacagccataagcaggacagccacaggtgaagcgaggtgaagggggaggtcccagagtaggaaccaaggaatgtggagtgctcagggcagcctgcaaggttcggcatggggaagggaaagtgtgaaaggggtggacagcaatgggcaggaaggaatggctgctcttaaagccttgaactttgttgcacaggtgtgaatcttgggccaggctctttactacggatccggcagggaagggtgggctgggtggaggggatggggtttggggtggggtttgggtatgggatgaatgggtggggcagggttaggggcagtgggactgggactgggggaggggttggggtggggtgaagtgggccaagctgtaggcattgagaacaccatctcattcatctgagctggtggacaattacatgttgagtgttgaggttgatgaatacaggctagagaagacatctgagtccggcaaaagaagaaaaaacagagtagctcaggaagggtaaaaggttaaggtaaagggctggtttctgggaaacaaacaggatgatgaccaccaaatgggaagtctctctgggggcacctggtcagtgatatgaaaagaggagggatgatgaaggaaaaatgtcagtagtaagggcctacgaaaattagattgaggccaaaggtattaactgagtgcctgggagtcatattagatgggtcagggcataaagggtggggtgtggaggtgtcagaagcgcaactctctcatgcagactgggcttttgggcacgatgtgtgttaaggggtaaatggggcagacaatgaggtggttccaagtggagagtgccaggactgttgggcagggggagggaaatgctggtcttatgagtaggaagtgtacctggaaataccaaaatactaaatgctagaaataggagagtaaaggccagggagtcaaggtggccgtccacagcagtgattcttatctggggttgaggggtgggtttcacccgagggagggctggggacatggacccccaggcaggcctatccaatcatcagaggggtgagcagtgttcagctcagaaaaagtaagggaaaaaaacaatctctaaaaggaacacagataacagcaaaagaagaaacccagcccaaaagatgcttctgataggcttcctcggggtcctgcatcctcgggtgagaatcactggtggacgcgggaggatggagagccggacagacatgtacaatgtgaggggaagatgcacgtgcagcggggctgatggaggcatcagggtcaagactgtcaggtgtgggaacacagttcccgacagaccaggacaaggatgacagcgagcaaatggatgtagccgaaaaggcaccgggaccatggtggtggagctgggatttccagcgcctcggtccgagactcgaggactcaggtggaggagtgaggccaagataggggcccagtgacacagaggaagtgggctgtgcgggtgagagcagagagcaggggatctgttgtcacggggagggaaggtgcaaagggaaatggagacagtgtggaaggagagcgtcttgaagacatgggccttaaggaggagggaggaggtgggaggagggtgggactgacaggagcacccaggaggagcagaggagctgggtctcaggcagggcaggagagtcaggttgagactgggtgcattcgtaccggggggacgaggatgggcagaaagtgggacacgaatgagtgacaaagacaaaactactctggtgacaggaagaaggtaggagattcagaggcagaggctccccagagtgtttttccacagtgtgaaagaaaggatgagaaaagaatcaggaaggtttaggggagtcagggttgtggggccctggaaaggactcatagcctgggccactgggacgtgagcttggacagcagagcgtgtggattcagtgcagtacgtgtgacacagagaggactgcatctggtggagcagtgggtgcggggccaggtcaagaagggaggacacacctgagaacacgaattaggccagtggcagaatcgcaggtggtgctgagagaacgcagcatggtgcaggtgggacagtaccgtgctatgcagtagaggaggaaagcaggagaaacgaccaacctgggcccaggagctgggagctgggagagcagagggtgagtttgcagcatatgggagagcaggacagaggagaggtgttccccaatgggcaagaagaatgagttggagcaggttatggaggccagcagcttacagaggtgagcttgttgagaggatcagggaatgtactgcagcaagggaggcatgccaagagcaagagtgtgggtgtgaacgtagagaatcctcctttttgcccaaaaggggcgaagtgtttgatgcaggtcatggaggagaaagcatggtgtgggtaagacacggaaggaatgaaggagaggtgagatgaggccacagaaacagggtgtagaggtgttggcaccttggaaacattgaggaccgtgtgtcaataaagggcatggcgagacgatgaaaggccagaggacacaacagagagaggaaaccactgttccttagaggcagaactgagaatacaggacggttaggggtgaactgagacagcagatggactcagtacagcaagttgaggacatggaagctggcagtggtgtcatcagtgggggcagggcaggaaggggtcagagttcaggaaagattcctgagtctgtggattgacctggcggagacagggcacgcaggactggatgttgaagaggaggtggagcatgtctggaagatgaaagtgggaggaaacagtggtgcaggaattaaatgtgaaccttgtgtggaaaaagtgagacattggagtggagcagccacatggaggtggtgtgatgtgagtggggtcagggaagttgatgggaaaagaaagagatttgtggtgcaggaggggaaagaacatcatg

SEQ ID NO: 13975 - DNA, 3044 bp, Artificial sequence
  DNA replication origin
tggaaacattgaggaccgtgtgtcaataaagggcatggcgagacgatgaaaggccagaggacacaacagagagaggaaaccactgttccttagaggcagaactgagaatacaggacggttaggggtgaactgagacagcagatggactcagtacagcaagttgaggacatggaagctggcagtggtgtcatcagtgggggcagggcaggaaggggtcagagttcaggaaagattcctgagtctgtggattgacctggcggagacagggcacgcaggactggatgttgaagaggaggtggagcatgtctggaagatgaaagtgggaggaaacagtggtgcaggaattaaatgtgaaccttgtgtggaaaaagtgagacattggagtggagcagccacatggaggtggtgtgatgtgagtggggtcagggaagttgatgggaaaagaaagagatttgtggtgcaggaggggaaagaacatcatgaagttgtggggagcttagtgtccgtacagggtccgatgcagaaaaggggaaggaggaaatcagagttccccaaatggggttttatcagatctcagggaagttggtatcatgcttcttatcaaggccaacccataggattacggtagggaggcaaaatcccaggcttttcagaagtggatccttaggaaaggaaagtagggggaaggtgcctaagtcactcagggtaaatggaggaaatggggcatcactgcacattcagacagcacctgcatggaacgtactggcaggtaaaccttgggggctgggggcctgggaggggatggactcatgtgttttgagtctagtatgtgggcagaaagatacttgcaagtgttagagggaactaatggagagaagacaattcctagtgaccactgagtctgaacctctgttgtcaagggagcctgagaggatggaggtgtagcttgcaactgaaaatatgcactacaccacacttcactacagaggtgcagtgaagtaggaagcgggggccttcaaacacaggtagcatcttagatttagtgggagattaggtcagtagtaaatgggcacagtgggcatgcccagagtttggataggatgaaggtttgggtgctgatacgggggcttcatttttggaaactttttccagagggcagagaggaggaaaggcagaacaggatggatggcaggacctgtgtaagaagaaggtcttaaattctaaacaagggtatagtaaaggtagtgtggccaagagggaaagaagaaatggtggatccagatagcttcaatgggtactgcaagatcaggtgtgatgggcaggggtgcatgggctcactgggaccctatccaaggtaaatggaaataatggagatgaagaaaggaggaagaggaggaagtggcgggactggctgtagagttttgtaggaactcacttcatggaacagaaagagaaaagaggaaacaaggctggagtggaagaggggaaggaaaaggcagcctaagggaaggcactggcctcaatcagtggaagatctggaggagcaacagaaaacagttcttgaagagaaggtgggatagagagaggatggaaaagtttgagcggtgaaagcaggtcaaagtagtgagcacatccctatggagaagagatgactgagtcagatgaagcgacaggccctgggtggctgagagaaatactggccacagacaggcaggtaccttcccttggccaaggaagcaaagagaagaaatgtggatgcaaggggaaaggcttcaagaaagaatgtggaagtgggacgatgaggcagcgccaacaggggagtcacctacagaagacagacagggtggaggggcccccagggaaggatggagggcagaaagcatggtggaagggagctgggcaggacagccacaggcaggacagccatagttggagcgaggtgaacggggaggtcccagagtaggaacaaaggaatgtggagtgctcagggcagcctgcaaggttcggcaggggaagggaaagtgtgaaaggggtggacagcaatgggcaggaaggaatggctgctcttaaagccttgaactttgttgcagaagtgtgaatcttgggccagggtctttgctatggatgcagtggggaagggtgggttgggtgaaggggatggggtttgggatgggatttgggttgggactgactgggttggaaaggagggaaggattgggagcagtggggtgtgagtgggagaggaggtagggaaccagatggggagaatcgagccaagttctgggttggaggaaactttcttatttaactgagctggtgggttacatatctaatgttgcaggtgatgaatacaggctggggtagccgtctaaatccaccgaaagaagtaaatgaaagtggtttcttgtaggtcgaaaggtcaaggtaaatggctggtttttaggaaacaactgagaactcgggaaacaaagggggaagtttctgcaggccgatcttgtaagggatctgaaaaaaggggtggggattaaggaaaactgacaatagtaagcacccataagaaacaggttgaggccgaagatactgacacagggcctaagagtcctatcaggtgggaggacaagacgtatcgggtggggaggcattaaaagaacaagtttccaatgcagactggtgtttggggtcagaggtgtgttaaagggcaaatagggaaggaatgaagtggttccaagcagagagttccaggcctaatgggggtgggcagacaaaagatgagatgtgttaagtgggaagttaaatggcaagtactagaatgccacctatggcaagcactagaatggtctaggtgtgaaatgagggagtaatgtcagggagtcaaggtggccatccatagcagtgattcttatctggggtagggggtgaatttcacgtggagggaggtctctggacatggacccccaggcagggctatccaatcatctgaggggtgagcagtgttcagctcagtaaaagtaagggaaaaaaaatagcagtctctaaaaggaaca

SEQ ID NO: 13976 - DNA, 2202 bp, Artificial sequence
  DNA replication origin
aatgtcagggagtcaaggtggccatccatagcagtgattcttatctggggtagggggtgaatttcacgtggagggaggtctctggacatggacccccaggcagggctatccaatcatctgaggggtgagcagtgttcagctcagtaaaagtaagggaaaaaaaatagcagtctctaaaaggaacatagacaatagcaaaagaagaaaccaagcccaaaagatgcttctgataggccgccttggggtcctgcattctcgggtgagaatcactggtggatgcgggaggatggagagccgggcagacacgtggagtgtgaggggaagacgcacgtgcagtggggctgatggaggcatcagggtcaagactgtcaggtgtgggaacacagttcccgacagatcaggacaaagatgacagcgagcagatggatgtagccgaaaaggcaccgggtaccctggtggtggaactgggttttccaatgcctcggtcccagactcaaggtggaggagtgaggcctagagaagggcctagtgacacagaggaagtgggctgtgcgggtgagagcagagagcaggggatctgttgtcacggggagggaaggtgcaaagggaaatggagacagtgtggaaggagagcgtcttgaagacacgggccttaaggagggaggaggtgggaggagggtgggactgacagcagcacccaggaggagcagaggagctgagtctcaggcagggcaggagagtcaggttgagactgggtgtgtatggggtgggagatgaggacgggcagagagcgagacacgagtgagtgacaaagacaaaattgctatggtgataggaacaaggtaggagattcagaggcagatgttccccagagtgtttttacacagtgtgaaagaaaggatgagaaaagaatcaggaaggtttaggggagtcagggttgtggggccctggaaaggactcatagcctgggccactgggacgtgagcttggacagcagagcgtgtggattcagtgcagtacgtgtgacacagagaggactgcatctggtggagcagtgggtgcggggccaggtcaagaagggaggacacacctgagaacacgaattaggccagtggcagaatcgcaggtggtgctgagagaacgcagcatggtgcaggtgggacagtaccgtgctatgcagtagaggaggaaagcaggagaaacgaccaacctgggcccaggagctgggagctgggagagcagagggtgagtttgcagcatatgggagagcaggacagaggagaggtgttccccaatgggcaagaagaatgagttggagcaggttatggaggccagcagcttacggaggtgagcttgttgagaggatcagggaatgtactgcagcaagggaggcatgccaagagcaagagtgtgggtgtgaacgtagagaatcctcctttttgccccaaaggggtgaagtgtttgatgcaggtcatggaggagaaagcatggtgtgggtaagacacggaaggaatgaaggagaggtgagatgaggccacagaaacagggtgtagaggtgttggcaccttggaaacattgaggaccgtgtgtcaataaagggcatggcgagacgatggaaggccagaggacacaacagagagaggaaaccactgttccttagaggcagaactgagaatacaggacggttaggggtgaactgagacagcagatggactcagtacagcaggttgaggacatggaagctggcagtggtgtcatcagtggggggcagggcaggaaggggtcagagttcaggacagattcctgagtctgtggattgacttggaggtggcagggcatgcaggactggatgttgaagatgaaaaggagtttctggaagatgacagtgggaggcaacactgtgtgtagactgtgcaaatttacactggcataccacatggaatgagagagtctggcagccattctaaggcagttattgggatgtaaatttgatgacggaagtttatggtaaaagaagggacaggaggcaggtaggaggggagataaccttatgaatttgtgcagggcttagcatcagtaaaagggctgacatggaataggggaaggtggaatgcagagttcccaaagtgggggcactggcaaatctcaggggcaagtcagtggtatgttcggtatcatggctgagtgtaggagcattttagg

SEQ ID NO: 13977 - DNA, 1375 bp, Artificial sequence
  DNA replication origin
gggggggctgacccccccacctccctcccggacgggcggctgacccccccacctccctccggacgggcggctggccgggcggggggctgacccccccacctcctcccagacagggcggctggctgggcagaggggctcctcacttcgcagtaggggcggccgggcagaggcgcccctcacctcccggacggggcggctggccgggcggggggctgacgcccccacctccctcccggacggagcggctggccaggcagaggggtcctcacttcccagtaggggcggccgggcagaggcgcccctcacctcccggacggggcggctggccgggcggggggctgaccccccccacctcccttccggacggggcagctggccgggcggggggctgacccccccacctcccttctggacggggcggctggccgggcggggggctgacccccacctccctcctggagggggtggctgccgggcagagacgctcctcacttcccagacggggtggctgccgggcggaggggctcctcacttctcagatggtgtggctgccgggcagaggggcttctcacttctcagacggggcggttgccaggcagagggtctcctcacttctcagacggggcggctgggcagagacgctcctcacatcccagacgggggggcagggcagaggtgctccccacatctcagatgatgggcggccaggcagagacgctcctcactttccagactgggcagccaggcagagaggctcctcacatcccagacgatgggcggccaggcagagacgctcctcacttcccagacggggtggtggccgggcagaggctgcaatctcagcactttggggggccaaggcaggcagctgggaggtggaggttgtagcgagccgagatcatgccactgcactccagcctgggcaccattgagcactgagtgaacgcaactccgtctgccatcccggcacctcgggaggccgaggctggcggatcactcgcggttaggagctggagaccagcccggccaacacagcgaaaccccgtctccaccaaaaaaatacgaaaaccagtcaggcgtggcggcgcgcacctgcagtcgcaggcactcggcaggctgaggcaggagaatcaggcagggaggttgcagtgagccgagatggcagcagcacagtccagcttcggctcggcatgagagggagaccgtggaaagagagggagagggagaccgtggggagagggagagggagaccgtggggagagggagagagagaccgtggggagagggagagggagagggagagctctcctgaacatttaaagaagtagagaaatttggactcttacattcataaaaataggttatagatggggta

SEQ ID NO: 13978 - DNA, 975 bp, Artificial sequence
  DNA replication origin
ctgggaggaggtgggggggtcagccccccgcccggccagccgcccgtccggagggaggtgggggggtcagccgcccgtccgggagggaggtgggggggtcagcccccccgcccggccagccgccccatccgggaggtgaggggtgcctctgcccggccgcccctactgggaagtgaggagcccctctgcccggccagccgccccgtccgggaaggaggtgggggggtcagccccgcacccggccagccgccccgtccggttggtgaggggcgcctctgcccggccgcccctactgggaagtgaggagcccctctgcccagccagccgcccagtccgggaaggaggtgggggggtcagccccccgcccggccagccaccccgtccgggagggaagtggaggggtcagccccccgcccggccagccgccccatccgggaggtgaggggcgcctctgtccggccacccctactgggaagtgaggagcccctctgcccggccaccaccccgtctgggaggtgtactcaacagctcattgagaacaggccatgatgacaatggcggttttgtggaatagaaaggggggaaaggcggggaaaagattgagaaatcggatggttgccgtgtctgtgtagaaagaggtagacatgggagacttttcattttgttctgtactaacaaaaaattcttctgccttgggatcctgttgatctgtgaccttacccccaaccctgtgctctctgaaacatgtgctgtgtccactcagggttgaatggattaagggtggtgcaagatgtgctttgttaaacagatgcttgaaggcagcatgctcgttaagagtcatcgccactccctaatctcaagtacccagggacacaaacactgtggaaggccacagggtcctctgcctaggaaaaccagagacctttgtttacttgtttatctgctgaccttccctccactattgtcctatgaccc

SEQ ID NO: 13979 - DNA, 1504 bp, Artificial sequence
  DNA replication origin
ggccggccttcctgcagcctcttccgctcgccggctgcggcgcctgggacggttgcggtgggtctgggcgctgggaagtcgtccaagatgattaaaaaattcgacaagaaggacgaggagtctggtacgcgcggggcttccgaggcccaccctcagccgcgggacgccccttcccccgcccgccgccacctgctttcaggccggcggggctgggggcgtgggcgccgccgtgccagggggccggagctggagccggcccctcccctcccctcgcggctgcccggggcctgcccgtagcccctcccccgggcgccggagcctcccttcgggccgcgcgctcccgccccggcgcccgcgcgcgccccgttcccgcccctcttgcggcgcagcccctccgagccgcctcctcccctgcgcgcgggcctccggcgggggccgagggcgtgcgcgcgtctccgcgtccaggggtgctggtagggtcggacccctagtgggagcaccctgttcccggggctggggtcgacggcacagggtgtgtgtggaggaacgttcaggtgcctggtaccttatcgttttcctggggtcaccggctctgtccaggtccccgggggcaagactgtcccgtgggacacagctcgttgaatgctcaggtgtccagaagtgacctgcgtcttgatgcccgtctttggtccagagcaaatggggaagatgccaagcatcctcaaaaagaaaaaaattctcagtgtttggtagcatctcccacagtgtgagagggggttgggttagtcaacctccatggcctcttgcacctttacgcctgcatgattctctgggaaacttcgtttctgcctctccttaagtgttagaaacacataaaatactgcttacctaaggaaatcaaaagcaccctactacaatctcattaatcttcgttgttgtggaaatgacacatttttaacattcatggaaaaagagggcagggaaagaagacactcattttggagagggttgctgcgaaagagaagtctcagctcttcgagtatggcagtgacagagccgggatcaaaatgatttcattcagttcgtatgcgtattagccatgattatcactgtgccatccaagtgttcacttcccaagcattcagtacccttctctggaaagtatataagtttgtgtagaacagctgttcaggacatttttttgttttgttttataaataggtagtggctccaatcctttccagcatctggagaagagtgctgttttacaggaggtatgactgggaagtatcttgtgccctttcttttctattctgttttagagtggtgggcagagaatccctgggctgctgtgatcacgacatgcaaaacaagaaacgtaacagagtttagggaatatagatttgagggaaaagaaagaggggttacttgtcacaggagaatttggagcttatagaaatgcaaagacatgaagactgtcacaggttgggaattttaaatgtaa

SEQ ID NO: 13980 - DNA, 1192 bp, Artificial sequence
  DNA replication origin
agggaggctccggcgcccgggggaggggctacgggcaggccccgggcagccgcgaggggaggggaggggccggctccagctccggccccctggcacggcggcgcccacgcccccagccccgccggcctgaaagcaggtggcggcgggcgggggaaggggcgtcccgcggctgagggtgggcctcggaagccccgcgcgtaccagactcctcgtccttcttgtcgaattttttaatcatcttggacgacttcccagcgcccagacccaccgcaaccgtcccaggcgccgcagccggcgagcggaagaggctgcaggaaggccggccccgcgctctcacgccggttgggccgccgcgccttcactcggggccaaggcccgccctccccggccgccctcggcccccgggacgcagccacgcccccttctcctcttgcggcccgccggagacttcggctcgaccctcccggcttgcgacccgggagcccacgcccgcagcagcaggaatgtggttttatttgggtggcgacttctgcggacccctcagtctcaagagagcgaggcgggaggactgaggggtctgtgttcacccgatgaccgtggcctttttgataatccactgcggggccctcccgttgcggaaggcgctctccccgggcgcggttctggtgggcatgtcttccaagagcgatgcgagtgtcagtggttcccgaatcactttggaaattggcctttcactcgctgacttcttggaagctacgacaaagcacaggcaccctggtgaatgtggcttttcagaagtactcgaaggatacttaatgtgagatgtaaaggagacgcacttggagggaccagaggctggtctttagagggtagattttggaccgtgtaataccattcccaacctattttataatttttggattccttcatttcatcaaaacccagtggaaaattcattgccagtttagagtcttccttgttcaagcctatttctttcaatgattccatctgaaaccatattgacacttaagaaactcactaaattaacgtgcattcattcctaactcatgttcctctttttctcagagtgtatgctggctttctgttctcttgtctaagagtgtagctaagaaactttgtctgcctttggcttcactggcataacttgtttagaaatgtaaattgggtctat

SEQ ID NO: 13981 - DNA, 1258 bp, Artificial sequence
  DNA replication origin
ttgtttaaccaatctcagcgtgagagtgagccaggaagttaccatcctcaagtaggaatccaaatggggagaagggctacgacgcaagcgcagggttccaaatcatgcaacaggacctgcaaacagactcacaccccagacatcaagaagtatctcccagccacacatctacatggagcttatgtggcctctcctagcagaggtagctggggcaattgggggattggagggcataagcctcccatcaacctgggatccctatttaaaagatgctaaaaataaattagtaaacattgctgtttacagaaatagaaatcatttctgtttccaaaggcctctcaccatcccagtcctggacatttccaagactgccacccctgacaccctctccaaggtccgccctggtggatgggtgagacaccagagtcctttgagactgggagctcctcaggcatctgagaattccagtttcacatccctggttccagggaggggagaatcttcagtactctggagagtacgggagttcatcccttcttatcagttcctgggggctgtcttgaggcaacccccacttttaggatgatatacacgttgcaagaattcccgctattttccggcccccagtacctccccagagtccacatgtctgcctggacccaccctcagagcagaggaaccagtctgtgccttggtgtaatgactctgggaaagaaggatgggcagagagaaagcagggacaacggcctgggggatcatccttgagggtaagactgacagcaatgactgtcctacaggcaggtggtgaagctgggcgccgggccgggaccggagccggaggcggagctttccacctcgctggtgagtggcgggtcgatgcggggagttcgacgacgtccccggtactcgatcatatctggatgataggttgggtggcggcgagcatgcttggtcaggtggtcgctccgggagaactgcttggggcagagggggcaggagaagcgcttctcgcccgtgtgcgtcctgtagtggcgggccagctcgtcggaacgcgtaaacttcttgtcgcagtcgagccagtcgcaggagaaagggcgctcacccgtgtgggtgcgctggtgggacttgaggtgcgacgacttgtaataggctttggtgcagcccgggaaggggcattggtggcgcttggcagcaggtgtgacagacctcctccggggcgcctgatccgcggcgggggcggggcctgcccctagggccc

SEQ ID NO: 13982 - DNA, 708 bp, Artificial sequence
  DNA replication origin
tgccgcgcaagtccgcccagacgcttgcagccagcaggtggggcgcggcgccgcccgcgccggggctgggggcggggacctgcgggagctgggggaccgacgcgggccccggtggccccggacccggcagagcggactccggcggcgccgcacccacctccgagccagcggctccacccgcgccctcggggtccggcgggcggcggtgaaccacggcgcccgcggacatggacaccaggcactcggcggcgaagtagtccaggcacgccacggcggccgacatgctgggaccgcccggccgccggcgagcgccgtccgaacgcggccggccgcgggcgacggagttcccgggagcgtccgtcccgcagcctcggagcgagaagcaggaggccgggtgctcgccgcctgccgcctgctgccgccgccgccgccgcagccgccgctgccgccgccgcccgcgcggagcccgccccgcctgacgcgcccctgacgcaccggagcccgcgggggcggcagagacccgccccggcccgcaggacaccccctcggaacgcgcggcccccggctaagtcatgtttaacagcctcagaaattatcttgtctccgcgttctttcttctgccggcgagccaggtaatggtaacagagcgaaactccccagtcggaacttctgggttgcagcagcctcgccccccctccccgcagcccg

SEQ ID NO: 13983 - DNA, 879 bp, Artificial sequence
  DNA replication origin
ctggctctgagtgctagggatgtggtggggcacagaacagcattgctgcctgtttgagcttttgccctagtgggtagggggcacccagtaaacatggggtgccatgtcaggttgtgataaatgctgtgaagaggtgcaaagccaagtagagggatagagagtcacgtttcgctaagtctccaggcctctccgagcaggtgacagttagaggaagagcgttccaggcagggggaatcacaccctggggtgagagagtgctgggcaggtcaaaggagcacctctgtcagccctcgtgtcactggagcagagtgggcaacaaaggacagagcatttggaaatggaattggaaaggtacccaggggtcagtccatgcaagcctgatgggctgtgatgggcagtttagatttgactcccagtggcctgagaggcccttcctggacaggggaaaggtgtgttaggacttttaattgtaaagggttactggatgctatgggggcagcgggagtgtgctggggacaagagtggaagtgtggtgtggcccaagtgagcggggtggtccaggtgggtaggtggtggctgagacagggttagtagcattgggagttggaagaaagggttagattggggatgttgaagataaagctggtataatttgttgatagctcggttgtagggtatgagagaaagaagaaccaaggataattccaagacttttagactgaacaactaggtaaagggaagtgctatctactgaaatggggaaagtgagggatgtgcaaggtgaataggaggagatgttggcaggtgttccatgaaaaaaggatttcgtagtcaaatttattttggaaacatggttctagagcatgaccaggggctgga

SEQ ID NO: 13984 - DNA, 1171 bp, Artificial sequence
  DNA replication origin
gccgggggcggcgggccgccggagccgggcgcctcccacgcagggccggcgttccccgccgcgggtgggtgcgcactcgccggccctctcccgggagaccgtttccgggagcgggcgctggcggggcggggccgtggcggtaaacagggtggtgccctctgccctcccgcccccggcctgccggggcgcgcggccggcggtgcccggggcggtggaggcgcggtcgcggcgccgggcagcgggggcgcgcccgctctctgccgcccccgcgcgcgcccgccgccgcccggccggcctcctctgtttttgttttgatggagcccgcgtgcagctggcgcgtgtcgagtcacgtgccgtgggcgggagggggccggggcgcgggaggcgagggcgcggtgacacgggccggaggggcctgcgcccgcggagggcgcgcgagggggcgtgtggcccccgatggagccctgccgcgcgggtgccccggcgctggctgaggggcttggcgcttctcggcgagcagtgctaggtttgtcgtcgcagcgcttcggggagcctagtccaggagagaggacctgcctgcgctgctcggctcagaactcggaccttacaggtggtgtgtacatcccggtggacgggtagacacttctgtgtgctcctgaaggccggctgcgtgtaataaccaactggagtgctttaagaaggattctaacgccagcccaatcccagaccaattggacccacatccacatagggcctggacagtgtatttttaaccccctcttccccataagtgattttggtgcagtgagaatttatagaagtaaccagcttgatggaatagctacttgtgaaatcacatctatttagggacaaaatagtaaaaatagctaaaatagctaacacgtattcatctgtcactcagtggggtctctgtgtcagatactgcggctccccaaacatggatctactcgtagaagtactgttacccctattttatagttggaggaggagtggaagctcggagttaatcagggaggactactgtgactaggacctagggaggtcgagttcaaaacccctactttcaacagtcacatatgcctcgtggaaaatgtacctttgcctaagggccccatgtttgtgtgaatagtagtaatgtttgcctgagggc

SEQ ID NO: 13985 - DNA, 1165 bp, Artificial sequence
  DNA replication origin
tgcgcccaccctcgctcagcccggggccccctcgccgtcccccggaaggggtctgcggttcctggccaggacgttcggaaggcgagcgggggaaggtagggctgtcgcgggaacccggcttgtgagagcgatttcgccatgtttgtgttgctaagagcactttttcccctttgctgtggcttgatgccacatggctcctccggagctgctgccgggctgagagagtgtttttttttttttttcaatgtccgcattccagctaatgttgcgcagataaaattcaaacttgaggtaaacagaagaagaggaggaggaggaggaggaggggaggggggaggaaggggggactgtttccatttcgagatcccacctcttccctccgcgcagcccaacatcccgaacctagagacaactcttgcctttctcccacgtcccccacctttgctgtcaacaagaaataaaggcggggcgggggggggggttggaggtagggggtggcgtgcttattaattagaaaggacgcggtgtctcggttctccactggaatcagcaactccctggaactcgggcctctggccccgtccctcttttctccggcagggacgcaggatgccttggtgcactctagagacggggaccggagggtgcagcgcgcctgggtggggcgaagggcgccggtctcctcacgccctctgactttaggataccagacagtgtctcttcaaccccaccccaggcgcaggtttccagaaggcggggtgggtggggcccccgatttccagaaggcgagttacctagcaggtgtgtggggtgggcattgctattcggtaagtctgttgcatggggtaggatgacgtggggagcttaaaagctttaaagccagcgcaaaggtagagctgcgtctgctgtttttgtttttttttttttttccctgtgtctgtggcaaattaaggagaaaaatcaagacgttcccttcagtcctccctcggtgttaacgtctgctccagctcgcagcccgctgctgggtgagtggcgacatcagggcgagggtgagcttcgtcacggggaaagctggaggctcctgacagctcgtagccgtcctcccctcgccccgccctaggcggaaggtgtgggttgggtggtccgaggagggtgacgtccaagg

SEQ ID NO: 13986 - DNA, 1190 bp, Artificial sequence
  DNA replication origin
ggctgatacttctcaaaccctgaatcattgcctccagctctgtcctgggttcaggatgcaccactccaccctctgtgtagcttggggtcaacttcggggcgtcactccaatagtaattattgctgcgtttggctggacatccttattacggcctgggtccctctcagctggaaactgggctccttcagtttggctggggtgacttctagcacttcccgccgccccaccttacccccctgcgcgctcccttcccaaggcgaccacctgcaccgccccacttaccatctgccccgcggggagggccccccgggctagcggagccctccctgctcccgggcggctctggaggagctcggtgtttgcctctagcccttcgctaccggaggatcaggttcctcccctcctccccctccagctccggccgccgccgccgccgccgccgcctccttcttgcatgacacagcagaaccgcagctgctgcagcaatttcaagccatccgcccaggaagcgccgcaaccgggactcgggaggggtggagggggcgaggcagaggccgcggccccaggggatccttggccccactgtgcaccacacactcctttcccagcccaggggcacgcgaacaaaatgaggctcaagctgaccaggccgagccggaggaacgctggggcttggcagcagaagggatgggaccagagagaagggtgtggaggagaccccagtgagggccaggacatttcaggtaaagagaggtaagaagaggcccagaagtcaagggccagactgtgaaggtgattagaggtcaaaagaggtaaggaggtagagttgcaaagaagagaggccgagctgggaagggcgtgggggtgggggtagctgcaggggagggtggggggtacagtctttggggaggcccgagctgagcccccaggcagaaaaggggctgagttgggaggcaagggaggtaggaggaaagggatgaaaagaattaggcatgagataggaaggtaaaacttgggagagatattatagaattagaagggttggaatggagctcattcatcatggctgatgaagtaaactgatgaggtggagagagacagagtcaaggcaaggccaaacgaaaagatcttccatcccactcttcagtttcttgcgaagtttttcttgattccgccaatccacacagttt

SEQ ID NO: 13987 - DNA, 1983 bp, Artificial sequence
  DNA replication origin
cagccgcgcagacgccgcccaggacgcagccgccgccgccgccgctcctctgccactggctctgcgccccagcccggctctgctgcagcggcagggaggaagagccgccgcagcgcgactcgggagccccgggccacagcctggcctccggagccacccacaggcctccccgggcggcgcccacgctcctaccgcccggacgcgcggatcctccgccggcaccgcagccacctgctcccggcccagaggcgacgacacgatgcgctgcgcgctggcgctctcggcgctgctgctactgttgtcaacgccgccgctgctgccgtcgtcgccgtcgccgtcgccgtcgccctcccagaatggtgagtggccggcctgggttccgccgggactcccaccgtgcccatgtgccccctgcccggccgagctgcagggaagcccggcgcgccgcgtggtccgaccccgagcagccctatcaccgccggggtcacacacggagccctgaccttgcaccatccacgccccctccaaactccgcagcgcggcaggtgcagggcctgggcgtagattcgtctccactctccactcgggaggagtgggcggtggattctgcccgggcaaacaggggcgcgccggtgctaagtgggtttgcatgggaaagaaaagggagaccgcaccgcgaggctccacgcttctgcgggactctcgggatctgattacacctttccttcgtgttggagggaatgaggggctgtagtgtgtattcgttaattccaggcaaagaggcaggcgagaggctcccgaggaagtccctgaagcaggtgacaagcctccagccacggcccacgcgggcgatgtacttacccgtttgcagaggttttttctaagtaatgtgtgcaggctcaactccttgagcccgtgctggggcaggtacagagtcgtaagtggaccttccacagtcccagagtcacctggctgagtgggggtcctacctccgtgtccctaaaacaatcgcttcttagtgcgtggctacgatggtgagacccccctcgaatcctcttgttcaaacgggaacttgttcaaacgggaacttctctctcgtagaataggattgggctgcattttagacacaccttagaaaatgtacctgtctctcatgaaacacctgcacctcagaaacatcccctccctgtttcttttcaaggtgaaatgttactctttcccttttgggggacaggcgatggctgcaaactcaaccagaacaggtgttcttaagcccctagggaacagccagagtcagctcagccccacgggagaggtgcatttctcattctcttttgcccacctgagcacatgtctgcaggaagagctgaggtggtgtgatcaccctagggccaggaggactgcggggacagcacagacagggtagggattctgctgtgagcaggtgccggcagtttgggactggactctaaggggccaggggagatggaagggcagtacagtctctcctctgcaccgcaggaaacctttggtagtgggcaggcgctggcactcagggagcaggcaggcgtgggcatcctcctgtggccggcgggagactccaccagcctgactagaaagggaaggtcccggcggggggaagaatgtgtgtccctggaagaggggctgcagtgtgaggaacagtcagaacagctttcagagtggcaatcactgaagagccacacgacatgcagggttgagatgacacgagagtatggtggctccttagccctactctggggacagctggacttcagggtgggccttcatacgaaccttttgttgggaagcctcttagaaccacccagaagggcgttgggctgtgtcaggaaagaggggttagtccctagtgcttctgagcttaaggaagctgagccacccttcctttgaggagtgggaggcactgtgggacaagaccctccctgtctgccctaaaaggaaatg

SEQ ID NO: 13988 - DNA, 1434 bp, Artificial sequence
  DNA replication origin
ataaacaggccagtggccagcagatggacagataacctgagcttatccaaggagaggcaggagggggccctttgggggcagggtccttcaagacaggaaggtgccaaagtgcgtcagagggagataggaggggctggagcaggcacgtgaggctggaactccagctgggaggggcagcttctgccctggcctggtcacaagtggcagagagaagtcctggtcctgtgatgctgattgaagtgaggacggagttccctgaggtctccccaaatccaggagatgcaaaccttatttggggtctgaatgcccacaagtggcaccagcggctgaaagccttttaccatttattcattcaggttgttcacaagtcagtgctcacatttattggaggcataactccagcgtggtgcagtatgtgtgtgtgtgtgtgtgtgtgtgtgtgtgtggtcgtatgtgcatgagagggtggtcttgtgggcatgggtagtgtataggtggagtttgtcacgtgtgcaggtggttaaggatgtaatgtgcatgtgtagtgtgtaggtggtgtatgtgtatgtgcaaatgctatgtgtgtgaaatgtgtgggtgttgtgtgtgtgaaatgtgtgtggtgcattatgtgtgtgtctgtggtccagtgtatggtatgtgtggtccagtgtgtgtgtgtggtctgagtgtggcatagtgtgtgtggtatagtgtgtatggtgtgagtgtgtggtgcagtgtgtgtgatgagtgtggtgtgtgtagtgtaagtatgtggtgcagcatatatatgtgtggtgtgagtgtgtggtgcagagtgtggtgtgtgtagtgtttgtgaggtgcagcatgtgtgtggtgtgtgtggtgtgtatgtgtagtgtaagtgtgtggtgtggcatatgtgtgtgtggtgtgtgtggtgctgcaatgtgtgtgtggtctgagtgtgtggtgtgagggtgtggtgcagcgtgtgtgtggtgtgtgtgtgtagtgtgagtgtgtggcgcagtgtgtgtgtggcgtgtggtctgtatgtagtgtgtgtagtgcagtgtgttcggtctgtggtatgtttagtgtgtggtgcagcgtgtatatgtgtggtgtgagtgtgtgatgcagagtgtggtgtatgtggtgtggtgtgctgtggtgtgtgtgtggtgctgcaatgtgtgtgtggtctgagtatatggtgtgagtgggtggcatgaatgtgttgtgcagagtgtggtgtgtgtgctgtgtgtgttgtgctgcagtgtgtgcatgacgtgtgtgtgtagtgtgagtgtgtggtgcagtggtgcagtgtgtgtatgtgtggcgtgtggtatgtgtgtgtagtgtgggtgtgtggtgtggtgtgtgtggtatgtgtggtgtgtgtggtgtctgtggagtgtgtgtggtgtgtgtggagtg

SEQ ID NO: 13989 - DNA, 878 bp, Artificial sequence
  DNA replication origin
gtggagccgggggctcagatgatggtcggcagaggggtagacagggtgctcctcagccccgtccttctgagctcatgtcaagatttcccaggaggcagacagaaggtggcactgagtggagagagggaattcaggcagcatgtcttggcctctctgggagccaagggggaagatccaccctgcacccagcagctttcctcttggagcaagggctgcctgtgtggccaagaaaggcgagcctggcatgaatggagaccttgtgccaaagacctcgctggagccgggagccgcaacacaggggcttttcacaaggagccttacaacagaggcggcattgagcgtgactgtggccagcgggcaggcgtggggtctggtggatgcgtggcatcggtagaacaacattgctgctcctcctgaccctgtctcggctgggggtgggggtggggggcgctcccagatctcttctcagaggggaatacactaagagtcatgttgtctctagctgaagctgccctgacccccttcgagggtgtttgaggctctacaggggcacagaataatgagtgcaggagtcaacgtgtgtgtggagtaagctggagggctggacaggaatgggttaaagacagctgcttggagacatcaccaaagcatgactccactggggcctaggctaccagcaaagggagggtgccagatgcctctgtctgttgaagggggatggaatcccagtgtgccccctctgaggggtcattgaaaggtgagggagagctgcagccttgccgaggggctgtgaacgggctacaagccggggatggagggcaactgcccaggggcagtcaggatcagaggaccatgggggtaggggcatggtgggttta

SEQ ID NO: 13990 - DNA, 1557 bp, Artificial sequence
  DNA replication origin
cagtcttctttgcttttgtgcagagaagactgagaattcagccctagagaattcagctctggttgtgagtgcctcttttccagggcagagacttctggaaaagcagatggagccttgtggaatggggctctctgcctcatctggggagtgactctcgattcccctcacctgtccctcccatcacacctgggcttctttgcggtgacaggtgtgtgtctggagagggagtagagtggaacgcaggtttggttgtgggatgtgggggtcgcagaggtgcaccctgggatctgaaggctggcctctgtcctcccatctggacgggcaaggagctcagcctcccagactctgctttctgactcatctaatggcagtcctcataatttcctcctaggatggttgagacggtcaaaaggaaagcaggtgggaaaactcctggcgaagcagaaagtgttccgctgtggggaggttttatttttccctcatgaggagtggacggtggagatggggggacagtgggagggaaaggcctgggcaggcgtgtttgggaaaagatgatgaagggcactttggaatttgtagataccaggagactaaggggaggagtgctgtggggggtcatttggggttggaggctgaataagcagggtgtggagtggggcagaagaatccagcatctcccaaagtggagggatagtgagcagttgctgcgtgtgtggggtgtgtgtgtgtgtgatgtgttttgtgtgtgctgtatgtgtttgttgtggtgtatgttgtgtgtgctgtgtgtgggtgctgtattgtatatgtagggtgtgtatgctgtgtgttgtgtgtgtggtgtgatgtgtgtgtgttgtggtatgtgttgtagtggtatgtgttgtgggggtgtgtatttgtgtgtgtgttgtgtgacgtgtgtgtagggtttatgtgttgcattatgtgttgtgtgtatgttgcgtgtgttgtgtgttgtctggtacattgtattgtgggtgtgtgttgtagggatgtgtgtgttgtgtgttatgttgtgtgggtatgtgtggtgagttgtccattgtgtgttgtgttgggtgtgtgatgtgtgttgtgtggtatgttgtactgtgtgtgtgtgttgtggggtatgtgttgtatggatgtgtggtgagttgtgtggtaaattgtgttgtaggggtgtgtgttgtaggggtgtgtattggggtgtgtatgtgtggtgtgtgttatgtgatatgtgcattgtgttgtggggtgtgtgtcgtaggggtgtttgtggtgtgtgttggggtgtatatgtgtggtttgtgttgtgggtatgtgtgtgtagctgatgttgggatgcattgtgtgttttgtgggtgtggtatgttttgtgtgttgtgttgtgggtgtgtattataggggtgtgtgtgttgtgtgttggggtgtgtgtggcgtgccttgtgtggtatgtggtacattgtgttgtggggtatgtgttgtaggggtgtgtgtggtgtgtgttgtgcggtgtcctcctgggcatgttcccaccttggcagtgctgtc

SEQ ID NO: 13991 - DNA, 1276 bp, Artificial sequence
  DNA replication origin
ttaaatatttaaaattcttaaccttttttcatgccgtgacacacatgatagatgacattcaaatgtgtggcacactctagtccaaacccctgtggcctgctgtgactccattctacttacttcttaaaagctgactgatggcaagtgagtgaggccaatgttgctgcaagaatgacctttcaactcttccaagttaaaatcagaggaaatcaatcactactaaagtatgcaaatgttttgctactggtaatgacacaaaaactacaactaatcacaacacgccacttcatggtgatgacactgttgtgttttgtctgtaaggtgaaggtagtagttaactgctaattggaaaccaagagactcttctccctttttccagattcggccataagcaaaagcttaaattcttggatgaggggaatgaatactgggaatccacagtggggctacaaaccaccattattacaaggtacttggaggcaggaatgggaggggaggatgggtggggagatggtgggagggaggacaggtaggaggatgggtgggaggagagatcggagaagagatggaaaaatagatggcaggacaggagtgagggcaggtgggaggatggatgggaggacaggcgggacgatgggttagaggatgggtaagagaatgagtgagaggagagaagggagggcaggtgggaggacggatgagaggatgagtatgaggatggtggaaggatgggcgcaaagatgggtgagaggacagataagaagactggtgggagactagatggaaggatgagtgggggatgggtgggaggacagatgaaaagatgagtgggagggtaaagaatttctagaagactcaacatactggcagaatcatctatgccattcaaccaagagttattgaggcttcctgaatttatatgcttccctttttcacctgctctgaagagaggaccagccagggtaagccctattttttagttgtgatggtgcagaaaaccttccccaaatacatgcagagcacactccacagcagtgagcctctaagtaaaaagtcctgggaggactgtctccatttgaccaacagcaggggagcaaattcagaagtgaccaagccgtggccaggtcactctaccatcatcctcaactgcaggctgcaaatttccttggaatggggaggcgggagatcaggtgtgctgtggtcccaggtgaggtctgccctgccggactttactttcccctccagggagccaggcaagctcggaggatacctcctc

SEQ ID NO: 13992 - DNA, 1262 bp, Artificial sequence
  DNA replication origin
ggataaggaggaggaggttaaggacgagggggagaaggaggagaaggaggaggaggagaagaaggaggaggaggaggaagaggaggagaaggaggaggaggaagagtaggaggaggtgaaggaggaggagaaggaggaggatgaggaaaaggaggaagaggaggagaaggaggaggaggaagaggaggaggaggaagagaaggaggaggaagagaaggaggaagaggaggaggggaaaggaggaggagaaggaggaggagaaggaggaggagaaggaggaggaggagaaggaggaggaggaggtgggggaggagaaaggaggaggagaagaaggaggaggaggacaagaaggaggaggacaagaaggagggggaggaagaggaggaggaggaagaggaggaggaggaagaggaggaggaggaagaggaggaggaggacaagaaggagggagaggaagaggaggaggaggaagaggaggaagaggaggagaagaaggagaaagaggaggagaaggaggaggaggaggaagaggggcatccagttgagttttagaggatgttttgaaggatccctcagattggctttgtgaactcataagcagaggtcccacgtggaggaagcagcacagagaggtgagagcacagcccttggggtctgcaggagttcaaggcagaggtgggaagtggggcaaggggcaacacggcagaggctgcaccaggaccagtgtcagtatccagctaagggatttatccatcaggcagcagtcaggccttggcgatctccaaggaagagaatcaacaagaccagatttgtactgtagcaaggttcagcgggggccacgtggagaacaactggaagcaggctattgcagtaaatcaaagcatcctgagccggggctgatcaaagggggtggcaaaggagagaaaggggctgatctgagaagtgcatcgtaggaattagcgctgacagatgatggtggatatggcggtgaaggtggtgggcagcaaggaacgggcagtggggttgtcctgcaggtgtcttgcctgggcagctggtgggagatgatgccattagtggagctggagaaatctggactgaggcaggctgtcgggggagtggtggggcaggagtgctgcattcttttctgaacaaggtgaattggggcatatgtggatttgcaggcggaagtgaccaggaggccggcggatacaaggctcttgtgtccccggcagcttcaacttcatgcttacctagtgctgttt

SEQ ID NO: 13993 - DNA, 1699 bp, Artificial sequence
  DNA replication origin
cgcccgggcagcggcccgaccgggcgagcatgggcggcgcggagtgacgccgctgtgcccgcttggcatcaaggacattcagcccgcgggggtggggacgaaggggggcagcccggcgtcgccaccgcagcccccgagagccgccgccgctgctcgggctccggggctgggtggaggaaaggggtgttcggaatcgatccccattttccgacctttttgttggacattacgcccaccttggacgccgcaagagaagctgtcaagccccgcaggctctgattcggcgccctccgcgttcctcggctgctcccggcttccctgtgcctcggtggagtatttgcgttcggggctggggctggaggaggcagccacacgcgcgcacacgcacacgttcagaggagggcgagaggcagcggcataggctccatctgcagtgtcaatgcggcgctcccgctgaaggagggaaacgcggcgcgtccaggtaaggagccggcccgccggggagtggggccgggcgggcggcgagggcagcaaggtcggacagacctgggccgacccgggagtcctcagtgtcccggagccagcccgcggcacacgcacacgcacacacgcaggcacacacacagatccacaccggcacacacggcgctcgcgcacctgcccacgtcccacctggacgcccgcggaggtgcagcggccggagcagggatttcccgggtgtgttctcctctcacgctcctggactcagacttctctttcccgggactttcggggtgggattctgtgtattcccggctctgcctcccacccggggaggttgagggagcaatttttcagctcccagcccctttcgtccctagctgggctttaaaatgggagaagtcctgagaggtttccggagacctacccagtgtcatcgcggccccgtggcctttggacaccctgggatttcaacgggagacagacccacagatattcggacgcatatttggagagagtggtggcccagcgcccggggaggaggccagataggcggttggggctgcagttctgtagggcggcgcatatgaaacagacactgcgtttccccagtaagaggcagcacaaacgcctttctgaagcgtggcactgcttccccgggaatgcgccgagatttcaggcagaaagcggcttaaagcatcgccgcgtatgttgcttgtctagggaaggtacgggggtcagatcctccttaaaaggtaagaccttattcacagcctcagtgcctgcttagcagcaagcagacaggacttggagacacaggacttgggtcccctctcacctccctaccctccctgggcacatggggctgccttccccggtgcctccggctggcgaacacctgtcacatgcctttcgtggtgtgtgtctgagaaagagaactagaagggggaagcacgagggatatagtcctccaaaagaggaggctcccctccctcacgaccgtggcggcactgcccaccggagaaggcaaggcattcgtgggtctgccagcgtcccccagagcccaagcctgctccgattgtagaatcactccccagacgcccgtgctttaaggtcctatttcccgaaagcattttcattcttgttctctctggctggaatttcacaggctgctcattttaactttttctggaggaggtaggaagtggctggggttcta

SEQ ID NO: 13994 - DNA, 782 bp, Artificial sequence
  DNA replication origin
ccccgctccctgccccctgcaaactttgcgagcagcccgcccggggggccgggggcgcgcccgggaggcccggctcggcccgcggccgagctctccgccgccgcagcgccagccgccgcagccaccaccgccgcagccccgcgcctccccggggagcagccggcggctcccgcggccccccagccccggccccagggcactgcccggcgagtgtctcggcaagggtgggggctgccgcggcgcggccggccgcgggctgccggggggcggccgccgctacccagagaggcgcgcagaggcgccgagagcgctccccggcgggtcccccgcgcactcgccgcgcccgggcagcggcccgaccgggcgagcatgggcggcgcggagtgacgccgctgtgcccgcttggcatcaaggacattcagcccgcgggggtggggacgaaggggggcagcccggcgtcgccaccgcagcccccgagagccgccgccgctgctcgggctccggggctgggtggaggaaaggggtgttcggaatcgatccccattttccgacctttttgttggacattacgcccaccttggacgccgcaagagaagctgtcaagccccgcaggctctgattcggcgccctccgcgttcctcggctgctcccggcttccctgtgcctcggtggagtatttgcgttcggggctggggctggaggaggcagccacacgcgcgcacacgcacacgttcagaggagggcgagaggcagcggcataggctccatctgcagtgtcaatg

SEQ ID NO: 13995 - DNA, 1300 bp, Artificial sequence
  DNA replication origin
ttgagtgattttgttatgtgtgtctctggacttctgaaactaacctgatattgtgtgctttatctagagtctgggattcagggtttctgggaagagtggagtcagatcaatgtattcatgtaagcttaataagataactccttgctgctttctgggccatgcaagactcagcagagaaccagagactaaaagggctccacgctgtctcctggaatatcctttaaccaaagaatcaaacatgtggtttcctcctcattctggcttggttcatcttctcattggtgagagcaaagtttcagcagggtcctctctgggtgggccaagcctgacctatatgtgccgctcaccttggggcttgtttaagctgtcatctcacagctcctttcaaaggctccccaattcacacaacttcgatttctgtgagaatataacccctatagggaggtataggcatttaagccattatcagtcatgtccacctaataaggaggctctgagatgtttcgatgggagggacagtaatgggcgggagtttctgggtgtgaggacagtgaaaactaaagaagggacaggagagaggaggccaagagccatgggctcctttagagggtcgtccttgctggttgcctatcccagggaatgcttactggactctgctgaaggtgccacttccctcagactatggtgggagcgggtatgaggatgagggtggcatgcacagagttgagttaacaggtgtgggaatcccttcggtttctcttggtgggtgggcccattcctagggggatctaggcagaggtttgggaggtagtgccacccactccccatcttcactgcctaaaccagagctacatggtgatttctttctttgggcttcagaaaccaccctgatgttggcatggtctgttctggatgtagtctaggatctagggtttcagagaagagaggagccaggagagccgctcagtataaacatgaatggaaaagtcaggttaccaagccagctctggggcactggccactcatgttctctcgtgcgggccttgtgccctcagtgtcctcggcctccttgggtgccatgtgggggtgacttggtggggtgttgggaggggttctgactagcaatgggtgtatgcctcagagtcagtgtgcgcttgtgtcagctctgagcacctgagggtccctccgacggccagcgcccagagctgcaaattccgaggcggctgagcgcctccctctgagcgcgcgccgtgcgctccggtcacccatgtatgcccctctctccgccccacatcgccac

SEQ ID NO: 13996 - DNA, 1054 bp, Artificial sequence
  DNA replication origin
gctccctcagcttgtagggaggtgtggagggggaggcgcgagcgggaaccggggctgtgtgcggcgcttgcaggccagctggagttccgggtgggtgtgggcttggcgggccctgcactcggagcagccggccggccctgccggccccgggcaatgaggggcttagcacctgggccagtggctgcagagggtgtactgggtcccccagcagtgccagcccaccggcgctgcgctcgatttctcgccgggccttagctgccttcccgtggggcaaggctcgggacctgcagcccgccatgcgtgagcctcccacccgctccgtgggctcctgtgcggcccgagcctcctcgacgagcgccaccccctgctccacagcgcccagtcccatcgaccacccaagggctgaggagtgcgggcgcacggcgcgggactggcaggcaactccacctgcagcctgggtgcgggatccactgggtgaagccagctgggctcctgagtctggtggggatgtggagaacctttgtgtctagctcagggtttgtgaatgcaccaatcgacactctgtatctagctactctggtggggccttggagaacctttgtgtccacactctgtatctagctaatctgatggggacgtggagaatctttgtgtctagctcagggattgtaaacgcaccaatcagcgccctgtcaaaacagaccactcggctctaccaatcagcaggatgtgggtggggccagaaaagagaatataaaagcaggctgccccagccagcagtggcaacccgctcgggtccctttccacactgtggaagctttgttctttggctctctgcaataaatcttgctactgctcactctttgggtccacactgcctttatgagctgtaacactcaccgcgaaggtctgcagcttcactcctgaagccagggagaccacgagcccaccgggaggaacaaacaactccagacacgccgccttaagagctgtaacactcaccgcgaaggtctgcagcttcactcctgagccagcgagaccacgaacccgccag

SEQ ID NO: 13997 - DNA, 1541 bp, Artificial sequence
  DNA replication origin
ctcacctcccggacggggcggctggccgggcggggggctgacccccccacctccctcccggatggggcggctggccgggcggggggctaacccccccacctcccttccggacggggcggctggccgggcagagggactcctcacttcccagtaggggcggccgggcagaggcgcccctcacctcccggatggggcggctggccggacggggggctaacccccccacctcccttccggacggggcggctggccgggcggggggctgacccccacctccctcccagacggggcggctggccgggcagagggactcctcacttcccagtaggggcggccgggcagaggcgcccctcacctcccggacggggcggctggccgggcggggggctgacccccccacctccctcccggatggggcggctggccgggtggggggctgacccccacctccctcccagaccgggtggctgccgggcggagacgctcctcacttcccagacggagtggctgccgggcggaggggctcctcacttctcagacgggccggttgccaggcagagggtctcctcacttctcagacggagcggccgggcagagacgctcctcacatcccagacggggcggcagggcagaggcactccccacatctcagacgatgggcggcctggcagagacgctcctcacttcctagatgggatggcggccgggcagagacgctcctcactttccagactgggcagccaggcagaggggctcctcacatcccagacgatgggcggccaggcagagacgctcctcacttcccagatggggtggcggccgggcagaggctgcaatctcggcactttgcggggccaaggcaggcagctgggaggtggaggttgtagcgagccgagatcacgccactgcactccagcctgggcaccattgagcactgagtgaacgcgactccgtctgccatcccggcacctcgggaggccgaggctggcggatcactcgcggttaggagctggagaccagcccggccaacacagcgaaaccccgtctccaccaaaaaaatacgaaaaccagtcaggcgtggcgccgtgcgcctgcaatcgcaggcactcggcaggctgaggcaggagaatcaggcagggaggttgcagtgagccgagatggcagcagtacagtccagctttggctcggcatcagggggagaccgtggaaagagagggagagggagaccgtggggagagggagaccatggggagagggagaccgtggggagagggagaccgtggggagagggagaccgtggggagagggagaggagggagagggagaggaggagcctttccgagaagttgtattttcaatacaagattaaaaggtatttctcaaaacatgcaggggttttggacctgctggcatagctgcattgaaggcttcgtgaattttcttttctttttctacaacagtccttatgctggattcacttatctcaaagtggcaggaaactgcagctgcagacctcaatctatggtacttaccaagcaatt

SEQ ID NO: 13998 - DNA, 1003 bp, Artificial sequence
  DNA replication origin
ccgcccggccagccgccctatccgggaggtgaggggcgcctctgcccggccgcccctactgggaagagaggagcccctctgcccggccagccgccccgtccaggagggaggtgggggggtcagcccccggcccggccagccgccccgtccaggagggaggtgggggggtcagcccccctcccggccagccgccccatccgggaggtgaggggcgcctctgcccggccgcccctactgggaagagaggagcccctctgcccggccagccgccccatccgggagggaggtggggggggggtcagccccccgcccggccagccgccccatccgggagggaggaggggaggtcagccccccacccggccagccaccccgtccgggagggaggcgggggggtcagccccccgcccggccagccgccccgtccgggaggtgaggggcgcctctgcccggccgcccctactgggaagtgaggagcccctctgcccggccaccaccccgtctgggaggtgtactcaacagctcattgagaacgggccatgatgaccatggcggttttgtggaatagaaagggggagaaggtggggaaaagattgagaaatcggatggttgccatgtctgtgtagaaagaggtagacatgggagacttttcattttgttctgtactaagaaaaattcttctgccttgggatcctgttgatctgtgaccttacccccaaccctgtgctctctgaaacaggtgctgtgtccactcagggttgaatggattaagggtggtgcaagatgtgctttgttaaacagatgcttgaaggcagcatgctcgttaagagtcatcaccactccctaatctcaagtacccagggacataaacactgcggaaggccgcagggtcctctgcctaggaaaaccagagacctttgttcacttatctgctgaccttccctccactattgtcctgtgaccctgccaaatccccctctgcgagaaacacccaagaatgatc

SEQ ID NO: 13999 - DNA, 1058 bp, Artificial sequence
  DNA replication origin
gccttcaagcatctgtttaacaaagcacatcttgcaccgcccttaatccatttaaccctgagtggacacagcacatgtttcagagagcacagggttgggggtaaggtcatagatcaacaggatcccaaggcagaagaatttttcttagtacagaacaaaatgaaaggtctcccatgtctacttctttctacacagacacagcaaccatctgatttctcaatcttttccccacctttcccccttttctatcccacaaaactgccattgtcatcatggcccattctcaatgagctattgggtacacctcccagacggggtggtggccgggcagaggtgcccctcacctcccggatggggcggctggccgggtggggggctgacccccccacctccctccaggacggggcggctgccgggcggagatgctcctcacttcccagatggggtggctgccgggcggaggggctcctcacttctcggacggggcggctgctgggcggaggggctcctcacttctcagacggggcggcggggcagaggcgctccccacatctcagatgatgggctgccgggcagagacgctcctcacttcctagatgggatggcggccgggcagagacgctcctcactttccagactgggcagccaggcagaggggctcctcacatcccagacgatgggcggccaggcagagacgctcctcacttcccagatggagtggcggctgggcagaggctgcaatctcggcactttggggggccaaggcaggcggctgggaggtggaggttgtagtgagccgagatcacgccactgcactccagcctgggcaccattgagcactgagtgaacgagactccgtctgccatcccggcacctcgggaggccgaggctggcggatcactcgcggttaggagctggagaccagcccggccaacacagcgaaaccccgtctccaccaaaaaaatacgaaaaccagtcaggtgtggcggcgcgcgcctgcaattgcaggcactcggcaggctgaggcaggagaatcaggcagggaggttgcagtgagc

SEQ ID NO: 14000 - DNA, 1401 bp, Artificial sequence
  DNA replication origin
aagaaggggatatcagccatattcaaatatgtaatgtttaaataagctatgaaggatagcaaccttgggtaagataagatgtgtgtaagatgtagtccacagcaaactgaaaagcgtggccataaattctaggagtgagattaatttaaataaaatgctgataataaataccaatattaccaacctatggaccatttctccttgaaggaggatgcaaaaacatttaaaatcaagctggaataagcaaaataagaatttaggtaagaatggagttcttgttgagctcctagatttctagatgcacacctggtgacactttttttttgtcctctcaataattatggaaagccaggaccattaattatttttcacttttagatgataaacctgtggttaaaaatggtcaaataatttatttgaagtcaactagaacttaaacctgactccaaaacttgtaaaataatggtggtggtaatgatgaaggagaaggggaactggggagaagttagtggtgatgttggaggtgttgatggtgtaatagatgatgatggtggtggcgacggtagccatggtagagatgttggtggtgataatggaggtggtggtgctggtagtggaggaggtggtagtgatgatggaggtcatgttagggtgatggtgatgatggaggtattggtggtgatgatgggtggggagggaatgatgttggtggggtgggactggtgatcgtgggggtcatggtagggtggtagtgatgatggaggtattggtggggatgatagagctggggatggggtggtgatggtggggtggattggtgatggtggaggtgatggtggtgatgatggagagattggtagtgatgatggaggtggagagaggttggtgatggtggagtgggattggtgatggtagagatgatggtgatgatgatgatggaggtcacagtagggtggtaaggatgatggagggattggtagtgatgatggagttgaggagggggcggtgatggtgaagatgctgatggtaatgatggaggtgatggtgttatggtggtggcagctgccacttacttaggatttcttttgtcctaacctctgggatgatctaatttcacctacacctctgcatccataatttactacatgcctattaagtggcagagcttggatttgaacctaagtttgtctgacaccaaagtccacatacttcacaggaatgttgcgttgcttctcacgttatttccagtccaccatatgtgaattctgtgtattttcacagaataatgacacctgtattctggtactgtgggactagtataagatggtcaaactgctatcaatgattctattctctttgcatatttcagtatccaacaatttatttataagaccaaaagac

SEQ ID NO: 14001 - DNA, 1293 bp, Artificial sequence
  DNA replication origin
aagatctcactactagaatattaattctataaggacagggaccaggcccatattgttctagtgtctgcagcagggtctgatcaggaaatgtctgctgatattgaaaaatcaaatcaatatcctacatacatgataagaattcaacaaatataggatgggtagataaataaataagtgaggaaatgggaagaaggcaaaagaagggaagaagggatgggaagggaggaagggaaggaagcagggaggaagagaggaaggaaggaagagaaaaatgaaagaaaggaaggaagggagagagaaagtaaagaaggcagggaaaaggaagataagaagtaaagaagggaggaagggagggacggacggaggaaggaagggaggaagagagggagaacgggaggaaggaagggaggaagagagggagaacgggaggaaggaagggaggaagggagggacggagggaggaagagagggacggagggaggaaggaagggaggaagggagggacggagggaggaagagagggacggagggaggaaggaagggaggaagggagggagaacgggaggaaggaagggaggaagggagggacggagggaggaagggaggaaggaaggaagggaggaaggaaggaacgaaggaaggaaggaatggagggaggaaacaaagaaggaaggaagaaaggaagggagaaaggaaagaagaaaggaagggaggaaggaaaaaaaggaaggtccttttgaatatgggaatggagatgatggctatgagagcaaaggctctttctaagcttgatcaatagcaatgacagaaggaactcatctgccaataaactatcacagaccacagacactactttcttacatggccacacctcctttgactcattatttcacttttctcagatttatgttcagtggggtagtaagctgggtctccccctaatgtgggctactgccatgatcctcactctcttcaaatccttcagatggatcatcaagttggactctgggtgatttgggcttcagcatcacccttggatcctcaccttacagattgctcttaatttttcaaactacagccctcagaaaatcctacccaatcccagagtgggttttgctaactcactgcagcttgtccagctaatgaacagaacaaatagcattccagttcaccaggtggcctcgtaaacctcacaaacaattgccagcatctccaggtccctcaagacccttttcaactattaccaccattttccccctctggagataagcactctcctgacttttacagtaa

SEQ ID NO: 14002 - DNA, 942 bp, Artificial sequence
  DNA replication origin
agcctgaagtcccggccttttatttcatgaaatggatggacactaacaaggagaataaattcagagggttattccttctaccagaaagttaggccaaggggcgcaaaaaggggtggccatcccgagttggtatgaatgcagggatcttggaaggcttcctgggtgttgagctggatctgcaaggagggcatgttctccaactgggagagaaggagaatatttcccggcaggatctctgctggggtggagtatttcaagacaggatctatgccactgtgctggaggaatttcagggcagaatctatgttgctggaggaatatttcagagaaggatctatgttattgtagggggagggcatttctggacaggatctatgttcctgtggtggggagggagtgtattttagggcaaaagttttgctactgggaggaaggggtcaaggtcagagggtggtggtgtgtgtgggtgttaccagggataactcttcatatccagagctagtgagaggccaccaggaggcccccagtgttcatggcagagccttctgccttgcagctatggggaagattgatgtggacaagatcctctttttcaatcaagaaatcaggctgtggcaggtaaataagcttcttagtaactttccccccaggactacattttttctgggtgcacatctgcttgtgtgtgtggcagtggttggggcgggaggtggggtgactacatgaaaggttgaggcaggtcagaggtcagtttccaaaccactctgtgtcatcttggtgcgaggataaggctccccaagacagagcttcacaaacccctaggtccccagcaacacggcaggtagggctggtggtgggaggttggtggtgggaggtgtgggcaggcccaggagagaaaagtcagggagtgggggtggagtggggtggtgacaatttccttaa

SEQ ID NO: 14003 - DNA, 1034 bp, Artificial sequence
  DNA replication origin
atatacatgtatacttgctaaagttgctaagaatttcttgtccatgttcatgagggatattaatctatagttgtcttgtttctgttttctttcccagcctgctttcaaacagttttcctcagaatggttcctccccttggtgcccaactgaggcagtcaggaaggatgctgaggaggaggaagatgaggaagaggaagatcaagaagaagaggaggaggaagaagaagaggaggaggaggaagaggaggaagaggaagaggaggaggaggaagaggagaaaaaagtgatcttatactccccaggaactttgtcgcctgacctcatggaatttgaacggtgtgaacagttgggtggggtggctctgtgcacccatggagctccctcccatggggaaggggacagaggctctggctggggtatgctgcagctgtgtgccccagctggagtgcatggttcagactaggccctgaatcacgaaatctccaggattttcatatgggaggggctgagggacaggactggcagagaggctagagaaatagtctcaaagctacattagcatagcacatacactcatacagtgtttttactgagactgggtgtttatttggggtgccttgtggggggcacagctgatggtgattatgagggctaacccctctctcccccaaaacacatacccccacaagtccgcactgctcttacagtaggaaagatggcgaatggctggctcagacgtcccttgccactgcctcctccatagactcaaagcccctcagcagccatgttggcttccagaggagttggctcaatagcaggaggctctctccacagccgagcctgactttcgggctgcaggttaaagttggagtcctatcatgccagcacattcatgggctcagaattttcaagaatattcccttaggatgagagctgaggcagctacgcctcttatctgcttctgtctaacacagaaggcttcatggggcagggactgggagaacttggggaggggccccaaagcccaagtcta

SEQ ID NO: 14004 - DNA, 928 bp, Artificial sequence
  DNA replication origin
ccatggatgctaaatgtccacgaagcacagggcatgtgcagaatgcgaatcggctgcgcctgggctagaggagcgagcgtgggccgtgtggtagagcagtgttctgaggccgtcctcatactggaagagcagctgtgggcccacttttatctccgtgcagggcgacctcaaatgctacctgatgctctgctttgcagactatggccacggccattctgactagcgttctgaaagctgagaaatgcatttacggtagcagttgtggtaacctccccttcacagagcgatcccagtgctctttggggtgggaactgacggcctttcaagggctggacctgattggtccaagtgtgattccctctatggccagtcattggctcagcaggctggcaatttggccagttccaaccaatgagaggggaggagcggttccggaaaagttcttccttaactcttaagaaagagctttcgtaggaaatctttgtcttacctgatgtagagtaggaagaaagacagttcgattgctctagctgccattccatagccacaggagccggaggaggtggggagggcagggaaagataagaaactgagcagagccaagagaggcctgaatccacgcggacatggtgagctcctctgcctgcctcggacctccccgggtgtgaggagtgcatttcttcgtggtttaataatccaggccctggcagcccaaagaatcccaactgagacaacctctcaagacttgtcttctgccatccccagggaaaggccaggaaactaaccgcagaaaaacaaatactgttccgtgaccccagggattagaaaatcagaaaccggccgggcgcggtggctcacgcctgtaatcccagcacttcggaaggccgaggcgggtggatcacgaggtaaggagatcgagaccatcctg

SEQ ID NO: 14005 - DNA, 896 bp, Artificial sequence
  DNA replication origin
aactggagcatgatgtcggtggggagggcgaggagggcgcgaaggactgcagcagctccgcgggccggtccgagcctacctccccatgcgcggggggggcggaacccctcgtcgacttccgggtcacgccacgccccgccccgctcctcccactcagcccgcgcccggaaacgacttgcagtgtcgcagcgcccaggttccccctggcggagcgcgttggcctcaccgcctgaaccggcggggcagcgagcgcgcgacaggacttgcgaagagcaagtcccgagcctggctgggcatccttgagcatcccgcctctgtaaacctgggccgaggcccaggaatctatattattctcagcacgcggactattctgatacacagcccagtttagggctctctaacctagaaggacggcatgagcagcgggtcccatccctaggttcgcagctgaatcgtgggggcttttgcagcatcctctacttgggcccagctggactttgcggggaggaaaggaggcttgtagctctcaaagctccgcaggtgtgctgtgtaatcagcgttgtgtaatcaggtgttgtgtaatcaaggtagaggctgggtaccgtatggggcccatgctgccgtgtgccgcacgccagtcactgagatgatgagttttgtagcagagaaaaggtttattcaccaggcagccagccgaggagacgggagaacagatctcaaatctgcctccccaaagatgggttttagggatatttatgggatagaggagcagggtggtctgaggtgtggggaaaggcggttgaaggtaaggaaaagtttggcaatgggttatctgcgcgaggtagtcaagcttcatggctctttataggatacatggtcacaaaatgacatcctta

SEQ ID NO: 14006 - DNA, 1479 bp, Artificial sequence
  DNA replication origin
cattttgaaatagaatctccaaatggaatcagctgttaatagagcttcctccaggaatgtctgaggctgcttctccttttccagctctgcttcccatcatcacaaggccctctcacctcctgtcccctcatcccctacctgtcacctaagttttctttgccatatctaacaagaccaaatctaccaagaccttatctaatatctagaaaatatttcatgattctccaagaatctgcagtggcatcgagatgtgaacggttttccgttaacaaattaaacatactattttcctaaaagggacatgaatttagaagagattctgcatggtggctgtgtggacagttcatatatccactgagattcagtgtggcctttttatttcttcctcatcactgcaacactgtggttaagggagtgactctccaggtcctgacaggtcactcctaggtatggagaggaaatgggggaggttgggcggggtgggggggtggtgtggcaaggtggtgagcttgggtggtacatctcaaagagctgtttatgggtctaggtcccctcttttctgacctcccctatggactctgagaggcgctgtctgggagagggcagtcatactcactcttcattgacaaagatgagttccagagaaggttggctgttctttacatccagacctatgagtagcaaagaaaagcagtatgtgagaggtggaggctggggctgaccctgtgggttggagcatagctcaagggcttagggcggaggtgggccatatggagtgggtgacatttctccttccctttgctctgtaaatagaatggggctcatggatgcagactggccccagggttttgcagtgatccttgagcatttgggggcaaagagcagtgtgtacccttgagcatttgggggaaaagagcccagaagtgaaggaggaaggaagagccagaacagggagttcagggaagcttcagagtccaagagctgggatgggaaagaggagagagggaagaggaaggggaatgtgggggcatggctgagggggtcctggggtgggcacaaagttgggcagtctccctagaggagccaggcaggaggaccccaggggaggttggaggagcaaaggagagatgaactccagcaaactgtactgatgggttcggcctcttcggtgttggagttgcccgccacgagctgctcgtcctcagcactgaccagctcctgcagcacggcctccacgatgggcatcaccatggcggtggtggaggtgttggacagccacatggacagcaacgtggtacagcacatgaagcagagcagcagcctggaaggcagggagggttggggcagagcgtccacggaacacacatccctgcggctccacagtgggcctcctaccaacctgctggggctggtctagacagctgtggctggaaaggcaggcatttgtcctgcagggtgccattcagctctgtactccca

SEQ ID NO: 14007 - DNA, 1187 bp, Artificial sequence
  DNA replication origin
agcagggaagcggattgatgacagccgactccggcggcaccaggcggcagcggctgcgggttatcccagcgggcgcagcctgtactcctctcctgcccctgcgggagctggaagctgagtgacaccagcccgaggcctgcagcgcagggccagagaccgctggctgggcccaggtgagagtgtgtgtgagtgtgtatgtgaaagtgtgtgtatgtgtgtgtatatgtgagtgtgtatttgtgtatatgtgagtgtgaatgtgtgtgagggtatgagtgtgtatgtgaatgtgtgtgtgtatgatgtgtgtgtataagtgtatgtgtgtgagcgtgtatgagtttatgtgtgtatgcgtgtgtgagaatgtgtgtatgagtgtgtgagagtatatatgtgtatatgggtatataagtgtgtatgagtgtatgtgtgcatgagtgtgtatatgtgagtgtatgtgtgtatgtgtatgtgtatgagtgtgggcatgtgtatgagtgtatgagtgtgtgtgagtgtacgtatatctaagcatgtgtatgtgtgtgagtaagtgtatgtatatgtgagcgtgtgtatgagtgtatgtgtatgagtgtgtgagtgtgtatgtgtgaacatgtgtgtatgagtgtgtgtatgagtgtgtgagcgtgtgtatgagtgtgtgaatgtgcattagtgcatatgagtgtgtgtatgtgtatgtatgagtgggtgtgtaggagtgtgtatgtgagtgtgtgagtgtgtgccagtgtgtgtgctggggaaaggatagagacaaagagcacatgcaattacttcctgaagtacaccctaaccctgggcctcctggagagctgtttgttcccaatccccaatatccaacccatgctttctacttcaccggagagccctgtggtgcccacctctatgccattctcctatagacagtaaatcttagttaacttgattgacacaggtatcatgcccaggctataaacttttggagcaacacattagaaggggcttagaggacttcagaggcagatataatgacggtaagtgagagtcacaatggagccaaaataaaaacaaacacacacaaacctaaaatacaggactaatcagcagaggaagtagcagctggatgctcacaagatcatagagggaccttagagtccaacccatctcccaaggca

SEQ ID NO: 14008 - DNA, 1054 bp, Artificial sequence
  DNA replication origin
gccgggcagcgcgcacaggtggaatttctgcgcgtctaccggcaccaggcatggaccgcacctgtccgtgtccgagagctacaagttagcggcgattgcctgggacctcaggtgcggactccaagggacattgcgggcggggaggggtgcagcggtccccagtctacgaccccggggactgcccgggcggttcaggacccattgtgagttaggtggcgaagcccaggcactgtctggtacctcatgagcttcgggctgagaccttgtcccccagccacggcggacagtccagctcctgcgcggggctcaaataggatgggattgcagaatgcttccctctcctttgtcttgggaccctttcccccattctaattgcttctcctccttggccatgacctggagaccgcaatgggaaacctctccagcgcccaagggctgctccgaaagcggagccgggggacagctcggagcccgagcgagccgggcctccatcccacacgcacagaagacgcggtcagaccccagcaggaaggaacccgaggggcgggagggacgaagctctccttgtcttgtccatggctgcatctggagtgggtggcgggaggggggtcagcaacagtagagggaatggggggctggaatagggagcgacgccgggacagcgcagctcccaggctgctttcgccacattcggctggactcagtgaccgtcggaatcgtaggggtacctcgcctcgcgctgtgcctcgtttgccccttcctttcagacccgccatcactgctcgcaaccctccaagccccaggatccaaagtttccgtttgagaatctgcacgtggggaggacctccctccaattcccccaagccccgacccctgagcctccggcttggggggatatgaagggagagaccccctggtgccagggcccttggagtgggtaagcggagagctgcacagcgcggggcccttacctgtcgctggtttcgctccagttgcctccccggctgcgaggtggtggaggcttgaaggagcgaggagtcctttgtgggttcag

SEQ ID NO: 14009 - DNA, 1465 bp, Artificial sequence
  DNA replication origin
attttctttatatgagagtaaaatccttatttatttcttaaaagtctctttgacccttctaccttgagggaaatttctggtatctctgttcattttaaggctgtttcatctgtccttccttgaatctctgtcttgttttgtccaacctagaggatagcagcatatattactttatatatcttgtttccagaatcaatagcctgtcatacttccattatttattctctccttctgtcagtgacacaatatagtctgctgcttgccaagaactctactttccaggccagtgattccattccctctagcgttttctcagatttaatttcttatgaaagaaaaaaaaaatatggttgatagttctgtcaaatgagaactcaggtttgaatgaattaggttggattttggaatatgcttgtgaccaatgtctgcattgttgatgaaggtggtagtggtggtcatggcagtggtaagtaatgatggtgatggtgttagggatgctggcaggtaatgatggtgacggtgttagggatggtggcaggtgacgatggtgacggtgttagggatggtggcaggtgacgatggtgacggtgttagggatggtggcaggtgacgatggtgacggtgttagggatggtggcaggtgacgatggtgacggtgttagggatggtggcaggtgacgatggtgacggtgttagggatggtggcaggtgacgatggtgacggtgttagggatggtggcaggtgacgatggtgacggtgttagggatggtggcaggtgacgatggtgacggtgttagggatggtggcaggtgacgatggtgacggtgttagggatggtggcaggtgacgatggtgacggtgttagggatggtggcaggtgatgatggtgacggtgttagggatggtggcaggtgatgatggtgacggtgttagggatggtggcaggtgatgatggtgacggtgttagggatggtggcgacggtgttagggatggtggcaggtgatgatggtgacggtgttagggatggtggcaggtgatgatggtgacggtgttagggatggtggcaggtgatgatggtgacggtgttagggatggtggcaggtgatggtgacggtgttagggatggtggcaggtgatgacggtgacggtgttagggatggtggcaggtgatgacggtgacggtgttagggatggtggcaggtgatgacggtgacggtgttagggatggtggcaggtgatgacggtgacggtgttagggatggtggtaggtgatgacggtgacggtgttagggatggtggtaggtgatgacggtgacggtgttagggatggtggtaggtgatgacggtgacggtgttagggatggtggtaggtgatgacggtgatggtgttagggatggtggtaggtgatgacggtgacggtgttagggatggtggtaggtgatgatggtgatggtgttaggga

SEQ ID NO: 14010 - DNA, 1657 bp, Artificial sequence
  DNA replication origin
ttcagcttgggctttcgctcgggatttaggaagaggccggcggggctggagggtgcgggccggcgcgggagggcgcgggaggcggggagcggcggcctctgattggccggggcgggggagtgagcggagtttcccacaatgccccggtgcggtgcagccgcggatggatgctgcgggaaggggctgccatttgctgcccctgccagcggcgcgcggacctgcccgcgctcctgcagccgccgccgccgccgccgccagcccgcccggcccctgcagcggcgccgcctgcgctccctccgcggccgccggagcgggcgccatgaaccccagctcctcggcgggagaggagaaaggggcgacgggcggcagcagcagcagcggaagcggcgccgggagctgctgcctgggcgccgagggcggcgcggacccgcggggcgcagggtcagccgcggcggcgggggccgctgccctggacgagcccgcggccgccggccagaaggagaaggacgaagcgctggaggagaagctgaggaacttaactttccggaagcaggtctcgtacaggtaggtgcggggagccggcagccgagacaggtgcgccgcggcgggagacccactcttctacccagcaaggggcgcttccgcggagttgggcacctctctgtttccacgcctctccttccccctttccccctctcctcccggggatgtctgtcttctccccatcctatcattccaggctggagggcagcaacgcctgctttcccctgtggcaggagagaagcactgggtccctaaggtcagagcaacagaaattttgtctgtgtgtgtgtgtgtgtgtgtgtgtgtgtgtgtgtgtgtgtgagagagagagagagagagagagagagaaagagagagagagaaagggttgcagactcagtgatgcttagttttcttaagagaagtcgtcaaagttgcccctaagcaggtgtcatcttcaaccacccttcccccaccttccagatttcgctggatgaacctttggcactaacttgacagctgagatcactccgacaggcagaaaagaatagcactacactgaagagaaatccttatggaagttggacctgcctcgaaatcccccatgaaggaagagtgggtttatgtctgtagatgcgccactggttatgggggctccatgcctgcgtgctccttgcctctctcctggctggaggagggtgtggggagcccgctggcaagctaggggtgaaggtgagagtggggaccatatttgcacctaaggatgagtgtatgtgtaagacaaggacagtgtgggatcaatggcctttaaattaggataaaagataaccccacattgtattagaatccaacaacgaggaattaggatttattaaggtctctctcacccctcccttccgcaggcaagaataaagacattgacaggtttggagagttgttgacactaaccctactgcttatcgatgttaaaggtcgaggtgatatgcaagcataggtttacaaagatgtacacttgctggagctcagagggtttctggaaaaggggtcagtgaaaacattcttgtaaccctactctttctgagttagtgttcccttcccaaaaaccatataaagtattaagcctgtcacaccatgt

SEQ ID NO: 14011 - DNA, 1404 bp, Artificial sequence
  DNA replication origin
cagggcagcggcccccgccgccgcggctgaccctgcgccccgcgggtccgcgccgccctcggcgcccaggcagcagctcccggcgccgcttccgctgctgctgctgccgcccgtcgcccctttctcctctcccgccgaggagctggggttcatggcgcccgctccggcggccgcggagggagcgcaggcggcgccgctgcaggggccgggcgggctggcggcggcggcggcggcggctgcaggagcgcgggcaggtccgcgcgccgctggcaggggcagcaaatggcagccccttcccgcagcatccatccgcggctgcaccgcaccggggcattgtgggaaactccgctcactcccccgccccggccaatcagaggccgccgctccccgcctcccgcgccctcccgcgccggcccgcaccctccagccccgccggcctcttcctaaatcccgagcgaaagcccaagctgaacatgaactctgcccggaggcgacgggctgcggcggagggggagagagaggaggacaggctgcgaccccgggctggggacgccagggcagggacagcgagcatcaggaaggagagcgtccggggaactcgagtggccgcgccctgggtcctgcaccgtgaggctggggggaccaggaccggcgggcgcccaccttggtcctgagcccagctgccgacgctgggccagcaccctctccaccgccgccctccagtgagcagagctgggctcaggcagcagcccctgggcgcgggaaggtagcgggagctgcatttaggggaggggggaggtagcaggagctccgccagtgggaaccttggagtgaattcgtcggcgggtgccaagtcgaagcgccgacctcctgtctctggactggggcccggacccctgcgtccccaaactgcgtccccgccttgctcgtcgcccggtgccttccttaggcgcagcagaccctcggtaaacagcggttaattcgatggaatcggatcacagggccctcggtgaagcagaaaggcggaggaaatccaggaggcagaagtgaggaccctggcgcctggcgccgctgcgttgttcgtataagaagaggcatcccggaaggggcttcaaaccacttaggaccgactgctgaaacgaatccaagcttgtggtgtctgcagaatttaactgtccgcctcaaccccagtttttgtttctaagattatcgaaaactgtgcggtttgagtgatgtgctacaaagtgtttaaaacagattgtttcccaaattaggggtttccacacaagaaatcgctgctgtcggcaaacacaggaactatctatggttaagacaaggtggtgttcgtaaccaaactataaacctacatatacgaggtggtaagagaaccagaccaatgaacag

SEQ ID NO: 14012 - DNA, 921 bp, Artificial sequence
  DNA replication origin
aagctgagagggactgctgggatgtcagatgtcagatcagtatccaaaatcaccttgctgtttaggaaagctggatatgcagaccagtgaatgcagagagaaagcaaagaggtttgtgtgtgctgggggatgagtgcgaggatggaagggagtgggaattcatttattgatatatacatacagagcactgcacccactttgtgccaggtactgtgttctgggtgctgttgtagcagtgaatcaagtagacaaacgttcggcccccatggaactcatgtgtagtgcaggagatcggaagcaaacatacatgtaatttcttagggggcgattcatgttatggagaacaataaaccacgatggggtaagagaatgctggtggggggtgggaggctctgactggcttacacagggtggtggggagtcctgcctgatgttgtgatatttgagtctgggggcagtgaaggtgcaatcagcccagatggctggcaaaagtggttccccagggtgtatgctggagctgggagaggcaagtgtgcctgtagcagagatccctcagggaaggggaaggaggatggtgcgggaagaagctcaaggtgagaaggcagagaaagggggcctagaaaccctttgttcatcctgatgagattcaggatttgagtagaggagggacaagatctgggaatacacactcaggatccttcttgatgacagccttccaatgctttaagggaacagttccaaagtcagagccatggccatctagtgaaaggtaccaagagacagcttttagttcagtgtatggcagctttagaattcaagtcgcccaagcaatggtctgtgctgcttcatgagtttagtgtccctggatttgcgcttaaaaaccaccagggtccatttcaacgtgaacattcagtgagtctt

SEQ ID NO: 14013 - DNA, 1386 bp, Artificial sequence
  DNA replication origin
aggaattgcaactcagaaattctttgctacttggctgcctctactctattactgtataccttgaaggcaaggttaattaagtcctgttgtgtggtttgagggccagaatctaatttttggagctttatttaatgtcgggagcagattgggtaataaaatgcatattgaaaataagacggccttctggcctttctgggtctagggtggtaaacgtctaagggttgttgccaaatgggccatgaactgggttgagttcttatatttgatgaaaaagagcctaaatgctaactgatctgggggaggtcggataaagaaaaaggagcattaaccttggctatggcttcagctccagccacctctttaagaggaaattattggacaggtcggggagggctagtcacggaaagaaactgtaagctggacggggtgtgaggaggggttgataaaaggattatagggtgggggagtggaggctcaggaagaattgtgacctggctcggcctggcgaggagcagcctggggagaaggggagaggtcagatgagtccgtagaaaaggaagattcaaaggactcagagcttggggtggagactgatggaacaggcaggagagaaagaagaaagatttgggatgagtcacattgggagcagagactagggagggaccaatgtgtaaagaatgcctggacgtcaggcacctcagatcatttgcccattttttgacaaaaattatctagataggcaaataggataggcaaatcaaaagtgccattctctggccacttggaaccactgtcgagtttgtattggggccaagcggtattgcagaagaaaataagatgcttagattttaggtcaggcaagagctgaagaggttttaagttcttgagaacacaggctaagggagaagaaggaggaatagagggtagaaggttgcccatagtgaaggaggcaagtttaaagagaagggtagagacactgagaagggagtggggagcagccctgggctgcaatgtgggtgagcagccgaagcaggcgtccccacaattgagttgccaccaagggaatgtgggtgaatgaccaagacaggggtccctgcagtgatcagacaccagtggaatgtcggtgaataatcagacaggcatccccccagtgatgaaacaccaagggaagactgtcttcccaagtccatgactggtgctggagttttgggtccacggataaaatgtgtctcctttttctctactagagaggaaaaagaactggaattggatggacaaggagattgaaggtattgagagaggaagattgaagggtagtgagagaggctggagaagagagtgaaaagatcacttaccctatttgaaattgctgaggtattctttggg

SEQ ID NO: 14014 - DNA, 944 bp, Artificial sequence
  DNA replication origin
cgccttctccaccgccacctccattgtcctgcccttgccgccgccggggaagcgagagcgcggtctccgcccgccgcccccgacgacctcctcctcctcctgcggctgctcctcagaggccgctcggtggactcgcggcagcgccagcgagggagggaaagcaaaccgggcgggggaagcctcctcaggcccacgggatccgcctcccgagtggcgcggccggaaggagggtatctgtcagcggagaccgttcctcgcaccggggaggctgcaccccgtccgcttcgccaaccgccgaggcgctcgtggaatacgcccagcccgcccttgcctccccgcctttctcttcatccccctggcccacctcaggccccgcccccgcccccgccctccctctcccagcaactgaggcttcggtgtggagcgcgccgcccaatagcggccgcgcctggcgagggggcgggacctgttggagcccgcgaggctccgtcggccgcggcgggaggttgggaagtgggaggtgcttgcccagccccgccccctccggacgcctgaaatcgcggcttctgattgggcctttgtgtatgtttcctcctctgaaaagattaagggttcatttgttaacgaccatccgcctgattcggtccgcggtgttagctcctcctagggggcgggacctcacttgtctactcaatgccgttaattaagtaactgcttggaaaactgatttcattactggagacctggtcttgtaggaggagtaaatatggtcggagggtcacaggaggaaggagtggaggtactgaagagcaaacaaggaaataattttttaaaatactgtgtgaaagaggtactctggaggcagcagggatattgcaacctaattttactcatctctagaatgaatgagtatgaagaataagggggggaagttctcgtgcaag

SEQ ID NO: 14015 - DNA, 954 bp, Artificial sequence
  DNA replication origin
cggcccggctcaacctgttggacacttgcgccgtgtgccaccagaacatccagagccgggcgcccaagctgctgccctgcctgcactctttctgccagcgctgcctgcccgcgccccagcgctacctcatgctgcccgcgcccatgctgggctcggccgagaccccgccacccgtccctgcccccggctcgccggtcagcggctcgtcgccgttcgccacccaaggtgagaaccggccgcggccgctggggagcccggggagagggccaggagggggcgggcgcccttgtgcggcgcgacccgctgtcatgtcgccgccgcccggggtgcgcggcgggggaggggcgagcaggagggtctgtgctggcgacggtgacatggagggcccgcgctctgcggcgtgtcgcgctcggccagcaacttccccgggcgctgtggacttgaccgcgccgccgccgccgccgctgctccgcattctcaacagccgggcggcccctgccactcgcacttttgcagacctctgtcggagtctcctgcagccggaatctcgggttctttgccggctgcagccagttaactgctacccgcccgctgcctccacaaagctttgtccaggtccatatgatcctgatcatctcgtctatactcacgttatttgagctgcaggggagaagggagggatgaagatgaagtgatggtgactttctttgatgattgattgcagatcggatgtcatttatttcttatcttgcatgtttggggctctttaccttaatgagttcccagttctcttccctctcctctgctggggacaaaggaaccaagagacgttgttttgttgtgtgtctctttcaaaggttttattttgagacggcgaagagaaataatacaaagtgatttgggttttctggtattttatagataaagctggaagttactgttctctttgtggtg

SEQ ID NO: 14016 - DNA, 1903 bp, Artificial sequence
  DNA replication origin
caaggtgactgtttcctgctctgggctcctcccatcctcctgtcttggcttagcccatctgactctgaccctgtccctgagcttactgggaacaattgtgctaaacggaagggccaggctaatgagcaacattgtcactgtctcccaggccccccaaccctgttttctaagcggttgttaattgagaaaactaaagaattgtggggctatgatggcccttgtgttttgtgagagtcatgctgaagaaacgctttgtgtgttgcttaaatcagaaacagtggagtcatgtcatgtattaaagacaagcacctgcagaaaagagctgaccctagggaggtggcgagtgggggcgggggagggtcgagcgtgggggtgggggtaggaagggtcgagcatgggggtggttgggggaagggtcgggggtggaggggaagggtcgagggcaggggtcggggggaagtgtcgggggtcaggggaaagggcggggatgggggaagtgtcgggggaagggtcgagggtgggcgtgggggtaaggaagggtcgagcgcggggctggttgggggaagggtcagggttatgggggaaaggtcgagggcgggagttggggagaagggtcgagggcgggggtggggggaagggtcgagcgccggggtggcggaggaggaagagctgggggtgagcagcagcagcgtgcgggggaggggggaagggcgcaagagaggatcaggggtcagcggcacacccatggaggatcaggggtgcgcccgatggagggtcagggacgctggagagttaggcgcgcgcccgatggaggatcgggggtgctggagattaggcgcgcatctggtggagggtcaggggcgtgcccgatggaggattaaaggcgctggagggttaggcgcgcgcctgatggaggattaggggtgctcgagggttaggcgcgcgcgcccgataaagggtcaggggcttgcccagtggaggattaggggcgctggagggttaggcgcccgcctgctggaggatacggggtgccagagggttaggcacgcgcccaatgggtcagaggcgtgcccgatggaggattaggggcgttggagggttaggcgcacgcccgatggagggccaggggtgtgtccgatggaggattaggggtgctggagggttaggcgcgtgcccgatgggagctcaaggacgctggagggttaggcgcgcgctaggtggggcgcgcgagggaggcaggacgtcttccaggtagaaggtgggggagggggagggcagggtagggtgcacaagaagggggcaccactgaggatcgttgggggcgagtgagggaggcagagggagagctggagccccagcgagcggacaggtttctgtctctgcagtctgtcaaacagggttacggaacgtttctgtcctagaaagtgtagcgtgcaggacccagtcgtggcttttgtcgtgcaagaatatatatgatgaatttttcatggttcagtgtgggagaaatgcatttcagtcttccctctaaagagtgaaggaaggagaaaaaaagcagaacagcgacagcgaaagggaaacagagctgtttctggtttgttttgttttcccctagaaatgcgagctgacagcattcctttgattgccctggaggccgtcagtcagggctgcagtgaagcctgaacttcttgaaggcaggaaaataaggagcccagaggcacagacagcagctgaggtctcaggccaagttataataaataaaaccctagtgtcaaatcccaggtccttgaattttatcaggggaggacaggccattgtgagaacgagtaaggaaaagaagtaggtgtatcttaggacttatgaatgttctgaagagttttttaaatgagtgattggatttggtgtt

SEQ ID NO: 14017 - DNA, 1581 bp, Artificial sequence
  DNA replication origin
ttgtgcactctctgtataagctgctgaaactgacctgaggtctgcagtagcttatccaaaaagaatgtctgtaaggctggtcctctgtccaatcagcactgtagtggtctgggttgtaaatcagcttgatatctcagacaggaattcagaaatctgccatgtctgccagaccctgaacccttgacctggagataacgtttgtttctttaaccttggggcccgtcttagttgctaaaggggtgtctattttggtgtctcagatcatatgcttttagaaaaacttttagaaataaaacaaagtttttacttagacttgtaataaagtgactcgattgctttctattttcttctacatataaaatactttagaaagtgtcaacctaaaataacagagaagctctccagagaaatgagtttatttggaaaggaatgataggtgattgcaatctgggaattcctgtgccatggcgaaccgtggccgggccataggtgtatccaggaaggcaaggaaagtcgagagttttttaaagacaaaatgaggaaggctacataagttattttgaaatacttttccttggctacaaggatcagtaacaacggtggcatcagtccgaggtagaacaggctgggtattgttcttgcagaagcagtttcttgttttttgttttgtttgtttttgagacagtgatgcactctgttgctcaggctggccttgagctcctgggctcaagcgatcagtggtctttgtgcaaggctgtggttttcagagtccttattacagtttttgtgtgcctgagagctcctcctctgttgcctacaatcccattttggtagggtgtggcctaagtgactccattttggttctcatggctttcagaaaagcgttacttgccaatccttgtatctttagggtgaccctataactttatgtttaattctaactgatctgtaccccagttggcttgtgtatatgcacctcttagatccttgagaatgctggagatccaggtgtggcatttgcacctgcactacaaaattgtattacgtgataccgttttttatagtacatgacacacatgtaaatgtgatatttacagctcatatttcattggctgcatttgtgctgtttcctaaggtgcctacagaggctccttccagcaggtacacaatctccctcattaggccatcacagctcagaagacttctctctaagcagctgaactctcccaaggtgactgtttcctgctctgggctcctcccatcctcctgtcttggcttagcccatctgactctgaccctgtccctgagcttactgggaacaattgtgctaaacggaagggccaggctaatgagcaacattgtcactgtctcccaggccccccaaccctgttttctaagcggttgttaattgagaaaactaaagaattgtggggctatgatggcccttgtgttttgtgagagtcatgctgaagaaacgctttgtgtgttgcttaaatcagaaacagtggagtcatgtcatgtattaaagacaagcacctgcagaaaagagctgaccctagggaggtggcgagtgggggcggg

SEQ ID NO: 14018 - DNA, 1825 bp, Artificial sequence
  DNA replication origin
tgcagtgagctgagatcttgccactgcactgcagcctgggcgacacagtgagactctgtctcggaaaaaaaaaaaaaaaaaaaaagagtgagatgagataacaaaacaagaaactgatgaggaaaagaaaagatcaaagaagctagagcagtcacgctgcagtcacagatgtctgcggagggagacgtccaggaaggagtgggggggtacagtcacgggtgtctgtggagggagacgtccaggaaggaatggggggcgggggtgcagtcacggatgtctgcagagggagacgtccaggaaggaaggggggatgcagtcacggatgtctgtggagggagacgtccaggaaggaatgggtgtgtgtgtgtgtgtgtgtgtgtgtgtgcgcgcagttatggatgtctgcggagggagacgtccaggaaggaatggcggtgtgtgtgtgtgtgtgtgtgtgtgtgtgtgtgtgtgtgtgcagttatggatgtctgcggagggagacgtccaggaaggaaggggggaatgcagtcacggatgtctgtggagggagacgtccaggaaggaagggggggcgtgcagtcacggatgtctgcggagggagacatccaggaaggaatgggggggatggcggggagggtgcagtcacggaggtctgcggagggagacgtccaggaaggaatggggcgggtggtgcagtcaccgatgtctgcggagggagacatccggagaggcatggggcggaatggggaggaatggggaggaatggggaggaatggggaggtgccgccacggatgtctgcggagggagacgtccaggaaggaattcggggcggggggggggggtgcagtcacggatgtctgcggagggagacgtccaggaaggaatggcggtgcagtcactgatgtcagaggttatggggacaagataaaaatgagaacctcaatttagcaatgaaagcagctgtgaggaattgaagggacagggatgggcagagatggagtgagcaggtagaaagagtcaaggtaaagaagaactgcataagaaagaattcatcttggccaggtgtggtggctcatgcctgtaatcccagcactttggaaggccgaggcatgaggatcacttgagccaaggagttcagaaccaacccgagcaacaaagtgagaccccatctttaccaaaaattcaaaaaattaggcaggtgtggtggcatgcacctgcggtcccagctactcgggaggctgaggcaggaagatcgcttgggctcaggaggtcaaggctgctgtgagccatgattgtgccactgcatgccagcctcagcaatagaacaagaccctgtctcaaaatagtaattataataatcataattaaccttaccgaacaggactggctttgtcttggctcctgggaggtaacctctaaaccactggcatttcccacgtgaaagggtctttgttattcatgctgggcccctgggaccacacctgatcgtttatgcgaatgcagtggcttaagttgggcaccttatagttgaagtggggtctggccacaccagaaagaccaaccacatgcttagagagttgggaatgatctgcaaggtgggagagagctggggactctgcagcaactgctggggctgcatccaccaatcaatcatcagtcaatcaatcagtcaatcctgcctgcatgaggaaactccagtaaaactttggacactgaagcttgggtgaccggcctaggctggcgattctctgcacatcttgccacacatcaatgtggggacagtaatgtgcctccaaggacacagctcctcatttggaactcact

SEQ ID NO: 14019 - DNA, 1640 bp, Artificial sequence
  DNA replication origin
cgagtaggtagaatggatgcagtggctcacgcctgtaataccagcactttgggaggctgaggtgggaggatcatttgagcctaggagttcaagaccagcctgtgtaacatagcactgtatggctgtagtcccagctactcaggaggctgtggcgggaggatcacttgagcccagaagtttgaggctgtagtgagctatgatcatgttactgcactccagcctgggacttcctgtctcaggaagaaaaaaaaagaaaaagaaaaaagacttgagcaagtggagaagagaggtggctagtgtagacatggccagtttccatggggaagcgtggggaagggtgaaggtgtgaatggaggattaaggcatattgttaagtagtcttgatcacaagactaaagagttttgatttcattctttaggcgataggcagcctttgaagattttaaagcaggagagtaacatgagtaaaatagtgctttttgtttgttttattaaaagagtgcttgagcaatctaggtgttagataaacggagaggggagaggctggcagagatgctgaggcttggagctagggtgatagctgtgggaatcggaggaaagattccgaaaggagaactagcaagctttgctgggtgatcgactgactgaaaccagagaaggacaaatccatgattccaagattctaggaatctgggagaatggaggctctgctgaaggggcagggagtttgtggaggggacctggctttgtggagagttgatgaattcaggattagactcctggattttgtggggttggtgacacattggagtttgaaagtctaagcaggcaattaggaaaaaattggggaagggccagagccatttggaagagggggatgaattgagaaagtggagaggaggaaagcatagagggccaggagtcataacattcgcatttacagcagtaggagacgggagattgtcagagactccagagggactcaattctcttgacagccctcccatgagatgaattggataagtattgggaaggtattaactctctacacataaggtcgtgagtctcagagagatcaagagattgccccaagttcgctcagtgagggacggcaggagctgggactgtgacctttgtgctgacacccagcccaagactcttctccttacatctttgtcgcttttttttttttttccaggaactaagtggctcctccatggcccccatcatgaccacagtgcaatctaaaacagcccctcccacatttaacaggaccaataaattcacagctggcttccagaatattgttgatgcctatggtgtcggcagctaccgggagataaacccaggtaaagatctgatgaactgcacgactgggtagcttgaaagtgaaaactggtaagatggacccctgaggtgaccgaggtggtgaacttgttaaaactgtgaggcttggggctagggtagtagctgtgggaatcagaggaataagtaggatagtaggggcaagtagtaggattcctaaaatcctccttggtttcgtaataccctgtggtgtcgtctataaatgccgattggtgaaagaattgttctttgtcttcacctgtgcacccttaaactgcaacctcatcaggcagccg

SEQ ID NO: 14020 - DNA, 1932 bp, Artificial sequence
  DNA replication origin
tggccaacatggtgaaaacccgccattactaaaaatacaaaaattagccaggtgtggtggcgggtgcctgcaatcctagctattcggggggctgaggcatgagaatcacttgaatctgggaggcggatgttacagtgagctgagattgtgccactttactccagcctgggtgacagagcgacactctatctcaaaaacaaaacaaaacaaaacaaaagcagtggttgacaatttaaggaagtagaaggaaggacctcatggctaatttaccaaaagtgaggaggttcacctgggcaggcaggaccaccctaagaagagttaggaagaagtaatgttgggagaaggaatcggagggactggtggaaggttgggagtgaagtccaaggtaatgggggtatctgtggtgatgttagggaacccaccgtgtgatttttgtcctctagcacttgacgttccagtgtgtctgggaaaggtgagccattggcccgagtcagggatggggaatcacagggcaggtgtgaagagccaaaggggattgaaggagctggcaagaggtggtctggatgaggtaggaggtgaaccgtggctggagcagtgggaaagggactgggaggagggggtgcagctgagatcccagggcaggtgttgagagagaggtgggggagggcgggagggattggggtgtcattgtgccgagtttcagaagtgggtcatctctagttttggtcttgggtaatgaacagggtagggtgtagtggtgggaatgagttgttgaagtggaacatggaggaaggctttggggtgaataacttctgtggatgttgaacttgcctggagagaggaagaaaggactgtgagccaggcaccagcccctcagtgagtgaaagaaagttcccagaggactgtgaatgggaggggaggaagtccgtcttgaatgtttctgctgtaccatcgctgccaccactgccctcattcaagctcccatcctcttttctccaggtgactgtcacgacctctacttctcctctcacttcctccagttcatcctccaccttcagcaggaagggcctgctaggaacaggtcacgtcccttcctccttgcttgactgtctgcagtggcccccatggttttcattacgctccacgtctgagtcaaagcctgtgtgctcagatagcaggtgtacagggcaggagttgggtgtctaggatgtgggaaaatgggcatggaaggtgcagaatattccacatattggtactgaaagggaccgagaagatctttccagcaagagaagggaagtgatgtgatttggaggctgagttttgccctctcgaggttgaggtccagctgtaagacggtttctcaaccctagggggtgggttttgttgtgacagccgctgactgggtaggacccagcccctcagagggccagcttctgcggcatgaagggtgctgtgtgtgtgcaaggagtgaaataacgtaggaagagggagtggtaaggtggaggccatctgtgcaggtgagggctaggaagaagccagtctggggtggggttggaaagggaggcagagagggcaggagtgaaagctcctgggggcttggaagggatgggatctagggcaagagtggaggcattcatttgagagaggaggaaaacagaaggagaaacaggtggcttgtctggggacagagatgtatgggggagtatgggtctattggtggagggtgggaggcgagcagatctggagagaggacagcagcgtggggggatcaggagcttgagcaaacacaactggcttccagaggagagtgagaagggatgagtgaaagaattgccaggcagtggcaagggcccagttgaagttggaaggccagtcttggtcgcagtccaggcagacactctgcttgtccctccagcagcctgggtggcccag

SEQ ID NO: 14021 - DNA, 997 bp, Artificial sequence
  DNA replication origin
cgccccgcaggcaggcaggcaggcaggcaggcaggcgtccggccggccgggagggggtgctcgccgtcccgcgcccgggcccgcgcgttgccgggcagcggctccgaggctccgaagggggcggagcggcaaggcgggcgtgcggctggcgcccctgtcctcggttccggcccggcccgcccccgcctctccggcctccctccgcgccggtgcgcggcgccccgtcccagccgcagccgcagcggccgcccctcccggacccgagagccgctgagccgcgaggccgggccggggcgccggccgggaatgccgggggcgcggcgccgacgccgaggcgcggccatggaggggaagccccgcgccggggtcgcgctggccccggggccgagcggccgacggccttccgcccgctgcgcccgccgccgccgcccggggctgctgcttcctggcctctggctgctgctgctggcccggccggcctcgtgcgccccaggtaagctccgccgagaccctcggaacgcggccgcgaccccgcctgcctttatcgctgctgttttcaaaaccccggctttccccgcccatcctcttttattctccagctccctcgccgtcctttctggaagatgctttgccattcttctggggcccaacaaataaaggcacgggggaaataaataattaaaacgaacaagcgagcggcttctggccggtcttgctaaggggtctgcaaagctgttctcttgtccatggaacccgaagcgggtctggtggcttcatctcagaatgtgcctggtttttcctgcagaatgcaggcaccggcgtgcttttttgtcaaggctgtatgatgtggcatatcgaatgttttgagatactttattgtcggggcgaagaggtggattcgaggtgtgctttaaaagagtattgcattaccgggacaagcccagcgtcccccagatgcgggcaggccggccgtgtccccccgtacagcaggacacaa

SEQ ID NO: 14022 - DNA, 1831 bp, Artificial sequence
  DNA replication origin
ggcgccgcgcaccggcgcggagggaggccggagaggcgggggcgggccgggccggaaccgaggacaggggcgccagccgcacgcccgccttgccgctccgcccccttcggagcctcggagccgctgcccggcaacgcgcgggcccgggcgcgggacggcgagcaccccctcccggccggccggacgcctgcctgcctgcctgcctgcctgcctgcggggcggccggggcagcgtgcgcggggctcggcgcggcagaggcggcaagggcggcgaggcggcgcggcccagccctcccccaggacccgccttccggagggagcgcgaggggctcggggggcctgggccgggcggtgccgccccgacccgcacccaaccccgggtcccgccgcgcgttccccggggcgcccggatcagggtaggccggcaagccgggggaggggtcctctcgcctccctcgctcctcctctcccgccgactccttgcgggcagcaggtgtgtggggcgccgcgctctcaggacagcctcggggccgcggaggggacaaagccagacaaagtcgggctcctgcgctagagctcagcgtgcaaggcaggggcgagcagagcgcacgcagctctcccccgccttcctgccttaagaaggtgcggccacctctgcgggtcttcgggaagcgaccctgcgctcagggcctgggaggcccgcgggaccctgcacttagcaggccttgagcaggcggctgctgaagcgaatgggcgtggagctggggagacccgcaaggccaggccgttttagggaaagtggcgctcctgagaggtggagagaatgcccagagagcgtttgagggttggagtccgcggggggaatgaggaacgggaagaagggagttgacatctgtcaagtacctactgtgtgccaggcacgtcactctgaagacgccccgtggcttcagggtctagggaggaggaattggaagttttgaatcgttgcatcccactggcattgttgcatcaagcagatattaacggtgtgtgtgggggacactatctcgtgcagaaaaactatggcagacagcggaaaaggtgaatcattacactggcagagggatcctcgcggctattcagtcgggttcccctgccaggcccagcccttgaaggggctgcccagccttgcagctccaactcttctggactccttgcccttggcgaatagttcttcctaagaataggacaggggcactcttctgtaggtacacacctggtccttacaggtgggtacttgaaacctggtagtttcaaggaaaatgagaataaaggttaaaaaaagcttttgttgatgttcctggtgtttttacacgttattgtaaccccccatcatacagcccctatgtttattacagtaactgctcctgtctcccaaagagggttctgcgtgcacacccaggtaagtacctaagagaaactgcccagatatgtctggtcccaggacaccatggccatagatctgggacctcttattcacacacttatctttattctctgaactctctataacagcacatttgaccacaaaccactgccttcgtgcaactcttgaatggtcttgtcctgttgtgttgttttatcttttatgaatttatgctttgcacacacagcccccaccccacctccaataaattaatatgaaattcaaatatggtgctatcctgcttaggatttctcatagccccagtaagccctcagtagacaatcgttggtttgagccagagcatgcattccgcccgtgaagaggttccatcttcagatttggcctcagcctcctgcaagctgccatc

SEQ ID NO: 14023 - DNA, 1253 bp, Artificial sequence
  DNA replication origin
ttcctgctgcaggaggtggagacgcaggagggcctcggggacgcggaggccgaggcggcggccggcgcggtgggcggtggcggcacctccgcctggagggtggtggccgtgtcctctgtgcgcctctgcgcccgctaccagcgcggcgagtgccaggcctgcgaccagctgcacttctgccgccggcacatgctgggcaagtgccccaaccgggactgctggtgagaaggcggcggcgggcggggactgtgggcgctggccgcgggcctggccgtcctgctggaagcgggagcgacgggaaggggggcttcgtcctgccccgggccggggacgcggggctggacgaccccctcccgcaggcctttcctgggcgtcctcccccgcgcttccagcagctgggcggaaaggcgcgaaggtcctctccatggagacgtctcaaccgcccacgccagaaaagttgctgcccccgcccgcccccccggatcctgcgcgacgcggccgggttaaatccggactgggacttcggagctcacttattctggtgatatttggcgggaggtggggggcgtggggcgtctgaggatcccatgagatccctggaccctttagccggaaatcgctgctcccccatatccacacacttgtgcagaagcgggtctgcgccctctaggtttaacagcgctgagccagtctcaccccaggaaacagggctggatggcttgggtgaggccctgtggttcctgactgccagagctggggttcggggctgcctcctgaccccaggctgtgcttcacagccccgaattttccttggttgtctctagccacacaccccgccaaagcggtgctggggataggggcgctttctttttaacgttggtggactgtggcagctgttgccggggagaaggccaggtgcagtcgcctacggaacagatgtgcatcctcaggcgaggtgggcgacccttggcttcaaagcatccctactgaaaattcaaatgaccctgggagaggagttccttcaacccaattttcttattttccatcagtgcttattaggccatactatccccggtttcatgaaaattactcaacttcacatgtattaaatacattgaaagctgctcaaggcaaggaattggacagactggtccttcttcacctgggcatctgaccgagggctttgttcttttaggtctacctgtaccctttcccatgatatccacacacctgtcaacatgcaggtcctgaaa

SEQ ID NO: 14024 - DNA, 1106 bp, Artificial sequence
  DNA replication origin
agtgcagctggtcgcaggcctggcactcgccgcgctggtagcgggcgcagaggcgcacagaggacacggccaccaccctccaggcggaggtgccgccaccgcccaccgcgccggccgccgcctcggcctccgcgtccccgaggccctcctgcgtctccacctcctgcagcaggaaacgctcgggcccggcgcgctgcagcacgtcccggagcctggcctccgacagctccacgtggccgcgcaggtccttcaggaacatgcggccgccgtgggcgcacagcaccttggtgaggaaggagcacactgtgggctccgccatggtcgctggcgcgggccctgtgcgcgcggcgcagcgagccggggcgggcaggctcctcccagtcacgtccacgatttccagcgaacagcccggggatgggcctgggcctggcgaggggtgggcctgcgggaggccgggcgaggggcggccccggcgcgtggaagcagggtacggcgcctgcggatcccctggacgtggactcaggcggggacagcgttgatggagcgtctgctccgcccaggcaccgttcagggcgaagcctggccttgaggggcttgtatagtgggagtcacaaaggactcgccaacaagacaactggtagtgctagggaggcctgcggagaaggagaaataggtaaaaggtggtaggaggtgagtggccgggctgcttcgcgggaggtggccactagccacatgtggctgctgagcacttctgggattttttgttgttgttgtatttttatttttggagacaaggcctcacgttatcgcccaggctggagtgcagtggcgctatcgtagttcgctgcagcctggaactcctgggctcaagcgatcctcccacctcagcctcctgagtagctgagaccgaaggttcgcatcactaatttttttggtttttgttttgctttgtagaaacggggtctcctcatgttgcccaggctggtctcgaactcctcaagcgatccacctgcctcagcctcccagagcactggaattacaggcgtgagccaccccgcggggcctgctgagctttattggaaagtggctagtccgaattgagatgt

SEQ ID NO: 14025 - DNA, 1242 bp, Artificial sequence
  DNA replication origin
gaggaccctgcggccttccgcagtgtttgtgtccctgggtacttgagattagggagtggtgatgactcttaacgagtctgctgccttcaagcatctgtttaacaaagcacatcttgcaccgcccttaatccatttaaccctgagtggacacagcacatgtttcagagagcacagggttgggggtaaggtcatagatcaacagcatcccaaggcagaagaatttttcttagtacagaacaaaatgaagtctcccatgtctactttctacacagacacagtaacaatccgatttctctatcatttccccacctttcccccttttctattccacaaaaccgccatcgtcatcatggcccgttctcaatgagctgttgggtacacctcccagacggggtggtggccgggctgaggcgctcctcacatcccagacggggcggcagggcagaggcgctccccgcatctcagacgatgggcggcctggcagagacgctcctcacttcctagacgggatggcggccgggaagaggcgctcctcacttcccagactgggcagccgagcagaggggctgctcacatcccagacgatgggcggccaggcagagacgctcctcacttcccagacggggtggcggcagggcagaggctgcgatctcggcactttgggaggccaaggcaggcggctgggaggtggaggttgtagctagccgagatcacaccactgcactccagcctgggcaagattgagcactgagtgagcaagaccccgtctgccatcccggcacctcgggaggccgaggctggcggatcactcgcggttaggagctggagaccagcccggccaacacagcgaaaccccgtctccaccaaaaaaatacgaaaaccagtcaggcgtggcggcacgcgcctgcaatcgcaggcactcggcaggctgaggcaggagaatcaggcagggaggttgcagtgagccgagatggcagcagtacagtccagcctcggctccgcatcagagggagacggtggaaagagagggagagggagaccgtggaaagagagggagagggagaccgtggaaagagagggagagggagaccgtggaaagagagggagagggagaccgtggaaagagagggagagtggaattttgattcttaaagttttatgtgataatgccaaattgttttccgaagtgtgtttgccaagttatactcccaccagaagaataagagccttcccttgcctcac

SEQ ID NO: 14026 - DNA, 1093 bp, Artificial sequence
  DNA replication origin
aagaaaattttaaataaaggaacacattcaagcactttttaaaaacgttagagtgagctgaaagggtttttgctctaaagaaatttttaaaaaaatacattgcgtcctctacctcatccatctaaaacacttacctttgtgtgttttattacacgtatattgggggtgagtgactggagtttttgttaggtgcgtgatcaaaagtttgccgactggtcggacttggtggcttatgcctgtaatcccagcactttgggaggctgagacaagtggatcacctgaggtcaggagttcgagaccagcctggccaacatggtgaaaccctgtctctactaaaaatacaaaaattggccgggtgcgatggtgcatgcctgtaatcccagctactcgggaggctgaggcaggagaatcgcttgaacctgggaggtggaggttgcagtgaaccgaggtggagccactgcactccagcctaaaaagtttgctgacaaccattttaaaccctgggacacaagtcaaagtgtttaagaatgggccaagtgtaaaaagtactgtatcgagaaaagtaattgagcagagcacatagtgacagaaagggtgggaggaaagactggccattcattaattcaacaaggcgttcattcagttcattcagaaattagatgggaaggcagaatccgccaagaagggaaagagacttcacaaaaaggacttggtgatgacagattgtgaggaggattaaaaccctgcctgggggaaaagatgagtttgactccatggacaggacacacgcgggagaggaagggcttgggatcaagggaaaggcctgggcagcgaatgtggacctggaagccatctttttagatgtgcagctgtcctcgagggagcaagctctcttagggagaaactgggaagaaaatcactcaagagtcttaacccaaaccttgcagcgcatctgcatttagacgaaaaaaaaaaaaggcaaacggaaacaacagaagcagtggcccgagacgtgagccacactgcttcaaagggatttaagagagttgtcccaaggcaggcggtcaactgcgcgcgccaccgtagagagacc

SEQ ID NO: 14027 - DNA, 1453 bp, Artificial sequence
  DNA replication origin
cccggaatggcgaggcgcccggggctgagcctgcgcccagcgcctgggcgcccatggagctgcaggtagatgtgcgcgtgaagcccgtgggcgcggccggtggcagcagcacgccatcgcccaggccctccacgcgcttcctcaaggtgccggtgcccgagtcccctgccttctcccgccacgcggacccggcgcaccagctcctgctgcgcgcaccatcccagggcggcacgtggggccgccgctcgccgctggctgcagcccggacggagagcggctgcgacgcagagggccgggccagccccgcggaaggaagcgccggctccccgggctcccccacgtgctgccgctgcaaggagctggggctggagaaggaggatgcggcgctgttgccccgcgcggggttggacggcgacgagaagctgccccgggccgtaacgcttacgggtgagtgctcacctgcgccggcagccgacgccgccaggtcgggtggacgtagccgaaacccccacacccgcccagccctggaccgctgggcagctgaccgactaagggacccagttggccatcccgatccccaacccgatctggcctctcgggcttacaatcaataacattcctgtctacgtaactgtaattcacattgttgccgtgtctcacgcctgtaatcccagcactttgggaagccgaggcgggcggatcacctgaggtcaggagttcgagaccagcctgaccaatatgatgaaaccccgtctctactaaaaatacaaaaattagcctggcatggtggcattcacctgtaatcccagctactcaggaggctgagacaggagagtcgcttgaacccgagaagcggaggttgcagtgggccgagatcatgccattgtactccagcctgggcaacaagagagaaactccgtctcaaaaaaaaaagagtaaagccactccccttctcatcctcccctacccgcactcccgaactttcaaattccctcttagcatgcgcagcacctttgagaagtagcagtggaaggaactccagatgaggggaagtcattcaggatcaggtggcaggggtggcagcccagatccccccatccctgcactgccaaggactttctggaaggtccaggctgctgctttctttccaccacactgaggaacatttagccccaaacactcatccattcagtagatagtgagtgggaccacagggtagatgtgccagtagtatgtgcggctggttattttgtggtgtgggggagggggagcttgacacagaagaaagagcccacaaaagatacagactgtcctggataaggagactggagggagtagttggtgaatttggggcaagagatagccaatttttttctttttttcttttttctttcttttttttttaagaaataagttttgcgcttgtcacccaggctggagtgcaatggcacaa

SEQ ID NO: 14028 - DNA, 1320 bp, Artificial sequence
  DNA replication origin
ggctggcccggccctctgcgtcgcagccgctctccgtccgggctgcagccagcggcgagcggcggccccacgtgccgccctgggatggtgcgcgcagcaggagctggtgcgccgggtccgcgtggcgggagaaggcaggggactcgggcaccggcaccttgaggaagcgcgtggagggcctgggcgatggcgtgctgctgccaccggccgcgcccacgggcttcacgcgcacatctacctgcagctccatgggcgcccaggcgctgggcgcaggctcagccccgggcgcctcgccattccggggcagcttgaccaaggcagggcccggtgacggcggctcggggcagaccccgtagcccaggctgagcggcggcacgcgcggggacccggggcgaggcgaaggcggctttttcttgctcgagggctccaggcctgcgcccgccgccttctccacggccccggccggacttgggctgctttcgggaccttcaggttgtcgcaccttcgcgggcacctgcggctgctccagcgtggggaccaggcttcccacgggctccattgggagctctgccccggcttggcctccgggcgcagcctcccaagactcctccatcccgcgcgccccgccacccggagacgctgaggagcgcacctgggcccagtgcagaggagcttcgctctcctccgtccggattggtccagccgcgtcgccgaagttgtcaggccacgcccctccccgaaggaccccgctgtgattggctgtggctgaggttctgctgccccgacccccttcgggacacagccccggcctccaccaggcactgggagggagctgagaacggcagcggggccaggcgagggttgcagggtgggcgggagctctcgggagaaaagcagaacaccagcggaggcttgtggcagggaacccggagccccgcctgacccttccctcttctttgtctctgacctcacccattttcccctccagccctatgccggggtgttggttttgagagttacagtttgggcggggaaggattggccaagcctgtctggatcctgggacctcagagaaatcagaatccaaaggaattggggcgacctgtggaaaagtagcccagttggttgtcctgacaatccagcagggtttcgaaaggactctccatcatacttgggaggactcccccactgagtaacgctaagagaaaagaaacagggcgtggataagcaattcttctttttttttttttttttgagacggagtcttgctctgtcgccaggctggagtgcagtggcccgatctcggctcactgcaatctc

SEQ ID NO: 14029 - DNA, 1066 bp, Artificial sequence
  DNA replication origin
gtctgggatgtgaggagcctctctgcctggctgcccagtctggaaagtgaggagtgcctcttcccggccgccatcccatctaggaagtgaggagcgtctctgccccgccgccccgtctgggatgtgaggagcgcctctgcccggccgcccatcgtctgagatgtggggagcgcctctgccctgtcgccccgtccgggatgtgaggagcgtctctccccggccgccccgtctgagaagtgaggagaccctctgcctggcaaccgccctgtctgagaagtgaggagcgtctccgcccggcagccaccccgtccgggagggagatgggggggtcagccccccgcccggccagccgccccgtcccggagggaggtggggggatcagccccccgcccggccgccgccccgtccgggaggtgaggggcgcctctacccggccgcccctactgggaagtgaggagcccctctgcccggccaccaccccgtctgggaggtgtacccaacagctcattgagaacgggccatgatgacaatggcagttttgtggaatagaaaggtgggaaaggtggggaaaagattgagaaatcgtggttgccgggcatggtggtgggtgcctgtagtcccagctactcgggaggctgaggcaggagaatggcatgaacccgggaggcagagtttgcagtgagcggagatcatgtcactgcactccagcctgggagatagagccagatggttgccgtgtctgtgtagaaagaggtagacatgggagacttttcattttgttctgtactaagaaaaattcttctgccttgggatcctgttgatctatgaccttacccccaaccctgtgctctctgaaacatgtgctgtgtccactcagggttaaatggattaagggcggtgcaagatgtgctttgttaaacagatgcttgaaggcagcatgctcgttaagagtcatcaccactccctaatctcaagtacccagggacacaaacactgcggaaggccgcagggtcctctgcctaggaaaaccagagaactttattcacttgtttatctgctgaccttc

SEQ ID NO: 14030 - DNA, 1175 bp, Artificial sequence
  DNA replication origin
cagacacggcaaccatctggctctatctcccaggctggagtgcagtgacatgatctccgctcactgcaaactctgcctcccgggttcatgccattctcctgcctcagcctcccgagtagctgggactacaggcacccaccaccatgcccggcaaccacgatttctcaatcttttccccacctttcccacctttctattccacaaaactgccattgtcatcatggcccgttctcaatgagctgttgggtacacctcccagacggggtggtggccgggcagaggggctcctcacttcccagtaggggcggccgggtagaggcgcccctcacctcccggacggggcggcggccgggcggggggctgatccccccacctccctccgggacggggcggctggccgggcggggggctgacccccccatctccctcccggacggggtggctgccgggcggagacgctcctcacttctcagacagggcggttgccaggcagagggtctcctcacttctcagacggggcggccggggagagacgctcctcacatcccggacggggcgacagggcagaggcgctccccacatctcagacgatgggcggccgggcagaggcgctcctcacatcccagacggggcggcggggcagagacgctcctcacttcctagatgggatggcggccgggaagaggcactcctcactttccagactgggcagccaggcagagaggctcctcacatcccagacgatgggcggccaggcagagacgctcctcacttcccagactgggcagccaggcagagaggctcctcacatcccagatgatgggcggccagtcagagacgctcctcacttcccagacggggtggcagccgggcagaggctgcaatctcggcactttgggaggccaaggcaggcggctgggaggtggatgttgtagcgagccgagatcacgccactgcactccagcctgggcaccattgagcactgagtgaaggagactccgtctgcaatcccggcacctcgggaggccgaggctggcggatcactcgcggttaggagctggagaccagcccggccaacacagcgaaaccctgtctccacccaaaaaatacgaaaaccagtcaggcgtggcggcgcgcccctgcaatcgcaggcactcggcaggctgaggcaggag

SEQ ID NO: 14031 - DNA, 1106 bp, Artificial sequence
  DNA replication origin
actttgggaggccaaggcaggcggctgggaggtggatgttgtagcgagccgagatcacgccactgcactccagcctgggcaccattgagcactgagtgaaggagactccgtctgcaatcccggcacctcgggaggccgaggctggcggatcactcgcggttaggagctggagaccagcccggccaacacagcgaaaccctgtctccacccaaaaaatacgaaaaccagtcaggcgtggcggcgcgcccctgcaatcgcaggcactcggcaggctgaggcaggagaatcaggcagggaggttgcagtgagccgagatggcagcagcacagtccagcttcggctcggcatcagagggagaccgtggaaagaggggagagggagagggagggggagggggagggggagggagagggagagcccaaagttaattttcctaaagcatggtgtgatcatgacctttctctgctcaaacacctttgatgcttccttgtgcctacatgaagtctgaagctttgggcctggtgttccaatggggcactgccctaggaatgggggatagagcagtgcctctgccctcaccccacagctggccatctggttggggatcaaacaatgacagtaggatgtggcaagtgctatgggaagagaggtggagagtgttccaaaggcccaaaggacaggtgccacagtctgggatcacaggaggcttaggaggcagggattgctggtcatgcacatattccattccccccttcttcctaacagaatctctgcattattgagcgtggcaatggctttagctaattgccactatactccacaaacttacttgagaaagaagtgtccagtggaaggtaagtggaaatcactgggggttccagaaaaactctttaaaggagtctgattcaacaagaggcatgcccttttccccttggttcttcctctttctgtaatctggtgtgcaggtgtgatggctggaaccacagtggctatagtgtgaccatgagggaatcctgaagatgtaggctatatactaaggatgatgggagcagaatgagaggaagagctagggtccctgatgatcttggagctctcaatccagccct

SEQ ID NO: 14032 - DNA, 1026 bp, Artificial sequence
  DNA replication origin
tcatgcacatattccattccccccttcttcctaacagaatctctgcattattgagcgtggcaatggctttagctaattgccactatactccacaaacttacttgagaaagaagtgtccagtggaaggtaagtggaaatcactgggggttccagaaaaactctttaaaggagtctgattcaacaagaggcatgcccttttccccttggttcttcctctttctgtaatctggtgtgcaggtgtgatggctggaaccacagtggctatagtgtgaccatgagggaatcctgaagatgtaggctatatactaaggatgatgggagcagaatgagaggaagagctagggtccctgatgatcttggagctctcaatccagccctgggctgatcacctctagacttctttcaggtaaaaaaaacacaaaaaaccaaaaaacaaaaaacaaaaaccttctttctagttaaactcttactggggttttctgttgtagtcttgttgaacctactctgaatgaatgcagtatcctagagactgtgcaatcagaagcattagcagaaatttggtaggcaaactagggtgcatgggggctacaaggaggggttagaaggaccaaggaggagatgtgttccaggcagaaggaagacagtgttcaaaggcccagaggaaagagtcagaatagttaggtgtgtctagggctggcagagaaggggtgggaggagaggatgccttaggtaggagcaggactttgaccatgagggaccttgaggccttgtaaaaagatggccttaatccacaggtaaagggacccctgaaggagtggtgagtttgcactttaggtagatgctgcgggtgtggagggggaggggctggataggagggagcaagagtggaggatgggagaccccttagaaggctgctgctgtggtcgggcaagagaaggcattggcttgtacttggccagtggctagagggatggagtgcaatgcgcagactaagagtttaaaaggggccgggcggccgggcgcggt

SEQ ID NO: 14033 - DNA, 1335 bp, Artificial sequence
  DNA replication origin
ccctcggggccgcgggcctcagcctctgcgggcgaacgcggcctgggggcggcgggggcgggcgcggggcgcgcggcgaggggcggcggcggccgggcccgcgaggggggctcccgggccggctccatgcggggcgctccgccgcgccgcgcccgcgctcctgcaccggggtgcggggcccagcccgacgcgcactcggcgctccgcgcgccctgcgggccccccaggccggcctcgggtgggctaggaccgcggcgctggcaggccggggctgagcccggctccccgcgctggagcctctgcgccgggtgccgccgcggtgcgctcagcgcctgccccgccgagccgcagcctccacgcacagccgggctggggaggagcgcgaggcggcgcgcgggagccgggagccgtggacccgggcggggcggggcaggggcggagagggaggaggcgcggaggagcggggacagccggctccccgaccccgccacctgggctggaggctggatgctgtcgagctgggagcgcagtcttggagccgggagacctggttctaactcagctccatctccccagccgcctgctcaccatctgtgaaaatgggaataaagttcgcggggacagtgcagggaggctcagggaagatgagcgcctttcttcccggctgccctggagccacagcagagggtggtaggggctgtgacttgacccccaaactcttgataaaggagagaaacgtccgaacgatgagcacagagacagtagagtctaaaggagcaagcgaagtgacgttgcagattcaattaacatttattgagcacctactaagcgccagggactttcacatattattagctgacaatgcccccaggtgaggctgagaagtggaattttgaggtcaaggacatttccgaaggcggcgccaggcaggtgcgtgcttggcgggtgtctgactcccaggccagggctccctccggagccttcactggccccttgcctcagctgacctcgcgtcgcctgaagccccacgcctccagccctgatcctcttccccctccaccattctcagccccaacctctggttcctgtctccatcttcagttcctcatccccagctcctcctgctccctcccccaaatccaataggccactgactcttgtgaattctcccttttaaaatatttttatttttattttttgagacagggtctcgttctgtagcccaggctggagtgcagtgtcactacagcctcggcctcccaggctcaagcgatcctcccacctgggtctcccaaagttctaggattgcaggcgtgagctgccgtgcccggcccc

SEQ ID NO: 14034 - DNA, 1932 bp, Artificial sequence
  DNA replication origin
gtgcgcgtcgggctgggccccgcaccccggtgcaggagcgcgggcgcggcgcggcggagcgccccgcatggagccggcccgggagcccccctcgcgggcccggccgccgccgcccctcgccgcgcgccccgcgcccgcccccgccgcccccaggccgcgttcgcccgcagaggctgaggcccgcggccccgaggggctgctgcggcgatccgggtcgggctacgagggcagcaccagctggaaggcggccttggagggtaagcgcggagcggcctccctctcctggcccagggacccctgcccaggcccgacccgcgacccggaggcggtcagagtcaccttggccgctgtcccggaggggagcgctgggagcgcggcgccgggacgcggcggagtcattcatttcagggcggccagacgccggttcgtggggtggggtgggagggaaccgggggccaccgcgagtcacagcctcgaccccgcctctgctgcgactccctctctgaccttggagcgggcttcacgctctgagccttcgtctcctcacgcatgaaggggacaaacactgcctgacacccaccagacaggcgtgttgagagggtggcggaatctgtggtcgtgaacacgcttcgagtaaagtaagaaagctggagaccccagaggtggtgcccgcccctgtgagagccgcggggaccccgtggtggtggggcatgtggggagggcagggcagggcaggggtggagaatccaggagaggctcttccttgcaaggtcaggggtcacacctactcctccatcagactgcctcagggagggacccctggcctgcctccggggcagtaacccaagtagagaattgatttcaagttcatgagctctttaaggaaacttgtattagctaccgccggcggcgtgtggtgtgggagatgcaggagttggtgagagggtggctggccctttgggtgcttctcagggtgctcctggcaccctgaatccaaggacaaggaggacctgggcagcattaactagggaagcctggagcctggatcacccatccttagggaggcagtgtcagaaaaggagggcttcccaggagtaggtgacctcttagcaggcgtggagacagaggggaaggtgttccagacccagagcatgacgtatcccaggccaggtggtcagagctactctgtgccacgtgggaactgagccctggagtactgagatggggcagggtggagagagacgggcctgaaggacccagacggtgaagggccagccaggccttgcccaggagcttggactttgttctgaaggggctactgaggggtggagatggtgggcttgcccttggaagactggtggtggcccagaggggtgggacccaggctcgaggtcagggagggggtggggcagtggaccaggagggacataaccagcagctgggccaaggcaggtcatggggctgctgaggatggcgaggtggggatggtaatgccagccttctgcacaaaggctatgggccaggggacgtgcactgtccgaggaagggctgtgcagactctgaagctggaccaccagacagtggcagggacagaggaggcgaagatgttgcgtcaccaaggagaagagctgtagcagagctgtgggttgtgaagagttgtgtggaatggatggaggtggtcagacacccccccgtgacgctgtctccggctttactgttggagtggccctgtgttcccacgcttcactcctgccaaagctatttcttgaagttgttccctcctcttgcctgtatttcttcattcatttattcgtcagcatttctgaagggtctgccctaaccttaaccccagcccccatggtagggctgcttctgggctgctgtggccctttaatgcctcctgcttgctgttcctgtccacctcctgccctg

SEQ ID NO: 14035 - DNA, 1363 bp, Artificial sequence
  DNA replication origin
ccccccccccccccccgcccctgccccgtttgcattgtttgtgtgcggcatcttcagtataaaaggccagcgcccacggtcccaggagcgcctccctccttctctccctcctccctcgggccattctctccctccctccctccctccctcccctccagtgtttatatgtaagggtactggttgaccttggcggggctcagtgggtatccagtgtagacggtggaggctggcgaggcgctgatgtaggtctggtgggcaaattgggctggatactgactcgggtggatggtgggcgagggcaggacccgggggcccatgctcacggggacctggtggacgatgctggctgggtaggcagtgtgctgcacggtgtggcgcgcagagccttgcgaggccaccaggtgggccacggtgccggtggagcccagggccgccggcgcagtgtaggtgtagaggtggggctgggtggggaggtgggcagcggcagcggctgcagccagatgcgggtgcacagtgccgtggctggggctgttgtgcgggaaggagtacggagcctgggccatggtgggagtgatgtaggcctgctgccttcggtggctcccagtgcggtccgtggtgatgtgctgctgagcctggggaggagaggcaccaagagagacgtcaggggccgacacatggggaggaaggaatgggaggaggggcaggagggcagggaggaggaagagaagggaaagactccagaagtaatagaaggggcttccctctgtgtgttgagaaagtaaaaatttacttgggacctggcgcagtggctcacgcctgtaatctcagcactttgggaggcagaggtgggcggatcacctgaggtctagagttcgagaccagcctggccaatatggtgaaaccccgtctctactaaaatacaaaaaaattagccgggcatggtggcacgtgccttgtctgtagtcccagctattcggtgggctgaggcacaagaatcacttgaacctgggaggtagaggttgcagtgagctgagatcacgcgagtgcactccagcctgggtgacagagtgaaactctgtctcaaaaaaaaaaaaaaaatttacttggactgagaaaatcccgacttggcctgccactcactgggctgggatgatacacggataaagccagctgcaaagttataggagaacatatttctcccaaggacgtacagaagctgtgaagtatcaggatgccccaggctggagtgcagtggcatgaacctagctcactgtagccttgaactcctggcctagaatgatccccccgccttgggctcccgagaagctgggactacaggcgtgagccaccgcacccggccagg

SEQ ID NO: 14036 - DNA, 1468 bp, Artificial sequence
  DNA replication origin
gcgccgggcccgggcggcagcggcggcggcggcggcggcggcgcgcccggccccctcccccggcgccggccacgggaggcggtgatgcgggcgcgggcggcctcggctgcgccgagagcggagacacaggctcaagatggcagattccgactgaggctgggggggccgagctcgcgcgccgctttcccgtccccgttgccatgaaccgcggacaccccggccccgatggcccccgtgtacgaaggtaaggggcgcccggccccgccgaccccgcgcccgccgccctccgcggcccccgcagctttgttctgcccgcggccccgcgcccgcagcccccggcgcctgccccagcccccacccggggcccgagggggccgcgaccccctccctcgcccggaagatgaccgggacccggcgccggcagggtcttgcttccagggcggggagaggggccgggggcgcaggaggggagggggcgtgtgcgagggtgggcggctgcccggggagggcagggacgccggggaaggcggaccggtgactgtgctttttatttatttgcgataaatgaaggtgatgcggcttagcttccaccgcccccccacattacctttcggagcacctcctttccacttcgctctccgccccgcgccccttcccatttctttccgcgcccaccccacgctcctttattctccgcgagcctccgattttgggggggctgtggaatcggaatgcacggggctaggtggggagagaggagagagatgaaaagtccatgtcagagccaggcagaacaatgaaataggcgaaaatctcccctcattagcgtgtggaaggggacgtggactttgggttttccagccgggggagcggcggagacgtttttctggctcggtctgggtcgatctgtgttgtgcaccttcacctggcatcggggtatttttccccatttgactgcctttagcaagaaagaaaagaacgcaaggcagaaaagcagtaggtctgcctcgcacactgtctttcgtttctcttcagtccgttctgtcagcttccagccagaaagcaacccagaatcaactaagtttttacacttcgatgtgtttttgtgtgcttgtagtaggagaaattttaaacccaagtgtgtctgatttttcagtcgtttcatcgtgtaaatgtttgtctcatgaaatcattgaaatcgcagccttcacatacttttagcgtgggtcccccggctttctttcggttttgttcagatattctgtggatgaaatcgcaaatgagaggggacagggtttgtgtggcacagaggagggcacgaggggggaatgtaatcctcctgtaaatccggagaacagttgtggccagtgagacagggaaggcattaatagttttatctctgttataagaggctgattaaaaaaaaaaaaacttaaaagaaaatctgttattagtttcagggctccaa

SEQ ID NO: 14037 - DNA, 981 bp, Artificial sequence
  DNA replication origin
gggctcggggcggccgggcgggcggagcggccgaggccgaggcgccgagcggccgcggcccccgagcggatccgcggaggggcgggagccgggggcagcgcgcggccagggccggcggggctcagctcagcatggctgggcgcgggggctccgcaaaagttgctggcggaggggggcggcgggcgggggcgggggcggggcgcggggccgggagagccacagggagtccgcgcgcaatcgagcgccgatggcacggatgcgaggcggggaaggccgaaccgaagggcagagccgcgccggcggcccgaggggaccgcgctgggaggggctgccgcgcagcgcggggggactgggcgcagggcgggccccgggtagtgggtgagagggccggcctggacccggcgggcgcacggctccgagcccagcgcagccgagccggtctgcagaggggcccccagaactttgtgtgtgtgtgtgcacgcgcgcgcgtgtgtgcccaggtgcgagggttcgcgcgtgtgctggcggggagggaaccgacccgaaagagagccccacgctggcaaagtggctcgcccatctcacagccggttggcgctcgcggaggtaggagtggaatgaatgaatgaaggagtgggcgcgcgccgtgctccggaggagggcgggtgagtggaggagcttcggaaagccacacgaggtcagaggcaccgaagccctgccgtgcacgccgcggaaatgcagcccccggggtggtcgctgggttcctgccggagtctggcttccacgccaccctgatcttctcctcctcgcgtctacactgtcccgagggccgccactccatcacttgaatgggagctcacaactctctgggtcctcgcttttctcagcgctctctcctatcagggcttccgctaaacactctccagactctccccagccgggagcctctccaggtttgcttctccagctgcctcccggatg

SEQ ID NO: 14038 - DNA, 1222 bp, Artificial sequence
  DNA replication origin
gtatgtattaacagggagttacatacctgtgtggtgaaggctatgatagagatttacagatgcaaaaggagaacattactattgttctccttctcataatcaaaatacagacactgaggctcagagaggttaagcattttgaccaagatcacatagttaagtggaagagctaggatttgaacctaggtctgacttactcccacgctatctcgggctgttttgtggaggaggtgagccaggcacaggtagaatctgcttaaagagagaagatggagaaggtacccctctgggaaagtgggtgggaaagtgaccgcttgggcaaaggcacagtgacagagatgggtgaagctggcactgggctacaagtaaaccagtttggctagagaagcagtgacttgctgaactcatgtccttagaaagctaagtcaggactcgcctgccttgatgaaaagccaaggcactcagccccacctgcagaggttgagtccttagaggatgttagccaggagcgtggcatggccagaaccacgtattatgaagatggcaatatttaggatgacctgggccaagactaaagttaaagattgcagggaggatagaagggaaggagataaatgaccggtgtggagcaaaaaacactagagtgggagccacgagacctattcctaagcttcaatactgtgtgacattgggcaacagattttacttctctggactccatttcttcaactctaaaagggcagggctggcccagatgacctctgaggtccttttagcaacagtagtctaggattctgcaaacgtgaatggcattaggttaagagaagggataggaagtgtagcattgattatgggggcaaggaagaccgcagagtacaagatcacacagaggaaggtgtcgtgatgtaccactaaaaaagtgtgaaagagcttgccttttttgggaaggactgaaggatgggaacggaggatggagaccggaaaggataagaagtagtgagaaaatcacgaggttgtttttaagaaagttatacagtgttagagatcattattttacacagatagcttttcaacttttttaaacccacgattcacagacggaaataaaattgacatcatggtccagtacacttgtccagtacctataatcgaaacaaaaggtttatgaaacaatagttgcccttactaagggcaatggactctaatattttctattggattc

SEQ ID NO: 14039 - DNA, 883 bp, Artificial sequence
  DNA replication origin
tagtcccagctacttgggaggctgaggcaggagaatcacttgaacccgggaggcggaggttgcagtgagccgagattgcgccactacactccagcctggtgacagagcgagactccatctaaaaaaaaaaaaaattaactaggtgtggtgggacacctctgtaatcacagctgctcaggaggctgaggctggaggaggctgaggctggaggatcacttgagcccaggaattcaaggatacagtgagctatgatcgtgccactgcactccagcctgggtggcagagcaggaaacagaatccagcaaagagcaaagttcaatgaggtgaaaagtgatcaaatccctgatgacctctgagaccacatggaagagctggcgctggaggctttggaggactcgaggaagggagagatcatctgcccacagcagggagggcagttggactgcagagtggccagaccagaggcaggaatccaggatgactccccagcaagtggaaggcacattcaatgagaaaaggtgaccagtgcagtgttccatatgggagtgtgtgctgtccagtttgtgaaccccctaggtagaagcattcggcagacaatcactgttcaaaggaagtttgggagacatctgggctgaggccagggaccacacaccagtgtggatggcggtgaaagctttagagtgtgtgaggtcaccaaggagggcggagacagaaaagaacaactgagaatggagccaagggggaatcaaggtgcagacagatgagagggaggatggggagggcacagccagagaccctggagataatgaagcagaatggcaggcaaggcagaagagtgtttcaggaagcaggagacagagagggagacagggcagagggagag

SEQ ID NO: 14040 - DNA, 1017 bp, Artificial sequence
  DNA replication origin
caggtgtggattggtgtatggtaaatgaatcacttcctgagatctgtaccctacacgtcaatcgcaaagccagttttatgttgacttttctagaagacaaacagtgcaggcaaatattgaggttcaggttaatgaaaaccacgaggtctttttccatggatgataaccaggtacaattgctatttcgatttttttagggaccattcattagaaaggcactagttgtcctgccgtgtgttctgagcagaacgatctcttatcttctctggaatattcagttggttggagacacctggtagagtgggacagctggccggctattgacaggatgttgggaggacatgaaattttataggacccctctcctctgcagtttcctccgagtcagtcctacgtgctctgggtgtaaggaaagaattgtgttaccaggggcccaactcctctgctgaaggagtgggtcctgtagatggagggcgagggggtcccgtagatggagggcgagggggtcccgtagatggagggcgagggggtcccgtagatggaaggcgagggggtcccgtagatggagggcgagggggtcccgtagatggagggcgagggggtcccgtagatggagggcgagggggtcccgtagatggagggcgagggggtcccgtagatggagggcgagggggtcccgtagatggagggtgagggagtcctgtagatcaaagctgcaatggctccatgaaggctgccacgtggaggtggtaaccaaggcagggacaatggcctggacagcgctatggacggctgaacaacagctcaaggagcagaatgttcacagcataacacacccaagtggagagatagcagagcatctgagactcatgagtgccctgttgccaaggctcatggagggagagccatcttgggaaaatagatttgctgttcataaagccacagggcttagagcactggggtgtttgaacactgtgggggagcaaaagatgtactcactcattaaaatcccattac

SEQ ID NO: 14041 - DNA, 1218 bp, Artificial sequence
  DNA replication origin
tcccagctaaagtccctcttgccccacctgctagagagctgcccgtgctctccggggcttcagtccagtcctgactctgtgcccagtttttgttacccttttttggttttcttatctctgctatggggctgctcttctaatgtgggacaaaaccccaaaagggtgattatggccctatgaggccaagtcaccactccccatcttccatgtaaaacgattctctgtttatgtgtttctatgtctttatgcttttattttattgattgatagattttttgagaaatcaacactgactctttctaataagaatttcatctgttctgcaagggtccccttagcagcctgcgtgcctcccttgatgttcataaatgacctctcccttaaccttgacagtcattccattgggcctgtgtcacctgctgcctgctgtctgctgtgtacagagcattgttctggggtggggtggagacgggtgatgcacagtccctgggggtggagaagccaggaggacactggtggtgacagggaagtgtgggcaccgtggcaacataggggggcaacatatgggggcatcgtgggggtcacggacctgcatggggtagggatgggagggatcagaaagactttctggagaaggtgaggcttatgctgaagcaattttcaaaaagcatttgtgttctttcacacagaaacaataaacgcacttaaacaaggttttggaacaaaatcgaaacgagttccatcacagccgtgccatttagtgccgttttattggagcgcacgctctctgtggtttctgcttctgcgtcgttccagccacgtttcagcccatagatcgtggcagtggcacgtgttaattgcggcaatttgttttggccatggatcttaaggaatcatttgtttcttttgtcttcgtgtctctgctcctgcaatgtcctgctgcctctgtgcccccgtgcctgcaccgtcgggaggcttctccaagggggttagcctgaaggtggggacacactggactggagtccctccaggtgtcacaggtgactctgccacaggagggaagtcctgaggggtggggccagctggttggaggggtttttgcaggatcgtaggcccaggcagccaggggtagaggtcaagttcacaatcatggactgggcaaccagatgagagtggtagtgggggcagggagagcacagtgccgggggtggggagggt

SEQ ID NO: 14042 - DNA, 831 bp, Artificial sequence
  DNA replication origin
tggaagaaagcaggttaggaagagcaactccttggaccagcaatgctagggagggtgggagccacatggccagattgcttgatgacggggagggagccgttcctgccggtgcagaaagggtgggcattgtgatgggaaggggtggaaatgactgtgactctcaagatgtttggtgccaagaggtggtagggtctgggacatgggtgtatgtgtgtgggattggccagaatctttgtgaggactcagttgggaatctagcaagagggttttttggaggaccaggcggtgcggttccctgccctgtgatacctggtgttggatgtgaacagtgggatttaagcagaggtggggttggtggcctcacacagtagaaggactggagtccagtgaccccagcacatgaggaagcctctaccactgtgtctgaaggtggtgaccaactgagctgggaaggcgagggaagctggatggagctgacaggccggggggcggggccggaggtcccaagggaggactcaggttgtggggctgtgctccaagcagggagctgagtgcgccattgggcctgtctgcaggctgaggttctatggtggcggcagccgtggggaggtcagggattgtgggacaggcagggaggccgacaggttcccaggggtggatggttttctccagtgagtctgagtcccaggctgggcattgcagaggggccaggtgatggagaagggcaggtggtggcaacaagggtgtggggagggccacaggacagccctacaccttgaggcagcagtcactcacaggcctggcccagtgctgggcagctggggtgtcctc

SEQ ID NO: 14043 - DNA, 825 bp, Artificial sequence
  DNA replication origin
aagctggaggagagccaaggtaaatgaccagaggaacagcaagaacaacacagcttcacccagcagctgggtcagccacatggttgcccatggtatgattttcagaaccccctccaaatttcctcacagcctgactgatcctgccatttcactcattgctttttcattaagtcattggtcctgctatggtgtagttgggcaggggcaaagaggtgtcagagaaaaccattaaatcagatgcatgtctgttgctaaggtcttgcatgtaagtgaactgattctatgcttctgaatcatctgggagctggggagatttggggagcagaactggttcactgggggtgtagatggggagggcggccagagggatccggtgggagatgctcagttgctccggaaaagtccactgagctgtgaagactctggcagccatggctgggtgacctggaagaaagcaggttaggaagagcaactccttggaccagcaatgctagggagggtgggagccacatggccagattgcttgatgacggggagggagccgttcctgccggtgcagaaagggtgggcattgtgatgggaaggggtggaaatgactgtgactctcaagatgtttggtgccaagaggtggtagggtctgggacatgggtgtatgtgtgtgggattggccagaatctttgtgaggactcagttgggaatctagcaagagggttttttggaggaccaggcggtgcggttccctgccctgtgatacctggtgttggatgtgaacagtgggatttaagcagaggtggggttggtggcctcacacagtagaaggactgg

SEQ ID NO: 14044 - DNA, 1373 bp, Artificial sequence
  DNA replication origin
gccggcctgggccatggccgctgggcctgctcccgtcggaccgcgggtggcgcgacgcggacggcggcggacgctggctggcgggcggctctcgcagggtggagacgccggcgggaaacgaaaccgaaagcggccccgggccggcgaaaaacagaacctgtgcgccctcgccacgcccccggtccgcagctgagcggctgcgccttccgcctcagggcccccagctgtgaggccgccgcccgacggaagctcgggagctcttgagctcgggcgttcggcccggagcgcgggctgtggctgtggcggctcgcgggggtcagtacctagtccctgaaaatggcttccctggatgtttgagggaccaggagcccctaatgccgcgatgctcagcgcgccttcagtcagagggagcctcgagggcggcggcagcgctggcggagccggctggacgccgccggttaaagccgctcagcgtcgcccaggccaagcccgggcttcgtagacggctcacagaaacagggacaactgacgggagctctcacccctcgaacaagtgacaaaagcgatcactccgcatagaagacgcacttaattaaaggttcctttcgcctcggtgcatcaatgagttccttcatttaaacataaaagggtatgtcctttaaaagagcaaatccgtgagccgagattgcgcgactgcactccagcctgggcgacagagcgagactccgtctcaaaaaataaaataaaataaaataaaatccgttactcccagcccctgctaagtaacgattgaacaaatattttagaagacccttcagagcaaaggaccctctcacacgctgagagcaatgcgagttgttagagccctttgaggaggtaatccaggaatagctattaaaattgaaaacgcgtgtgacctttgacccagcaatctttcctctcggaatcttccagaagtaaaaggaacagtaaataagttatgtgtgaaagtgttactgggggaaccctacctgggaggtagggttacgtgggaacagtgtggttgatctttaaagactattacgaaggctgtttaacaagcatgcgttagagctccgtgtgcggatgtagaggggcagacagccatgatgtggtggtaaacgagaaaagatggctgtacagaaatgtctaaataatcaagttgaatgatcaagaattaatttttttaaatgtctgaataacaaaaagagaagcctgtgtgtgtgtgtgtggcaggatatttttgaataagcacggagaaagatgaagaaacacacaagggtagttgagaggaggcagtaggaggtattaggaaaatggaaaagggaagatgagaggcagaaggattgtggggg

SEQ ID NO: 14045 - DNA, 1182 bp, Artificial sequence
  DNA replication origin
ctctcttttccccacattttccccttttctattggacaaaactgccattgtcatcatggcccgatctcaatgagctgttgggttacacctcccagacggggtggcggctgggcagaggggctcctcacttcccagaaggggcggccgggcagaggcgccccctacctcccggacggggcggctggctgggtgggggctgccccccacctccctccctgatggggcagctggctggccgggggctggccccaacctgcctcccagacggggtggctggccgggcgggggctgccccccacctccctcccggatggggcggctggccgagcaggggctgcccccaacctcctggacggggcggctgccgggcagagacgctcctcacttcccggatggggcggctgccgggcggaggggctcctcagttatcagaaggggcggcttccgggcggaggggctcctcacttctcagacggggcggcttccgggcggaggggctcctcacttctcagacggggcggctgccgggcggaggggctcctcacctcccagacggggtcgcggccgggcagaggtgctcctcacatcccagacggggcggccgggcagaggcgctccccacatctcagacgatgggcggccgggcagagacgctcctcacttcctagacgggatggcagccgggaagaggcgcttctcactccccagactgggcagccgggcagaggggctcctcacatcccagatgatgggcggccagtcagagacgctcctcacttcccagacggggtggcggctgggcagaggctgcaatctcggcactttgggaggccaaggcaggcggctgggaggtggaggttgtagcgagccgagatcacgccactgcactccagcctgggcaacattgagcactgagtgaacgagactccgtctgcaatcccggcacctcgggaggccaaggctggcagatcactcgcggttaggagctggagaccagcccggccaacacagcgaaaccccgtctccaccaaaaaaatacgaaaaccaatcaggcgtggtggcgcgcgcctgcaatcccaggcactcggcaggctgaggcaggagaatcaagcagggaggttgcagtgagccgagatggcggcagtacagtccagcttccgcttggcatcagagggagaccgt

SEQ ID NO: 14046 - DNA, 881 bp, Artificial sequence
  DNA replication origin
tgagaagtgaggagcccctccgcccggaagccgccccgtctgagaagtgaggagcccctccgcccggaagccgccccttctgataactgaggagcccctccgcccggcagccgccccatccgggaagtgaggagcgtctctgcccggcagccgccccgtccaggaggttgggggcagcccctgctcggccagccgccccatccgggagggaggtggggggcagcccccgcccggccagccaccccgtctgggaggcaggttggggccagcccccggccagccagctgccccatcagggagggaggtggggggcagcccccacccagccagccgccccgtccgggaggtagggggcgcctctgcccggccgccccttctgggaagtgaggagcccctctgcccagccgccaccccgtctgggaggtgtaacccaacagctcattgagatcgggccatgatgacaatggcagttttgtccaatagaaaaggggaaaatgtggggaaaagagagagaaatcagattgttgctgtgtctgtgtagaaagaagtagacatgggagactccattttgttctgtactaagaaaaattcttctgccttgggatgctgttaatctatgaccttacccccaaccccgtgctctctgaaacaggtgctgtgtccactcagggttaaatggattaagggcggtgcaagatgtgctttgttaaacagatgcttgaaggtagcatgctcgttaagagtcatcaccactccctaatctcaagtaatcagggacacaaacactgcagaaggccgcagggtcctctgcctaggaaaaccagagacctttgttcacttgtttatctgctgaccttccctccactattgtcccatgaccc

SEQ ID NO: 14047 - DNA, 890 bp, Artificial sequence
  DNA replication origin
ccttccccgtctttatcaaacttcctgggccagtgggacgggggcagcggcgggccggagaggcgaccgcgccagccagctcggcggggctccgcggagtaaacagagcaacagatgaggcactcgctctcggggacttgaaaggtgccggggaagttggggccgggcccccggcgggcggcaggttgacccgggtcgcggtcctgggcccccgcacacacccgggtcgccgggactggggcagatggagtgggttgcggcggcccgaagggaacgcttctccggaccccctgcgttgccctcgcgccgcggcttaaactttacaaagagtgcagttgccatcgctcgaagctggcgacaccgggaccgcctgcggctgtgcccgggcgccggtgccggcgaacttgagtcggccgggcggacgctgcggggccggctggcggcggcggcggacgctgccctctgattcagccgccgccgcgctccgggtttgacgtttgagagctcgggccgcctccgcagccaggccgccgactcgtgtgttttgtaatcaaagtgtgaggctaataaagggcggcgccacagcctcttgactccggcgtgggagggattcacaggcatttaaacaaagaaactagttggggttgggctcccaaagtccttatttgggtgttgtggcaaagcctgcggtcacctttagttgaagccggtttcccgggccccgtttggtgttgtctcttggcgagagcacgctcacgagtaatagcagatatggtgactgtgattgtaggaagtgtcttttgattgacagcaggacatttaaatacagcctccgctccccccctccccaattttacagaaacactacaagaccaggccagatgtcttag

SEQ ID NO: 14048 - DNA, 1454 bp, Artificial sequence
  DNA replication origin
gcgggggcggcggaggcgccgaggcccggccgggagccgccaccgacacggctgccgcggcggctccagctgctgctcccgcggccaccgccgccgccgctccggccatctttaaaaaacacacacacgctcgctcgctactccgctcgccgactggagcgagcgcagccgccagccagcgccgcctcctgcagcagccgcggcggcggcggcgcctcagtgcgcgcgcgcgaggccgcggcggctggcggagggggaggaggcgcgcgcgacgcgcgaggcccagactcggctgcttccggcgctcggcgcggggccgtgcgtctcgcgcacgtctctggcgccggcgcgcgctccccgctcctctccgcgacggccgggcggagggagctgttgaagggcacgcaggcggctgcgggggcggagggagctgaggccccgtgaggacacgcgcggtggtggcggtggcggcgggcgcgcggccgcagccggaggaggacggcgggagcgtgcgaggagctggctcggttatttcggagcgagagccgaggccgggggaagttcctgcggagtgctcaagggcagaagaggtgccgcgtcccgaagaggggaagcggagaagtttgctgctgcccgggtcgcctcgcgacgctgagagaatcgcccagccctccgcagccgcccagcgagaaccggagctgcggccccgcaccggcgtgagtccagctgagctgacacgccgagccggttgtgcctttccgagggaggaatgtgccgtggaatccaaactttggaaaacgtcccacccgaattcccagcgagcagcaaggagaccagagcgtcgatggagccaccgttagttgcgggagggctgtccccaagaggaattcatcactgtcgtccgctgggagggaccaaccttgaaatggggttggtggagagagggatagagaagagccggcgtgcttataaataacaaaacttagctatgaacccttccgattcccaagtggggaagatggggtaaaattctaagtgacttctcgctccgaagagggataccacaaaaagcggagcgcagggtacttggcgtataataagccatcaataatttatgggtgaaattgagagccaaatataagatgataaactgaagaataaaaacagctgacaaatactgtatagaaaagattgcgttggaatcataactgtggattggaagtgatgttaaggattattggattgagtatttgtagctgaatttctgctggcatttctatcagtggggaaagccctcacagctccataggtaatttttgttaggggaggaagaagtgttgttctgtcacccacccccaggcaaagagtcgctgatctaattctccatttctttctttctttcctttctttccttccttccttccttccttccttccttccttccttccttcctt

SEQ ID NO: 14049 - DNA, 963 bp, Artificial sequence
  DNA replication origin
gagttcaagcccaagctcttaggcactatattctgcttccaatgctgctgatcaaataggtgtgagccggatttatttataattttttgttgtttttgttgttgtcgctgcttctgctgggggagattgaatactaggcttaggaagtaaattttattctgggaggatggggtcccactgaagtgtcatgggtagggcacagcagatctgtgaggtgctttgggagagttctttgagcccaattggaggagggaaaggcttaaattcgggaaacaatgctggggggtggggactgcaagaatccaggtgaaaggcagggaaggccagagctagaggagtgcaagggatgggagaaaggggatggatgataaagcaattttaaagaaagaattcatcttctgcatatgactgggatgagggtgttgcccaggtcagcaaggcctacataagagtcagaaaagacggaaggttgatgccctgtgactagaagacgagagatgcttgccacgggattaaggaagtggagcagcctcagttaggggcaaagatgaagactctgaggctggcaggaagagtttgaggggctgagagcaaagctctgggggcagtgggaatggagctgggaagtgggggatttgggcgtcatcagcagcaccaagtagaggctttgagggtagaggaggaggtcttcagtgttgagaaagcggaaataaaaaggaatcgggaaagatgcaacaaaggggaagacaatgcagtgaaagggccgagcagacattagctggtggaattacaagggaaaccaggggtgcctcctcacgtgaagaagaattctcaaagagaatgaatgggttgctgtcgctgtccagtgctgcagagaggaagctgaaggaagccaggcacaaggccccaggaggccattggtgccatttggggagccatctcagtgatgtccctagcggtaaa

SEQ ID NO: 14050 - DNA, 1453 bp, Artificial sequence
  DNA replication origin
taacgctgggtttaagtgcactgggccccagttgacaaccaaataaagtggaaacacgtgcgcaccactcacagaaagtatttccattccgcagaagcaacacctacggcccccacgccccccagctccgagccagagaaccggccctctagggaagccgccgcccttccccatcgggctgtcattgttccccggtcacttcgggcggcgacccccacggcccggcccgcgcgccccgacagcccccgcccgcgggaccagcagccgcggcagggcacgggacaccctttccctggcggggcggcgtgggggcggcgctgccaatcgctgcgcagcgcacgtgctgcacgtctgcgcatccggccccgcccggccggcgtggtgtggggttgcgggggtgcgggggcgcgaggcgcagcggcggtgtggacgcgcgagggtcgagggatgcgcgcgtcgcggggtggagtgcgcggtgcttcggaccccggggcggcgagagtgcgccggggggcagtgcgaacgcccaggagtggggagtgcgcagagatctgggggtggcagaggacgagcgcgccagcggggaccacggggggacccgagggcccacaaaagggtccgttcccccctatgcgatggctgagcaccgggaaactccccagcggtctccgcctgtctctatccctctcttactagaaacttgccacagctggtgggcgcgggcccgctgccctgcacgtccaccgccagatcagcccagggcccgcgcccggaggccagggagctggaggtcaaagcttggtctcctgacacctgttcaggagaaagcggatctttgtttgagggccctccttccgccacccaccgcccccgcccccaaccccgcctccagcctagaagaggagtatttcaggttgcgattttcaaacggaatcatcaaatgtgtaaactaaagggcggaagcccaggagtcaaaacagccgtggtatggtcttgacagagggcagagaggaagagaggggtgccacctgctcagggccagacgctgattgagggcgcgccctgggaggggcgcttcctggtgctcattagtggaagggtgaaatgggaaggcagcagggccgacttgctctcggcagagggacattttcattcttcggtgtgctgtttgggccccagagagctccacgtcccagcgtggaggccagtgatgtagctggagcgagctgtgagctcctggagctgtttcgttgtttaccctccttgaaaggaatgctgtaacaacttccggaagaggagcccctttgaagtgtgggcaggattggggttcctctgacttcacgttgtctaggtggcccctttgatgtggtgacagggcttagcagagactggctgtggggagtcaaacgccagtccaaggtcacctccaccaggatggacatactgaagggca

SEQ ID NO: 14051 - DNA, 928 bp, Artificial sequence
  DNA replication origin
tttctagtaagagagggatagagacaggcggagaccgctggggagtttcccggtgctcagccatcgcataggggggaacggacccttttgtgggccctcgggtccccccgtggtccccgctggcgcgctcgtcctctgccacccccagatctctgcgcactccccactcctgggcgttcgcactgccccccggcgcactctcgccgccccggggtccgaagcaccgcgcactccaccccgcgacgcgcgcatccctcgaccctcgcgcgtccacaccgccgctgcgcctcgcgcccccgcacccccgcaaccccacaccacgccggccgggcggggccggatgcgcagacgtgcagcacgtgcgctgcgcagcgattggcagcgccgcccccacgccgccccgccagggaaagggtgtcccgtgccctgccgcggctgctggtcccgcgggcgggggctgtcggggcgcgcgggccgggccgtgggggtcgccgcccgaagtgaccggggaacaatgacagcccgatggggaagggcggcggcttccctagagggccggttctctggctcggagctggggggcgtgggggccgtaggtgttgcttctgcggaatggaaatactttctgtgagtggtgcgcacgtgtttccactttatttggttgtcaactggggcccagtgcacttaaacccagcgttattcgggaccgagccaggagatcactgcacccttcaatctgcgggtggggggaggagttaggaaggggactgagtgacaaaagtgacagaggcgcagctcatgtgcgtgaccgggggagtgatgctcagttctgggtgggggaccagaaagatgtccactgcgggactgggcgatgaaggggcggatttgagtggcggctactgtttcccggcctgggacggctgccggg

SEQ ID NO: 14052 - DNA, 1466 bp, Artificial sequence
  DNA replication origin
agcccgatggggaagggcggcggcttccctagagggccggttctctggctcggagctggggggcgtgggggccgtaggtgttgcttctgcggaatggaaatactttctgtgagtggtgcgcacgtgtttccactttatttggttgtcaactggggcccagtgcacttaaacccagcgttattcgggaccgagccaggagatcactgcacccttcaatctgcgggtggggggaggagttaggaaggggactgagtgacaaaagtgacagaggcgcagctcatgtgcgtgaccgggggagtgatgctcagttctgggtgggggaccagaaagatgtccactgcgggactgggcgatgaaggggcggatttgagtggcggctactgtttcccggcctgggacggctgccgggcgggcaggatctgcaggcgcgcggccgggacgcgcagggagcgcgcagggagcgcgcagggagcagtggggcttcccgggccgcttcggggaggtgggcaggaaagggcacgcagccctaagtgactctcggctgagactgcctctcctcatcccagcagtagccagccaatgaaaaataggctcagggggttcccgagccaatggaagcccgcgggccgtgaggacttgccactagaaacgtttatggtgtcccggcccggagacttctgtgtgtttgttaggcggggcggggggcgtcttcccagcagcccaggacaggtgtgtgcccaggcggattagagcgcctgctgttggtaaggcccctgccgtggagggggaagggaggacagggggagggcagaggtgaggaatctaggagctggcgaacggtttctcccgctttctgtgtcctgcgtcactttcccttctgtaaacggtggtcttccctttgtgtcgtgtttgatcgtttctaaattgctttcccatgcattactttacccagccatcactgtaacccacaagatgggtttgattactcattttaccagcaggggaagtgaggctcaggtaagttaaatcctaggcacatggtggcacagctgcttagtacaggtttgggactggaactcaggtgccccgacgacaaatccagggctctttaactacatcaaaggaaggaaaccaggtctgttttatgatcctggtgccaagggcacacccagtgattaaactgaaatccagaaggaccgggtgagttttatttccccttcagtcatgctctttcaggttgtccctttgcaacacaggtttgctctgctattacacgccatgccttaagattaagagagttcactgactgccagaaaagccagaagtaaaaaaacagaatgtgtgtaggggcgggcgggttacccactgtgcatttcctccttacccacaccctcaggccaactcgagacccgtggtcctctctcatgttggtcccccacctgcagatactgtttcctgttccatgg

SEQ ID NO: 14053 - DNA, 1275 bp, Artificial sequence
  DNA replication origin
gaggggctcctcgcttcccagtaggggcggccgggcagaggcgcccctcacctccgggacggggcggctggccaggcggggggctgatccccccacctccctcccggacggggcggctggccgggtggggggctgaccccccacctccctcccggactgggcggctggccgggcagggggctgacccccccccccacctccctcccggacggggcggctggccgggcagaggggtcctcacttcccagtaggggcagccgggcagaggcgcccctcacctcccggacggggcggctggccgggcggggggctgaccccccacctccctcccggacggggcggctggccgggcagaggggtcctcacttcccggtaggggcggccgggcagaggcgcccctcacctcccagacggggcggctggccgggcggggggctgacccccccccccacctccctcccggacggggcggctgccgggcggagacgctcctcacttcccagacggggtggctgccggacggaggggctcctcacttctcagacggggcggttgccaggcagagggtttcctcacttctcagacggggcggccgggcagagacgctcctcacctcccagacagggttgcggcccagcagaggcgctcctcacatcccagacagggcggcggggcagaggcgctccccacatctcagacaatgggcggcggggaagaggcgctcctcgcttcctagatgggatggcggccgggaagaggcgctcctcacttcctagatgggatggtggccgggcagagacgctcctcactttccagactgggcagccaggcagagaggctcctcatatcccagacgatggggggccaggcagagacgctcctcacttcccagacagggtggcggctgggcagaggctgcaatctcggcactttggggggccaaggcaggcagctgggaggtggaggttgtagcgagccgagatcacgccactgcactccagcctgggcaccattgagcactgagtgaacgagactccgtctgcaatcccggcacctcgggaggccgaggctggcggatcactcgcggttaggagctggagaccagcccggccgacacagcaaaaccccgtctccaccaaaaaaaaaacgaaaaccagtcaggcgtggcggcgcgcgcctgcaatcgcaggcactcggcaggctgaggcaggagaatcaggcagggaggttgcagtgagccgagatggcagcagtaccgtccagctttggctcggc

SEQ ID NO: 14054 - DNA, 947 bp, Artificial sequence
  DNA replication origin
ggtgggggggggggtcagccccctgcccggccagccgcccagtccgggagggaggtggggggtcagccccccacccggccagccgccccgtccgggagggaggtggggggatcagccccccgcctggccagccgccccgtcccggaggtgaggggcgcctctgcccggccgcccctactgggaagcgaggagcccctctgcccggccagccgccccgtccgggagggaggcgggggggggggtcggccagccgccctgtccgggagggaggtggcggggtcagccccccgcccagccggccgccccggccgggaggtgaggggcgcctctgcccggccgcccctaatgggaagtgaggacccctctgcccggccagccgccccgtcagggagggtggtggggggggtcagccccccgcccggccagccgccccatccgggaggtgaggggcgcttctgcccggccgcccctactgggaagtgaggagcccctctgcccggccacgaccccgtctgggaggtgtgcccagcggctcattggggatgggccatgatgacaatggcggttttgtggaatagaaaggcgggaagggtggggaaaaaattgagaaatcggatggttgccgggtttgtgtggatagaagtagacatgggagacttttcattttgttctgtactaagaaaaattcttctgccttgggatcctgttgatctgtgaccttatccccaaccctgtgctctctgaaacatgtgctgtgtccactcagggttaaatggattaagggcggtgcaagatgtgctttgttaaacagatgcttgaaggcagcaggctcgttaagagtcatcaccactccctaatcttaagtacccagggacacaaacacttcggaaggccgcagggtcctctgcctaggaaaaccagagacctttgttcacttgtttatctgc

SEQ ID NO: 14055 - DNA, 918 bp, Artificial sequence
  DNA replication origin
aggtttgtggttttgaatctaaaaagtgaaatcagcctgcttgagtgatttttctgtggcaaaactcagctgctttggtgcagggaaggaggaggacagagacaaggaagggcactgtagattctaagttggtaaggcaggaaatgaggacaggagggggatggatgagggaaaaacaaggctactgaattgggagccttgttgaggtcagatgactgttgaggtgtggtatattcaggtaagtgatctgcaaggaaaggaagtagaagatttgaaatccagctaccaggcttcagccttgtgtgggtttttattgggggatggaggagaagggtggtggtgaagagaaccggaactgaaaaggcccaggagggagcttatccacctggcggtggggatggaggttgggtgaccatgggacgggagtgcgagggagatcagtccctgacatctatggggaacagcaggctatagagccccaaggtgtgagtttcaaagaagctggggtcttggcaagaagagagcggcccagaaacggccttggggaacaaagagaacatggaacgcttgtgtccttgaggcatgtaggttgggggagggaagattgcacctcttgaaaggccttaggggaagtgaaggtatagggagcacccggagtcttgtgaggatatagtgcctgctaaccatgtaactaggtttctagagaggaaagatacgaggcttgctaaccgtgtatctctgtttccagagagcatggtcaaaagggctgggggtggggtgtgtgggaagactgggcagatgagatgaatggggcagagtgggtatgtggtagcttcatgtatgtcatctcttttactgctgaccactcccctgcccactctgcagtagactttcttcagagagttcctaatacgagac

SEQ ID NO: 14056 - DNA, 1221 bp, Artificial sequence
  DNA replication origin
attagggagtggcgatgactcttaaggagcatgctgccttcaagcatctgtttaacaaagcacatcttgcaccacccttaatccattcaaccctgagtggacacagcacatgtttcagagagcacagggttgggggtaaggtcacagatcaacaggatcccaaggcagaagaatttttcttagtacagaacaaaatgaaaagtctcccatgtctacttctttctacacagacacggcaaccatccgatttctcaatcttttccccacctttcccccctttctattccacaaaaccgccattgtcatcatggcctgttctcaatgagctgttgagtacacctcccagacggggtggtggccgggcagaggggctcctcacttcccagtaggggcggccgggcagaggcgcccctcacctcccggacggggcagctggccgggcggggggctgacccccacctccctcccggacggggtggctgccgggcggaggggctcctcacttctcagacggggtggctgccgggcggaggggcttctcacttctcagatggggcggttgccaggcagagggtctcctcacttctcagacggggcggccaggcagagacgctcctcacatcccagatggggcggcagggcagaggtgctccccacatctcagatgatgggcggccgggcagagacgctcctcacttcctagatgggatggcggccgggcagagacgctcctcactttccagactgggcagccaggcagagaggctcctcacatcccagacgatgggcggccaggcagagacgctcctcacttcccagacggggtggcggccgggcagaggctgcaatctcggcactttgggaggccaaggcaggcagctgggaggtggaggttgtagcgagccgagatcacgccactgcactccagcctgggcaccattgagcactgagtgaacgcaactccgtctgccatcccggcacctcgggaggccgaggctggcggatcactcgcggttaggagctggagaccagcccagccaacacagcgaaaccccgtctccaccaaaaaaatacgaaaaccagtcaggcgtggcggtgcgcgcctgcaatcgcaggcactcggcaggctgaggcaggagaatcaggcagggaggttgcagtgagccgagatggcagcagcacagtccagcttcggctcggcatcagagggagaccgtggca

SEQ ID NO: 14057 - DNA, 929 bp, Artificial sequence
  DNA replication origin
gaagtgaggagcgtctctgcctggccgcccatcgtctgggatgtgaggagcctctctgcctggctgcccagtctggaaagtgaggagcgtctctgcccggccgccatcccatctaggaagtgaggagcgtctctgcccggccgcccatcatctgagatgtggggagcacctctgccctgccgccccatctgggatgtgaggagcgtctctgcctggccgccccgtctgagaagtgaggagaccctctgcctggcaaccgccccatctgagaagtgagaagcccctccgcccggcagccaccccgtctgagaagtgaggagcccctccgcccggcagccaccccgtccgggagggaggtgggggtcagccccccgcccggccagctgccccgtccgggaggtgaggggcgcctctgcccggccgcccctactgggaagtgaggagcccctctgcccggccaccaccccgtctgggaggtgtactcaacagctcattgagaacaggccatgatgacaatggcggttttgtggaatagaaaggggggaaaggtggggaaaagattgagaaatcggatggttgccgtgtctgtgtagaaagaagtagacatgggagacttttcattttgttctgtactaagaaaaattcttctgccttgggatcctgttgatctgtgaccttacccccaaccctgtgctctctgaaacatgtgctgtgtccactcagggttgaatggattaagggtggtgcaagatgtgctttgttaaacagatgcttgaaggcagcatgctccttaagagtcatcgccactccctaatctcaagtacccagggacacaaacacttcggaaggccgcagggtcctctgcctaggaaaaccagagacctttgttcacttgtttatctgctgaccttccctccactattgtccta

SEQ ID NO: 14058 - DNA, 1699 bp, Artificial sequence
  DNA replication origin
ctgggagaccggcctcaagtgaccacctcccgagccccgggagccggaggcagcggcgggggcatccttccagcggcaggggaggagccagcccacctctccccgatgcgctcgcagccagctcaggcagcgctcagggaagtgtaagcggcggtgcagccccgcggctccgcagtaatcgcgcaccgccaggcctccgcggacagcgctgagggctccgcggcccagcgggggttgacgcagtgactgggggaacgcggcggcagcgggggccgcgagggctgcagagatcgagacaacgccggtccccgccctcccgcgcctctagccgcaggccggccgccctcctccctcccgcgccgcaggcttggcccgcggccccctccccgcgcccggcgctccgccgcgcaacgtcctacctgcaggtgacctgtttagtccagccgccgccgctgccgtcgctgccgccgccccctccgcccgcccccagggacggggcggtgactgtggggatcggggtgggggaggctgctgccgccgtcgccgctgccgctcctgctcctgatgttgtggctgttgttccgggagttgcagcctccgccattactgtttatcccacacagcaaaggccccggaacttccgggatcacatagttccggtccggctgcggggagaggacggcgaggccaggcgaggggaggggaaggacactgaggcacccgttcggtccccgcctgctacgcgtcgcgtatctgagcgctctcgccacttcaactgcgggcccagagcatgcgcgcccgcggcccgcccacggcgccgctcattggtggaggggacgtctcctccggaaaggggcggggcaaacgggggtctgtacaggtgtgtcctaggctcgaaaccccggcgacgaaagtccatagttagcggctttcttcctagcagaggctgatatagtggagctggggctggggactagggacttgcagtcggaagacctgggtttgaatctgcactttcccatttctctagtaatatttgagctaggtacttgttctatctgagcctccgtttcagcctctctcgaataaggatgacagcagacccacatatggttgctgtgaggattatatgatgtccttagaaatcactgagcttagtgcctggtacatggtaaacacttaataaaggttatctcattcctggtatcagagatgtgatcttggccaagtattttggctgagcaatgctctagagggctggtccccttatctccaggcttccctttctaagccatgggtcttctagcaaattatcctacctcttggtgctcctgctttctcctctgtaaaaacgacaataataataataataggccaggcgcggtggctcacgcctgtaatcccagcactttgggaggctgaggtaggcgaatcacctgaggtcatgagttcgagatcagcctggccaacgtggtgaaaccccgtctttactaaaaatacaaaaattagccgggtgtagtggctagtcccagttactcaggaggctgaggcaggagaattccttgaacccgggaggcggaggttgcagtgagccgagatcgcgccactgcactccagcttgggcgacagaatgaaattccgtctcaaaataataataatagtaatagataatagtacctacttcagagatggctgtgaa

SEQ ID NO: 14059 - DNA, 1617 bp, Artificial sequence
  DNA replication origin
taccgcagctccgcgcggggccgggccctgggagaggggttgccgtggcaaccggccgggcgcccgccagctgcggattagctcactgggccgggcgggatgggtcgggaggagggggcgcgcgtcgcgcagatcgtcgcggagccacggcaggaggaggcaggggccgcgggcgagcctgcgctgggccggccgagggaagcgcgccgctggggccgggggcggcggggaccccacgggagcgcgcgcggcggggacccccaggggcttgcgggcggccgggggaggctcggcggacaaaggggcggagggcggagggccatggcgtccccggcacccgccgccgcccgcccccgagccgcgccgccagccgtcccggcccgccccggagcccccaagatgcgccccagagcccgcggagccgccgcccgcggggaggtagggccgggccgggccagggggtgcagggtcgagctggggagggaaaggggacggaggaggggacgcgcgggggagggaggaaacggctcgcgcggcctgagccctgacgggggaagcggctctgcagacgggagtctgagttcccgcctggtcccgggactgtgcagagcgcgatccaggcgttcctcccgggctcgggctgactcccaggactgagcccggacgccgccgtctcgcgcctcggggacctgcagaaagccggtagacccccgccctgcgccgtgctgggtccctcggggcgcgagtgtgagtgtgtgtgtgtccgcgcgcgcgcgtgtgtgtgtgtgcgcgcttgtgtgtctgtgtgtgagtgtgtctgtgcgagtgtgtgtgagtgtgtgcgtgcgcgtgcaagcgcggggcatcgaggcggctgagcagccgggcccccctcacagcggtcagcatttgcagtcttgggaaagcaagaaggtaaagatgattgaatggtcttacttcttccactttgtccccaagggtggagttgggagcagatggagcccaggggaagtctggacacaatcgtattaggagggtcacagagagctgggtgagaccacggagtagagccagacctcagccgtggaatcttgtcatggggggcctgggacaggaagcaggaaactggtcagggctctccaggggcgtaaattgggcaagggaagtgcagtgaccctgccttaaccagctggtgctgacttccagctgctgttcagatgcgattcaggaatgtgacttccccaaggttccaaatgacatcggacagtaatgggctgggggtaacagagttgtaataggcgtgctacagtaatcttgttagtaaactcttaaaccctctgtggttaccacataaaagaagagaaagaaatcccttctccttacatcatcaaatatcagataccaaaagagtggagtagaaagtctgggtgggcagcgtgggacggagcagaactccgagaggaagtatgtgtgagtgtgcgagtgtgtgtgtgtgtgtgtgtcagagacggtttctgaggcctggtaatgaaaaggctggcgggaggctggcctccagtcctttcgtttgttttttatttttatttttttgagacagagtcttgctctgtcaccctg

SEQ ID NO: 14060 - DNA, 1236 bp, Artificial sequence
  DNA replication origin
tgcgcgacgcgcgccccctcctcccgacccatcccgcccggcccagtgagctaatccgcagctggcgggcgcccggccggttgccacggcaacccctctcccagggcccggccccgcgcggagctgcggtaaacaggaccttctgccggactcgccccctcgcctctcggggtgggggagaggtggcttaacccttcctgggaggacgcccgccgcgcgcgggctccattccacccaggcccgggcggattcgcgaggtgcttccggcctgaggcttagacctggacgtccaagcctggggaacggcggccgcgtgcccggccccgcttactctaggcagttaacacactctcggcaccgggccggggccgggggcacctcgggcagtgagtcaggcaccacccttgccccaggcagcttgccgtcgggccggggtaatgacagtcatgagaccggcgatgcaggtgatgggggccggggagggcccagggccgagcgcgctgcagaagggctcccagaccgggcgggaagggaggtggtcaggaaaagcttccaagaggagaagtgacttcatagacccgctgcccccactcacgcaggacaccgtcaaggaacacaggctgcacagcagaagtccgcagggaaatgccgtgggctgcggggaaggcgggtctggaatacaggctggggccttcgaggaagttccctggagctttgaccgggccgggaacattgaatagcatttgcataggtggaggaaagtgggtgaaaggaaagggttctgagtgaagggaacagcaccagtggaggccggaagcagaggctaggcatttcagaaacagccgagtgaggaccaagtggtgaatcaggtctgatgggtaggcttagccagatttcaagcgggggacggaaagtttttgagcagaggaatgccctgatgagagtgaggggggtctggcggggtgatttgcgcgcggtgggagcaggcttcaggtccatctccacaccagaggaaggtcatcctcatctttagctcagaagggctgggagccatggtcctgcgggacagcaaagaggcctaaagttcaagcaagggggaagagagaagagaggcttagcctcacaaatccacagaaggagtgtgcgcgcgagagaaaggcaggagggagacagtgaaaaataaaagatgggtgtaatgacgtaatactgcccaggcagtgcctatagactgggagc

SEQ ID NO: 14061 - DNA, 1875 bp, Artificial sequence
  DNA replication origin
gacgcgccagggcgccaccatcctcccgaggcccgcggcccaggcggcccgccctccacttcagaggcgcccgctcaggcgaggctgcggtgaagccgaagcccggccctgaccccgcggacggagctgcccatctgggccggatccgcgccccgctccctccagcacctcgccgggcctcaggccggaggcccgcgccccgcccgacacccgccgcgccgcgccgcgccgcgcggaaggggctgtcagacggcaccaactgcggaacgggaggagccaggacccacgcgaagccaggccccgggcgcccgcgacctgagcgagggggccgcgcgggcggaggcaggggccgggcagccgcagggtcaccgtgcgcccaggggccagtatgagatcgctggggtggcgggcaccagcccagggcgcgggcgcaggcgggggccgggagggcggggcggagcgtggagggcgggcggagcgtcgggggcggagcgtcgggggcgggcgggagtgcaggtgcagggaaccgaggcaccgagggctgtggtggagcggaggggcgcgggagatggatgggacgggttcggccactaggttgaaaccgccattgcaaaattataacagataatgaaagagatctgacctaaccaactccatcttgcttctaacctccaagctgtccttgttcattcctgggcgttggctgaactaactttgggaggaacttagtttatactttatagtttaaaacaaagatgataacagccctttctgaaaacaaacctccttcttgcctggggaatagactgtctttgtaggactaacaaattaaccaaaagattagaaagtatgatttaggagtcaggcagcaaggctacagtattctgaccctccctaaactgctaataagatcagtgctcaagatattttgcagaccctgcacttgatggatcaactgacacctaccagatcgataaaccaggtcatctgatcttaggcccccactccggaactaactcagcacaagaggacagcttcagttccctaagatttcacctccgacccaaccaatcagcactctcgactcactggccttcccccacccaccaagttgtccttaaaaactctgcccagtgtcccgcgcagcctgatctgtgtgaattactccttctctattgcaatgcccctgtcttgataaatcggctctgtctaggcagcaggcaaggtgaacccgctgggctgttacagggtggccggtgggggcagagggctgggtgctgggcggtgagggtcggagggagcagagggtcggtggcagaggcccgggcagccagggtcccttgacccgccccttaaagaggacggcgaccccaggccaagaccaccctgcccttgagtcctgggtcctgggtagcaaaacgcaaaggcaccctctatgtccccctccccatgtctatcttcccactgacttcttcgtatctttcattattccaaagagcatggctgaaaagtatgaaggcaggttctgaacacaggtccgcttttcagcgggggttgggtaggggggtggtgttggatgggggtaactgggctgcaggagtaggaactggatgctgtgtcctcggctgcattaattcggcaattgtgttggaccttggggaaaggctccggaaaggccatattcattcattcaataatactcactgagcccaataaatatttcttgagcccaatctcatatttgtcgaggctcaataatatgtactgatcaagctaggtcatgtgctggaccctgggaaagcggacacaaatatcctgcccttactggctgaatacgtaatgagggggacccaacatgggaacatataaatgtgc

SEQ ID NO: 14062 - DNA, 1185 bp, Artificial sequence
  DNA replication origin
tacagctgaggggaggagaactcacctgttggaccatcagcttctcaaattcctccacaatctcaggcaagctaagccacttgatgcctggcaaaactcccaggactcggctgccaatcttcatcagcagcaggtccatatgcacctgagcgagcaggccagggtgcaacacctgtcagaaagaggaaccgtgagacaggagaaacctgctggacacattttacccagccagggctgggtcccaccatccaagcaagagccaggtggcttcttatcaaagaaaagaggatgtggtcccgacacccaagcagttagttcactccagactcagttcattttcctctatcagactattcacaccgccacttcaagccaataaatgaaacagcttgcatgaaataagcactcagatattggtcaggcaaatagaaataaacgtgggggcgatttgcatggcggttgtttctgatctgggatagctcagtgggtaggtgagctgtgagctctcacaacacttactttcactgccacggagatgaggttggtggcctcaggttggtggccagggacctgagcccgagacacccctgcatttgatccaaccaggtcagctttagggaggagcagcctttctagaaacgactggtctgcgagattttctggaggtttccggccatttccaaggtatccaaagagctctctcagcccaccgactgccccagtatgtgagaagggcggcagacaggaggccctgccaagtctctggacgctgtcagtctccaggaaggcagtgttggcgtatgctttgtacacctgggccacgcagcctgagcccacaggttcccggttctcaaaagagaggatgctcccccagtcatccccaaaagcctgccgaaggaagcgctcagtgtgagtccacgggtggggcgtcactcggacatgcagcttggaaaattgggcacagaaagcctccgaaaacagatcgcgccgggtgctggcccactggcccagtttgatgtaggttgggcctgaggtctcggtggctttcagaagcaggtggagccagagggtggagacgctgggagccaggtaggtgagggggtagaggagtaggagggggaagaatttcaccaacagagcgccggcgcgaagccagaggcggagatgcaggaagacgccgcccag

SEQ ID NO: 14063 - DNA, 1107 bp, Artificial sequence
  DNA replication origin
gcgttggaggccgccttttcagaagcggctgcgcacggactgctggagatggtggagtccgtcagtgagtgtggggctggggatgggggcctcgccggcctgtagcggacagcgcgggtccctgggacgctctcaccttgactggggcgcctgaagaggccgcgtcccgaggcatgctgggacctgtagtccgcgtgtctcctgaagccgcgactcgaggagagggaccccgctggccggagggagagggagagacttcgctgggcagatgggacaccgtgtgcagggccgtcatggtagtaggggccgcctgccctcgggagacgcacgcgtgaatgcggagcgggctgagccagtcggcgccggcgcgggcggtccaggcggaggaagcagcgtgcgcggcgggtgtggacgctcctggagcgaggcggggggcggcggcggtgaggcctagggagggcgcggtccagggtcccggtgcctggctgcggaatttagggtagagtctgttcggcagcctttaatcggagacgtcacgtggccgctttttaatgctgaaaaatcactctggctgcagggagtggaggctgtcgcccagagagagcgccgtcgggtgagaggagcagaaagccggaagccaacgctggggcagccgtggcgtttaggagagtgacaggcagagccgcccgcgaggtggcccgagacgcagaccggagggcggagggctgggggtgcgaggtagggagcgggtgcgaggtagggagcagctgccgaagccgagttagtggtgtgcagagattccgtaagagcaggactggaaaagagtcatggatgattccaggtcccttagatcatcagctacactttaccaagaggcagtgtggggtcgtgattccaagcgggattctggccgcacagtggctgggttcaaatcccacctctgccacactccagctgtgggaccttggaaaagtttcttattctcttaatgcctcagtttcctcacccatttggcgtccatttgcaaggaactaaatgagttactgttatctaaagcgtgtttgtgtgttttaggagatggggtctaactctgtcaggcaggctgga

SEQ ID NO: 14064 - DNA, 1119 bp, Artificial sequence
  DNA replication origin
tgcctcagtttcctcacccatttggcgtccatttgcaaggaactaaatgagttactgttatctaaagcgtgtttgtgtgttttaggagatggggtctaactctgtcaggcaggctggagtgcagtggcgcgatcctagctcactgcagcctctaactcctgggctcaagtgattctccagcctcggcctcccaaagtgttgggaatacaggcgagccactgcgcttggtctcactaaagtgtttaaaacaattgctggtgcctgctaaggaccgtacaagtattctttaactgttgttgttattaaggaactgaggcccaggaaatgaaaggagtgacttgcctgaagtcccacatggatgaagaatctggagctggggcaggtgtggggtgggcagaaggcaaagccctgtgtgacttgggcaaagacagtgatggagagccatgagcgacagcccttggtcctgcatgaggagatgggggaatgccgatcttccctgaggtgctggcttgttcgtaacacacacttgtttcagagtgtgtgataattaagtgcataaatgtttatggagcatcttctatatggctgctcctttctaggtgctgaggatatagcagaatacgagagagaatgaagtgtacattctggagaggagagaccagtagaaaagaaagaccttttttgagtactgttaagggttatgaagagaatacagctggggattaatatggagaatgcgtggtgtgggagtagaagggatattgtatttggggatggcgtgggaatgcctgggagtgtgatttgaagcgggacctgagggatgagaagtcagccatgcagagacctcaagggaagagcccggtggacataagagggcagaggaggcatcaggtggagaggccagagcccgcagggttggcaggaggccaggctggagtggagcgtaggggaagagtgggagagaccaggtcacagggacaagtgtgggggccggattagagggggctttggaggactcggaattttattctaagaatcacagggagccattggagttttaaagcaggaaagtaatgtggtctgatttattttttaaaaatgtaactttgtccaggcgcg

SEQ ID NO: 14065 - DNA, 881 bp, Artificial sequence
  DNA replication origin
tattagtcttgctagtggtctatcaattttgttgatcctttcaaaaaaccagctcctgggccagccgccccgtccgggaaggaggtgggggggtcagccccccgcccagccagctgcctcgtccgggaggtgaggggcgcctctgcccggccgcccctactgggaagtgaggagcccctctgcccagccagctgccccgtccgggagggaggtgggggggtcagccccctgcccggccagccgccctgtccaggagggaggtggggggggtcagccccccgcccggccagccaccccgtccgggagggaggttggggggtcagccccccgcccggccagccgcctcgtccgggaggtgaggggcgcctctccccggccgcccctactgggaagtgaggagcccctctgcccggccaccaccccgtctgggaggtgtacccaacagctcattgagaacgggccatgatgacaatggcggttttgtggaatagaaggaggggaaaagcggggaaaagattgagaaatcggatggttgccgtgtctgtgtagaaagaggtagacatgggagacttttcattttgttctgtactaagaaaaattcttctgccttgtgatcctgttgatctgtgaccttacccccaaccctgtgccctctgaaacatgtgctgtgtccactcagggttaaatggattaagggcggtgcaagatgtgctttgttaaacagatgcttgaaggcagcatgctccttaagagtcatcaccactccctaatctcaagtacccaggaacacaaacactgcggaaggccgcagggtcctctgcctaggaaaaccagagacctttgttcacttgtttatctgctgaccttccctccactattgt

SEQ ID NO: 14066 - DNA, 1001 bp, Artificial sequence
  DNA replication origin
ctctttccaaaataaacaccagccagccgccgagcccggagtcgggagggcggcagggtggcgccagcactcacctcctccggaatggcagggtccgcagccgaagaggccgcggcgccggcgccggcgccggcctcgggctccatgtccccgttgaacagagcctggcccggctccgcgccgccaccaccgccaccgctcagcgccgccatcttataaccgagagccggggcccgagcggccgctgtcgggcggggagggggaagggaggcggagagctgggggaggcggaggcggaggcggaggcggaggagcggggggcgcggggggcgcggggaggagcggcccgggcggcgccgcgggcggagggcgcctgggccacctcaggtaccggcccgcggccccgggcgcagccgagcctgaggggattgggggaaggacgctaggcgggggtgcgggggggagcgggggaagggggcggagacgacgagaagtcgccgcggcaacggcgtcacccgcgtgtcacggtcgtgacgtcaccccggtgcgtgacgtaatctgaggcgcgccttcgcgccgtcgtccggggagggttttttcccttctaaccacccgcgctctcacactttgcctccgctccgccgtttccatggctccggtttcctactttcctcttgtctcctccgtcctcagcctgttctgtaatgtgggatttactagaagagcagggctggtgttcgaggaggagaagttgaaatcctagagggaggaaggcggggaagccaatactacttgctatttccactgcaatgaacgtctctgtgtcatcaaaataagaacttcaaccccaaggttgaaacagccaagcagaatttgatggaaatatatttaggaacagctaaattagcagtgcgacgcgtgttttcttttcattgaagaattcagccagttaaaacgagtctaaatggaagtctgaaagctttttcttcattgttgaggaa

SEQ ID NO: 14067 - DNA, 1452 bp, Artificial sequence
  DNA replication origin
gggccaaagtcacttgactccatctcgacatcctagggcagccagagggcagagatctggccaagggcgcatgcctgcagtccctcgaccagccgggcacccgagaatccagcgggcctcctcaggctctgctgtcccttgggcaaatcccattgcagaatccaggggtgaaaagcgaaagcgaggcacgcccctcccccactagatggcactgaaacgcctcgttcgcgcttttcaaaatgcaggaagggcgggggagagagagagagagagagagggaaaaaaaaaaagacaaaaagaatatggtggaggtgcgctcattttggctcacaagccccgttgtgcaaagcagggtgtcagagactctctttttccccagggcaactctttacccggcaatgccggacctcgactttggggtgagggtgaaaacgaggggtgagcattagagtgaaaaacccagcgtttgatgccgggagggagggtcccagcctttgcggcgccgtctcacgtgagcagagcaggggggctgaagttgggatgaagcggggcttgcctggggcccacccgctcaaggtctggggtccggcgctacctcccagagcccctgcagagcctaaatccagcggccacccttacaaaatgacaaaccctgcatcgaggtttcttttaaccccaccttccctcaacgctcgagctctccagcgttttcaaaatatctactaacggaccaccccccatccaccattaaatttctctcgtcttgagtcgatcagccaaatttcttctttctgttcctgccgaggagggagggcaggtggaggtgggtgtgtgtcggggtgcctggctctggcttgggactggactggggctggccggataactccgcagccgctctcagctcagtcctaggtggaaacgcctgtagcttgcaaggtagcgcctgtggctttctggggaaaaaaagatcaaatgcctcccaagacaccagcgacccaaaccggggatgcagggagctcgcttggcccctttgaaggccgactccgcaataagcagtttttcctttaaataaccgtagtggatttgagagaattttccatggctgaaaagagaaacaggagctgtaggcaacatccctaaatttataataatgcatgtaaacatgctacataccacatatatgtatatgtgcataaatatggatgtggttgggcacatacctatctagacaccattgacttgcctggtcaaagaataagacttagacatttcgtgcctgggaaatggtgcagtttatctttaaggagactagaaaaataagagatgaggctcacgttgcacggatgacatcactagcttttggctgcgcgctcggtgttctcgtctgtgggttttagccaaggctgcagctacccgcgccggacgagagagcgcggcagcagcttcctccgg

SEQ ID NO: 14068 - DNA, 826 bp, Artificial sequence
  DNA replication origin
aatgcatgtaaacatgctacataccacatatatgtatatgtgcataaatatggatgtggttgggcacatacctatctagacaccattgacttgcctggtcaaagaataagacttagacatttcgtgcctgggaaatggtgcagtttatctttaaggagactagaaaaataagagatgaggctcacgttgcacggatgacatcactagcttttggctgcgcgctcggtgttctcgtctgtgggttttagccaaggctgcagctacccgcgccggacgagagagcgcggcagcagcttcctccggcgcccgcacccgggcaatgcgatttccccagtcccctgggcgcagcctgggctctcgcgcctcccgggcaccagccgagcctgcgaggcctcggagccgccgcggctagaggaggaggcgacgaggggaagccgagtgacccagcctccctcccccaccctctccccattcatctcggcgaccaccgcgcgccgggagccggatcgtgggacgccgaggccaggacgggattctctgcacgctgtcgagtgagccggcatctcggcgcccgggtgggctgcgaagaaaatggtgcaatctgagagcgactgagcccagctgggcagagcagacggggtgccagagtgccaagggctcaggtgcctggagaaaggggcggattgtttggaggggccgggaccggggttttcttcggtgcctgcggcattttctttgcacctgggcggcaggctcccggggctcccgggtgccagatgaagtgaggcggaggcgtcgcgggagagccgggtccggaggcggtcgg

SEQ ID NO: 14069 - DNA, 1458 bp, Artificial sequence
  DNA replication origin
ttcgcccgccggccgcatccggggcgttctacttcacccggtggtccagtggcgcctcctgacagcaccccccgtccccctcagagagacaggcgagttctgtcccgtcaccatcctgcacaaagaagccccaccgcagccgaggacacttggcatttagtttccggcccgagggcagcggcgcccgaagccgggctgggagccgaggcggctgcttcggggcagtcgcttcctgcggggcggggagggggcgggaggcggccgcgctgggttcgccgccgccggaggctgcacctgcctcagaggatgcccaggagcccgcgggagcctctccggatcagaactttttaggccgcccgcccccatccccgcagtccccgggccgtgctccggtaggcgggggccgagggggcgccgcggcgcgagtccctctcctgccccctcccccagctcggccgcccgccgctttgttccgggtgcggcgagggaaggcgaggctgcggcggatcatgcccatggtgtagccgccaagcggaggcatggctgccggaaggttactgctctacactggcctctcgctagcgctctgcgccctcggcatgctggccgtggccatctgctcggaccactggtacgagacggacgccaggaagcacagggacaggtgcaaggccttcaacacccgccgggtcgaccccggcttcatttacaacaataacaacaacttgccgctccgggcgagccgctcgcgcctggaccgctgggagggcaaactcctccgggcccggaatcgccggcagctgttcgccatgagccccgcggacgagtgcagccggcagtacaactccaccaacatgggcctctggaggaagtgccaccggcagggcttcgaccccgagatcgccgccctcattcggaaaggtaagcgccgggcgcaaggcgtggcgctgcggagagcccggcgcctttaggccccgcagcccctcgcgtctccttcccaggccacaggctatcaggtctctgggttccaggcggtccggttatccaggcctggctgagcctcggggccaggacttgcctcccaatagctgttaatgaagcttggtgcaggcttaactctctcccctgcctctcctttcgcgcgtctctgtcgggattcgagtggaacctcatggtccagggttcttatccaggataatgcttcatcagcctctgagaagaagggaatctggaacgttgtttgtgctcttaaaggaagccctttaggagtcatgtgtcaggggtagacaggttcctaatttttgttgaactgatttaatcaaggaaaattgggggaaacatttcacagagaaggccttattcataccagaaacgtttgctgagcgctatactataccagatatggtgtaggcactggtcatataaacatcaataaatcacagcccctgtcctgtaagc

SEQ ID NO: 14070 - DNA, 1110 bp, Artificial sequence
  DNA replication origin
gtttgcagtggactaaaaggctttataagagccccatgggcctcactgtcaaaatgacaaagtatgcactgacctatataggaaaacataccagacacacagacagatacaaaagcacacacataaatatcctgaaagatgtagccaaaagtgttgccagaacagaggcttcatcaccacttattaactctatgaccttgggcaaattattgagtatctctaggccttaaacttatcatctataccataagctaataatactgaaaaatgaagctagtgatatttgaatatatcatagagtttttttgacaattacctgagtaaattacatgtaaagcatttacaatagcacttggcaagtaagcccaataagagtttcttgctgctgtttttaatggagatggtggtagtggcagtggtagtggggtggtagtggggtagtggtagtgatggtgatggtgatgatgaatatggtggtggtggtggtgatggggatggtggtggtagtggtgatggtggtggtggtgatgatgtgatcatggtggtagtgggggtggtggtggtggtggtggtgatggtggtggtggtgatggtggtggtgctggtggtggtggtggtggtggtggtgatggtggtggtgatgatggtggtggtggtgatggtggtgatggtggtggtggtgatgatgatggtagtgatgggggtggtggtggtggtagtgatggtggtggtggtgatggtggtggtggtggtggtggtgatggtggtgatggtggtggtggtgatgatgatggtagtgatgggggtggtggtggtggtggtagtgatggtggtggtggtgatggtggtggtgatggtggtggtggtggtggtggtgatgatggtggtggtggtagcggtgatggtggtggtggtgatgatgatggtagtgatggtaatggttatgatggtggtgatggtggtggtggtgctgatcctagaaatgatggtggtggttgtggtggtgatggtgatgattgtagtgttggtggtggtaatggtgggatgctagaagtgatggtagtaagagttatataatgtgtagttcattggacaatagtgtatgagcag

SEQ ID NO: 14071 - DNA, 937 bp, Artificial sequence
  DNA replication origin
cctttaagagacacatcaagccgcaggtgtgggccacgaggctggcgcagggctgtcgcttcacgcgccgcagactcatccagaagcgccttgggagctgcggagccctagagcctccatccgggcagcaaagcagctcacgtgtcccacccgggaagggcaggagtgggcgaggaatggtggagggaaaggagggaaagcggagaaacaggagggagggggaaagctgccgctgcagaaaagaaacgagtaagcccctttgtgcttggcctgcgaggtgtttccttcccgagcagacttgaagctgtcacctctcagtctgggtttggaataaatacactcgcccaccgagagatgaggcggcgcctggccgcacctgggaggtacctggtcgcacctggaagtgcctggtctcccctggcaggtacctggccgctcctttcctggagccatgggcacgggcccctcccggactttctactgctctgcaggaggatccgatgactgtgaccgactgggacaccgacccaggaatgcctggcggggtggagggtctggagactgcaattgaggtactcaagagagggctgccggcgtgaggagcagcaatgtccacggaatcggccataaaggatcaaaggggccaggcaggcccctctttctggttttctcctccgaacattggtctctgcggttttcttggccacattttccagccggctggctagtagcagacagatcatgagcagaacaggtcgcaccactggagagaactcacgtgctggctagggagggcacctgaggcccggtggggatcggggaggggggtcctggaggttattccctccttagggaagtttcccaaagctggggaagctgtggccttgtacctcactgaatggtgtcatattccactccatcactgcagcctggattc

SEQ ID NO: 14072 - DNA, 677 bp, Artificial sequence
  DNA replication origin
gttatttctaggacctctttctagtttgcaagtaagccaggttctactgctgtcaagtgttactcatggctaactgaggaaaaggggttcaaaaacattgagaagacgaaaaggagggagaaggctgggttaatggggacggaggtaaggggtgagaccccggctaaacagtgaagataaaaacagacatgtaaatgagagaaccggaagagaaggtaatggtgaaagtcaatacgggaaggaaaggggttgtaggggacaaacactgagagggcaagaacttggagtaggtgaaactaaggtgagcgaggaggctgaagagaggtcagctgcagcgggaaagagggaagggccctttaagagacacatcaagccgcaggtgtgggccacgaggctggcgcagggctgtcgcttcacgcgccgcagactcatccagaagcgccttgggagctgcggagccctagagcctccatccgggcagcaaagcagctcacgtgtcccacccgggaagggcaggagtgggcgaggaatggtggagggaaaggagggaaagcggagaaacaggagggagggggaaagctgccgctgcagaaaagaaacgagtaagcccctttgtgcttggcctgcgaggtgtttccttcccgagcagacttgaagctgtcacctctcagtctggg

SEQ ID NO: 14073 - DNA, 1133 bp, Artificial sequence
  DNA replication origin
tggggaagggcgggggtcggccagtcctcagctctctccctcggggcgcagctgggtgctggcgcgcggcctctcggagcggccccgagggctttgttccagccccgccgacctcctctcccctcccctcctctcctctgagtcccagccccacagtggtgttcgcacttcagtgacagggcatccggtttgtggccacgttgggttttgttttcttttcttgggggctagaagatttttcacgttgtgcggaggaaaccccccgggcgagcgccctgagctccccgctcgccccccatcccgtcccccgctccccgctcgccccccaccccgtcccccgctccccgctcgccccccaccccgtcccccgctccccgctcgccctagctccccgtcgcttcctctggggtaactttcctagcggccaagttcactttctctgactgcattattttgaggaattaacgccgggagcattaagggatggggctgagggattcagctgaaggctgattaaaggagaagcctccccggataggctgtctttcggagatgcttggagaattaaagtcttatcccacataatcttagcctaaccacccggcaggggggtgtgcgttttccaggtgagagtccacgggggacagaaggtggaagaacgaccctgcgcgcccaggaagccttggagggtcagctagggacttctgactctgagagtggctctgctgttcggggttgggggaaggaggtgtcatcgcaggagtcgtggtgtcagggcttaaggaaacccaggtgtgactgtcaatgtctccagggcagctgctggagtgtggagtgcctgttcgtgcgggaaaatattggctgctttctgggatgaggtgggatggagtggagaaaaaaaggggttaggatctggagaaggggaatctggtatggcagctgatgatgggttccaggccggtaattttggggttctcagctgtaggacacaggaagaatgtgggattcactgtggagctccatttgcagggacagagtttgtggggacaattcaggcctttgtgacttctgcttgtttctttgccacattccatggctttcaaactcttttgactgatctatcatgtgaagtt

SEQ ID NO: 14074 - DNA, 715 bp, Artificial sequence
  DNA replication origin
ccgcctcgcctagccatggtggagcagggagacgcggcgccgctgctgcgctgggccgagggccccgccgtctccctgccgcaggccccgcagccgcaggcgggaggctggggccggggcggcggcgggggcgcccggccggccgcggagccgccccggaggcgggagcccgaggagccggccgccccggaggtgctgctgcagcccgggcgcctggagctgggcgacgtggaggaggaccaggtggtggccgtgttcgtggtcaccttcgacccccgctcgggtgagggccgcgccggggccaggcgcgtggggagggtcggggtgcccccgagctttgggggcgcgggggaggggctcgctgcgcgcgcacctgccctcccggccccgcaccccgcaccagggccggccccgggctcccgggcttggggaagggcgggggtcggccagtcctcagctctctccctcggggcgcagctgggtgctggcgcgcggcctctcggagcggccccgagggctttgttccagccccgccgacctcctctcccctcccctcctctcctctgagtcccagccccacagtggtgttcgcacttcagtgacagggcatccggtttgtggccacgttgggttttgttttcttttcttgggggctagaagatttttcacgttgtgcggaggaaaccccccgggcgagcgccctgagctccccgct

SEQ ID NO: 14075 - DNA, 1186 bp, Artificial sequence
  DNA replication origin
ttatagcctctgtaagcattgcagaatagcagaagttatagtggtactagtggtggtgctggtagtgatagtagtgtgatgttggtgttatttgtggttatatggtgatgatggcagtaggggctgacggtggtgatagtgatgtgggaatggtgataatgatggtggtggtagtagtggtgttggtgatggtgatgatagtggtgggggtggtggtaatgggtgtgttggtgatgatgacggtgatagtggtggtgatggtgacaagggtggggctgacgatggtgtttgtggtagtgatggtgatgatgatggtggtgttggttatggtggtggtggtagtggtggtgacagtgaggtggtgtgaggagtgtgatgttggtgatagtggttgtggtgatagtggtgatggtggggatggtggttggggtggtggtgggggtggtagtggggggtggtggtgacggtagtgaagggtaatgataatggtaatggtggtgggggcacgatcgtggtactgggggtgatggtgaaaatagtgatgatggtggtggtgatgatggtgatgatgaccatggtggtcgtggcagcaacaacagacacttacatactaccaagtgcgcatcactgatttatcacttgctgcatgttagagcatttcacacatattaactcattcatgcatcacagaaacactatcaggcagatgctattattatccgttatttacagatgaagaaactgaagcactaagagattacttaatttttgcccaaggtcacacagctagcaggattggagcctgtatactaagccaggcatatgtctctgattctgggtttcttaaccagttatctacagtgtctctaggaatagcgtaacatcagattttccataatttttaagaaggagctcaagtctagcagaaagctttctctaagtatcctagtggctctatatcctgtcagttttggtctggatttcaattagttagttgtctagcttggggcacagaaaaatattcttattacttgatgtaaaacttcaatgtggtgcctctgttctgaagactaatattttctgtctattttctagttgattggccggcctgtgatggtaccttactggtctttggggttccagctgtgtcgctatggctaccagaatgactctgagatcgccagct

SEQ ID NO: 14076 - DNA, 953 bp, Artificial sequence
  DNA replication origin
tcaaaaaatcctttttataaaatgtgctagctaaaatttgtgaataattaaactaaatgcaatgtgtgaaaagatatgagtctgactaatcaaagggagctctgcaatgtagtattttcagcccagattggcttgatattgtcacactttcatcctgtggcctgtataattctggctcctttcttccatcttaggatgctcattgcaataatgtaacagcaatttcttgtgcaatcaagatgtgtccttttgtctccactggtcaagggtgagtttgaagttccaccctaaatcaacccttccgggaaagcaatagacagggtgtgtgaaagaatgggggctgcaggggttggagtgggggcaaccgtgttcctgacttggactatcctgagctcatcaggtcagaaggtgtgaatccatgggactgtggaatgttggccacttgggggcgccgtggccccactatgctgcagggaaccctggggaggggtaggagggtggccaggaagggagggcggaagggaatgcctggctgcctgctgacatcaggagattaggtggaaattagagtaggtcctggcctgggactgcccagggaaaggtagggccagggttggcaccaagcagggagtgtttctgcctctgcatgggcagaggagggtgtaggggctggggtggcaagggctgggaatcagtgtcaggacagggatagggtgggcagaggaaagtgaggtgtgatgtgggcatgcggggactgtgaccagccacctcccctttagttgaggggctgtgcgggacaggaaggctgcatggagctgctgagcctgagtctttcaatgggtgaacaaggcaggagtggcctgcagaaagagtacctggaaaaggactgtacccgaaggaattgggtgacactttcttagctccactcagggagtgaccctgaggagggtgct

SEQ ID NO: 14077 - DNA, 1113 bp, Artificial sequence
  DNA replication origin
gcacgcggctcctggtgctcggtgagcgcgggctgctggggcgcgggcgcgggcggcttgggtctggtttttgcggggagtccccgggctgtgctctggggccaacgtcctgactttcggggccggcagcaggctgaccgtgctgggtgagttttcgcgggaccacccgggcggcgggattcaggtggaaggcggcggctgcttcgcggcacccggtccggccctgtgctgggagacctgggctgggtccccagggtgggcaggagctcggggagccttagaggtttgcatgcgggggtgcacctccgtgctcctacgagcagtacttcgggccgggcaccaggctcacggtcacaggtgagattcgggcgtctccccaccttccagcccctcggtccccggagtcggagggtggaccggagctggaggagctgggtgtccggggtcagctctgcaaggtcacctccccgctcctggggaaagactggggaagagggagggggtggggaggtgctcagagtccggaaagctgagcagagggcgaggccacttttaatcttttttctggggtgtttagagagaaggtgaacgatggaggagaggatttgttaggactctgggagaggcgagactggagaggacgaagggaaatcctggtttggggaatgggtaggagtgggggtaactgctattcgtaggcaaaaagagctgagcaggctgggaacagcgcgggtgggcaagggtcagcactgcgggcaggcgggtgggtgttagggggcagaaatcctgcagccgagggtgcagtagaacacagaagaaaaagcctgccaaacaaaagtggaacagagaagccaaaaagggagatgaacatgagtcagtgaagaaaagaatgaaagtttactgtttagcagtgtggatctctaatccgacttaaaactccttgttcccgattcctattcctcctaagccagagatccctgggtccagggtgagggcacggcattcatgcttacccacgggctggtcaacaaagaggtgctgacctgagagtagggcacataacctcagccactggggtacacttaccacccccgcccccgtgtagctccctcc

SEQ ID NO: 14078 - DNA, 1485 bp, Artificial sequence
  DNA replication origin
acccggcccgggtccgttcggcgccgagagtccctgggattccggggtggacctgacgctggcggcaggggctgctccagaggtggggcgccgggagatcctgggggcccgcgtcgagatcgccgtcgccaagctgggtcccgggtcccgccgcccgctgctgtagagccgcggctggagcgaacgcagcccggcccgccccctccgcgtcccctcccaagccggcccggcccgccccttcagcccctttggccgccttcccactcccttcttccggggagccgagcccgccctcccggcctaggcggtgagtgcgcggcgcccgctcctccgccccggcgcgcgggggagacgcggggcgcgcccggggccccgcctgtgcgccgggaagggggcggcctcctcccgcgggtcttggccgggaggatcgcacgcgtggggcgcctgcaggaagtgggaagggaagaggctgtctgtaaagcccctgcctgggctcgggctcgggctcggcttgggtcggacacccgcggagcgaagcgcaactggcggaccgtggcagttcagggcagggcagagccctgcacacaccccctcgcgcctccctcctcttcggctttaactctaggaactaaaacagtggggctcctactcagcttggaactaaggtgggcgtgagctgagcaagagagaaggaaggaaaagcagggggtggagggaaagacaaactgagaaatctgggagagtacgggcggtggtagggggagccgaggcagcgggagaggggggcgtctcggtatgaaagcgtcgccgtgctagccgggaactcttttctcttttcgtgtctggatcttggtcaacgttggggcttctgagtcgaacctccctccatctaccctccccaaggggcagggcagtcgggttgaaaaggggaagcgctgctgtacgcctggctctgacatggcttgggcaagtcgctgcacctctgggtgcctcctccctcgcccgcgctccggagagaacctccctgcagtgaggaggggcggtgcaaggtgctctcagctggcgcctggaggcagggttgaggaaccgagggggcgccgcgaggaaaagtgtttccgcccacctctaaccccttctctagccgaggacggggatttggggtctattgtttgggtcctacagagctgggctggggccttgccacgaagtgttgctaccacctgctggtttttctagggagcacaagcacccggtgcgattccctttgcccccttttctccctgtatcgccctgtcccatcttgctctcctgtttattaaagcaaatgggctgatcaaaactggtacttaaagagcattcagaagccgaagaaaattgtgaaagagatctatgagccaacaaacacaataaacaaaacaatgaaactcagtaagagtcacctgggagagacaaacaggctttaatgaattgactgaatgagtgata

SEQ ID NO: 14079 - DNA, 1178 bp, Artificial sequence
  DNA replication origin
gccgtcccagaaggaggatcctgcctttcccatgctcagcccaccccagcctgttgctccccagcattctggtaactcagtgtcattgccaaccatctttttgcaccctgaatggagtaatagactccaaacaagtcctccttctgaggccaccaggtaagtacatagacacccccacgctaatcttcctttgagaaaaaaggcccactgctctgaaaagccaagtggccccactgagcagcactcagaagcctcaatgctccaatgccccttacttgggcagcttctgtggtctactaacagccccacacagctccctcccactggtctctcagctcaggaccagcatctcccctcctagagcctcagtcaagttcccctggcgggcggagggcctgggttaactgggaacagacccagcagctccgctccatgggcgctgccagggacattacaacattgctatgctgggtccatgccagctcccccagggatgggaggagagagggtgccagacggccaagatcggtgggtgggggtgtggggcaagcagggccaagcacccagatggagggagcagagcgagggtggagctggggcaggagcacgcaatagaatttggttgcacgttgggggtgatggctgggcagcaggaaccaagcgttccttccacctccaaggcttaactgtggtcatggagctgggggggacagtgccttgtggggagcaggggacaggtgtgtggtcagcctcctgactcctcccagctccaaggggattggagtgatgccactggagtcagaggggtggcaatcctgttccaagcgtggagctccgtctctgcgaggaccctcccagattaggactcccaagccagagccagaggagaatgtctgggaacgcaactgggggatcctaacagcaagggtaatgcggtgtcaatgatgccaggtcagagtggagtgagaggggagtagccaggttgaccgtttcctcacccttcatgaaccccactctggccttgaggaaggatcctcagtactccctcaggaagccacctaggggctgaggagccccactactcttgcaaaccttaattcctctgtccccaagcatactgtccccgacccccacaacgccgcctgctaaccccgcgggctcaccttcccgttggccgc

SEQ ID NO: 14080 - DNA, 969 bp, Artificial sequence
  DNA replication origin
tgtctaggtctagccagacagccacttagaatgagccactctgtgcactgaccggggacatgcgtggctctggaaaagagcataagggagggtgttaaggcaggaggcaaatgtgcctgagagatgagtaagtggaaggttgtggaagaaagcccctgagtgccaggagtagcacctgcgtcagcagtgcctgaggatgtgtgtctacctggtggagtgtgtaagggaatgtgtatgagatgaggtgggcgggagcagatgctgtctgtgtagatgggggctgttgctttcctgtggcagaagatgcacatcagtgctggttccggagtggttccatgggcccttcttcctcaccttcggcccctgctctacccccagtctggctgtgagttgctcttggccccaggaggtacttctgcagaaacacctgggctgggagagggagccaagtggggggcggggaggagtgggtaaagaaagggaaacctgaggcttcccaaaccctccagaacctgccatcctccttctacctagagtgggaactcagggtctagggcccaggctcaggacagagtgatagcagaacagccgtcccagaaggaggatcctgcctttcccatgctcagcccaccccagcctgttgctccccagcattctggtaactcagtgtcattgccaaccatctttttgcaccctgaatggagtaatagactccaaacaagtcctccttctgaggccaccaggtaagtacatagacacccccacgctaatcttcctttgagaaaaaaggcccactgctctgaaaagccaagtggccccactgagcagcactcagaagcctcaatgctccaatgccccttacttgggcagcttctgtggtctactaacagccccacacagctccctcccactggtctctcagctcaggaccagcatctcccctcctagagcctcagtcaagttcccctg

SEQ ID NO: 14081 - DNA, 752 bp, Artificial sequence
  DNA replication origin
tcccctatcctgttccacagctgttaaacgcccaggaaattccagtataatccttgctcagtttaatgccaaagcctctatcctttaatctccaccttggagatctcttcgtgctctggcctcctgccttgagaaggatcccatcatcaggcttcatggaggcatccaggacagacagtgaggaggtggctgtcctccggctcttctagtccctgcttccttggctggagaagccaatttgtagattacctagcagaggacagtcctgtgtccctggaggcctccagcccctgagaatgtcccccagagcactgtgactcagacaaatgtgcctcccactcccaggctgtggagctgggggaggcttttaagatgcaggcagtgtctaggtctagccagacagccacttagaatgagccactctgtgcactgaccggggacatgcgtggctctggaaaagagcataagggagggtgttaaggcaggaggcaaatgtgcctgagagatgagtaagtggaaggttgtggaagaaagcccctgagtgccaggagtagcacctgcgtcagcagtgcctgaggatgtgtgtctacctggtggagtgtgtaagggaatgtgtatgagatgaggtgggcgggagcagatgctgtctgtgtagatgggggctgttgctttcctgtggcagaagatgcacatcagtgctggttccggagtggttccatgggcccttcttcctcaccttcggcccctgctct

SEQ ID NO: 14082 - DNA, 774 bp, Artificial sequence
  DNA replication origin
gcaaggagaggtgcccagaagtgtgcagcactgggcatgtgtctgagagccctgtcaaccagggagggtggctgggggccttaggggcagaagcaggggcaagagggggccaggcagggagtgagtggctgttacccccaggcagaagacgaatcccactccttcaccctgaccagcgagaccaacactgccaccgtgacacagctgagccctggccacatctatggtttccaggtgcgggcccggactgctgccggccacggcccctacgggggcaaagtctatttccagacacttcctcaaggtgagcgggggtcaagggccagatgggcaggtgaaggcccaagtgggtagtgaggagaggcccagggactgtccggccttgaaccctggccccgtgcttcccaaccagaagttctgtgggaaaggagagtgccttttgctcagcagctgacctaggggctactcggggaggtggggaattgtaggggtatgtatgcatgttgagtgtggatataggagggctgtggggatgtgtgtgtgtgttgtgtgtccctgggtgtggatgtgggagggctgtgggcgtgtgtgtgtgttgtgtgtccctgtgtgtggatgtggagggctgtggggatgtgtgtgtgtgttgtgtgtccctgtgtgtggatgtgggagggctgtgggcgtgtgtgtgtgttgtgtgtccctgtgcatggatgtgggaggtttggggcatgcgcgtgcatgttgtgtgtgcctgtggtgtgtgtgggt

SEQ ID NO: 14083 - DNA, 1109 bp, Artificial sequence
  DNA replication origin
cgttcccaggtaaactcgtaacaaacctgcaaggcaggtattattatctacattgtattgatgggagaaaccaaagctcaccatggtaaaggaactctcccaaggccatagaggtggcagaggcaagattcacacccatccctcattccaagcccacttctttctccctagcacacctcctcattctaactggccaacagagcttcagagaggttaagtgactcgcacagtcatacagaagaatgatggcattaagcatggcccatcgtcttcccacaacaaagagctccatcatgagcttgctggaagctgtcggaaaggtcatttagttcaacttttccactggaaaggggcagaagcccgggcttatccaacctcctggtgccagccaggtgccaatagcctaggggcaggtgtctgggtgttcagagtcacaggtgtgtggatcacttcctagcttcagagtctgttttgtcctaactttctctgactcagagttggaagacccagccaggggagtgtgtgtgtggcgtgtgtatggcgtgtgtgcccatgtgcatttgtgtgtggtgtttatgcgtgtgttcatgatgtgcatcggtggggtgttttgtgtgtggtatgctgtatgtatatgatgtgcctgtggtgtgtttggtatgtgtctacgtgtgtatgatatatgtgatatgtgtaggtatggcctgtagagcgtgtggatgtggtgtctgtgatggtatgtgtgacatgtgtgttgtgtatatacgtattgtggaaagattgttgcatgtgtgttgtgtgtatggtgtgtagtgggtgatgtatatggtacctttaaggtatgtgtgcgtgtacatgatgtgtgtgtgtgtgtgtggtgtatacatgatttgtgtagtgtatggtgggtttactatgtgtgtatgtatggtgtgtgttgtgtgtgtatgtatgtcatggggtgtgtgtcatatgtgctgtgtgtggggggagtcggtgtgtggagggaggtggatgctgaggtagggcaggggagagaaggaccccttcaagtggaaagctatttgtgttcctgccgctgggcagaggccaggccacgcagtcctgag

SEQ ID NO: 14084 - DNA, 1472 bp, Artificial sequence
  DNA replication origin
cagtgagtttggcaaaaaggaattaacctcatagcacagtgtcaaaatgaaatagaaggtagaaaatgaaataaaagttaggcaaatatatgccaggcacgtaaatcaataaatgataagcagaaaagagacagcaagaactccagaaagcagtactaataaatcctgcaccaaacagcaagcagtctcaaaataatacacagccctttgctgaaaaaatataggtatctggaccgcaggggctgtgatccacagtcattccctggatgcccactccaaagcttgtggcagccacccaaaacccccttctaagtcttgcttaggcaaccgggatagggaggaagtgcaacttgcctccgacaggggctgcaaagcagcatcccacgcccactgcacaggccgacaccaggaggtcaagctgcccaggcacggtctgcaacagagaagcacgcgggacaagggggtggaggggtggggcaggcgggacgtatgtaagaggtagggtgagggattgggagctacaaagggatgggggagcacacgagggaaacgtggagggaaactaacacagagggggtggtatggactagcagggagagcatgggagcagacgacagaccagacctccatgtggggccacaggtgaaagaggggtggacatttggaggacaggcacaggctaaacagaggcatcacgtggccagggtaggcagacagggagacgaggaagggagcgtggattagtgcgatgctgcttcagcaccacagccagcccagagcagaggcagccctcccaacaccctggacacacagccggactccttctaccacctggccccagctcatttcactgtctcaaccttacctcatataccccgcagaacacagacatgaatttgctgaggacagcagcacagatgctggcaatgtggacgaaggggccctgggagagggggagcgagggggcgggggtcagaggccagatggaggctctgcagcactcactggactaataatattccttactccaggcactgtgccaggggctggaaatacgggagttacacagaggtcctgccctcacgaggcctcatcccagagaggaagaagaggagaaaccagtgtgtttctcctctccagagagccagggtggaggagggtgggagggcacgtgtttagaggaaagggcctgaggagcctgcctaaagtagagctttgaatgatgggagggagggagccgcgcagatgtcaggaggaagaatgttccaggctgagaaaacagcacacaggcgccctgaggggcccagggcagagtgactgagggacagaaaggaaacttgtgagccaaacacaggaaagcaggggcacaggcctgcagagaggaggaaccagagtccacggtctcgaaggccacgcaagaagttctgataaggccgggcgcggtggcgcacgcctgtaatcccagcactttg

SEQ ID NO: 14085 - DNA, 1419 bp, Artificial sequence
  DNA replication origin
tcccactgggccaggctcccctaaggactccatagatggggtagtggagggaatggcctggaggatgggaggcttgacagaagggtgaataggtcagggggtggggatgagggtcttcatcaacctcgaaggagcagggagactgagccaaggagtctgtcagcattattttgtctgaaggcattcttacatcaggagtctcacctgagaatgatgacttggccagggccccaatgccataggcgttagagtttcgcttaagcttcggaagaatggaagtggtgtcctccatggagagctgggatgggaatgtgggaggaagggcagaggaataagaaggtacgggcgtgctttatacatggaggaggttcatggtttccaggaaaaagcattcgagctagggcagatgataagaaaagctactatacccaagagtcccaaggagggatatatccccagtgctctggaaaactggggcacaggttgagaacgtgagtgctcacagtgcctattggagccagggaataccgtgctggttggaaggtgcaagggagaagatgaggaggaggagttcgggaggatggggaggtctgggggcagctgcactcacgttgatgccgtcccaggagaaatcagttcgagtttgctgtgaggagagaggaaagggaatgggcatcccagtcactcgcaggaatgcaaggaagcccccttcctcagagggccttccaggagtgcgggatgtggggagggctttcctgaggttgatgccgctaactgggttctccatgtggactgcttggcatgtgttgtgagaaatgttctgtagaagtgtcagtctgaaggagtgtttgggttgttgccttggaattgaggaagtgcaggcagccagagacttggggtggctgagtgaggtctcacctcagtcgatggccgatggaggctgctcccgtgcagtgagctggtgctgtccatgttgatttgatcgacatccttcaggcccttccaatccactgcaatcacctcattccctgagggggccagaaggttagccgccggccctcacctccctgtgcagccgaggcgacaccctggggccagcccttcacaccccttccttaccccagctgcccatttcctcttatatccctgcactctccaaattctaggggagacaagtagtaatgctgagcccaaatattcagttttagctcaacccagaatagtgcactcagaaaaagtgatgtatggccttatttgttgttgtttatgtggaggggtcagaggttgggttttatcagaaaaccaattattccgtcctgaggactcttggagggtttctgtatgggagctgggctttttctctattacaagtctacagataagggcagagctgctctatgaggaacttttctctatgct

SEQ ID NO: 14086 - DNA, 1680 bp, Artificial sequence
  DNA replication origin
caatccactgcaatcacctcattccctgagggggccagaaggttagccgccggccctcacctccctgtgcagccgaggcgacaccctggggccagcccttcacaccccttccttaccccagctgcccatttcctcttatatccctgcactctccaaattctaggggagacaagtagtaatgctgagcccaaatattcagttttagctcaacccagaatagtgcactcagaaaaagtgatgtatggccttatttgttgttgtttatgtggaggggtcagaggttgggttttatcagaaaaccaattattccgtcctgaggactcttggagggtttctgtatgggagctgggctttttctctattacaagtctacagataagggcagagctgctctatgaggaacttttctctatgcttagggtggaagggatgtgtctcccccggtgggcccttcctaagagtccatgagtctgactgactggaagaggacttcctgggaatcgaggcaggagttggatagcaaggagttgggtgtgtcctcccaaaaacagtgagcagagaaaccaagggtgagctggaggcatttcacctgactgtggggagagaagtgatggattaaagtggagggaagctggtgagcaggaggagaaaagagaactttttaaaataggaattaagaaaataggaattcaagtcagagagaagacagaagatggtgggaggggtggacagggtctgagggctgagtgggaaactgcaggactcaggggaaggagggtccttgttacagccgggccagagctcctggtggagggagactcctggactgagggcaggatggtgccgcggagagtcttgcggaagaactgcttgggtcttcataaagggactattcaagcagcagatggctgcctgaaccatctgaccgtacaggccctttatactcatgaggttttacaattgtgagtttaggggtcggctccatttttgggaaggggagcattgaatggggctgggcacgaggaggcattcagcacatcagcagggctgggggaaaggaaggggcttgtggtgaaccggactgaggagggaggaccctccaaagttggcctgctgtcccctggggctccgcggggtggtgactgggggaaaagaggaaagatggccctccggacacagcaggaatggggcaggtggagaagagcctgaggagaagggagacaggggagggcggggtgcggggggagaggggagcgggaggtggcctttgtgagagacggagagctgagtcagagctgtggggggcagcggggagggagagagccgcggagaaggggtgaaagcagaggaggagggggtatccatggaaataaaccgggtctcagggaaatcaggcttctggagagtgagtttgtttgtaataataatacgaattattctctcagcctgaggtcaccgggaggtgtaggcgggagaaattgggagttggaaaggggaagaatgggggagggggtgggagagggccggatgaattcgctgagcggcgagagtggagtgggtgcctgggtgggggtcaggggcggtagccaggcagaagctggagggagaagatggattaggaggcgcctctcttccctccccgcgtcaaaggtaaataaagagccggccccgccccgccgg

SEQ ID NO: 14087 - DNA, 1000 bp, Artificial sequence
  DNA replication origin
ttctggagagtgagtttgtttgtaataataatacgaattattctctcagcctgaggtcaccgggaggtgtaggcgggagaaattgggagttggaaaggggaagaatgggggagggggtgggagagggccggatgaattcgctgagcggcgagagtggagtgggtgcctgggtgggggtcaggggcggtagccaggcagaagctggagggagaagatggattaggaggcgcctctcttccctccccgcgtcaaaggtaaataaagagccggccccgccccgccggcccccgctgacaggtgcaggcgggtccccggccgccgaggcagggccggccccaccctcccgggccgcgggctcccgacccctcccagcgcctcgaagcccccatctcctccccgcgtcccccagccccttccctccacccggccctggccctgtccctccgggcgtggaacccgggctcatcccgcccccgccccagagggaaaacgcacgtgaacaaagcgaatcggaggaggcaggaacgacagtaaaaggcaacggagagggagagagagatggggcaaagcacccgagccagatggaggcggcggcggggggtggcgtggggggcgtgcgaaagaaactcggggctggcgcggaggccgagggtccttcgcggggggctgctccggagtgggggatgcgaggaggcgctggggacggcggagcagaggcggatggcctggaggggcagggatgaggggaccgagcgtcgggccgagaggcagaggagaggagggcgatggagaggatggagaggaccgcgcctgcgggagggcgacggggagaaggaagcgagccgagcgggatggcagccccggaggcgcaagacgagagcgggcaggaaggagggacagagggaccgcgggcggacggaaggaaagtgaaggagctagcagggcaaggcgggtgcggagcggggcgcccggaggcgcgaggagagggatgggggagggg

SEQ ID NO: 14088 - DNA, 1208 bp, Artificial sequence
  DNA replication origin
gcccagccctgcccccgcccggccgcggtacccacccacagtccgggagccgatgcagcccatggctccgggggccgcagagccgggccctcaccgactcggggcgcgcgccggggggagcaccgggagccgcgccgccgccccagccgctctgcagcgccgcggctgtctccgctcggctccgctcccccctcccctctccatccctccccacggcagctccgtcgccgccgccgccgccgccgccgccgccgcctggctcccccgccccggctcggctcgccgcggccggggagggggcggcccggggattggctgcgccccgcgcctccccgcccctgctccggccgtgccggggcgctccctcggggatctggggccgccgtcgccgcccccctcctcccgcccgtgccaagccccgctcccggggctctctcctggagaaccccggcttgggtttcaggagccgaggcacgaacccagggcctaccccgaggttctggttgatggattttgcgggccggggtcaggggatgccctgagagaaagtggggtggtggtgagaataaagccaggcccaagggcctttggccaccaaattccgcaaacacttgttttcctcctggggccgcatctgggacacacacaggaacgtgattggacacagctttgggctctgttgtttcgagtgcgctattttgtccatccaaacagaaggtgaagtctttgcaagtgaatcgtgtagtccacttctctgtgctcgctggacattcaggggtgggtgtggggatgtgcagatagttgacctccaggcctggttggggattggagaatatgaggaggacagttcattcgcagtagactaacaacaatgtcaggacccgaggctggctaggagacatcgtcttgaatccagtttaacttttctgagacgtgatcttctcggacaaatgaaagcaaggcggtcccgaagcagcaaagagagagaaagattggcctctggctagtgggactgggccaggtagatacctcaagccccatggggaggagatgaaggtctaagttgcaagggttaaatgagcactgtggttacagcaggtaagaagtggagtccagaaaagatgcatgagaaagggcaaggagacccttttgtctaaggtgtacccagaaagcccaaagtgtgagagagtgggcaggtgggcattcac

SEQ ID NO: 14089 - DNA, 1681 bp, Artificial sequence
  DNA replication origin
cggcgccgggtccgcagactctgcgtcccggtccggagcagcctccagccgggcggggagggacacacggaaggaggagggagggagaagagagggggcggggagagagcggcgcccagaccatacaaggagcggcccggagagggggcggggagagcggggaagggcggaccaggcaggaaactcccccaggaaggggccctgatcctgcctcaggccggaggctccgccgaggtccgctcgcccccaccccactcactgccgcccccgccgccccagcccggctcagacccccactccctgagcacaggcctctgatgtcatttcctgacctgcctccccctccccgcccgacccgcgggtgcccgagatctgactcaccgtccccctccgggcttagccggcggaggtggggcgggtgccgccgaggtagccacgcagcccctgtgcgcctccggcccggcccagcgacctcctctcgggcctgccgttacccggtcccctcctgccaccacccgctacccggccaccccgagtccgcctggggtggccgaacgtatggagctgggctccagggtgcacggggatggggggtgaggagcggggcgttctccctcccagcaccccccagctgactctgtgcccggagggggtgtgtgagccggaacctccagcattcttggggatacgaacttccaacgctgggcagcctcttaaggcttctaggaattcgcatccccagcgccccagccagcagatcggttgcgagagggaccgttcgggtccgcggggccgggaatggaggtgggagggcggggccgaggcggcggccgcctgcggactggagacccgggaggacggacgcggacgcgggctgctcgtcttttacggcccttcaacgcccaccacgacccactcctcttggagaccccgggcgacggtggggctcttgggcattctgagactgcgcttggtggagaccccgggcgacggtggagctcttgggcattctgagactgcgcttggtggagccccctactggccagactggatttctcagcctgcgactcagccccaggctacacgaaagaagccagacctgggtaattcttctagttctttttttttttttttttaattgcactgggaaacttccccaatctcggccccagttctttctccaaactaaggagtcatggcctttcgcccgctagtccagtatgcacccgtaggcgcttcattttctctcctcttgtcagcttttactgcctcctgaggccttcgtcttgttcacactgagtgtccagtccctccaaatccggctacactctactggcaaggagcacctgggccatgttttagagatcatccgaggactaaccccaaaagtttatgaagagaaagcagaggccgagctgaagagatggacccgggtcacacccaggtaaaggcaggatctaaactgaaactggtgtcagatctggttgccttgcacccctgatatcaggtgaagcaacactgggcaggatagagcagagtgaggtcagagtgtgaagatccagcctgatgcccaaactgacgcctcttcattctcccctgctccatctgtaaacgtcacggttaatccatctactttattgcattatatagagaaataaatgaaatgtcatagctgtatgcg

SEQ ID NO: 14090 - DNA, 1153 bp, Artificial sequence
  DNA replication origin
tctgggcgccgctctctccccgccccctctcttctccctccctcctccttccgtgtgtccctccccgcccggctggaggctgctccggaccgggacgcagagtctgcggacccggcgccgaggcggccacccgagacgcggcgcgcacgctccggcctgcggtgaggcgcggggagcggcagggcggccccacggggagggggcgcggggcgccgggagggggcgagtgggggtcaccaaggggagctgggaccgcctggggctcctgagcccggctccgcgctgcgtaacccggcgacccaccccagcagcccggcccggccatggcggccccccgcccgtctcccgcgatctccgtttcggtctcggctccggctttttacgccccgcagaagaagttcggccctgtggtggccccaaagcccaaagtgaatcccttccggcccggggacagcgagcctcccccggcacccggggcccagcgcgcacagatgggccgggtgggcgagattcccccgccgcccccggaaggtatgcggcggggcttggggaatgtaccccggcaggagccggggtggggggcagtcgtttcgggaatttggggatgtctggaaaggttgttgccgagggggctgggcgcagccaccctgtcccgagcagatgttcttacctcatcgtggagctcgtggctgggagccagggctcctgggaccgttccaagtcccccgcctgggagtgggagtcgggaatgtggggcacgaatcttcccctccgggtccgttttccgaagtgtaacgggagctgcaccactcctcggcagtgcgcccggcctttcctgacctggtactcccagggcgccctgcgcccctcctttgcttccccacacgctctgggacccctgagagagttcttgggttaggggttagagcggttaactgaggggagcttgggtgaggggtagagggaccccggccgacgtctttctccttcctaccccagactttcccctgcctccacctccccttgctggggatggcgacgatgcagagggtgctctgggaggtgccttcccgccgccccctcccccgatcgaggaatcatttccccctgcgcctctggaggaggagatcttcccttccccgccgcctcctcc

SEQ ID NO: 14091 - DNA, 1156 bp, Artificial sequence
  DNA replication origin
aagaatgggaaaaaccaaggtggaactggtgatctcatccctccctttaactttctggggtaaaggcacaaggaaaggtccaccagatcctcctaattcagagcccatgctctctgcgccgtcccagccaggccccacccagccccacacccagccaggcctctcctccagaggagcattttcctaccattgttccaccaggctaaccccagaggatgaaaattcctatcccgccaccccgcaacccccgtgtccaccctgactctccaatcaccttatgcttatgctctggctcctgacccagccccgccccagtgccctggtaccaagccttgtcctatcaccatccctcacctggttttggttctgagccggtgggggcacggggtgctgcttctcctgcactcggggcttctccctctgctgggcataggtgaagctgggaggttgaggggagcctgtgccagcagaaagagcttcggggtgccccaatttttgatttggttgtgacccagatccacctggggctccaggactgaacttggaagccacaggagtaaacttaggagtcactggagaaaacttaggggctggagccggagatgaggctgggggccctcggggctgggtgttagccaaagacacaggctgggtctgggactggacatggagttggacctgaggcttgggctggggctggggctgaacatggaactgtgtctggctctgagccggagccggaacctggggcagaggctgggagctggaaggggacttccaaggaggcaggggtgctgtgcccccggctgcaggcttggtactggacttggaactgaatggagtggccactggtgggggcacatatccagatgacacctgcaaggggtgggagagggaagagagatgcagtcaggaggacaccatcctccttagttctatgcccagtctctctggccctgagccctgcttttcctactctccggtcccttacccgggctttgaaaggatcattcttggtcatgtcatccagcagtgaggacagagagtcgatctccaaatcaatactgctcaccttctccctgggctagagggtcagaggtcagagcacctattccatgcctctatccccccacccccaaggcagaggtgcagggga

SEQ ID NO: 14092 - DNA, 1573 bp, Artificial sequence
  DNA replication origin
tggttcttgccttctagttcaggaaataagatcgtccaatttctggtgacgaagatgaccctgatggtcatctagtccaagcatccagagtccactgatagtgttgatgtctacctacactcggacacagcataggaagaaatgccaagggccagtgagctttgcagaatcctgtgagtcacaggcactcagaccagggagtcaactcggggagtcaaattaggaaaggcttcgaaggatgggcaggacgtaagaatccagagaggagagggatgtttggagaacagaaagtggaaggttcctgtaggaaaatgatagagctatacttggagaggcaagcggggctggagggtgtaggaggtgaagtggctcacccaaggagctcttgagcactggagaggcattcatgatttttgagtaggtgtggggtgggtcaggagggctggtgaaagcagtgtttttggaagctttctggaaagtttcaccagcagagatgtgtattcgagggaggtcagtgatgggtgtgaattcactcttgggcaatagtaatgttagctgcaatgaaaattaaaccgtgcatgtgagagctgtgtgctagagctgttgggaaggcacagcctccaggacttagcaagggatgagcaattggaagacaagggtgaggggaagagggaaaaaaaagtctccagcacgatttggagatggggtgtgggcggatggcaggattgctgacaaaatagagaagtccagaaggggaaatggtttggacgggaagaggaggggtccagctgtcaacgttttgagcaacaggtcccaggaggactttcagctggggccgtcattcagctagaaatccagggctaggtttcaggagagggccagagatgtctagcatggtagtggggcacagtgacactgtgacgctggagggtcagggtcggagcggaggagcttcccagggagtgcagacagcggggaccaggaggtgcgggaagaagagtcaggaggagagtcagggtgcacttggagaagagagctgagctcctcagtggggtatttgagggagtgaggactcaaggctagagattagactgttgggaaatcatcagcggtcttgggatggcctgtttgtgccctgtggtgggaacacaatgtgaggagttgaggagagagtgggtggtgagaagtggggctgctggtgtagcctggtcttaaaggactaagggaaggactgtgtgtcagtggtgtgtgtgtgtgtatatatacacatatgtgaatatatgagtggcgtgtgtgtgtgtgttagtgtgtgggtgtgggtatggtgtatgtgagtgtatgtgcatgtgtgagcatgaatgtatgagtggcgtgtgatgtgtgtagtgtgattgtgtgaaagtatgtgtatatgagtacatgtgtgcatgtgtgagtgaaggtgtgtgcatgtgtgagtgtggctgtgatgtgtatggtgtgtgattgcacaagtgaaggtgcacatacatactttcttacaaatacacacaagtggcgtatgtgtatatatgtgagtggtgtgtgtgagcgt

SEQ ID NO: 14093 - DNA, 1995 bp, Artificial sequence
  DNA replication origin
gagcatgaatgtatgagtggcgtgtgatgtgtgtagtgtgattgtgtgaaagtatgtgtatatgagtacatgtgtgcatgtgtgagtgaaggtgtgtgcatgtgtgagtgtggctgtgatgtgtatggtgtgtgattgcacaagtgaaggtgcacatacatactttcttacaaatacacacaagtggcgtatgtgtatatatgtgagtggtgtgtgtgagcgtgtggtgtggtatatcttttttttttttttttttttttttttggagacggagtgcaggctgtcgcccatgcttactacaacctccgcccccctggctcaaacgattctcctgtctcagcctcccaagtagctgggattacaggcacgttccaccacacctggctaatttttgtattttttagtagagatggggtttcaccatgttggctaggctggtctcgaactcctgacctcaagtgatctgcctgcctcagcctcccaaagtgttgggattacaggtgtgagccaccgcgcctggcctggtgtggtattatctgaatgtgagtggtgtgtgtgtgtgtggtatggtatatgtgtgagtgtgtgtgtgtggtgtggtatatgtgtgagtgtatgtgagtggtgtatgtgtgtggtctggtatgtgtgtgtgcatgtgagtggtatgtgggtatgtgtgagggtgtgtgtgtttgagtctgtggtgtagcatatgtggtttttgcaagttaggggagaagggctcaggtacgtgtgtaacccggggaagcaggtgatggagggtgagtgttgtgggagagcaggggcaggctgcttcggtccctggaggagatcttggtgatgtctcctcccccagaggcataccagacagcaaggacagagtggttgcagcgtggataggaaggacgatgagggagcttaagctggctggcttccatgtcctcaaccatgtgggaggtgaggtcacggtgcgagcaaagggacgaagcaggtgggggctcaggagatggagaggtctggaacggctgctgtggggaaggctgggctggaggtcgcgcgggtgctgcagtgttgtgagctcacgctgcagtgttcagtgatctctccactgctttctgcagcttggaagcagaaacaggaagagggtggtggtgtgacttggggttggagactgggccggatagctgcgggtggctgcaggtgcccggagggacagtgaaccctgtaggagttagatggtcatgggaccaggctggggcatggtggacaaagtccaggggtgggttgcgggtgggggcaactaaggcttttctgggttcatgtagtaggtgtggatggggaagaggagaggcagataatggctggcaagagacttggaggtaaatctgaggtcaaggatgtcccatgatggatgatgactgagatggacggaagtttggtttgaagcggtggcattggtgcaggctggcagagggggcagttctggatagagtgtcctgatgaatggggatacccatgggaggtgatgcagatgaggattctgtgcttctgaaggaggagccaggcatttagaatggcactggagagcaaggactgactgagccccttcactgtgtccccaagaggccaggaagggaagattggaggagacaaagttgaagtgagtgttccagggaacgagtcagttaagagatggtaggatcttaagggaagatggctaagatcttaagggaaaatggctaagatctggagagttggacttatatggacgcatgcttcactgggcagaaaggacgcaactctgggtacagatgggggtcggggtgaggggcagtgaagccagggctgaggggagaggggctatgggaggaggtagcaggggggctttggaggttccaggtgttatgggaatgaaggcatctgcaggtagcacactcagtgatggggccacagtcctgggtaggcttttccagacatagaaaagacccaccc

SEQ ID NO: 14094 - DNA, 980 bp, Artificial sequence
  DNA replication origin
tcaggagttttccaagatccttccctcttccgacacttaccccatcttttgggggatccagcagccagcccagctctccctgtgccttgcttgtgtccatcagagtaactgaaagtggggagaaaagaagtctgtcacctctgggggaggaggtgcccctgcagcccacattaatcattctggggcctcagccccaggctgcaacatcctgttcctaaaagctgtgacttcctgaggcttaggggagaaaaagggctcaggactgaggagtgaagagctccagggatttcactcttctttgtgtgtgtgaaggaaggcaggtagagtgggacaagggttggggcgctgggtctttgaccaaagtcaatgcaagaagagcagccccacgagacgctcagttacccaggctgctgcgtcctgggacacccatcagctgcaggattggaacgcgtggagggcaggaggagctcacctctgctagccaggagtgggcagggtggaccggggacctcagaaggggtttcctgggtagggaggctcacctccactgtccgaagcctgctttggcctgacctggccagtgatcagagccgtgaagtggggataagaggcacagctacctgcctgggaagtgggggggagtaaggccggagagggtgttccaactttcacatggaatattcgactcggacaactgggaacccctgtggcgtcagtcctaacccttctcccggaggcagctccctctgtccctggcctaggttggcaggaggcgacttcccaccttcaacttccaagggctcagatctctggggtgggcacctgaagctgggactgtctgggaatgcaggcaggggtgcgggtgcaggtgctacttcctggcaagggtccggaattccctccccactcccaggagcagattgctggcctgcgggagtgggggtgactgacccgggagagcagccgcttggggttaaaga

SEQ ID NO: 14095 - DNA, 1524 bp, Artificial sequence
  DNA replication origin
cggaattccctccccactcccaggagcagattgctggcctgcgggagtgggggtgactgacccgggagagcagccgcttggggttaaagaccaaagatgggcctggccagtcgatagcctggcggtcgggcacagcgagagagctggcgagggtctcggggaacatggcccctaggaatgccggcttctgcaggggggtgctggccgggccccgggaaggggcggggcgcgggggttgggggcgcgggggcgggggtcggtaccttccttggcgcgcgcccccgggggcagcggggcgcagagcagcagcaccagccctagccccaggggccagcgccgctccatagctccgggccgggacctgggacagtggcccggatggcagcgccaggttgcaagggactaggagagccgggcgggccgggcgggggcggggggcggggccagcgccgggggcggagtcccggcctcacctggttcacctccttaaagggacagtagggcaggaaagaaacttgctagactggtaatcaaattcaagaaccggaggcgtcttgacccgaatgagactgcgggcgccgcctagtaggtgggattaagaattgacgaaccttttcccaattctaatcctaaactcaacccaatcttgatccagcttttaacctaattctacctctgacttgaattacactcctatattcctctttctgtctttgtgcaggccccagagctgggtaatagggccggggaaggcaaggggtaagagtcatatcttcaccctctagcaggggaggcttagatgaccacaatgcaaggtggggtacaacctgcagtgaagcatctggagattagaagaggaagcaagcccagtcatcggggcacattagttgagtcttcagggagagctggtgtgacctgggttttcagtggcagagattgggaaaggcaccagcaagggcctgaaggcagggagcctcaaggtgcgcccagggagtggtgaatggaccagtttgactgctggggcgcaggatttgtcttgggaatcagggcagaaaggcaggtgtgggccagggctgggtaaacaagaaaaggagtttgaaccttgacatgcacttacacagcagacatgaatatctggttaaggttccagccacaggtggcagggaaggatattttaacccatcttagtggtgtcaaaccacgtgccctctcactttcttgcggacttccttatattctttttcttttttgagatggagtctcgctctgtggcccaggctgcagtgcagtggtgcaatcttggctcactgcaacctccgcctccctggttcaaacgatcctcctgcctcagcctcccgagtaactgggatcacaagcgtcaagcgtgcaccaccacacccagctaatttttctatttttagtagagacggggtttcaccatgttggccagcctggtgtcgaactcctgaccttaggtgatccctcctgatctcaagtgatctccctgcctctgcctcccaaagt

SEQ ID NO: 14096 - DNA, 1444 bp, Artificial sequence
  DNA replication origin
aaggcgcaggtggaggcggccttgccccggcctttggggcagcgcaggcggcgcagggcggcggcgatggcgccataggaggccaggatgagcaccgagggcagcagcagcagcaccaggcaggcgcccagcagaggcagctcgtcggcgtagctccgcgtgcaggccaggtgcagcagcgccgtgatgtcgcagaagaagtgcagcagcaggcgggagccgcagaaaggcaggtggaagatggccaccgtgagccccacggacaccgccagtcccctgaggcagcaggccagagccagtcgcgcgcacagcccgggggtcaccacggccgcgtagcgcaacgggtggcagatggccacgtagcggtcataggccatggcggccagcaggaagcactcggccccgcccagagccacaaacatctgcatctgaaaggcgcagctcaggaaggagatagggctgcccctgcggtggccccggcgtgctcaggtcgaccagggagcggggcaccaccaccagcgtgtagcacagctcgatggctgacagctggcacaggaagagcagcatgggctgccggcttggcatcgaggccacggccaccaggatgagcaggttcccgcccagggtggccaggtgcacccccagcagcaaaaggaagagcacgggtctcaggtgcgggaattcggagaagccttgaaggagaaagccacagggcacggtggcattgctgggactgtccatgcacgagcccgcccacaggcacctgtagaagagaggcacaggagggcagagcttgtcgggtacgcatgctctggccctgcgcgtggaggaggagtcgggtggaaggtagaggctggaccaggaatggtggctgcagagaggtcgcaacagttcatgggtccattcccagcccaccacccccagtcctcctcacaaggaagtcttactgacttgttcagaaaaagagtgcagtttttgctgcctcctggacaagaattcctatagctgccctctcaacgtgctctttcaaaagaagcctgggttttagctcatgtgcctctatagtccagttattattttgtgggtcctatagggctgtgagtatagtgtctgctgcagtcttgagaccaccatggcaggaaatgtctttagttcccgcttctgtcttctcctgcctgccctgttctgtcatttctaagttgccttctgtgatgtatcacagaatcacaaaaacacaatgcaggtgagggccttagggatcatctcatgtaacttcctaattttaaggaggaaaataaagttcaggttggagggaaaggggattgttgaaggacgtattgctcacaggaagttaggaacggaatctgcattctgaggctgaatccaaaactttctatgacccaggtcctgaaaaaaggtcactcaggtcaagataatccacatt

SEQ ID NO: 14097 - DNA, 952 bp, Artificial sequence
  DNA replication origin
tactaatgtagagtcagagaagtttgtatctttaatgaaacagccgtccacactgccaggatggggtctccaggcgtccctaagccacagcaatgccaagccaccagggccggcgacacaaagaagcgctgtcccccgccaagcgccgccccctggagctcccactccagcctgggaggaagtggggaggaggggactcccgtggaaacccctcctctcctccagctccagcctcctccccgctcccaaatcccggctcggtcgcccagtcactggtacagggaagcctcttccctgtgcattcctctctgcgccaggctctgcccgctcccacctgcccccgtggaaatcgcagggtgacctggtgagtggccctctccaaaagcctggcaggctggagaaggggccagcaacggtggactcggcctgggtgctgcgggggggagggcagggcgggaggccggggcgggggtgcggggcgcgatgggtgcgccgtgggtctgggtgtgccgaaatcagaaatcatcggggacagagaatcccctttgtgtccgtatttctgctggtgattttcctctgcgcttgggtcccgcatccccctgccgcattgctcctcctctccaggttctgacatctgatgtttgtgtgtgcttgctttgtgtggttgagttacctgagggcctgacctagagaaccgcgtctaatccgctgctttgtcggatgagaaggcccggggcttgagcagggtcgcgggtagctggtgacagagcattacttgtggcctactgtcctactgccctttgatctttgtgaacactggctttgggactgagctctatctcccactggcactggcccctggagacttgagtgagcgttcgtgtgtgtgtgtgtgtgtgtgtgtgtttacgcgcatggaggagctcccctcctccctgccggctgcccccca

SEQ ID NO: 14098 - DNA, 2031 bp, Artificial sequence
  DNA replication origin
aggcgtccgaggacaccgtggggcccggctggctccctctgtctctgtgcgcgccccttccccgggtcaccccgcctgcgcccgacctgcgcccgcgcaccgcgccctcggggctccctgggacagcccgcggcctggcccgtgcgcccgggctcccctctccgccggcccggcacttcccagctctgacgcgggagcttctttcacaccaatggggctcgcgcgcggaggggccctgcccctcctccgggaaggtgtgtccctgtttcctcacctgaaacttcctaggagaacccgatccctccctcccgtcgggcggccaggggcgggccgcgggtggggcggccgggcctgcgctggggacggctctggggactgcggccggcgccgggacctggaggggacgctggggccgaagcagcatgtgacaccgaccaggtgggtgccctcctcccgtctcggccctgggctcccggcggctgtggagcccggcggaggtggggcagggacaggaaggaagaggaagccaggcctttcccagggatcagcccccgctgggtccggggcgcaggctccggaaatgggggggctgggcccgcaggcagggctcggggtgtgtggctgaggaccctggtggggaagaggagaggaactagaggaaatgttgttgcctacaagtttgcttccggtcgggtcccgcctaggaaatgggcaccctgcccccagacgttccccgggccaataatcagggctctttcttcaaagtaggcgccctggggaaagctaagccatatcagaaggaataactgagattccctttctaggctgttccttacctggagaggttttatcggctccttttccttaaccaggccggggcctttccttatgtatctccataggtatttgcatactgtgtgagtctatgtgtagcttctctccgtgttaaccaaagctccgtaacctggaacagtgaatcctgccctgcccctcaccccagttccctacatatggggagcctcctaaagcttgatgtgaatcacaacgttgcattcttagcaaggtggaaagaagttatttagagttgggggctgaggtaggcgttggggtgctagaatgcggacgcagagctctagaacccctgagcatcttttgcagttgccttccggcaagactaccggaggagagccagttgtgatactacgtcatttccagatctcagtccctttcttcccttcctggatcttgggttccaaagacagatttgccctcctgtctacctagaagtgaactctggccaggactcttgtctggttgagagagaagggtgtgtcaaacagatgagagagggtggttttcctttcgagcttcctccctagcttgctcccctactgcactccactgtctggccttgcatcttgggcctaatccagaggtcccagctccagctaaaaagctcttgatgtggcctctgtctcagacgtcttgttttatccacatttggagcatgaagaagttcctggcataggccttagcaaaatgggtgtcatttgttaaccaatctgtgggcctaaaagtgaagccatggctagtgaaggagtcctggggagctgggaagatgggatgagggcgtgtcagttctgggtgagactgatatgcaggaggaatgtatgtcatggtcctagtggggaggagagagaaatcaggaggagtgcaaaggaatccctctcatcaacagaatatagtgattctcaatagagagaagagtgttcatatattagaggtcctgagagtgtatcagtgcccttaacgcggtctgtctgaggttccgtggccacgttacacgtggtgtctgtgggatagacaggaatacgtcatttgtggtgtctggagaggtcagtcgctatgtggtatggacaggaatggagtcactcgtagggtcttgggttcaacgggagcagcattactcaagtgtcagtggtgtagacaaacaggtgaccaacagctctagtgtagacaggggctgggtca

SEQ ID NO: 14099 - DNA, 1547 bp, Artificial sequence
  DNA replication origin
acccagcgggggctgatccctgggaaaggcctggcttcctcttccttcctgtccctgccccacctccgccgggctccacagccgccgggagcccagggccgagacgggaggagggcacccacctggtcggtgtcacatgctgcttcggccccagcgtcccctccaggtcccggcgccggccgcagtccccagagccgtccccagcgcaggcccggccgccccacccgcggcccgcccctggccgcccgacgggagggagggatcgggttctcctaggaagtttcaggtgaggaaacagggacacaccttcccggaggaggggcagggcccctccgcgcgcgagccccattggtgtgaaagaagctcccgcgtcagagctgggaagtgccgggccggcggagaggggagcccgggcgcacgggccaggccgcgggctgtcccagggagccccgagggcgcggtgcgcgggcgcaggtcgggcgcaggcggggtgacccggggaaggggcgcgcacagagacagagggagccagccgggccccacggtgtcctcggacgcctccgaaatctccctgcgtgtttgtttcttcggagcttcaccggagcctgactctggaaccggcctgtctgcctgctgcagtctgtatgtgtttgtcttttgccttggccgtgcctctggaagtctgacatccgtggttgtacatgtgtctttatcttcaggcctcattggtttttggtttgttcgttgttgttgttgttgttgttttttctgagacggagtctcgccctgttgcccaggctggagtgcaatggcgcgatctcggctcactgcaacctccgtctccgggttcaagagattctcctgcctcagcctcccgagtagctgggattacaggtccgcgccaccatgcccggctaatttttgtattttttagtagaggccgggtttcgccatgttggccaggctggtctggaaactcctgacctcaggtgatgcacccgcctcggcctcccaaagtgctgggattacaggcgtgagccaccgcgcccggccaaggcctcagtgttgatttctcttccgtgatgtctcctcctatagaataaagagtgtctcctccatctcctcctccgcccccttcttcgtttctctctctctctccctccctcctcccccctccctgtccctctccctgcctcttcctctcccctcttccttctcctacttagggcctagaagtgtgcctctctgaaaggacatgcccgtgtccttctgtattcccgagtttattttagaatgagtgcgtatctcagggtgtatgttccttctagggcctgtgtgtgtgtgtgtgtgtgtgtgtgtgtgtgtgtgtatttaaatctctaagcccatgtttgtgtgttttcttatgcctgtattttttttttattctttcagggaaacgttttgttctgttagtcttggaggccaaggctgagtgggtttatctctgtgcccctccagtgacttcaaagaatgccaaaagtctctcgagtgtgcctgtgtgcaca

SEQ ID NO: 14100 - DNA, 597 bp, Artificial sequence
  DNA replication origin
ggaagaaatgattgggggctggtgaatggagaagctcagggaccacattttagcagcaaatatttccaagcaagcaggcagtgggcagcagggagacaggatgtggacacctggcagaagaatggttggtcctttgttgtgggtcttcctgagggcatccctttgagttaaggggagaggatcaaggtagcatctgccctacctggagcagcagtttgaggcgggtgatgcgttggaagggcagaatcagaaaggacttgagggaaaggcgctggcagacggggtcgctctccagcttctccaagacctcccggaaattgctgttgctattcctgcacggagagtgagccttaggggaggggggatatggggagcaatgggggatgcagtgaaggtgcggggaagggaggtcagtggagtatctgtgggctgggaaagagcggtgggagctgatgtacagggcgctcagatgtgatgctggggtaaccaatacagagggcggaatggggaaagtgtgctcttgggatagccctctgggctggggactggtgcatggtcacctcagggcctacatggggattaaatgggggatgagtc

SEQ ID NO: 14101 - DNA, 1575 bp, Artificial sequence
  DNA replication origin
cactgctgtcccctggtggcctccctgagtcccgcctgtggggccagctggacgccttctccaggtgcagatggctgggtttttctggctgccttgcttggcccacaggtgacctccctgggccactggctccttgctgaggggttgtccttctcaaaggttctctcgcaggggcctcagggtgttctgagacccctgcttcatccttagaggtgggtccctggagctccggagtccagggagtggtaggggaagaggggcataggaagtttgtcatgttgctgaaagccatgccaggggacacttcgctcttactcctgctggtggaagtgaaagactctgttgatctagctgtggccgggggccaggaggtgcgtccagcagaggcagggagggggactgtccagtcttgacaagcaggtcttgttttggcatgaccccctgagttcatatgtcctccccaagtgctcctgctcctccccctggactttgggggcaatgggggtggttcggtgggagggtctatgatgggtagtgggggtagaggcctgtagatccttgagctaccaggagcagaaatgggaggaaggtggggctgcggcaaatcaggggtagggggtagcggcttgttgtatctccacctgggggtggcctgagcatggtgggagctgtctggggtagatggcagaggtcggtgctgcctggccacagcggggtcagaggcttggggaagtgggcctttatggggggcatgcagccctgaacctagggccaatggaggagggtggctatgctgcttcagcgtgggaaccactacacgagcatggccatctgtctccaccacggagggatgggtgtccctcctctgtgggggaggagggggcagaggttcgtggatcctcacatcctccatggagacaaaggatggggaagaaccgtaggcgggagactctgtggcaaaggctggattatgtggggagacccagggctggatgctgggaggactgctgggtctctctagatttgagatggattcttgagagtcctgcttcagcgtggataaggcagtaggggatgctgaaacggtgctgtagtccctaccactccttctgtcccttcttggggtcacagagctgtagatggcaggtttggggggcctctggggcagctctgagtgggagtaggaaagcaacattcccaccaggtctggagtctgctctgtcctgtgagaaccagggaaggagtcactccgtaagtgctggacggtgcctgtggagttggctgggggcctcggagggctggtcccggtggaggggaagccatagagggcagccgggcacatctcagaagtcccacagggagatgggtcatccattgagagaggggcactggcagtttctggagcacgtgcagcacaagaggtttccctcctgggaaaggcaactgggggcctggcagataccgaggcaggtgtgatggggtaggcttcagcaggactgggaggagctgaatctggtgtccttggaggagtcacagatgcactggcaaagaccacctcagtcccttggctggaca

SEQ ID NO: 14102 - DNA, 1267 bp, Artificial sequence
  DNA replication origin
aggcgtccgaggacaccgtggggcccggctggctccctctgtctctgtgcgcgccccttccccgggtcaccccgcctgcgcccgacctgcgcccgcgcaccgcgccctcggggctccctgggacagcccgcggcctggcccgtgcgcccgggctcccctccccgccggcccggcacttcccagctctgacgcgggagcttctttcacaccaatggggctcgcgcgcggaggggccctgcccctcctccgggaaggtgtgtccctgtttcctcacctgaaacttcctaggagaacccgatccctccctcccgtcgggcggccaggggcgggtcgcgggtggggcggccgggcctgcgctggggacggctctggggactgcggccggcgccgggacctggaggggacgctggggccgaagcagcatgtgacaccgaccaggtgggtgccctcctcccgtctcggccctgggctcccggcggctgtggagcccggcggaggtggggcagggacaggaaggaagaggaagccaggcctttcccagggatcagcccccgctgggtccggggcgcaggctccggaaatgggggggctgggcccgcaggcagggctcggggtgtgtggctgaggaccctggtggggaagaggagaggaactagaggaaatgttgttgcctacaagtttgcttccggtcgggtcccgcctaggaaatgggcaccctgcccccagacgttccccgggccaataatcagggctctttcttcaaagtaggcgccctggggaaagctaagccatatcagaaggaataactgagattccctttctaggctgttccttacctggagaggttttatcggctccttttccttaaccaggccggggcctttccttatgtatctccataggtatttgcatactgtgtgagtctatgtgtagcttctctccgtgttaaccaaagctccgtaacctggaacagtgaatcctgccctgcccctcaccccagttccctacatatggggagcctcctaaagcttgatgtgaatcacaacgttgcattcttagcaaggtggaaagaagttatttagagttgggggctgaggtaggcgttggggtgctagaatgcggacgcagagctctagaacccctgagcatcttttgcagttgccttccggcaagactaccggaggagagccagttgtgatactacgtcatttccagatctcagtccctttcttcccttcctggatcttgggttccaaagacagatttg

SEQ ID NO: 14103 - DNA, 1398 bp, Artificial sequence
  DNA replication origin
cgggggctgatccctgggaaaggcctggcttcctcttccttcctgtccctgccccacctccgccgggctccacagccgccgggagcccagggccgagacgggaggagggcacccacctggtcggtgtcacatgctgcttcggccccagcgtcccctccaggtcccggcgccggccgcagtccccagagccgtccccagcgcaggcccggccgccccacccgcgacccgcccctggccgcccgacgggagggagggatcgggttctcctaggaagtttcaggtgaggaaacagggacacaccttcccggaggaggggcagggcccctccgcgcgcgagccccattggtgtgaaagaagctcccgcgtcagagctgggaagtgccgggccggcggggaggggagcccgggcgcacgggccaggccgcgggctgtcccagggagccccgagggcgcggtgcgcgggcgcaggtcgggcgcaggcggggtgacccggggaaggggcgcgcacagagacagagggagccagccgggccccacggtgtcctcggacgcctccgaaatctccctgcgtgtttgtttcttcggagcttcaccggagcctgactctggaaccggcctgtctgcctgctgcagtctgtatgtgtttgtcttttgccttggccgtgcctctggaagtctgacatccgtggttgtacatgtgtctttatcttcaggcctcattggtttttggtttgttcgttgttgttgttgttgttgttttttctgagacggagtctcgccctgttgcccaggctggagtgcaatggcgcgatctcggctcactgcaacctccgtctccgggttcaagagattctcctgcctcagcctcccgagtagctgggattacaggtccgcgccaccatgcccggctaatttttgtattttttagtagaggccgggtttcgccatgttggccaggctggtctggaaactcctgacctcaggtgatgcacccgcctcggcctcccaaagtgctgggattacaggcgtgagccaccgcgcccggccaaggcctcagtgttgatttctcttccgtgatgtctcctcctatagaataaagagtgtctcctccatctcctcctccgcccccttcttcgtttctctctctctctccctccctcctcccccctccctgtccctctccctgcctcttcctctcccctcttccttctcctacttagggcctagaagtgtgcctctctgaaaggacatgcccgtgtccttctgtattcccgagtttattttagaatgagtgcatatctcagggtgtatgttccttctagggcctgtgtgtgtgtgtgtgtgtgtgtgtgtatttaaatctctaagcccatgtttgtgtgttttcttatgcctgta

SEQ ID NO: 14104 - DNA, 1066 bp, Artificial sequence
  DNA replication origin
accggagcctgactctggaaccggcctgtctgcctgctgcagtctgtatgtgtttgtcttttgccttggccgtgcctctggaagtctgacatccgtggttgtacatgtgtctttatcttcaggcctcattggtttttggtttgttcgttgttgttgttgttgttgttgatgttgttgttgttgttgttgttgttgttgtttctgagacggagtctcgccctgttgcccaggctggagtgcaatggcgcgatctcggctcactgcaacctccgtctccgggttcaagagattctcctgcctcagcctcccgagtagctgggattacaggtccgcgccaccatgcccggctaatttttgtattttttagtagaggccgggtttcgccatgttggccaggctggtctggaaactcctgacctcaggtgatgcacccgcctcggcctcccaaagtgctgggattacaggcgtgagccaccgcgcccggccaaggcctcagtgttgatttctcttccgtgatgtctcctcctatagaataaagagtgtctcctccatctcctcctccgcccccttcttcgtttctctctctctctccctccctcctcccccctccctgtccctctccctgcctcttcctctcccctcttccttctcctacttagggcctagaagtgtgcctctctgaaaggacatgcccgtgtccttctgtattcccgagtttattttagaatgagtgcgtatctcagggtgtatgttccttctagggcctgtgtgtgtgtgtgtgtgtgtgtgtgtgtgtgtgtatttaaatctctaagcccatgtttgtgtgttttcttatgcctgtatttttttttttattctttcagggaaacgttgtgttctgttagtcttggaggccaaggctgagtgggtttatctctgtgcccctccagtgacttcaaagaatgccaaaagtctctcgagtgtgcctgtgtgcacacacagacacacacaaagtaggaatcctttacctgggggacagagatttctgttatttttggttgaatctgaccactccccaaagcca

SEQ ID NO: 14105 - DNA, 914 bp, Artificial sequence
  DNA replication origin
acccagcgggggctgatccctgggaaaggcctggcttcctcttccttcctgtccctgccccacctccgccgggctccacagccgccgggagcccagggccgagacgggaggagggcacccacctggtcggtgtcacatgctgcttcggccccagcgtcccctccaggtcccggcgccggccgcagtccccagagccgtccccagcgcaggcccggccgccccacccgcggcccgcccctggccgcccgacgggagggagggatcgggttctcctaggaagtttcaggtgaggaaacagggacacaccttcccggaggaggggcagggcccctccgcgcgcgagccccattggtgtgaaagaagctcccgcgtcagagctgggaagtgccgggccggcggggaggggagcccgggcgcacgggccaggccgcgggctgtcccagggagccccgagggcgcggtgcgcgggcgcaggtcgggcgcaggcggggtgacccggggaaggggcgcgcacagagacagagggagccagccgggccccacggtgtcctcggacgcctccgaaatctccctgcgtgtttgtttcttcggagcttcaccggagcctgactctggaaccggcctgtctgcctgctgcagtctgtatgtgtttgtcttttgccttggccgtgcctctggaagtctgacatccgtggttgtacatgtgtctttatcttcaggcctcattggtttttggtttgttcgttgttgttgttgttgttgttgatgttgttgttgttgttgttgttgttgttgtttctgagacggagtctcgccctgttgcccaggctggagtgcaatggcgcgatctcggctcactgcaacctccgtctccgggttcaagagattctcctgcctcagcctcccgagtagct

SEQ ID NO: 14106 - DNA, 2036 bp, Artificial sequence
  DNA replication origin
cggaggcgtccgaggacaccgtggggcccggctggctccctctgtctctgtgcgcgccccttccccgggtcaccccgcctgcgcccgacctgcgcccgcgcaccgcgccctcggggctccctgggacagcccgcggcctggcccgtgcgcccgggctcccctccccgccggcccggcacttcccagctctgacgcgggagcttctttcacaccaatggggctcgcgcgcggaggggccctgcccctcctccgggaaggtgtgtccctgtttcctcacctgaaacttcctaggagaacccgatccctccctcccgtcgggcggccaggggcgggccgcgggtggggcggccgggcctgcgctggggacggctctggggactgcggccggcgccgggacctggaggggacgctggggccgaagcagcatgtgacaccgaccaggtgggtgccctcctcccgtctcggccctgggctcccggcggctgtggagcccggcggaggtggggcagggacaggaaggaagaggaagccaggcctttcccagggatcagcccccgctgggtccggggcgcaggctccggaaatgggggggctgggcccgcaggcagggctcggggtgtgtggctgaggaccctggtggggaagaggagaggaactagaggaaatgttgttgcctacaagtttgcttccggtcgggtcccgcctaggaaatgggcaccctgcccccagacgttccccgggccaataatcagggctctttcttcaaagtaggcgccctggggaaagctaagccatatcagaaggaataactgagattccctttctaggctgttccttacctggagaggttttatcggctccttttccttaaccaggccggggcctttccttatgtatctccataggtatttgcatactgtgtgagtctatgtgtagcttctctccgtgttaaccaaagctccgtaacctggaacagtgaatcctgccctgcccctcaccccagttccctacatatggggagcctcctaaagcttgatgtgaatcacaacgttgcattcttagcaaggtggaaagaagttatttagagttgggggctgaggtaggcgttggggtgctagaatgcggacgcagagctctagaacccctgagcatcttttgcagttgccttccggcaagactaccggaggagagccagttgtgatactacgtcatttccagatctcagtccctttcttcccttcctggatcttgggttccaaagacagatttgccctcctgtctacctagaagtgaactctggccaggactcttgtctggttgagagagaagggtgtgtcaaacagatgagagagggtggttttcctttcgagcttcctccctagcttgctcccctactgcactccactgtctggccttgcatcttgggcctaatccagaggtcccagctccagctaaaaagctcttgatgtggcctctgtctcagacgtcttgttttatccacatttggagcatgaagaagttcctggcataggccttagcaaaatgggtgtcatttgttaaccaatctgtgggcctaaaagtgaagccatggctagtgaaggagtcctggggagctgggaagatgggatgagggcgtgtcagttctgggtgagactgatatgcaggaggaatgtatgtcatggtcctagtggggaggagagagaaatcaggaggagtgcaaaggaatccctctcatcaacagaatatagtgattctcaatagagagaagagtgttcatatattagaggtcctgagagtgtatcagtgcccttaacgcggtctgtctgaggttccgtggccacgttacacgtggtgtctgtgggatagacaggaatacgtcatttgtggtgtctggagaggtcagtcgctatgtggtatggacaggaatggagtcactcgtagggtcttgggttcaacgggagcagcattactcaagtgtcagtggtgtagacaaacaggtgaccaacagctctagtgtagacaggggctgggtcact

SEQ ID NO: 14107 - DNA, 1630 bp, Artificial sequence
  DNA replication origin
gcaagatggaaggtctgcgcaggccctgccggctccagcccttgtgcttgttggccccctcactaggagccacagcctgtccactgctgtcccctggtggcctccctgagtcccgcctgtggggccagctggacgccttctccaggtgcagatggctgggtttttctggctgccttgcttggcccacaggtgacctccctgggccactggctccttgctgaggggttgtccttctcaaaggttctctcgcaggggcctcagggtgttctgagacccctgcttcatccttagaggtgggtccctggagctccggagtccagggagtggtaggggaagaggggcataggaagtttgtcatgttgctgaaagccatgccaggggacacttcgctcttactcctgctggtggaagtgaaagactctgttgatctagctgtggccgggggccaggaggtgcgtccagcagaggcagggagggggactgtccagtcttgacaagcaggtcttgttttggcatgaccccctgagttcatatgtcctccccgagtgctcctgctcctccccctggactttgggggcaatgggggtggttcggtgggagggtctatgatgggtagtgggggtagaggcctgtagatccttgagctaccaggagcagaaatgggaggaaggtggggctgcggcaaatcaggggtagggggtagcggcttgttgtatctccacctgggggtggcctgagcatggtgggagctgtctggggtagatggcagaggtcggtgctgcctggccacagcggggtcagaggcttggggaagtgggcctttatggggggcatgcagccctgaacctagggccaatggaggagggtggctatgctgcttcagcgtgggaaccactacacgagcatggccatctgtctccaccacggagggatgggtgtccctcctctgtgggggaggagggggcagaggttcgtggatcctcacatcctccatggagacaaaggatggggaagaaccgtaggcgggagactctgtggcaaaggctggattatgtggggagacccagggctggatgctgggaggactgctgggtctctctagatttgagatggattcttgagagtcctgcttcagcgtggataaggcagtaggggatgctgaaacggtgctgtagtccctaccactccttctgtcccttcttggggtcacagagctgtagatggcaggtttggggggcctctggggcagctctgagtgggagtaggaaagcaacattcccaccaggtctggagtctgctctgtcctgtgagaaccagggaaggagtcactccgtaagtgctggacggtgcctgtggagttggctgggggcctcggagggctggtcccggtggaggggaagccatagagggcagccgggcacatctcagaagtcccacagggagatgggtcatccattgagagaggggcactggcagtttctggagcacgtgcagcacaagaggtttccctcctgggaaaggcaactgggggcctggcagataccgaggcaggtgtgatggggtaggcttcagcaggactgggaggagctgaatctggtgtccttggaggagtcacagatgcactggcaaa

SEQ ID NO: 14108 - DNA, 1036 bp, Artificial sequence
  DNA replication origin
ctgagtcctccatagggtgtgggtgagccccacggctgggcccagccccccgaagaccaccgggtagcctcgctcccgcctcccaccccagcctcgccctccagccccgccacgggaggggccgcctgaaggagacccgcacctgggcctgggctcctggctggggggagcggagcaggcggcgcccaggcccgggtcctccccgccctcgcagctgccccagccgagcctcccgggccggcctcgccctgggggtgggggtgggggtgagggggcgcagcctcgggctacggctcccccggcccggcccggcccgtgcgggctgcacacctgcccgcccggcgaggcttcattaggccgcgcctgtgcatcacgggccggccgcggcggcgggagtccaggccatggaacccacagagaatccctgccagggaccgctgggtgagtgtggagaccccgtcgtgcgagggggtcaggctttgggggttcggggagggggggaggcctgtgatcaccaggtcagcgttagccgacctaagagcttcagtaggccgagggccgggtggagtcgggtggggtagggtgggaggaggccgacctcactgccccctgtgctttgggattgcaacccccctccccgctcccccgcgccccctgcccgcctccagtctcccagcgcgcaggggagagaaccctgggagccccaggacccttctagtcttaggtctgacacccgtccccttcttactagcgcacatcactcccataggacacgtgcttacggagcacccacagtgctgggtaccaggctttttgctacagtacaagctctcctaaaatgctgtaaaacaaatttgtccctgcttccccacaccaccagccagctttgtcccttcactccatagaggcctgctcaccctcttcaccagcccagaccctctcatgcaagtcgggtccagcctgtgtcctaggaaaggacttggaacagcacccttgaccatgacctttttccttgacactctgttacaaagtcatt

SEQ ID NO: 14109 - DNA, 1078 bp, Artificial sequence
  DNA replication origin
gcccaggcccaggtgcgggtctccttcaggcggcccctcccgtggcggggctggagggcgaggctggggtgggaggcgggagcgaggctacccggtggtcttcggggggctgggcccagccgtggggctcacccacaccctatggaggactcagtcctggatcgtggctaaagcccttccctgtggactgtggaaggcgatttctagagccactcctcaaaggggaagcgctgggttgcccaactcccatgctagggcccctccaagcctcagtattaaggagcttcaaagtccccttcctgattttgtttgtttttgtttttgagacggagtcttgctctgtcgcccaggctggagtgcagtgggggatctcggctcactgcaacctctgcctcccgggttcaagcgattctcctgcctcagcctcgcgagtagctgggactacaggcgcccgccaccacgcccggctaattttttgtatttttagtagagacggggtttcaccacgttggctaggctgggctagaactcctgacttcaagttatctgcccgcctgggcttcccaaactgctggaattacaggcgtgagccacagcgctcgccccccgtactgatttgagggtctccagagcacaaaggctgcaccggatgatgaagaaggagctgaaagagccacagactccgtagatccggtacagtccacacacaggaaattcaggtacagccaggggcggccctgccagggacggtgtggttactgtgtttccatccatttggtgtttcgattttattctctgagaatggaagggactttcttgggggagatctcacaggggtgcagccttatgattcctggttcacggaatgtttcttactatctttatacaaacaaaatcagaatttaaaaattcttgcctcttctgagcggggaggggtagaaagtcggagggctggtcagatagaaacaggtgcttggagctgggtggggagcggggcggcctggaacagaatccaggtgttttgctttaaggatttaaaagactctggacaccacgtgctttcatgctgaaatcagct

SEQ ID NO: 14110 - DNA, 1458 bp, Artificial sequence
  DNA replication origin
ggattattggcctctgcattaaaaaaaaaaaagtgaagttagactctcagttttaattaaacatcgcgcagaaccaacagcacgggagccgcctgaacctggcactcggcagcggcgcgctccgggacccaggagccagctgagctgcggcgcagcacccggcgctggggacccgccacggctcgcctacagcaccgccgcgggcgggggcccccggagaccggccgcgcgggccgctatgaggtccgaggggttgcccctgccgcctctctccgcgaacccatcaccatccgggaacctggggagcgagaggcggccgcccccttccgcggcccgcgcgcccggcagcagtcgcacttacacaatggctggtaggagccacagactggagatcgcaggctgcgggagctacggcgatcgaccgctcggcgctcggctgaggagccttggcgcgcggtcctcgctcgcaggttttagcccccgggacgcgaggtggccccgcccgcttccgggagccggaggcaagtgggagccgcgccctgtgctctgcgtccggcactacccacctcaagtctccaaggcttcgttttctgggctggttctgctagctgtagtactgctgccgggccctctgcactcagctttaacaaggaggccatttgcttcaaactaagtggcgaattccctatcacccatgcttgacctagcttccaagccaaacttactttccactgtgctgcttctagtcctgctaccggtgtcctccctgagccgtcgggttaaaagctttccttcctggccgggtgcggtgactcacgcctgtaatcccagcagtttgggaggccgaggcggacggatcatgaggtcagaagttcgagaccagcctggccagcatggtgaaacctcgtctctactaaaaatacaaaaaattagccgggcatggtggcgcgcgcctgtaggcccagctactcgggaggccgaggcaggagaatcgcttgaacccgggaggccggaggttgcagtgagccaagatcacaccagtgcactccagtctgggcgacaaagcgagactccatctcaaagaaaaaaaaaaagctttctttagggaacactccgttaagagctttccttactttgctttgtggaaacagaatgtttttgttggaagaaactttaagccacctatctgcagctgcagagcgtcactgttgcaatacaggcttttccaatagtgagcgaacctaatctccctctaccctcttaaggtttccacctgggcctaagaggttaaattgacttaagacagtttaacaggggaaaagcttacagctatgtgcatgggagtccacaagaaaagacccaaagaaggaggaagcctaaatgcttatatacgggtttagctacaacaaatttcaaaagtccatgtttaaatatgaccttaatgaacctaaaagacaa

SEQ ID NO: 14111 - DNA, 1208 bp, Artificial sequence
  DNA replication origin
gtgagcctccagcaggagcaggcgttcaaggacgaggcccacacgcagtggctcaccctgcaggccttagaggaagaagcttctccaggctgatgagtcatctcctgccctggaggggatcaggagagttgaggaagaactgggcgaactaaaggccgttctcacagacgcgggaggatgcggggggatgcggggggatgcggggggatgcggagggatgcggggggatgagcggagaggtggggggacgcaggaggatgaaccttcaaacactcagacgtcttagaaaccctccggaaaaagactcagggattggactccaagctccagcacgtggaggatggagtctgttctctggagacggcttctgtgccccagaccgagagcctgcagtgcgccttgtccaagagccaggagctgacgcagagcctggccgccctgcaggggcgcctggtgggcccagggtcctcggaagcagacagggctggcctggcagtgcggtgaggagcctggccaggcccagctggtgctcctgggtgctgcagatgagctgaagtgtgtgggcaagctcctagcacacgctgcccagccaggaccaagcccaggctgcccgtctgccccttcaggacttcctggaccgttgttcttctctagacagcctgaaatcctcagccagcctagtgcaattggacttgaaaatgctcagggctgtcggagacagtttgcttgtgtacccggcaggccacaacagaaccaacgagaacagcctgggatcaaccaagggtttactagatgacctgaaaaataatctggatgggttgtttgtagaggttgaaaagatttatgaaaatgtctcaatgaattgtgtgtgcagggcacggatttaaagcacaatttctcatgatcataaaatgtgttgttttctcctatgtaccctccccctcaattccttgtcccctctgaaagagtggtagatacagtctgaacaccaaggcgttgtattttgtgctcagttaattgatttacaatgattgccacaccgttgtgttctaaggtgctctgcctctgcgtttgatttcctgaagcccagccccagtgagtaagaggtgactttttaggagggatgtttctaatgtcagagaaaaatgataatggcttcaactcagggttaagagagctgattaacctcaaaaatcttgtctggctgg

SEQ ID NO: 14112 - DNA, 939 bp, Artificial sequence
  DNA replication origin
ttagcacctgggcccgcagctgctgtgctcgacttcttgccgggccttagctgcctcccggcggtgcagggctccagacctgcagcccgccatgcctgagcctcccctaacaccgtgggctcctgtgccgctggagcctccctgacgagcgccgccccctgctccaaggcgcccagtcccatcgaccacccaacggctgaggagtgccggcacagggcgcgggactggcaggcagctccacctgcggccccggtgcgggatccactgggtgaagctagctgggctcctgagtctggtggggacttggagaacctttatgtctaagggattgtaaatacaccaatgggcactctgtatctagctcaaggtttgtaaacacaccaatcagcaccctgtgtctagctcagggtttgtgaatgcaccaatggatactctgtatctagctactctggtggggacttggagaacctttacctctagctaagggattgtaaatacacctatctgcaccctgtcaaaacggaccaatcagctctctgtaaaatggaccaatcagcaggatgtgggtggggccagataagagactaaaagcaggctccaggagccagcaatggcaacccgctcgggtccccttccacgctgtggaagttttgttcttttgctctttgcagtaagtcttggtgctgctcactctctgggtccacactgccattatgagctgtaacactcaccactaaggtctgcagcttctctcctgaggccagccagaccaggaaccaccaggaggaacgaacaactccagatgtgcttccttaagagctataacacccactgcgaaggtctgcagcttcactcctgagccagcgagaccacgaacccaccagaaggaagaaactccaaacacatccgaacatcagaaggcacaaactccggacacgc

SEQ ID NO: 14113 - DNA, 1029 bp, Artificial sequence
  DNA replication origin
gccttagtctgaagcttgaaatcgagtttgggactgaaaaagtatttttgaggctgtttgtgtcccattaagctgtctcaaataagccctgctgaatttgcagttttcagctagcaggagtcattcctccattaacttccctatcaaaaacagagttggggaagggtggggcggggtggggcggagcggggtgggacggggcggggcggagtggggggggggggggatccgggtgaggcggggcttacttagaaaataaaaaaaagaggccaggcgtggtgactcacgcctgtaagcccagcactttgggaggccgagatgggcggatcacgaggtcaggagatcgagaccatcctggccaacacggtgaaaccctgtctctactaaaaatagaaaaaatattagcccggcgtggtggcgggcgcctgtagtcccagctactcgggaggctgaggccggagaatggcgtgaacccgggaggcggagcttgcagtgagccgagatcgcgccattgcacaccagcctgggtgactgagcgagactccgtctcaaaaaaaaaaaaaaaaaaaaaaaaaaaggaaaaagaaagaaaaaagtttaaggggcaaaagtggggagatcctgtgggaagaatcccttgcttagtgcaggtgggtcactttaattattgtatctttcccctggttgagactgggttcgattccttggccaggggagaaacgttctgttggcctggcgggtgagaagcaccatccactggccctgtggttgttgggctcggcctttggcctttgcctgctgccggcacgcccagcaacaagctgggtgcagaaaggttaatgggaggtgccctgaaccgtgtgtgcctgtggtgtcgcggtggaggcatagatggcacctctaggaacagttggtctgatttgcacctttggcggctgagccaaatgatcattttacttagtaacattgacgctttaaatactctaaagccagtgagttagggcaatcataaaactcatttttttttct

SEQ ID NO: 14114 - DNA, 1083 bp, Artificial sequence
  DNA replication origin
ggacgggggagggaggtaatcagaagagcagaggctgcagaagaggaaggcagagcgacggggacggtggtgcagctgttgccactgcgggcgagcgctccctccgccgccgggcagcgtgactcgaggggtttccactcgcctgtcagctcacatggagagcttgtgtatgtggggagcgcgcagcgcagccggggcgcacgcacggcctcagcgctgcgccgcgcgaggaagcatctcccgggcggcggagcgcgagcagcagcaacagccgcggagagcaggagacgccgccgccgccgccgccgccgccagctcctgtgagcccgggcggcgagcgaggcggagggaagccctcccttctcttcccttctcggttccctcctcggctcctcctcctcctccgcctcctcctcctcttcctcctccttaccgtacccctctggctgtcaaaacccttctgccctgccctggcctcgtttgaaagcaaaagggagactgagccgaccggccggggtccatcagctggggcgggggcggagcaaggaggcgcgcgcctctccctgggcgggaggtgatgctgtccgcggtgctgaagttggggatttgccgtgtaatcctagaaccctgctccaaacctggctgccccctacccggctgcaggaaggagaacaccctcgctcggatgccttctcctttccttctctcctccccttcagataaagatggtacaggctcctggagctccggccccccgggaaccacagtcaggcgtccgacaggcaggtcttccgagtggtcctaacaccaagtgacggtgctaaacatcccgactgactggagcagggagggaggactgcagatgccgttaatgcacatgttttcgatatgtaattaattcgtactcatacatatgcacacgtacaccaaacacacgctgctgccaggagaaactacacttaggcaaacacgcatacaaacacaaacacaaaacggaaatacataagcaggcatatgggtaactatttcaaggtacctgaggcattgcaagcactaagaattaagaatgtttagagagaccta

SEQ ID NO: 14115 - DNA, 915 bp, Artificial sequence
  DNA replication origin
cagtctggaaagtgaggagcgtctctgcccggccgccatcccatctgggaagtgaggagcgtctcttcccggccgcccatcgtctgagatgtggggagcacctctgccccgccgccccgtctgggatgtgaggagcgcctctgcccggccgcgaccccgtctgggaggtgaggagcgtctctgcccggccgccccgtctgagaagtgaggagaccctccgcccggcaactgccccgtctgagaagtgaggagcccctccgcccggcagccaccctgtccgggaagtgaggagcgtctccgcccggcagccaccccgtccgggagggaggtgggggtgtcagccccccgcccggccagccgccccgtccaggaggtgaggggcgcctctgcccggctgcccctactgggaagtgaggagcccctctgcccggccgccccccccgtctgggaggtgtgcccagcaggtcattgagaacaggccatgatgacaatggcggttttgtggaatggaaaggggggaagggtggggaaaagattgagaaatcggatggttgccgtgtctgtgtagaaagaagtagacatgggagacttttcattttgttctgtactaagataaattcttctgtcttgggatcctgttgattggtgaccttacccccaaccctgtgctctctgaaacatatgctgtgtccactcagggttaaatggattaagggcggtgcaagatgtgctttgttaaacagatgcttgaaggcagcatgctcgttaagaatcatcaccactccctaatctcaagtacccagggacacaaacactgcggaaggccgcagggtgctctgcctaggaaaaccagagacctttgttcacttgtttatctgccgaccttccctccactattgtcctatgaccctgcca

SEQ ID NO: 14116 - DNA, 1225 bp, Artificial sequence
  DNA replication origin
attcttaacgagcatgctgccttcaagcatctgtttaacaaagcacatcttgcaccgcccttaatccatttaaccctgagtggacacagcatatgtttcagagagcacagggttgggggtaaggtcaccaatcaacaggatcccaagacagaagaatttatcttagtacagaacaaaatgaaaagtctcccatgtctacttctttctacacagacacggcaaccatccgatttctcaatcttttccccacccttcccccctttccattccacaaaaccgccattgtcatcatggcctgttctcaatgacctgctgggcacacctcccagacggggggggcggccgggcagaggggctcctcacttcccagtaggggcagccgggcagaggcgcccctcacctcctggacggggcggctggccgggcggggggctgacacccccacctccctcccggacggggtggctgccgggcggagacgctcctcacttcccggacagggtggctgccgggcggaggggctcctcacttctcagacggggcagttgccgggcggagggtctcctcacttctcagacggggcggccgggcagagacgctcctcacctcccagacggggtcgcggccgggcagaggcgctcctcacatcccagacggggcggcggggcagaggtgctccccacatctcagacgatgggcggccgggaagagacgctcctcacttcccagatgggatggcggccgggcagagacgctcctcactttccagactgggcagccaggcagaggggctcctcacatcccagacgatgggcggccaggcagagacactcctcacctcccagacggggtggcggccgggcagaggctgcaatctcggcactttgggaggccaaggcaggcggctgggaggtggaagttgtagcgagccgagatcaggccactgcactccagcctgggcaccattgagcactgagtgaaccagactccgtctgcaatcctggcacctcgggaggccgaggctggcggatcactcgcggttacgagctggagaccagcccggccaacacagcgaaaccccgtctccaccaaaaaagtacgaaaaccagtcaggcgtggcggcgcgcacctgcaatcgcaggcactcggcaggctgaggcaggagaatcaggcagggaggttgcagtgagccgagatggcagcagtacagtccagcttccgctcg

SEQ ID NO: 14117 - DNA, 1421 bp, Artificial sequence
  DNA replication origin
gtagatggagtggatggagtggacggatggagtgggtgaagtggatggagggaatggatggatggatggatggatggagtggacggatggaatggacagatggagttgatggatggaatggatggatggatggatggagtggagtggacagatggaatggacggatagaatggatggatggaatggatggacggatggagtggctggatggaatggatggatggaatggacggatggagtggatggatggaatggacggatggaattggatggagtggatggatagagtggatggatagagtagatggatggaatgaacgcatggaatgaatggatggaatggacagatggatggagtggatggatggaatggacggatgggatggatggagtggatggatggatagatggagtggacggatggaatggacagatggagtcaatggatgggatgggtggatggatggatggagtggacagatggaatggacggatggaatggatggatggaatggatggacggatggagtggatggatggaatggatggatggagtggatggatggaacagatggatggaatggatggatggatggagtggacggatggagtggatggatggagtggatggatggagtggacgcatggaatggacggatggaatggacggatggaatggatggatggagtggagggatggagtggatggagtggacggatggagtggatggatggaatggatggatgggatggatggagtggacgtatggaatggatggatggatggatggatagatggagtggacggatggaatggacagatggagttgatggatggatggatggatggaatggatggacggatggagtggatggatggaatggacggatggagtggatggatggaatggatggatggaatggatggatggaatggacggatggagtcgatggatggagtggatggatggaatggacggatggagtggatggatggagtggatggatggaatggacggatggagtggatggatggagtggacggatggattggatggatggagtggatggatggaacggacggatggattggatggatggaatggacagatggagtggatggatagaatggcctcctctttgtctaaaacccccagtagctacgaattcccccaacaactactacacactgccctgcacatgatcacgttcggtaagttgtgtgagagggcaggagggagaaaatggagctgcctgcctgcctcacgagcacctttcaccattttgatcacatttccagatgcagcaccaccctctgctctcacttctttcctcccagaccagggaagcattggatggtggttcatgaggtgctggaggagctaaagaaattgctgtcatcgttttgtcaaatccagggc

SEQ ID NO: 14118 - DNA, 1275 bp, Artificial sequence
  DNA replication origin
agcccttcagcctgctgctgcactgtgggagcccctctctgggttggccaaggctggagccggctccctctgcttgcgaggaggtgcggagggagaggtgcgggcaggaactggggctgtgtgtagcgctggtgggccagcgtgagttccgggtggtcgtgggctcggcaggccccacactcggagccgccagcgggcaccactgccccagtagtgaggggcttagcacccaggtcagcagctgcagagggtgcgctgggtcccccagcactgctggctggcgctgcgctcgaattcttgccaggcctcagccacctccccgtggggcagggctcaggacctgcagcatgccatgcctgagacccccaccccaccccaccccaccctgtgggctgccacatggcccgagtctcccccaggtgctgccccctgctctaggcgcctggtccaatcgactgcccaagagctgaagagtgcgggtgggcagcatggggactggcgggcagctccgcctgtagtccaggcatggcatccactaggcggaagccagctgggctccagagttgggtggggacttggagaacttttatgtctagctaaaggattgtaaatgcaccaatcagcgctctgtgtctagctcaaagtttgtaaacgcaccaatcggcactctgtgtttagctcaaggtttgtaaatgcaccagtcagcaccctgtgtctagctcaaggtttgtaaatgcaccaatcagtgctctgtgtctagctcatctagtggcgacttggagaacttttgtgtctagctaaaggattgtaaatgcaccaatcagtgctctgtgtctagctcaaggtttgtaaaccaatcagtgctctgtgtctagctaatctatttggggacttggagaacttttgtgtctagctaaaggattgtaaatgcaccaatcagtgctctgtgtctagctcaaggtttgtaaaccaatcagtgctctgtgtctagctaatctatttggggacttggacaacttgtttctagctaaaggtttgtagaaccaatcagcacctgtcaaaacggaccaatcaactctctgtaacatggaccaatcagcaggatgtgggtggggccagataagggaataaaagcaggttgcctgagccagcagccgcaatctgctttggtcccattccaccctgtggaggctttgttcttccgctctttgcagtaaaccttgctgctgcttactctttgggttcgcaccgccttaagagctgtaacatcacgaa

SEQ ID NO: 14119 - DNA, 1543 bp, Artificial sequence
  DNA replication origin
catctctgtggtgccccaaaggctcccgcgacgcctccgcctggtccctgggcctgggccccggcgaaagccccgtcccgccaaggtctagctgcgtccctcagctaccggggctgccccgcctggagctgcgtgcgacacggcgcccgcctcctcctcctcccctgcccgcccggccctcctcctcccgccgccgccgcctgcaccacgcaacctccgccctctcgccttccctgcgcggctccccgccctctcggcctcaccggctccggcgaccgcgggggagaagctgttgggggagggccggaacgcaccgccatcggcgtccggggcgggggagccgggaaaccgtcgtcgccatcgccccgccagcccgaggcgcgggaggggcccggaaagctccctcccgcccgctcgccgctgccggcggccccgggggcgccccttccgcggccgaggcccccgctcgcgtggggaagcttctacctgcgagcctgcggcccctgcccccggcacccgagacatccccgacccggcgcgccggattctctgccaggttttacagcctccctcgccttgggaccgccgcggaggacccgttcccgccacttcggacctcgcgagcggggctgagctgcttgggtcggggacaccaccagcctctggagaaacggcccgaagcaccccgaagaagagggggtcccagtcccctgcccctcccttgtgcgcacccccacccccagcttgcctggaacctgactccacacctttgtcgaccgggacagggactgggggttgcaccccagatcagaaagtcagaggtggccctccgaatcggcgcggacttccgaggaacctcagccaattctcgacccccttaccacctgcaaggccttaggaatcggctccagaaagctcgagcttatctgcgtgtttcgttttaaaaatcacttctaagataaaacctaactaggctttccccttcagactttcagtaactcctgtttggcaaattttgacattcactctatccttcgtctttgtaaggacatatcaagacttagaaggctttgattacacatacggatggcatgagtcgtgatataaaatagtattgttttcacgtgtacttcgaagtcatctcatttgaaattaactgtcataattgactatttggaatattcaacctaaatactacccgctgctgtggtgacggggggtggaggaagcgtggtggaaccccaacacctagtgaggggtggctgattaataccacggctcacaacataacagagcggctcattccatgaacaaccccggggggatttcgaattctatcatctgggcaaaagatgtgatgagtgtaacttcctgttttctccaaactaaaacactacgcagattcctgtaccgctctgggacagaaatcctcagccagagcagaggccgtccccagagtccacactgtttcctgcataaagtgggttatctcagaagaaacatcccactggtctgtgtgatccttctattgaaatgtggtctt

SEQ ID NO: 14120 - DNA, 895 bp, Artificial sequence
  DNA replication origin
cctcgcctggtgaggcgacctccgcgggacgccgggacccgtgcccttgccccctcgcgcccacgcttcttcccggcgctgctttccggccgacgcgtgttcccctgtgagctctgggctcaagcgcaggagcagccgcggagccgggctctctcgctttccggttccctgcccgcggctctcgggttccccgcctgcattgttgcgaacgtgcagggcgctattattgggtaacagtcgcccttttgccccgttctcctgggagagcgggccggggcatgcgcgcagggatgctagcccggcggccgaaccggacagagccccccggcgcccgcctatcgctcgctagtcgggccgggccctgcgctgcggcctcggcgcgcccccggtcccaacgggagcgcgcgccctgaccctgagggtagccgtgcgcccgccaggccgctgggacttggggtccccagactcgggggtcgtcgcttttttttcccttaagatctgaaagacccccgtttctgccacccgtgcagtattgtgtagcgcagacataagataagaaagagaggaatgcttgtagacattccttgaaatgaatccccaaagttagggttttctccctggctggctttgccaaaaagaggattctcttttccgattgggtcactcttggttgcttctggttcgtagtaggggttagtggtaagtgcgcaaatactgaattgcagtctacttaaatatttgtttgctctgtgtaattgctctttcctgtagtagcattaaaatcgtcaaaagttctgagtggagtaaacgatcacactttttggaatgcacttaacgaagcggcagaagaggaactagattccttttttacttcaagccatgagcttctaggacc

SEQ ID NO: 14121 - DNA, 984 bp, Artificial sequence
  DNA replication origin
ggagctgcggggcggggggcgtgtggggggctcctttcccggtgcttgtcctggccggggcgccggggccggggtcggggcgttccggtgcccggtccagggtggcagctcgagcctcaagtctcctttgtgtggcgcggccgcggcgggagcgcccgggtgggacgggacagacacaagttggtgggacccagccgccgagtccgcactcagacaaaggacggactgtgtctccggagggctcggcgcgaggggaaggggcatgacacccgggcccgccggcgggcgggagaggggcgtggggaggcgcgggccgctgccggggtgggcagggctcggccctcgcctcgcgcacgcccccggtcccgggcgcgccgaccccgggctggggccgcggcgctcgcgggacgacgttcgcggcggggaactcggagtagcttcgcctctgacgtttccccacgacgcaccccgaaatccccctgagctccggcggtcgcgggctgccctcgccgcctggtctggctttatgctaagtttgagggaagagtcgagctgctctgctctctattgattgtgtttctggagggcgtcctgttgaattcccacttcattgtgtacatccccttccgttccccccaaaaatctgtgccacagggttactttttgaaagcgggaggaatcgagaagcacgatcttttggaaaacttggtgaacgcctagtgagttgccactttctaaagaatcgtaatccttaaacattacaagctgttttggccaacttgtgtgatacatctgagaatggcgacaggtgctaacgaaatcaactgtcattcagccagattattccccaaatcccgacgggttgaatgaggatgaggtggtagaagtaggtgatcaaaatagaatggctatgacaaatgtgtgtttagattatacggttagcagtttcttattaattggtctcgttttctgtgaacaatagct

SEQ ID NO: 14122 - DNA, 983 bp, Artificial sequence
  DNA replication origin
ggcactggcagcgcgtgcgcgcgcgggcggcggcggggttcgctgtaagggacgccactggccgtgtggaagcgccgccgccgtctctttgttctttcgctgaacacacggcgcctctcaggaaggcggtgtgcaggcacgcggggaccgggagacatcgcgggggcccggagcccgccgcggacgggaggcggggaggataggtggcgggaaccggccgaagggcgggacgaagcgccggcggctcttggcgggaaccggcgccgcagagttcccgggcgggggaggggcggggcgggtgctggaagccaagtttgaaccagttcaaaactcgggggtggtaacggttttaaccgccgcgctcgtttccccgcgcgcggagccgaggcccgggctggccgctcctagtggtgcccggggaggggagggcgcgggccccggaggtcggctcagctgtggcgccgcgtttgccgggagacgctcgcccggcccgcgcgctgccgccggacccgttactacttttttttttttctcctgagacggagtttcgctctggttgtccaggctggagtgcaatggcgcgatctcgactcaccgcaacctccgccttccgggttcaagcgattctcatgcctcagcctcccgagtagctggattacaggcatgcgccaccacgcccggctaattttctatttttagtagagacgggtcttggtcaggctggtctcgaactcccgacttctggtgatccgcccgcctcggcctcccaaagtgctgggattacaggcgtgagccaccgccgccgacccgggccctgtttgattatgtctgctgctgccttggccgttttttcccccaccgctggactttggctggccgagcttgcagtgcttatcgccctagaaacctgtgaaagggcgacattgctgccatttcagacccttccactgttcgtagttctaagcacgtgtcagtgttaaaaa

SEQ ID NO: 14123 - DNA, 1674 bp, Artificial sequence
  DNA replication origin
acccatcccagccaccgcctcccgcagcagggggagaagcctgcccagtgcaccccatgcggcaagcgctccctcccagtggacagcacgcaggctcgccggtgccagcacagccgggaggggccggcctcttggagagaaggccgcggggcctccagcagtgtgcactcgggacagaaaccaggctcgcgcctgccccaggaggggaacagccaccaggaaggggacacggaggcgctgcagcatggcgcagaggggccctgctcctgctcggagtgtggcgagcgctcccctatgagcgccaggctcgccagcccctgcagggcgcatactggagaaaagcccttccagtgtgcgcattgcaccaagcgcttccgcctgcgccgcctgctgcaggtccaccagcacgcgcacggtggggagagaccgttctcctgcaggaagtgtggcaagggcttcgccaagcagtgtaaactcacggagcacattcgagtccacagcggagagaagcctttccggtgtgccaagtgtggcaggaacttccgtcagaggggacagctgctgcggcaccagcggctgcacacggacgagaagccctttcagtgcccagagtgtgggctgagcttccgcctggagagcatgctgagagcccaccggctccggcacggtggggagaggccgttctcctgtagcgagtgtggcagaggcttcacccaccagtgcaagctccgtgagcacctgagagtgcacagcggggagaggcccttccagtgcctgaagtgcgacaagcgcttccgcctgaagggcatcctgaaggcccaccagcacacgcacagcaaggagaggccgttctcgtgcggggagtgtggcaagggcttcaccagacaatccaagctcacggagcacttgcgcgtgcacagcggggagagacccttccagtgcccagagtgcaacaggagcttccgcctgaaggggcagctgctcagccatcagcgcctgcacacgggagagaggcccttccagtgtccggagtgcgacaagcgctatcgcgtgaaggccgacatgaaggcccaccagctgctgcacagcggggagatgcctttctcctgtgagtgcggcaagggctttgtgaaacactcaaagctcatcgagcacatcagaacgcacacgggagagaagccttttcagtgtcccaagtgtgacaagagtttccgcctgaaggcgcagctgctcagccatcagggcctgcacacaggggagaggccttttcactgccctgagtgtgacaagaacttccgggaaaggggacacatgctgaggcaccagcgcatccacaggcccgagaggccctttgcctgtggcgattgtgggaagggcttcatttacaagtctaagcttgcggagcacatcagagtacacacaaaatcctgtcctgctccaaatgaactggacattaagaaaaggctcagccaactgtttgcaatgatagaggccgattggagttgaggcagagtgggacatccaaagcgttgagcaggattggtattgcccaggaatccacagcaacagtagccagacccgctggtagacgggttttaggagcaggtatccttctttgagcaagagtgtcatgcaagttaggaatatgaagaaccacaaaggattttctcttca

SEQ ID NO: 14124 - DNA, 952 bp, Artificial sequence
  DNA replication origin
ccctccccagatcccgggaatccgagggtccctcaaagaccggcgtgctgcggcctgctctgagggcgcccgggcccctgggtccctcctctgaggaccgacgctcaggcagcgccgcttcttcctcccgcaggaggcgctgtaggactgagcggcagccgcggccgggcgccgggtcccagcatgcaccgcgcccggccggcgctgcgtttgggggccacccgggctgtgcgtgggagtcgggttggggcggagcggaggggagtcagtgcgcagcagggcaggttcctgcggagccgccggagacggtcgggtttgccagggccgggcgggaccgcggggaccatggcggagccgcctcgggtaagcgggctagcctgtttggacgcccggtttcggggtcgtggtgggtcctcgggttccgggctcgcccgtgtcctggggtccccgtgagtgcgcgcggtgcacgggtaggacggagtctgcaggctgcttctgctggggatgtggattccgggccctgcggtgagcaggtggcctccgctcccgcggcttgtccgtggccaaacccctggacaaagccgagcgtggaccgaggccgacctaggagcggggcggagcctgggcgaggatgccgggcggacggggagcggacggtggaaaggatagaaaggtttggggccagaggtggatgttacaggtcaaccagttttacatcatagtcaccgaaatcagaacaactgttccaaaaagtttaagattccgaatggttgaaatggtgtttggcgggggcttcaatgtcagaatttattgtctagcgtgatttgggttgagtgtaagatgatacgttgggaagagtagaagaggatacaaaaaattaagttagtggtttcttaaaatcgaggtttagagggtatttttatcttgtaaactttaatgttgaggatttttg

SEQ ID NO: 14125 - DNA, 920 bp, Artificial sequence
  DNA replication origin
gagacaagctgaggagctggccggaggggaaacggaggggcaggacatggagagatcagggacagggacagggagagatcagggacagggacagggagacgcgctccacagaaacccagactgagaggcagcgagaggggaacctccggtgcggttcctcccaaagccgcccccgagacaggcttcgtctgtgagggggtcccgggaatccagcgaggccggaaagtgggtggggggcgcgcgctgcccgcggtggcccggggcatccgtcccgccgggggcgcggaggccgtgggggccccatgcttgtcccgccggggacgcggaggcggggtccgcccaccaggtccggtcgccgtgggtctagagccctccgggctccccgggcggccacgctccttccttagcagagaacggccttgggcagagaccccatgcggaagccaccccggcctcagggccgcctgcagggactcagggtggcccaaggctgcggtcgggcaccccgggccccggcaggagacagagacagagtaggaggagaagacggaggaggccatgacacagggcgtgagaaacacgagaacgcaagaacaggggagaggtggggaaaccaggaagagacagaaaggagagagggcgaggaagggggtggcgattgtctccagaaaatcaacctcgcattctgtcttagtcatgtcttaggtgtcaggctgaagtagcaaaggaaaagtgtgtagtttggagaggatgtgcataagaaataaaatagtccctgcgtaggctgaggagcatatacgcatctgtgtttgccacagaatcgtgaaatgtacatgcaccttactgtttaacgttttttatttttacaactgttatacagtacaattttttttttttggagacaaagtctcactcttgtc

SEQ ID NO: 14126 - DNA, 1694 bp, Artificial sequence
  DNA replication origin
cgcagtgtgaccggtgcttccgcctgaagaggggcatgaaggtccatctgacccagcacagcgggaagaggcccttccactgtcccgagtgtggccggagcttctcccggaaggctgccctgaagacccaccagaggacgcacagcgaggaaaagccgttttcttgtggtgaatgtggcaggaaattcatctacaagattaagctggacgagcacatcagagttcacacgggagagaagcccttttcgtgtcccgagtgtaacaaaagtttccgcctcaagagaagcctgaaagcccacgggctgcagcacattgggaagcggcccttccagtgcccggagtgcagcaggggcttcttctggaggaacgccatgcgcgcccaccagcgcctgcacagcgagcaaaagcccttcccctgcgccgagtgcggcaagcgcttcacgcggccttccaagctcgcctgccacaccagagtccacgacaggcagaaggagtttccctgcggcgagtgcaaaaagaccttttctcagcagtcgcggctcacgcagcacctgaaggtccacaccacggaaaagccgttctcctgcgccgagtgcggccgcagtttccgccgacgcgcgcatctcacagagcacacgaggcttcacagtggcgaggagcccttccagtgtcccgagtgcgacaagagcttctcctggaaggcctccatgaagttccaccagcggatgcacagggacgagaagcccttcgcgtgcggtgagtgtgacaagacctacacgcatcagtctcagctcaccgagcacctgaggctgcacagtggagagaagccctaccagtgtcctgaatgcgagaagactttccgcctcaagggaaacctgaaaagccacctgctgcagcacagtggccaaaagccattctcttgtgtgatgtgcggcaaaagtttcactcaacagtaccggctcacagaacacattcgagtccacagcggggagaagcccttccagtgtccggagtgtgacaagagctactgcatcaggggcagcttgaaggtccacttgtataagcacagtggagagaggcccttccagtgtcccgagtgtggcaaaggcttcctccagaagagaagcctgaaggcccatctgtgccttcacagtggggagaggcctttttcttgtgatgagtgtggaaggagcttcacgtacgtgggggcgctcaagacccacattgcagtgcatgccaaagagaagccctccagcctctaggtcaggccatgcagcagtcacgcagtcggctttcaggaggtgccagcagctctgttggctcaagttgaggcaggttgaaggattcacagggtaagatcgggcacagtggctcccgcctgtaatcccattactttgggaggcccaggtgggaggatcgcttgagcccagaagtttgagaccagcctaggcaacattgcaagactccatctctacaaaaaatataaaagtcagccaggcgttgtggtgcatgcttgtggtcccagctactttgggaggttgaggcaggaggatcgcttgagcccaggaggcagaggctgcagtgagccatgctcacaccactgcactccagcctgggtgacagagcaagatcttgtctcaaaaaagaaaaaaaatcacaaaatactggctacagacacactggacaggtgtgtg

SEQ ID NO: 14127 - DNA, 1523 bp, Artificial sequence
  DNA replication origin
tggaaggaacagcaccggactctcaccctctcgctgcctctcagtccgggtttctgtggagcgcgtctcccagtcgctgtccctactctctccctgttcctgctctctccatgttcacctgcccctccgtttcccctcccgtcagctccctcatctcgtcttcgaccgcatccctcgcatgcagatccgggagtccaagggtccctcaaagaccggcgtgctgcggcccgcacggagggtgcccgggcccctcctctgaggaccgactccctctggcggcgccgctcctcccgcccgcagggggcgctatggggcggagcggcttccgcttccgagcgccgagtcccagcatgcaccgcgcccggccggctctgcctttgggggccagcagggctgtacctgggagttgggttggggcggagcggaggggaggccgtgccaggcagggccggttcgtgcggaaccgccatggccgagccggcttcggtaagaagggccggtggaggatgcaggctctgtcgaaactcgggtccctgtcgcagctggattggggtccgcgtccagggagtggggcggccggggcctgggcctgggggttggcagtggcccacggactgagctccgggctgggctggagaaggtgcagtcttgctgcgtgtgctgttctggaattgacctggggaaaagctggtctggccgggcttggccgcgcgcgtctgtggccccggccactcggaaggctgaggcgggagcagcgcttgagcccgggagctctgcgctgtatatgcgctaggtccgtcgcgcggtgcctctgagttctgcatctgtgtggtgacctctcgggagcggggaccaccaggttccccagggagggggaaccggcccagctcggaaaccgagcagggcaaaaccccagtgctgatcgttagtgggatcgcgcctgtgaatagccactgccctccagcctgggcaacagccagaccccgtctgtttaatacataaataaaagttggtttgggagaaagaatccgggtgggaaagatctgtttctcggcctgttgtaggctcagatcaacaacgctgtccctgccttcagtgtcggggctctgaacctcggggtctctctggggcccgtgctctcctgctgaaggtagtttcagagaagcacatcagtgttaagcagatgagaaaaaggagaaggaaagctggaactgagagaaattggagaccgctccctctaggaaaggacagaaaacttaaaatgaattgggtggttagcgtaaatcgaatttaccgtaaatgctgtagtattgtaatgtagtattgaaaatttgagcaccggttttagagtttgaaaggcgtatcctgaggcttaatccaagaaaccctgttacattcagttaagtataacttgcttaagtgtgcaagtttttcttgtgcccccaatgaaattttataatcttaggaatgtaatgctccttatttgcatttgattcttcccttttgcttcccactccttttcc

SEQ ID NO: 14128 - DNA, 827 bp, Artificial sequence
  DNA replication origin
cacagacgcgcgcggccaagcccggccagaccagcttttccccaggtcaattccagaacagcacacgcagcaagactgcaccttctccagcccagcccggagctcagtccgtgggccactgccaacccccaggcccaggccccggccgccccactccctggacgcggaccccaatccagctgcgacagggacccgagtttcgacagagcctgcatcctccaccggcccttcttaccgaagccggctcggccatggcggttccgcacgaaccggccctgcctggcacggcctcccctccgctccgccccaacccaactcccaggtacagccctgctggcccccaaaggcagagccggccgggcgcggtgcatgctgggactcggcgctcggaagcggaagccgctccgccccatagcgccccctgcgggcgggaggagcggcgccgccagagggagtcggtcctcagaggaggggcccgggcaccctccgtgcgggccgcagcacgccggtctttgagggacccttggactcccggatctgcatgcgagggatgcggtcgaagacgagatgagggagctgacgggaggggaaacggaggggcaggtgaacatggagagagcaggaacagggagagagtagggacagcgactgggagacgcgctccacagaaacccggactgagaggcagcgagagggtgagagtccggtgctgttccttccaaagctgcccccaagtcagggatgagctcgagggtttcgtttgtgagggggtcccgggaatccagcgaggccgggtaggtggtggggggcgcgcggtggcccggggt

SEQ ID NO: 14129 - DNA, 934 bp, Artificial sequence
  DNA replication origin
gagatgagggagctgacgggaggggaaacggaggggcaggtgaacatggagagagcaggaacagggagagagtagggacagcgactgggagacgcgctccacagaaacccggactgagaggcagcgagagggtgagagtccggtgctgttccttccaaagctgcccccaagtcagggatgagctcgagggtttcgtttgtgagggggtcccgggaatccagcgaggccgggtaggtggtggggggcgcgcggtggcccggggtgtccgtcccgccgggggcgcggaggccgtgtgggccccgggcatgtcccgtcggggacgcggaggaggggtccgcccaccacgtccggtccccgtgggtgcagcgcccttctgggctccccgagcgtccacactccctccttggcagagaaaggcctcgggcagagaccccatgcggaagccaccccggcctcggggccgcctgcggggactcagggtcgcccagggatgcgggccgggcacccctagcccccggcgggagactgtgacagagcgggagaagacggaggaggccatgacacagggcgtgagaaacacgaagacgcaaaaacgggagaggtgggaagacgcagaaggggaaaccagggagagacagaaaggagagagagggcaaggaagggggtggcgactgtccccagaaaatcaacctcgcattctgtcctagtcatgttttaggtgtcaggctaaagtaacaaatgaaaagtgtgtagttagaaaggatgtccatgagaaagtagtccctgcataggctgaggagcgtgtgcacatctgtatttgtcccggaatcgtgaaatgtagatgcaccttactgattaaagggttaaaaaaaaaaaaccttacattaaaactaacgtttcggatgggcgcggtgcctcacgcctgtaatcccag

SEQ ID NO: 14130 - DNA, 1084 bp, Artificial sequence
  DNA replication origin
tgcctggcagctccctgcccgcccgccttcctccctcggggtctgggtctcgggggctcacaacactcgcgcgcggccgcccttaccggggccggggccgcctcagccatggccctgcgctgtctagcccgggcctcggaagtcgccgccgctgccgccgctgccaccgcgcccggctccaagcaggcccggccgccgggtcctctccacaggcggcgccgacccggccctgccttccccgcacggacgggactcacgcggccgtcggggctcgggacgcgcaggaacgcggcggaggcgcggtgcagcaggcggcggatcaagctggggtcgcgaggccgactccgccgcactccacccgcagcggcccctcagctggcgctttgtgggcagcgagtgcaccgggaaccgcgcgggcctagacgcgccgcaggctcgcgctgcccagccaccgcggccagcgcgccccctgccggcccctgcggccagcgccccccgcgtcgcctccgcccctcccccccagctcttgggcttcggtgtggggagggttgttatttggggcccacgtgtgttccgctttctcacattcccacgagaaggttcagctcaccgcagtttaggacccagccgcaaagccgggctcattctggggagtgattttcttcacggaggctcgatacgcaggcgccgtctgcaggcaacagcttctgctgaagggcagccgtatttagaacagcggaaatgtgcagggtgagagtaagggggacacggctgaagggagcctatgggtggaatgagtgacggagaggcacaattttggaatgaagaagatatagatcatttgcggaaattacaaatgtggttgccaaggtgaggcggttcaggtcccacgcggcctgtgttgggatcaataatattttaaggtctccttcacatctcggattattgactctccggggcctggtctggaaataggattcttaatttttgtttatttatttatttagagacggagtctcactccgtcgcccaggctggagtgcagtggcgggatctcggctcactgcaaccgccttccgggttc

SEQ ID NO: 14131 - DNA, 1072 bp, Artificial sequence
  DNA replication origin
ggcccggtcccgcggcccagcccgcgccccgcccccacggcagcgcggccatggcgccggcggggttctcccacctgcatgggcggcattccctcggccatttccccgcgcagcgccggctcctggtggcagacctcctccgggggcagagcctgggcccagctccagctcccgctgtccagccccaggccctggatgcccagctgctgaggctgcggccgtgttgacacaaactgcatcctgggagtgctgttccccgctcgggtcggccagggagaagaagaacgttttccaggcgccttccccctctccggggccggacagctccatctacagcccgtaggagcaaacagtccccttcggcggcgctccccgccccttggcagcccgcgcgccagccaatggcctcggagctcctgcccgcctgcggggacctaccggggccactcccggactggggtcgccaccgccccaaaactgagaggcggcggcctcgcccaggggtcaggccccctcaatctgggatggccgactttaaaggcccaaactatgcgaggacctggactgtgggcttgattactgttaattctgcaaatgtattgggcatcccgggagaaaatagtgcctgacccttgtgaaaattttgcaggagtaattctgtcttcagacactttcttctggccttctgccttccctcactcctttgcagactttacctcccactccccttcttcccaatccagatttacctggacccatcccagagcttttgcactgttatggatgatagagaagtgattcatgttaaggtgtcaaaagagggctgagctctttctcccaggtaaggtgcagtgcattttaacagtggcctcttcaaacaccttgaaattgggttgggcgtggtgcctcacacctgtaatctcagcactctgagaggctgaagcaggagaacgacttgagcccaggagttcgagaccagactgagcaacatattgacaccccatccctataaaaaataaaaattagccgagcgcggtggctcacatctgtaatcccagcacattgggaggct

SEQ ID NO: 14132 - DNA, 1201 bp, Artificial sequence
  DNA replication origin
tccagggcctggggctggacagcgggagctggagctgggcccaggctctgcccccggaggaggtctgccaccaggagccggcgctgcgcggggaaatggccgagggaatgccgcccatgcaggtgggagaaccccgccggcgccatggccgcgctgccgtgggggcggggcgcgggctgggccgcgggaccgggccgcgccgtcctccggtagccttgcggcgccctcccagcttccgcgcccaggcgaggcccgaggcgggcggggcacggccgggctgcgcggcgggcaggacggagcgggcccgacgcaggcccggaagggcaggcctggcccgcgcggcgcggagcagcggtcgccgggcccaagtgcggaggccccgcggggcgggggccgggaccgtcctttccgggacctggcagagctctgaccctgtggctgagccccggcttggggctccctttgcgcccggccggcggagagcttcgcgggcagtgcttccgcccggccgcagaagtgaatgcctcgttcgtgtttacacggtggccaatttgacggggatattttttaaatgtttgattaccacctttcaccaagtgtaatgagtaattcactctccccctgcaccgggtgtgatccagggagggggccatggagagatgacttcggggtctttcctgcggttgacaaacttggccgcatgttggaatggcctgggcagcttttaagactcctgagcccttgcctggtcccagagctcagggtctctgacgggtgagagtagcaccaggcatttcttcaggctccatcgatgatctccgtgggcagaaccggtgctccagaattgggtataaaaccaggggaggtggatcctcagagaggcctgaaagcttgcccagggaagactctctgggcccaccctggggctgggctgctcaggggcccctctgctcaccacgcggctctcagccaggtgctaacgagggagccaggggctgctgtgttgtgtttgatcattttcagggttagggcttcaaacccgagaaaactaaactgggccccgggactttcttaacttctactgtggactctgtccccttctgtgggctagggcggagtggagcctctgtgatggaggaatgggtgcttttgatggaaacaccagcacctcttactggtattacagggcctggcgatccta

SEQ ID NO: 14133 - DNA, 856 bp, Artificial sequence
  DNA replication origin
gacccttcccaggcatcctgcactgatgtgaagagaattcttttggcctctgcacctggccagtgtcctgcagagatggttctctgccaggccaattttgattgagacagagagggagggcaggcccagtctatttaagagtatcatataaggacagacctcagtcaaacaccaacgaatataggagggctgggtggaaacatggcagatgtggcctgggaagtggcctccggggagcagttgggtcctaggcagaggggtgtgagcacggagaaaaggatgctgagaagaggtgggaggccgtctctttcttcagagctcttccacaggcttcccctaaattggggagcaggactcctctagggagaaaggaattcaaactgaagaccagggaggtgatggagcgtgaggcatgagaaccactgggctgggggacagggtgggtgggagggggaaggactgggcctgacgtcaccattctgatgctcagagcctgggctttgtctcccactgccccccaaggtggtggagaactgtgcacttggaggaaagggggcaagaaccgcatttcctggggtggtaggttgggtggccactgccacgagtgcaaggagggcctgttatggtgctgccaaggtccaggtgggtcaggtgccagggtgggactcacatgtcccagctgcccacacctgcccaagtcagatgccccacatgcttagtggaaacatgactgccaacccatctgatgcttatgtttccagctccctgcattccattcctgtgggcctctagatggttttcaccttggataaaattcttttcttcctattgagagactgtcctgagataaaagtga

SEQ ID NO: 14134 - DNA, 1416 bp, Artificial sequence
  DNA replication origin
ccgcggtgcgtcatctggtggcggatgaggcccgagtggcagttgaagctcttctcgcactcagcgcactcgtagggccgctccttggtgtggctgcggtggtggatgatgaggctcttgcgcacgccgaagctcttgccgcactcggggcacgagtagggcttgctgcgggcgccgtgcaggaggaggctccgccgcagcccgccagggcagcagctgccacagccgccgcctgcccccgtccccgcctccgcgccgccgcccccaccgcccccatcgcccccgccgcccccggtgctgcggtccccacccggcggcgcctcgccggagccacgctccccgggcagcacctggaaaccgtcgtccagcagccctcggctcggggggccgcccgggttctcggccaccgcgatggggggcaggctctggggctggggctgcgactgcagctgcggctgcggtggctggggctggggctggggctgtggcggggccgggggtgggttcttcaccatcagcaggctgtcacctggggagataggaagaagtgacatgctgacaggggttctcggccaggaccccacactgctcccgaaggggggcccagggagcatgctatctgagcctcagttccactaactacgagggattgcacaaggtgctgggccacgatctacgtggcccttcgacctgttcgaagccaccctgctgtggagcccagaaacgggtcaagcaggtggcacgcagcaaggacaggaagtccctccagaacgctgagggctaaggggtaggggacctgctgtccagaagtcattttggaaggcagaatttcccagaaacaacaagacttacttgcagtctgatggacaatgttttttgtttgtttgtttttccagacagggtctggctctgtctcccaggctgtagtgcactggtgagatcatggctcactgcagccttgacttcctgggctcaagtgatcctcccacctcagcctgccaagtagctgggaccataagcatgcgccaccaggcccagctaattaaaaaaaaaaaacaaatcttttcggccggtcgcagtggctcacgcctgtaatcccagcattttgggagaccgaggtgggcggatcaccttagttcaggagttggagaccagcctgaccaacatggaaaaaccccgtctctactaaaaatacaaaattagccgggagtggtggcccatgcatgtaatcccagctactcaggaggctgaggcaggagaatcacttgaaccggggaggcagaggttgcagtgagctgagatcttgccattgcactggcccaggcatccagcctgggcaacaagagcgaaactctgtctctcaaaaaagtaaataaataaaatacaatttaaaaaggccaggcgcagtggctcacg

SEQ ID NO: 14135 - DNA, 879 bp, Artificial sequence
  DNA replication origin
caatccctcgtagttagtggaactgaggctcagatagcatgctccctgggccccccttcgggagcagtgtggggtcctggccgagaacccctgtcagcatgtcacttcttcctatctccccaggtgacagcctgctgatggtgaagaacccacccccggccccgccacagccccagccccagccccagccaccgcagccgcagctgcagtcgcagccccagccccagagcctgccccccatcgcggtggccgagaacccgggcggccccccgagccgagggctgctggacgacggtttccaggtgctgcccggggagcgtggctccggcgaggcgccgccgggtggggaccgcagcaccgggggcggcgggggcgatgggggcggtgggggcggcggcgcggaggcggggacgggggcaggcggcggctgtggcagctgctgccctggcgggctgcggcggagcctcctcctgcacggcgcccgcagcaagccctactcgtgccccgagtgcggcaagagcttcggcgtgcgcaagagcctcatcatccaccaccgcagccacaccaaggagcggccctacgagtgcgctgagtgcgagaagagcttcaactgccactcgggcctcatccgccaccagatgacgcaccgcggcgagcggccctacaagtgctcggagtgcgagaagacctacagccgtaaggagcacctgcagaaccaccagcggctgcacacgggcgagcggcctttccaatgtgcactgtgcggcaagagcttcatccgcaagcagaacctgctcaagcaccagcgcatccacacgggcgagcgcccctacacgtgcggcgagtgcggcaagagcttccgctacaaggagtcgctca

SEQ ID NO: 14136 - DNA, 1742 bp, Artificial sequence
  DNA replication origin
cctactcgtgccccgagtgcggcaagagcttcggcgtgcgcaagagcctcatcatccaccaccgcagccacaccaaggagcggccctacgagtgcgctgagtgcgagaagagcttcaactgccactcgggcctcatccgccaccagatgacgcaccgcggcgagcggccctacaagtgctcggagtgcgagaagacctacagccgtaaggagcacctgcagaaccaccagcggctgcacacgggcgagcggcctttccaatgtgcactgtgcggcaagagcttcatccgcaagcagaacctgctcaagcaccagcgcatccacacgggcgagcgcccctacacgtgcggcgagtgcggcaagagcttccgctacaaggagtcgctcaaggaccacctgcgcgtgcacagcggcggcccgggccccggcgccccacggcagctcccgccgcctcctgagcgagactagggctgggctgggggagggcagggccggacggagtggatcgggggcggcctgagcaccaaccaccttgccgggtgtcctcagccaccgtctggaaatcggcaacaggcattgcactccggttgggggtcccccagggtggggcagggatcccccagatctgtctggtctgaatggacgcccagctcatctagggtggacccagctgctggggaagagccagggggaccgcgaggagccgagcgtcctcgggcaccgccctcacacctcctcgagtgccctgggaccactgggccacagatggtcatcaggggaagccaccagggagtcccgaagcccttctgagatcaggaaatcaggtcccaaggttaggagacgccctgaaaaaaagcgaaggccgagggatgtgctaagggtaacaccttcatgatgacaacactgcctcgcgtttcaatagcgctttatacttttttaagtgttttctatccgttatccatttcacccttggcctatccctctcagataggtggggtaggattttcctggtgaccgagtaaagtgagaggcaggtgagacggttcacccaatcacacgggaaggggcgcgcgctgcccaaccgcgctctccgcctacctccgctgctcgggaagctgctggcctggccctcctggtctctcttcctttcctggtctctcttcctttccttgctctcacccacggataaaaccagaagcgacaggaggccagctcctggggttcctgggagccgggaacagattggctacggaacgccccaggttgtacattcagagggctctttctccatgggagctcctggtgccgcctcggccccagcctgtccccagcccctcaatctggtgcagcagcatcttgtcactgcacaacagtggcctggtcccccacaggcagttagggccccaggtcagacctcaccatgatgatttgttccagttctcccagggcagaggggcgagggagaggcttttgctgtgagagtagccgtcacgtgtctcttcccagcagcgccgggcaagtgggtgctagagtctgagcctcaggctctcctgccctgggcctcccaattggtgctatctgttactgcccgtgctcacggacatggatacagaccctgctgtgctccacaccctgcaggcgcctcgggaagcgcccaaaggattccccttcacgttggtgcacctgctccatagctccgggcgctgcgtcccgaggggccacagtctccatttcagcgtcttg

SEQ ID NO: 14137 - DNA, 1779 bp, Artificial sequence
  DNA replication origin
aatttatcttagtacagaacaaaatgaaaagtctcccatgtctacttctttctacacagacacggcaaccatccgatttctcaatcttttccccacctttcccccctttctattccacaaaaccgccattgtcatcccggcccgttctcaatgagctgttgggtacacctcccagacgagatggtggctgggcagaggggctcctcacttcctagtaggggtggccgggcagaggcgcccctcacctcccggacggggcggctggccgggcggggggctgacccccccacctccctcccggacagggcggctggccgggcggggggctgacccccccacctccctcccggacggggcggctggccgggcagaggagctcctcacttcccagtaggggtggccgggcagaggcgcccctcacctcccggagcaccagcattttatctttgattaagccagaaggagagtctttagatggggagtctccaaccttccccaccagggacatcctgccaggcatggggcctggggaagaagggcggaggcacctgtggccgcagcagagccccacaggagtgtgggggccttttgggagtggggtggggttggggttgggtggtgggacctggtgaggggcttcctcctgagggttctctccctccctctccagcttctatctccctggggactgtggggacccagatcagtctggggtccttcctggtctttccccatcgtggtctggtctggcctggctggaaaggcactgcatgaaaacccaggcatcagatcccaggcatgtggtccgatgatgatggaaaagctgttcacgtggtcttggcgtggctgggctcccagcccctccgtgtccacagtctgtgtccctctgcctagagtctgtgcttccctgagagggcagggtgccaggaccctccctcacattagggacccctgagagctgggtgctgagacctggggtctcacgtctccagcacattgctgtgatcacctgccactgccttggttgtccttgtcactgctgtcccagcagctccttgcctccacccaacctgggagttgagtgagactcacacagacccaggcaggaatctcaggtcccagtgcctcctctctgtcaccagtgagtgtagtggcagacaggtcgtggacgctctgtgtggatttgtcatgtggatgagcagctgagcatgggtgcagcactcaccacctctagtccacagaggcctcttagggtggtctgggggcatgcagggcccctggggttcattgtctttcacagatggtaactaatgtcaccagaactcttgggggtggggtcctgccaccctctctgctgtgcccagggtctctgcttctgtgtcccactccagctgacccctgacctctgggctccctggctcctggccttgcagtttgatctcccctcccctgatgtccttagcttggcctccaggaatgaggcagatgacaacaatcaggactgagtgaccgtgcaaggcagtgcctgtgtggcagggctcagtgagcaggacccctgcaatgtgctgtgagcactgtggggagatagggcccgggctgaggctggaagccaggactgggccgagtgacctgggggacagggtggtgaggtccacttggaaaccaacatagactcctttgccaggtggtggtgtggccatcaagacagaggcacagtctgaagacgagatgacgcctgagcggctctttctgggggtgtcccgaggccagaccgagtgt

SEQ ID NO: 14138 - DNA, 1462 bp, Artificial sequence
  DNA replication origin
gtggcagctggcgacacctgcgggctgttgggcaccagcccggggcgggcgctcgcacctgtcgggcgtgcacaaaggcccggcgcacgctgtgggggcggggcctcccgggttggccaatgaaaagctggcactgggtcggaggcgccagccaagtggggggcggagcttccaccaccggccaatggggatctggcttcgggatgtgggcggggtccacccggtcgcaacccgttgagtctctgcacagctgccgcgctgacgcgttttccgcgtgtcccgagccccggcggccccgcgagctcggtccgtgcggggaaagcagggctgacgccgtctgcggagaggactgcgcagccgggcttgtgtggggccgcgcgtaacggcagcggctactccctgcccaggccggccagcacagggccatggccgaggcggctgcgcctccggtaagggcgaccctcatggaggcttggggacgtggagccgagtcctgaattcgccaggaggatgttccaccccccaccatctccggcgacctcctggaactggggagggctcagcccgggtggcaggaggaggacaaggactcctaaggccacacgataaacgcccttctcgctctccgtttccttgcctgtggaataaggtgattggcaaacacaagatttggaggttccctccagccctgatatccactggacccggctctggggggacagtggactgtggacgtcttcattccagactctccaagattcctctttctggacccgccttttggcaccgcccccaagtcgaccatctcaaagatccacccctccctccaagctgagaccagtgccatggcctggggagggatgtccgctgcagtctgctggagccagagtctggctcctggctgtgaggtgggctctagacttgagctctgattccagtcaggaggattctgatgcctgcccactctttctaaaattccctgacaagtccttctggctgctgctgaggggatctgcattgtgaggacttttggttaggggcttcaggctcaggcttgacctaggccattgctggcctgcataagaactgttgagattttcataggtttttaaaggtagaggggccatctcctagtataaatagctttgcagtggttttggatccattcccgggtggcacatttgtggcagggcattgcagggaggtgaggatgtttgcccctaatctgtgaagacggtgctgcctcctctgagctccacttcattgtatcagacagaggccagacttgaggatgaatagccatgctgtgtggggaaggaaagggccaggtatctggtgtctggtacctggtatgtgtgggacgctttgctgagtacgtttattggggaggtctctgagaaactcagttgcacagaattggattaatcacagtctttggttcataacacattcagatcactgg

SEQ ID NO: 14139 - DNA, 1376 bp, Artificial sequence
  DNA replication origin
atggctggtcatccccgtcacagctcacagcccgtcattcacagaccaagctcccctggcttgactcactgccatgtcacacgtccccaggatgtgctgtgcctttgctgggacctacagttctgttgggagtctctttggtgtcatggtcccaactgaggctgtgagaggaaagatgtcctatgacacctgctgccctcagggcctcttcctctttcccttagacgcaggccagctggaacgtccccaggcgttctgtcctggatcaagcaagaggaaggggcaagtgggaggagccagcagggcccacaggagaccactgtggcacacctgtgctcaggtaaggcatgctgggccatgtctcctcaggcctgtatccctgggccttaggagacatggcgtcccctggggggcctcacagcgcctctagtggggccttctcctgggcgaggctcctgagggaaggcagtgcgcagccttggctgtgtctctgcagaatcttgtatgcttgctgcgtggtgtcctcccatgcagttgcacgaaatcattcttttattcctgatcctgtttcctgtttatttcatgaacttgtctgtaggcagcatggtgctgggcgctgcaggggctcattaatgcatgagacacagattccactcaggagagagaagacgaacacagacacagtacacggtgggaaggggcacttccatgtctgcagccagagagccctttcagaatctgacccaaaagatggccagtattctaagaaaaagcacatatgcttacgatgtgcaaacagctgaaggtgttctttcaactatagtaaaaggggtgtctcggtggccacaggcggcccagatgaaggtgctgctggggaaaatgtcaccacgctggtcttgggaggctccatgagagggaggtgggacttgagaggggcttagagcctgggtgagaggcaaagaggaggccagagaccttctgggtagagaggaccctcgggccaaggctcagaggtggatgaacgggggagccttaggtggaacagcacagggtggaacccggcagaggacaatgggagctgatggaggctaggccagagtggggccttcagtgatgcttgaaccccaggcttcagactccagaagagccaagggcaggtggcccggctgcagagcctgtggcaggcaggcctcactcactatacccttctgtgtcctttgcctgcagagacctgtctgggccgcagagaggagtctggaggtagggtccaagggccacgagccagtttgggctgctggaggggggcctggcaaggagggctctcggggaagcacctgtgggggtctgcttcctgaccccagggagctagaggcctc

SEQ ID NO: 14140 - DNA, 1861 bp, Artificial sequence
  DNA replication origin
cttaggtggaacagcacagggtggaacccggcagaggacaatgggagctgatggaggctaggccagagtggggccttcagtgatgcttgaaccccaggcttcagactccagaagagccaagggcaggtggcccggctgcagagcctgtggcaggcaggcctcactcactatacccttctgtgtcctttgcctgcagagacctgtctgggccgcagagaggagtctggaggtagggtccaagggccacgagccagtttgggctgctggaggggggcctggcaaggagggctctcggggaagcacctgtgggggtctgcttcctgaccccagggagctagaggcctccctccctccaggccccccgagccaggctgagccagccgctaggggcacggagcagtgcccaccttgcgcccagtgtggccagagcttcggccagaaggagctcagtgcgccgcaccagcgcgtgcatcgtggcccccggcctttcgctggtgctcagtgtcccaagagcttcacgcagcggaccacccccgccagccaccgtcgggcgcacgtggccgagtgcacctacacccgcgcccaatgcggcaagaccttcctccagcagtcgacgctcacacccactactgcgcgcacatcagggagaagccctacgagtgcgccaagctctttggccgcctgtccacgctgctggagcaccggcacatgcacacgggtgagcggcccttccagtgcacgcaatgtggctgctgcttcagccgcctgtccacgctgctggagcaccggcacacacacatcagcgagaagcccttccagtgtgcgcagtgcgacaagcgtttcacgcgtctggccaacctgaccgtgcaccagagagtgcacttgggcgagcgctccttccagtgcgcccagtacagcaggagattcatgcagaagcccggcttcctgcgtcatctgtgtggccactcgcaggagaagcactatccttgcagcccttgtggtgagagcttcacctgtccctcctggcttgtgcgtcaccaggacagccatgctagccaggcctctccatcttgcctggtttgtgagagggactcctcgaccgatgagccgcccacgggcctcaggggtgcagtgtgggggagcacccctagtaatccttctgccgcactcagatttgagggcactggtacagagctgggcctcaggaggtgccctggggacaggcagcggggcagtggtgatcaggaaggtcttgggtgggggtcccttgcccagttctctttctcgcgtgaagatggagaatgtgggtagcacccagagagctccctaaaggggctctgagggcccaggggcagttggtgccccttaaatctgagcaacctctcctgggggccacttcttggccaggtcaaagtattctggccatggtcttggcttcccgggggagggctgttctcccaggcactgagattgcccatgggccttctcgttgcagggaggcggctgggatagaggccagtcccaaacacctgagcctcactgaggggaaggcctgggcttggagatggggtgcgcaggagtggctggctttgccttgttctattaggcgagtgattttcagagacaaaggtccaagttaggagacgtaattactcagtgctttgaagggacatccaaggtgctcactcttagccatagccgttggtttcctggatgctgactgtgaagattctaaagtgcttcctagggtgggcggtggtggcaggaggccttggacggagtccaggccagacccagcctcctgtttaataggctgagcccaagcgtccctcagatgcgaatccaacagccttggtgagtt

SEQ ID NO: 14141 - DNA, 976 bp, Artificial sequence
  DNA replication origin
cacaaacgattatatttttattttaaagatgtatttatgcgtctctatccatattttaaatatgcacattttctcgattacattaattttgatgacttgacttttagacgttcctctgcctgggcgttttttctcccgtctgatgagaacgggagcgcgctgctgggtgcccggcagggcgcgccggcggcccacgggctgcctcccgggccagcgccacgtcgggccgcgcggggccgcgcgctgccccctgccggccagaggcgaggaggccccggaggccgcggcgccctcacctggccgctggcggccgctctaggaatgcgcgcggccttctcggtggtggcggccgcctcgcgccagagacccgctagtcccgacatccgagccccagccccgcctgccagccggctggcccttagtcgcagtgcgggagccgcccggccgcagccccgaaccagccctggttagcaggagccgctgtcaggttgcttttcttgcacacactggcctgccggccaaggccccagcaaatccccgtgcaaacacagttggtgcaaacacagttagtgcaaacaaaggtgcggccgcaggaatctgagagcacaggaaatatgagacctaccccacctcgaaggctcaacccacggcacaaaacagcacagaagacccggagggccttgggtcccagaaggagaggggactccgtgaattgaccccgagctttagggttgctcaagcttcttcccgggcagcctgcattctacccacttttctcgttgtgcagatgaggaaaccaaggctgaggcccagctcctggccgctcgctgtgtttgtcccatgcggaggtggacctggaggcgctctctcatgataggctgcacttttttttttttttttttttgagacggagtctcgctctgtcgcccaagctggagtgcggtggcaggatctcggctcactgcaaactctgcct

SEQ ID NO: 14142 - DNA, 1356 bp, Artificial sequence
  DNA replication origin
cttgctccattggctctcagctgcactcacagcaccagtgagaccgacacggttgtgccccatcccacaggcgccaaatggagggcgcagggttttaggagctcgcgtagggcctctcgggcggcagcaatggagccgcgaggccggcggggagaccgaggacgggacccgctgagctctgggtgagctggggggactcgaggggacctggatgggccagaggcctggcttggggaagggccccttcccggttccccaaggtcccggtgtgccgctgccgtagggaagcaggaaggcacggccgcgccaggcgacctgaacgagaggaagcccggggtcgccgcccgcgggcgcggctggtgttcatacccagccaggaagggcgggcgggcctcgggtgccacgcggcgtgcccggcgctttccccgcagtcccgcttgctgcccgtccctggactccttatcaggcagctgggtgaccttgctgcaaagggcagggccgtggagcaggatttctgccgcacaccagccacctgcaacggtggtaagaggatttggcagtgatccgggtactctacctaatattggggctgaaatatcagaaggaatgataaaatccatttttaagtgatagcgtttaaaggtgttggatcaggtttaatgaagaaaatcatctccatcccagctgggcagagatttgggattgtacccgtgtttcttcccgcacattgtcacctgtggcttgttcatccgttcatttcgcgtgcactgaggacctctgaggaccttgcgccagactctggagcaagcgcgaaatgaacaaaagccggccctgcccttgggaaaaatcaaacacacaatggccgctgagtgcacgctccgagcacgcgccaagccctggaaagcccggtagaggggaccctccaacctcccgcagtgatgcgtgtgtggccaggggtcttgctaggctgcaccttgcacctgaatctcccgttgccttcaccgtggaagcgtttgctgtaaaaataacatgggggttggggcgggggagacgtctttgtagctttctcacagggcttaagacatctgtcctgctatcttccccggccttccagggattctcagtggatgttagctctctggatttcactggcaaggttatagagacttaccattttctgatatgaacatctgccaagtaacgcatagagaataggaaagcatgcatatcccacaaggaaaaaaaataaaactaagaaactgttctatcaaagaattaagtaagcatggagtgtgtcactggataaattaaacatacagagtttggattgaggctaggaaaggttgaagcaagaga

SEQ ID NO: 14143 - DNA, 1189 bp, Artificial sequence
  DNA replication origin
gcgagcggccctaccactgcgccgagtgcggcaagcgcttcacgcagaagcatcacctgctggagcaccagcgcgcgcacacgggcgagcggccctacccctgcacgcactgcgccaagtgcttccgctacaagcagtcgctcaagtaccacctgcggacccacacgggcgagtgagcgcgcgccccgccgccgccgcccggccaggtgcgcgggccgtgccccccctcggacaccgccaggcccgagcccagcgggcgggggcggggcgccccccagcccctttgccgtgagctccccctctcctctcgtccctcctcccaaggacatgggggcagtgagaccaggtcccttgctgccgcgtttccccgggggccccaggggggagggcgcggacctggggaaccctttcgggctgttaatttccttgacaataaaatggatgaaaccaatcagcacggggggcgtgatttggccgccggccactcagaggggcggtgtagggcccatctagttggggatagaactttataattaccttttggatactgtggttctatttgataataatagagtaatttttaaaagaagagcgtttcctgtttgccgtttttgtttggtttgaaggggagggattgagaaggccggagggacatacgctagtgtcagttgacaggttctgttgggacccttttttgtgttccttctccatttgggtggtgagggagacgctgatcccgccggttctgaaatggaggaggagaggcaggactgacgtctaagggaccacgggaaccccagaccatcgcgtctgccctggagtccatgaggttgctgggagctcaggactgaataggtcccagttgactagcgtggtcaaggagagtgacggtcaggtttggaatgagctggaaagaaggtcctgtagcaaaagctgggcgctgccttcagtgcccaggcgttcctgcgtagcttgaaatgcagctggctgaggagtagggtggcgggagggaagcctagggaagaggtgcagaggcccctggtgccagtctttgcggaagccacaaaaggcaccagtcagaacattttttatttgaatgttgcaccaaagctactctggacttgctgaacgcactgacgaaccctggtttctctaggtattcattcatttcccatctccctccagctct

SEQ ID NO: 14144 - DNA, 1190 bp, Artificial sequence
  DNA replication origin
ccctggagggggcccgcgcgtcttgacccgggcggtgggggagggctacgggcctcgccgccgtccgtgcgagggaggctgctctcacgcccggcccggcacacacgcggccccgaggtggggcgcccggaggcgcgctcgctccctgcggggcccgcgctgcgtccgtcggggtagccgccggcacgttttccgcagagctcggccccgcggagccttccccggcccgggcgcggcgctgacgcggctctcccatttcgcagaacggagacactgaggcacagacacctggcggcgacccgccctgccggccccaaggtcacgtagcaaggcatccgtggcacggtgcggcagccccagaaaggcctgcccagagggctgcgggcctggacggggagggggtggctctggcggcggccgcccctgggtgaggggctgggccgccctggcagcggacgcggcccgtcgggggcggcgggggaggccgggcagcgcccagctgggcatctccgcggtgggagcaggtgaccctctgagctccagcctctgcctccggcctctgcgtctggaaggtcgtaggctaaactttgagtgccctgacagatggtgtctggggagtaagcttctcaggggttgggggctgatgttcctcttcaggaagacactcttaaaaaatcatccctcagatcctcccgcagacctgctctttgagacgccctggccgtgctagtgagaggattactgcatgggagtcagtgcctttgagcctcagtttcctattgtgtacacaggaaggaggcaggatatatagctttctaaaaagcatcccaattctttaatcaaaaaaaaactcatgagaaaataaaatcaaacgaagatgtttacatgccttactctgggctcaggccttcggggcccttgaatggtatataatgctgggtgaaccatactgggtcattcaaaaaaatgccatgactttcttaataagtcagatactgtggttatggatgcttctgctaatgtggcatgaatcctggagaatccatccactcctgatccgtcggggaaggagggaccgttaaatcctacaaatatggttcagaagaattctccctccaaccccctaccaggaatttgagaatttgagcttattcgttttaggtatatttacagctccctccctctctttg

SEQ ID NO: 14145 - DNA, 1407 bp, Artificial sequence
  DNA replication origin
ggcgtcggagctgggcgcgcggctgtgcgggcggcccggccggctgcgtcccggcggcgagctgggccccggccctcaacggcggcccccggcccgcgcgccgcccctctgcggccgcggctgggaccccagctccggccccggccccggctgcgagctgcgctgccgtcccggcgcctctttagcaggggagctgcacagcagctgccatgttgctacaaactgcatcctgggaggcatgtccctctcaggccgtttaaagagaaacactccgaggctcgtcggaggctgccggaacccagacagctccatctacagccggtaggagcgaacagtgtcgagcgagccgcccggcggcgacggacacgccctgagcccgggccagcccgtcgtggagcccgggccgaaccgccggggcctcccaccctccaggaccctccggcctctcacctggggtcctcgcctgcccaggcaccctcgggcgaggccgggaggcgcgcgggcggaggcgcagtcggagcgcgcagcccaggcgacgtgctggggtctggaggcggcttgattggctccgacagccttcctcccgccgatcccctgcgcctctcacacccagaacccggggtcgttccctttcaaaacctgcgctcacaaagggatctaagaaacccgtcacaccagagaaagcccggagttcatgtgaccagctcagtgcagcccgggttccagggacgcgggctgtgcttccaaggggagccagggggttgggtgcttttgtgaaatgcccgagtgttgttttcgacatgaaaggaccgaattcctagaatcagaccctgctggggctggaagtggccagacgggtcatttaggaggaaactgaggccgagtgggcagcgacttgtttaccctcagtcacagtatgaatgaatgctctttgtaaccatgagaagtcccaaaagaaatgcaggagcttagagttgagaactccccttcctggacaggtccacttaaacatgtattaattgaatacctacgaggtggcgagaactggggatgaattgaaaaggaaaaaaaaagaagaaactataggcaggcgtcctggttactagcgatgaagcccaactggaactaacttaagtgagggaagacggcgggggggagcagaggacattgtgtttacctaatggaaccccaggagtggagctggtcttggaaggcaacaggactcagtatgctggcagctcagataatggaaagttatggccagacgtggtggctcatgcctgtaatcccagcactttgggaggctgaggtgggcagatcacgaggtcaagagatcgagaccaacctggctaacgtgatgaaaccctgtctctactaaaaataccaaaattagctggacgtggtggc

SEQ ID NO: 14146 - DNA, 764 bp, Artificial sequence
  DNA replication origin
tgcgagagcccgcccggcctgagagggacatgggtgagctcagtcctgctgtggcccaggaggagacccctcctggggactggctcttcggaggggtccggtggggctggaatttccggtgtaaaccgccagtgggcctgaacccgaggacggggcccgaggggcttccttactcctccccggacaacggagaggccatcttggaccccagccaggccccaaggccattcaacgaaccctgtaaataccctggccggaccaaaggctttggccacaagccagggctgaagaagcaccccgcggcgccccccgggggccggcccttcacctgcgccacgtgtgggaagagcttccagctgcaagtcagcctgagcgcgcaccagcgcagctgtggggcgcccgacgggtcgggcccgggcacaggcggtggcggcagcggcagtggcggcggcggtggcggcagcggtgggggcagcgcacgggatggcagcgcccttcggtgtggggagtgcggccgttgcttcacgcgccccgcgcacctcatccgccatcgcatgctgcacaccggcgagcggcccttcccctgcaccgagtgtgagaagcgcttcaccgaacgctccaagctcatcgaccactaccgaacgcacacgggcgtgcggcccttcacctgcaccgtctgcggcaaaagcttcatccgcaaggaccacctccgcaagcaccagcgcaaccatgcagcgggcgccaagaccccggcccgaggccag

SEQ ID NO: 14147 - DNA, 1008 bp, Artificial sequence
  DNA replication origin
tgcccgggcccgacccgtcgggcgccccacagctgcgctggtgcgcgctcaggctgacttgcagctggaagctcttcccacacgtggcgcaggtgaagggccggcccccggggggcgccgcggggtgcttcttcagccctggcttgtggccaaagcctttggtccggccagggtatttacagggttcgttgaatggccttggggcctggctggggtccaagatggcctctccgttgtccggggaggagtaaggaagcccctcgggccccgtcctcgggttcaggcccactggcggtttacaccggaaattccagccccaccggacccctccgaagagccagtccccaggaggggtctcctcctgggccacagcaggactgagctcacccatgtccctctcaggccgggcgggctctcgcagccccagcacagggtcctggctggggaaggagctgccctggctttcccaggctccttcctgggcaggactagggaagaaccgtgtggcttggcctggtccaaacagggtcccgtgagcctctaggtcagtaggatgtacgggtgtggccaccacctcctcttcctggacttctgtttttattacaatttttacatctgctgagaaagacagaaagacagatactgacctgtcccttaactgctgagcgagccacgatctgccaccatcacctgctcagcagctgcctggccagacaaactccacccaggccctcgtggctgagcccagagggcagctcagcagagcagcctggtggctgtgaggctgcctccccctcgaggacaccagtgttctggcaccttcaccacaggacaagccaccatatctgctccccaggctccatttttcagtttggctgttaaggctaagcatgaattgatcctcagaaaggaattcgaactgctgcaggcactgtgccccaccacagtgcagggaatgggggttcagacagctcggccacacaccagctgtgggctgcaggcagtttc

SEQ ID NO: 14148 - DNA, 860 bp, Artificial sequence
  DNA replication origin
aaaccgtattatatattgtttacagctaccaaagtacacagcagacgttttaaaatgtggatagaaagaataaacagaaaattcctagggaggcctgggagacctaaaaaggaatttaaatgctatcagaaatacattatttcacacacacacacacacacacacacacacacacacacacacgttttaaattttgaaacagcatacattcagcaaatagttattgaattcctactctgtactaggcaatactctaggttcctaaaatgattaaacaggtaaaaatttttatacttttgaaattgacattctaatggaggagacctgacatacgatgaatctataaataggaaacatatatattatgtgacactgtctaacacggaagacccaaagcaggaaagtaggcctggagtcctgggtggggagggcctgcagtgccgatgacacgaaaggcctgcaggtgggacctgcctgaggaggattcccagtagagggcactgcgaaggccctggcacagggcggagggaacagcaccagggaacagcactctgcagctgggcagagtgagagaaaagtggaggtggtgagctgacggtgcgggtcagatggaaagccaggacttgggtctaaaagggattactctgctgggctgaggcaagactgggggatcagggcaggaggagaggggctggcaggagatgacgggcctacgtggcagagtagaggggacaaggccaagtaagaagacagaccattcaggaccacggagggccctggtaaccgaggttggagaggttttggtggaaggggtaacagagtgggggggaaggtgcaggagacagcaagcgcagatgtcc

SEQ ID NO: 14149 - DNA, 942 bp, Artificial sequence
  DNA replication origin
ggcgcccaggtggaagcttgcggtgggctccgggggaaggagtgtcagggggcctcttggtaccgctgtccacccctcctggcctgatgctctgcgcctctgtgatttgagccgggcttttagggaaggctaggatttcaggcccagctagaccggtggtgctttcagggagggaggagtgcctgggcaaaggcgcagagagacgggacagtgcagggcgtgtgcaggcacagaaaggagtccatgagcctggagaagatggttttggtttggaggcagtgggaaaggagtctgcagagagagactaagaaggggtttgcatgcctggacttcatcctgcgggtgggcagtggatgagggatccggctcctcttaccatcagctcctctcaagcaaagagtttcagctcccctggcaggagtccaaggacagccccacatattccagccacttgtcagtaagaagctgggctggagtgagcagcgcacagtcgccacctcccaccacatagtgtgaagaccttacacagggtttcctggccccatcagaactgtaagaaaaccatgcaccttgttgtccatgagtaaaagactaatattttcttaataaagtagtttagcagaggtccctttcatgccacacaaagcccataataatgcacgtggaggatgggtaggatttcagtggataaggagctggtgaccagttgaaaggaagcttctggagtaaactcttggcgtctgggatcacgtgacagggattgatctgagaaaggagaggtgagggaaggaacagtggccttaggtggagggtggactcaagcccagaaccacgctggcccacccaggtgctgtaggaccacctactccttgagagcaagactcccacccgcattggggttttcgcctagaaacagttcagcttgtccagaatctcccagcc

SEQ ID NO: 14150 - DNA, 1393 bp, Artificial sequence
  DNA replication origin
ccggccgggcgctgacggaggcggcgcgactgcgggcggcgcggcgcaggggcagccagcgaggagcggcggcagaggaaaggccaggcaggcgccgcctgcggagagcaccgggcggccgggcctgcgtggtgccgcgcgcggcggcggcgacgacgacttcctccgggccgggcgggacagcgcagggccatggccgaggcggtcgcggctccggtaagggcgacccgcgcgcgcagggactcgcggcctgggggccccaggcggcccggccccggcacacggcgccgcaggccctggggaggggttccggggtccgggccggaccaccgggcctggggctcccgcgaatggggcgcggggtccgccggggcctactgcgcccgtcggccgggcccccactccgagccgaacccgagcgctggcggaacggttgtccccgccccgggccgccccacgccaagttctttgggccctccggggcttcctgcccccgccccagccgctgtcccctccttctgggtgcccccccacccgcggctcctttctctgcctggcgctcggcctgtaggtccctctccatctcccccgcagcggcctggtggcacctgggaggtgtccggcttcgaatccgcatacaccgactcccactacgtgcccagcttcccggggtcggcgcggaagggaatatagagccacgcacttccacaagccctgttgaggcgttagtctgtcctcacagcaagcctgtgggatgggtactggtgttaatctctgtcatacaaaagaaaaacccggggcctagagaacttaacttgcccaggcttacccagctggaaagtgtgaaaagacacacagtggctgtgtgttcaaggaccaggcaggcaggtacgcgggcaataatcgtgcaaaacagaaaggggtgagtgctggcgcccaggtggaagcttgcggtgggctccgggggaaggagtgtcagggggcctcttggtaccgctgtccacccctcctggcctgatgctctgcgcctctgtgatttgagccgggcttttagggaaggctaggatttcaggcccagctagaccggtggtgctttcagggagggaggagtgcctgggcaaaggcgcagagagacgggacagtgcagggcgtgtgcaggcacagaaaggagtccatgagcctggagaagatggttttggtttggaggcagtgggaaaggagtctgcagagagagactaagaaggggtttgcatgcctggacttcatcctgcgggtgggcagtggatgagggatccggctcctcttaccatcagctcctctcaagcaaagagtttcagctcccctggcaggagtccaaggacagccccacatattccagccacttgtcagtaag

SEQ ID NO: 14151 - DNA, 1297 bp, Artificial sequence
  DNA replication origin
gctggccgggcggggcgctgaccccccccacctccctcccggacggggtggctggccgggcagggggctgtccccccacctccctcccggacggcgcggctggccgggcggggggctgacccccccacctccctcctggacggggcggctggccaggcagaggggctcctcacttcccagtaggggcagctgggcagaggcgcccctcacctcctggacggggcggctggccgggcggggggctgacccccccacctccctccaggacggggcggctggccgggtggggggctgactcccccacctccctccaggacggggcggctggccgggtggggggctgatccccccacctccctcccggatggggcggctggccgggcggtgggggctgacccccccacctccctcccggatggggtggctggcctggcgggggctgacccccacctccctccctgatggggtggctgccgggcggagacgctcctcacttcccagacggggtggctgccgggcggaggagctcctcacttctcagacggggcggttgccaggcggaggacctcctcacttctcagacggggcggcggggcagagacgctcctcacctcccagatggggcggcggggcagaggtgctccccacatctcagacaatgggcggccgggcagagacgctcctcagttcctagatgggatggcggccaggaagaggcgctccttacttcctagatgagatggcggccgggcagagacgctcctcactttccagactgggcagacaggcagaggggctcctcacgtcccagacgatgggtggccgggcagagacgctcctcacttcccagacggggtggcggccgggcagaggctgcaatctcggcactttgggaggccaaggcaggcggctgggaggtggaggttgtagcgagccgcgatcatgccactgcactccagcctgggcaccattgagcactgagtgaaccagactccgtctgcaatcccggcacctcgggaggccaaggctggcggatcactcgcggttaggagctggagaccagccgggccaacacagcgaaaccccgtctccaccaaaaaagtacgaaaaccagtcaggcgtggcggcgcgcgcctgtaatcgcaggcactcggcaggctgaggcaggagaatcaggcagggaggttgcagtgagccaaggtggcagcagtacagtccagcttcggctcggcatcagagggagaccgtggaaagggagggagaccgtggaaagggagggagaccgtggaaagagagg

SEQ ID NO: 14152 - DNA, 918 bp, Artificial sequence
  DNA replication origin
tgcccagctgcccctactgggaagtgaggagcccctctgcctggccagccgccccgtccgggagggaggtggggggggtcagccccgagcccggccagccgccccgtccaggagggaggtgggggggtcagccccccgcccggccggccggcccgtccgggaggtgaggggcgcctctgcctggccgcccctactgggaaatgaggggcccctctgcctggccagccgccccgtccgggagggaggtgggggggttggcccccctcccggccagccgccccgtccgggaggtgaggggcgcctctgcctggctgcccctgctgggaagtgaggagcccctctgcccggccagccgccccgtccgggagggaggtgggggggtcagccccctgcccgccagccgcccgtctgggaggtgaggggcgcctctgcctggccgcccctacagggatgtgaggagcccctctgcccggccaccaccccgtctgggaggtgtacccaacagctcattgagaacgggccgggatgacaatggcggttttgtggaatagaaaggggggaaaggtggggaaaagattgagaaatcggatggttgctgtgtctgtgtagaaagaagtagacatgggagacttttcattttgttctgtactaagaaaaattcttctgccttgggatcctgttgatcggtgaccttttacccccaaccctgtgctctctgaaacatgtgctgtgtccactcagggttaaatggattaagggcggtgcaagatgtgctttgttaaacagatgcttgaaggcagcatgctccttaagaatcatcaccactccctaatctcaagtacccagggacacaaacactgcggaaggccgcagggtcctctgcctaggaaaaccagagacctttgttcacttgtttat

SEQ ID NO: 14153 - DNA, 1602 bp, Artificial sequence
  DNA replication origin
aaaaaaatgtggatagaaaggataaacagacaattcaggacaagcggctgccctacagaggtctgggagacctaaatgatatcaaaaatccattatttcgcacacacacatcacacacatacacacacacacattttgaattacaaagcatggcatacattcagcaaatagttactgaattcctactctatgctcagcaatatctcaggtgcctagaatgaatatatgaagaaaacagttaaaaagtctttgtactttgaaactgacattctaatgaggtagacctgacatacgatgaaatctataaataggaaatatatatattatgtgacgctgtctgacacggaagaccgaaagcaggaaagtaggcccggagtcctgggtggggaggggctgcagtgccgatgacaggaaaggcctgcaggtgggacctgcctgaggagcactcccagcagagggcactgcgaaggtcctggcacagggtggaggggacaccaccagggatggtgcagctgggcagagtgagagaaaagtggaggaggtgagccaatagtgcgggtcagatggaaagccaggacttgcgtctaaaagggattactctgctgggctgagatgagactctgggggatcagggcaggggctggcaacaacctcagcaagagacgataagcctgggtgtcagagtggaggggatgaggcgtggacagactctgggcaaacctggcagggagggccagtagggtttctggtggagtggatgcggatgtggaggaggaggtcagagaggactcgtggggttttgcctgtaaatggaaggatggagcggccatttactgggttggggagaatgtgggaggagcaggctattcagagaagacaggagctcagcgctgggaatgtttggggggagtttatgagacactgaggtggagatacaggccaagcagctagatgtgcggaatttggggcaaaaacccaggtttgaggcacacattcctagatggtatgtgtggccccaagaccctgggagacgatgggaatgaggaaatgcaagtagagagcgggtgtgagaaccaagggcgctctagggctgagaggctccacagggcaacaggaaccagcgaagaaagagcagtgaaggtgggtggcaggtgagaggaaagtgagcaacatggcaagtgttacgaacaggccaagtaagaagacagaccatttaacaccacggagggccctggtaaccgaggctggagaggttttggcggaaggggtaaaagagtgggagggaagaggcaagagacagcaagcacagatgtacccaaggggctctgccacgaagcggagcagagaagcaggccgtggctgtaggggtagaggtcaaggtaggattgactgtgttgcccttgagaagctggcatggggtgggatgcagcaccaggtggaagtggggctttggctggagagtcgacagtttagcagtcacaggactgaaggcagagaagggggcacaggtgcaggcagatggcatggggagagctgtgcaagtgagtggtgtatttctctttaattaaaaaaagggggttaaaatataaaaccaatcgcagc

SEQ ID NO: 14154 - DNA, 1363 bp, Artificial sequence
  DNA replication origin
tacagtgcggaccggccgggcgctaaaggcgttgacgcaactgcgggcggcgcagggcaggggcagtcagggagcagcggcggcagagacagggctgggcgggcgccgcctgcggagagcaccgggaggcgggccctgcgtggggccgcgcgcagcagcggcgacgactttatctgggccgcgggggacagcgcagggccatggaggaggcggccgcagctccggtaagggcgaccagcgcgcgcacgaactcgcggcctggattccccgggcgacccgggcccggcacacgggggctgcgggagccgagccgtactaccgcgcctggggctccggggaacagggccgcggcgtctgccggggcctactgcgcttgccagccgggccccccactccgggccgagcccgagcgctggcggaacggttgtccccgccccgggccgccccacgccaagatccttggcccctccggggcttcctgcccccgccccagccgctgaaccctacatctgcgtccccccacccgaggctcttttctctgcttggcgctcggcctgtgggtccctcccccagctccccccagcggcttagtggtacctgggagttgtgaggcttcgaatccgcgtataccgacaccccttacgtgcccagctccccagggtcggcgcggaagggaatatagagccaggtactgcaccaagtcctgttgaggccttagtctgtccttctgtcctcacagcaagcctgtgggatgggtactggtgttatctctgtcatgcaaaagaaaaacctggggcttagagaagttaacttgcccaggcttgcacacctggaagtgtgaaaagacacacagtggctgtgtgttcaaggaccaggcaggcaggtacgcgggcaataattgtgcaaaataggaaggggtgagtgttggcgcccaggtggaagcttgcggtgggctccgggggaaggagtgtcagggggcctcttggtaccgctgtccacccctcctggcctgatgctctgcgcctctgtgatttgagccgggcttttagggacggctaggatttcaggcccagctagaccggtggtgctttcagggagggaggagtgcctgggcaaaggcgcagagagacgggacagtgcagggcgtgtgcaggcacagaaaggagtccatgagcctggagaagatggttttggtttggaggcagtgggaaaggagtctgcagagagagactaggaaggggcttgcatgccaggacttcatcctgcgggtgggcggccagtgagggatcgggctcctcttaccatcagctcctctcaagcaaagagtttcggcttcctggcaggagtccaaggacagccccac

SEQ ID NO: 14155 - DNA, 998 bp, Artificial sequence
  DNA replication origin
gatttatatacatccaagaccatggagggggctagaatatggacttagaagagcaggaatgtgctacatgggaagcactttctgcaaggaaaagctaatggggaactccaagatttgaactcgtgcatgaactggacccctggagccagtcctcacactccatgccccagccccagggatcagccagagcagatggcgggcaccagaatttaaaccacggaccatagcaagctgcttgtcctctgactatgctgtagttcagtggctccttattttggaggggcataggatacagagagctgaggcttagggaatggaactggcaggagatgggggcattccagaggacgagtgagtacaggaggaactgggctgaaggagagcagacctggctaggcactaggagtgcggatgctacctctgcaggtggcatacaggggcagtcccgctgagggcaggctgggttcactcctaggtgtctggtttggggatttggagagttagcagtgccaatcactgacgcagcacttagggggaagaagaggagggggaggggacaagggaggaaggagaggaggagagggaggaggggaagagagaagtagaggagagggaaagaatagggaagaggaagaggagggagagaaagggggggaaggagaggagagggaaggagtaagaggaaagggagaagacaggagggaggaggaggcggagtttgagtgtggacttcctgagtgtgacttttctgcaagaactgtggaatgagaagaagagggttttgttttacacaggcagaggaaagagtggccagccaggcgggaggatgagggggaaggagcagtgtcctgaaagcaaagggaggagaagagagttctatgaagggggaggaaggggacaataataattttaaaaaacaataataataggccaggcacagtggctcatgcctgtaatcccagcactttgggaggccaaggtgggtgggtcacctgaga

SEQ ID NO: 14156 - DNA, 2283 bp, Artificial sequence
  DNA replication origin
cctggcgcgccatccccgggctcagcctccccgccactcctcggtttccggcgcgggccctggcgcgggcgcacgcgaccctcgtcggcggcggcccaggtccgcgcaggagaaggcggggccgggggcctgggccgagggggaggggcgggggtgggcgcgcccgggcccgcccccggcctcgttgagcccgccccgagcgcctcgcatcccttggtgggtggtgccgtttccgcccggagcccccggcttcggcggcccggccggccggcgcagacgcggactacacttcccagaaggcgccgcggcgccggctcggaagcggggggcggagacagggcggggcggacctggctcgggcctcgtccccgccccctcccctcgtccccgcccccagctgcgggtagaggttgcgcgccgagaccagccggggcggctgtgggcgtgcaagcccgcgggtacgcgccgcttatcactcattcattcccgcagccaccactcagcgcgtcccatgtgccaggggctgatggtggggatgaagagggacccatctttcccagaggccgcggtcggggaaacccgacctggagtgaaaggggtcgagggtccggccgggcgtgggtgggacagagcagctgccaggcccccgtacatcctcacgtctttcgcccgcgcccccgctcgccgcagccatgacctaccttcgtgtcacattttgcgtgcctgtttgctggggtggtaaccccagttgttcctggcacatagtaggcctcaaataaacgtgtgatgcgggaaggaagcgcggcccactctcctctgcctccccctgcgcttcacgagttcgaaggcctggtctgggcgggcgctgcgagagcgctccgggggtgcgggcgaggcgcagcgagcctggttttcctgtctggagaaggaccccgtcatttttatagaaggctgctggaagggggcctgcggggctaagcctgctgtgccagacagaagcttggaggggaaggggaggctgtggtcccacgcagaggagactctgctctgagtttggaagccccgtccagaccttgcggcccagacagcgctctgcctgggcaatatcggagggaaggaaagggaattcctcgcccagtcgcccggggctggcccttgcagccgcgccggccatgatcacggactcgggtacgatgccgacaacccctcgtcccggcctccgaggaaaggcgcacgcccactcgggcaaagccccctcggtcatacccgagacaccttagacacaggaccggcgtgtgcgcagcctgctgaacaaggatttgaagatatcacaaggccccacctcgcggaaagggaaaacttaaaagtccaacttttcaagagccctacaggccacagccctcagggtaagtcgcctcctgggctttaggccgggtcccacctccgtgccgaggtgaggcgggctccttacagtaatgtgttcctgctcccagctcctctccaccgcccaccctccggcccgggatccctaaacgttaaaaccccctaaatcaggggtccccaaccttttgggccagagcccggttttgtggaagggaatttttgcatggactgggaggggggttgttttgggatgaaactgttccaactcagatcaccaggcattagattctcctaaggagcccgcaacctggatcccgcattcacaacagggttctggctcctatgagaatccagcacctgcagatctgacaggaggcagagctcaggggtaatgcgagcaagggggagtggctgtaactacagataaagctttccctggcttgcccgcagctcacctcctgctgcactgcccagctcctaacaggccaggactggtactggtccatagcccagggactggggacccctgccttaaacttaaacacctgtagaaagaaatctctatccaagtaagatgcacctttgttttaagctgtgcagattcttggcacctctttgactcaaacgtccacttcctggctaggcttcctgccccatttgtggaccatcagtcgctaaaagcagttcaccaacatgaaatttgctgcatggccaattatttaaattatggagacacttcctggcacccctatcccccaaattttagttgcgcctttgaccctgtagacctgtatttacctcagcccgtgtgtgtgcgttaaaaaatagttgtgaagacctgtcctgaaccaggtttattggatggctctggacacagacaaaggcaggagtggagctgaa

SEQ ID NO: 14157 - DNA, 1970 bp, Artificial sequence
  DNA replication origin
gcgggaatgaatgagtgataagcggcgcgtacccgcgggcttgcacgcccacagccgccccggctggtctcggcgcgcaacctctacccgcagctgggggcggggacgaggggagggggcggggacgaggcccgagccaggtccgccccgccctgtctccgccccccgcttccgagccggcgccgcggcgccttctgggaagtgtagtccgcgtctgcgccggccggccgggccgccgaagccgggggctccgggcggaaacggcaccacccaccaagggatgcgaggcgctcggggcgggctcaacgaggccgggggcgggcccgggcgcgcccacccccgcccctccccctcggcccaggcccccggccccgccttctcctgcgcggacctgggccgccgccgacgagggtcgcgtgcgcccgcgccagggcccgcgccggaaaccgaggagtggcggggaggctgagcccggggatggcgcgccaggtaaggcaggcggacgcgcggacccctcggcgcagtgcggccccgaaggcggtagggcgagaaagagctgggacccccccgcaacttcgggatcggctgggtgaggctgggcaggcctgatgctcaggggttcgtgccgggaagttcaggtcctcggacaacctctctccagctctccgccgccggtacccacggcccagtctccacctggggaaacccccttggcgtggcttgtttcgttacaagttatcctggtagagtgggcatgaaggcctcggaggcagtgagtaaatctcatacttctgttcttggtggaatcctggatcccgggggctggggacgtggaaatggggagaaacaaagatagaacaaaccccaagttttgtcttgggaagcctgcaggtaaggcgtttagatctgagaactggagggagagccccaggccgtgacagcctgggcaccgtttgggctaggttgtgtgtgggctgtgacgatgctgggaaactctggtgctgatatcagtgaggtatcaggtatctggtgctgataccagcaactgctccacgttcttctggatgggcacctggagccagttctgcaaccgtggtggctcctgagctttggccagtccgaggcagccatggatggggggcagcgtgtgactaggcagagcaaacactgtgccaggcccttggcgtcattagtgcccccaagcatttggggagaagggagaggctaggcaaattggatgttgttgggcagggacagtcaagtgtccttttcaggtctggctgcacagttaagtagcctagggacaccctggttcagacatgcccatggccccatcctaaggcctcctcataccacagtttcctgttctgtaaagtgaggagtttgggccattgacctttcagatctgatgaggggaatatcctcacactacgtagcttcatggagaaggtggccaggagtgaccttggggagtggtaggtcactgtaaggtggagaggagcagggagggttcccagaagcccagggcaatgtgagcacagcctccaggttgagaggtcctgtggcagggtctgatcagggagcccgagcctgaggcccactgggagagcaggtctaggttgggaaggactgtgagagaggggcaggtccagcaggcactgaagctgcagtttttgtgctgggctagtgacacggtggaagggtgatgttaggaggaccagtgtgcagctatgagctaggaggctgcccagttacaagagtcctgggtcagcccagaaagcttttctccattggttgggggaaggaggtgaagtggggcccgaggaggaaggccggtggtgtgtgggcagagccagccagtggtggccttcctcctcccgaagatgagttttgtagcccaggtgtttgcacactcacacttgctcactccctcacacacaaaaccctcactctttgctttttctggggag

SEQ ID NO: 14158 - DNA, 1634 bp, Artificial sequence
  DNA replication origin
ctccatccacacacagaccacccccctccacttccccttctgtcctgggtgagttacatttagccagctgctgttaattggttctcccaaataaaaatgtaatatatttattcactaagccaccatcctggctcctgcttctagctcggaagtataaggaaggaagattggggtgcatttctctcacgccacgtgtcaccgactagagctgaaggggggcaggccgtcctttggcgtgggcttgggagctctgtgtggtctccgcaactctcctgggggattcggagctcggtggcgtgaggaaggaggtggcacatccactgcagatgaaggttgctttcacatcgcacttgcaacaagtcctttcttaaggctgctgggtccagaagtctctgtattgcccttctccagcccacgcaggtatgagagctagggctgcctggccgtgaacggggagggtaggacgatggggagcctatggagcttgcagtgagtagtcttgggtttgacccccctctgcctctcgtgggacttggagcgcagcattattcatttcccagtgagcggggatgagaggccagagcagtggcctgagagatgaaggggtctttcacacctgtgaagcagtttagaccgtgtccaagggagggggaaccatggcaaggttaggcggggcaggaacagggccacgctcacattcctgaagtttggaaagatgtttggctagacaactcgggagcgaaattggaggcctgcgcatcagttgtcctggtgacaggttgtggtgacctgggaccatagttgtgtcagaggagacagagaagtgatggattcaagagacacttaataggcagaggatacaggacctgttgactagtgtgggtcggggaatcaatgagctcagcccgatttctgtttgacactgactggatgacagtggcatactcccagaagggagactcggtgttgggggcagctttgtgctgggggagtagtcctgggtctcctgagttgtgagcagtgtgtgcccagcaggaaggaggctgtgtgggtggagagctcaggagagggccaggctgcagacatacagctgagaactatccgcatgtgcttctgaagctatgggggagcggatgatcttcccaaagaactgagtgtggagtgagaaattgggggcctgggacagaagcctctgggacaccaacattaggggatggcaccgagagaggcctgtaaacaagattggagagtgcaggtgcaaggactggacaggaaagccccaggtagaggtgatagaggagccgaggaaagacgcgcttcagggaggaggaggccgctggaggctagagagaggtcacctaggcgaagggcttccaaaccctttggatgtcgctgcaagcaaatccagtctcggtgacagcagcatcaggagcagctgggtcagaattcagatcacaatggtgaactacaaaagcaaaatcccagagaaggtaggagacaatgagacctggacacaggtgagggaggggcgttggctgggaggcctgtcagaggatgcatgaatgcaggcgtgtttataagtttcgtggccaagaatgagttggtgactccaggttattttaaatatcttgaaa

SEQ ID NO: 14159 - DNA, 950 bp, Artificial sequence
  DNA replication origin
gtgaccgccgcttcggctcgcggcctaatctggtcgcccactccagggcccacagcggcgccaggcctttcgcctgcgctcagtgcggccgccgcttcagccgcaagtcgcacctgggccgccaccaggcggtgcacactggcagccgcccccacgcctgcgccgtctgcgcccgcagcttcagctccaaaaccaacctagtccgccaccaggcgatccacacaggctcccgccccttctcctgcccgcagtgcggaaagagcttcagccgcaagacccacctggtgcggcaccagctcattcacggcgaagccgcccacgcggccccggacgccgcccttgcggccccagcctggtccgctccccccgaggtggcgccgcccccgctcttcttctgagcctagttctcacgaggaccctttcttgcccacagtttcgagaggcccgtgccatgagaccgcctggggtgagcaaggcgacctgggctgctgcccgaaggtttggccgccgcgggacacctgtttccttcccgcagtgtctgcgtccgcacagcatacccagctcggacctcctaggacagagactcagcgaacccttgctgggaaccgctgagctgaagttcttggaaggctcccacccaggtgccccgttggaaagcagatatttcccggacccagcgcggcctcaaccagggcaggaaagagtggttatttatgtacttaaagtttcattaaagttaaaatcggaaagttctggggctgctaaatgaattgggggagggaacacctgactctccttagccactgtcccacctccatccacacacagaccacccccctccacttccccttctgtcctgggtgagttacatttagccagctgctgttaattggttctcccaaataaaaatgtaatatatttattcactaagccaccatcctggctcctgc

SEQ ID NO: 14160 - DNA, 1027 bp, Artificial sequence
  DNA replication origin
cagcggaatcccctgcaacctgcccttaggctgaggcttccctagagggccttccctgtttctccagagccagtgttcactagttccccagaccctgtaaactccatcgtggtcttcctaaatgggacttctcctcaggctgtccagcaggaaagaagggagtagcaggaatacgtgggtaccctggttccgtggccactagaggtaaggtgggctgggggtaggggttagagagcaagagaagcagcccaggtgagatgtcaaagatcaagttttcaaggccaccagggaaggaggctctagtcctaaggttaaagtcagccagggctcagtttgggaagctcaggtgtgtggtgagaaagctgctgagctgcggccagtttgcagtaccaaggagagctgctggaccagagatggagactgaggtcccagaaaggcactgctggagcaggaagatctgggccagccaccaaagggatgtgaacctggagcgaagcaggaggactgaaacttgggcaaccttcctcttcaggggtgctggagggctcctgggcacatccaggccggggaagaagcccccgggagccgtgtggtgttcacacgcatcacaggttcaggagaatgcaggagggggcctgagaagagctgcggatttggtcactcccgggaagcgttaggtagagtggagagcagagccagaccgcggggctccaggaagtggagatcctgtggttaaatagacgttgccgcacgtggagctcaatagacaattcttgttttgactttccaggagaggagtggatgattcggaaggtgaaggtggaggacgaagatcaggaggcagaagaggaggtcgaatggccccagcatctatcgttacttcccagcccctttcccgcgcctgacctggggcatctggctgccgcgtacaaactggagccaggggccccgggggcactgagtgggctcgcgctgtctgggtggggtccgatgccggagaagccctacggctgcggggagtgtgagc

SEQ ID NO: 14161 - DNA, 1288 bp, Artificial sequence
  DNA replication origin
ggaaccgaggtgaggcgaggaaaggagaaggaagggaaaccggggtgggggaggagaggagggaggggagaggagaactgggttggggaaaagagctgagaggaggagggcgggggttggcgaggaaggaaaagaggagggggaaaggaagggagagggtgtgcagccggggagggagatggagcgggggagaaccgggagggtagggaaaggcagcctggagtctgagagggggaggggagcgctgccgccgaggcggcccggagcgtagggtcaggggaggcggtggcagcggagggccgacccggacggggcctcgaggggttggccctgccgggctcgggcgggcggagcctgaggggcggggccgggggcggagccgaggcgccggcccgattcgcaggggagagagggcggaaggcagagggagcgggaggggcggggcagagggaaggctgccggggagatgggggaggggagtctgctgggggaggggcgggggagccgcggaaggcggagcagggaaggggcagcaggggcggtgtccgggccttgggcagcccggcacgggtgagaggtggttttgtggtaggggtttaggaagaggcgatcattttctagctacaagaggatcctctcgaggacctccccaagcagtacccctaaagtgacactcactcccgcccctgggctggctcctatttcaccagctcgggcagtgacagctggaggacctgggagatgaagtttcccactccccaccctgggctcccaccctcaagcctctccccagagaatcgaatcttgcctgcactttcccaggcaaggacgctggggcgtggagttgcggtgctgatgggccggggttggcggtgacagacctgccaggtgagggggtggcgcggctggtttccagagctgacagaaatcgtttcaaggccttcttgggccaccttcaaagatctcttggcttggctttctaaacccagtttcccaaatttcccccagctgtacctggggatgtcacctttggagctcctggaagagcccatagggagaggttgggcagagccagggcccaggtggaagctggcgtgggaaaaatctgaacaaggctgtcttttctccataggttctgtggcctgatccccaggaggagctactctgggttaccatgagagagaccttggaggccctcagctccctgggtgagctggcagaaatgaagggacttggggaaaagcttaggaggattcaggggcatctacaactcagacagcagagccac

SEQ ID NO: 14162 - DNA, 776 bp, Artificial sequence
  DNA replication origin
aggagggcgctgacaggtgagccccggagctggggagggggccgggacctggaatgaagtcggcgatcggagctgcttgggagggcggcggggcagggaggtggagctgagggtcccgtcgggaggaaaacttgggaggggtgagaagtccgaggggagcagaaatagggagggggcgccgcggcggagaagagaggcgcggaggggtgttcggaggggagacggagtggggagggcagggcccgcgggaaggtcccgagagagcgggtcagccctagacccccaggcttgggggccggaggacccgggagctgggaagcagcctgggaggggggaggggaagagcggttctggggactggggacggggagggaagcgaagctggagcctgctggggagacagagggggaagggaggcgggggcctcggaggggaaggagagctgcagaagggaggggggagggggagggcggtggggagacgtgggggagggctggaaagggggaggggaagggaaccgaggtgaggcgaggaaaggagaaggaagggaaaccggggtgggggaggagaggagggaggggagaggagaactgggttggggaaaagagctgagaggaggagggcgggggttggcgaggaaggaaaagaggagggggaaaggaagggagagggtgtgcagccggggagggagatggagcgggggagaaccgggagggtagggaaaggcagcctggagtctgagagggggaggggagcgctgccgccgaggcggcccg

SEQ ID NO: 14163 - DNA, 1038 bp, Artificial sequence
  DNA replication origin
gggctctccgcccgctccctcggtccctcctcccttgcaggcgccgtttcccggcttcgactccccgcgcgtctatccctctcctccccgcgaagtttcggggctgtcagtctgtcagtctttcaggccgtcagcacccgagctgcaggcggcgagcgccattgtgagcagagccggcggggcaggaggcccgggcgcctgggtccccgcggcgcgggcggagcggccggccagccaggtaagggccggggaggctcctctgcaggcggccccgcccgcgtctccctcagcgccgcggttgggtcacggccggctccgcgcaggtgacagccccgggggtaggggcgcggacggcgggcgtgggggaggggcgcgggtccggggaggtcgggggctggggggaagggagggcaaggccggcgcgggcagggtgagggctgtgggggtagaggagaccgggggggctggagggaagggcgggggctgggagggggtcgggcgggaggcaggtgggaagggggacgacgggccccgaggggaggagagagggagtgtgggagggggccgagggggaaggggaggaagaagcgggcgctggggaccgggccactcggtaggggcgggagaggagggcgctgacaggtgagccccggagctggggagggggccgggacctggaatgaagtcggcgatcggagctgcttgggagggcggcggggcagggaggtggagctgagggtcccgtcgggaggaaaacttgggaggggtgagaagtccgaggggagcagaaatagggagggggcgccgcggcggagaagagaggcgcggaggggtgttcggaggggagacggagtggggagggcagggcccgcgggaaggtcccgagagagcgggtcagccctagacccccaggcttgggggccggaggacccgggagctgggaagcagcctgggaggggggaggggaagagcggttctggggactggggacggggagggaagcgaagctggagcctgctggggagacagagggggaag

SEQ ID NO: 14164 - DNA, 1557 bp, Artificial sequence
  DNA replication origin
cgcggggagtcgaagccgggaaacggcgcctgcaagggaggagggaccgagggagcgggcggagagccccggcgcaccgggctgggggaggcaggggcagggggtttcaggagtggggtcccaggagggagcaccgtgggcttaggtgggcaggtgatggtcctaaggctccgagcctggagtaggtgtggaagtgggagctcaggacgggggaggggaggggaggggaggggagggtgatgggagagggggtggaggagggcgaggaggctggggaggacaggcactcgggctgcggggaagggtgccaagggagggtgctcgcggccgcggagggaggagccggggaaaggtggagcgcgaacgggtgggggggtggcggggaggagttgggggaacgaggaggggccgtgtcgggggggagccagcgagtcgtgcgctgccgtctctaagtcgccggtgccagccgggtgtgcagcgccgcgctcccgcgggaggacggcccggggggtcggtctgggaaactccggccccgcccccattctccacccggattccaccccgatccacccagacccgcagcccctcgcctggagtcccgaggacccgattcgaaaccagccgcgggagccgtgggggcaggcgggagagagggctgggcccctgtgcttgcgagaacgggtccttcgaagtagaaactggggagaggactttaagccaggtcccctgggagaaggccgggccaggtcgggagctccagggggcaaggctgggacggggctgggcggagattctgagggcggggtccgggggagggtctgggagggggctgcagagaggggagggctctatgggcgggagacgattgctggggggcctgctggcccggacaccacctggagttagatgtggagggcagccctcagccctcagccctcagccccagctcctcaggggactccactcgccctccctgcccaggttacgaggtttctccttggccttgttcccgctgcgcccactcctgaaagctccggagatgctgaagtctggactgttagttcccggtctcctctccatgaactttctccaaacccctgggttccagcttcctcccttctgcccctttacgggaaagggtgactgcaactcgggtctcttcccaatcccagtgctgcctgatcagccccggtttgaatccagagctgagtgaggctgggaaggggagggtgtgaatggcccttgagctcctgctaccacagcccaccacaaggatgagtgcctggaagagcgcccatcactcgggctcagctgtgaaggctcctctgcctccaggatgaagggagcacctggagtagcatgtgtcactgtgcgtgctggggtgtggccgagcacctgtgccggtgttgtgagacttacagtgagagtgtgcatgtgtgtaaaacaggaaaggggggtgtctgggtgtgcgtgtggctctttctgaggactccagagcaggagttgatcccagtcatccgtgaccccctgagagactcactctgggcccttttttgg

SEQ ID NO: 14165 - DNA, 1132 bp, Artificial sequence
  DNA replication origin
cctctttgggatggcgtgggccctggctgacgggtaagcagcccaccctggacccctctgacaagggtcctccttctgccgcatgcccagggaccctctggggcatcagactccgtgccccccacccccgggatcctccctccacccccgccacttcccatgagtgtctctccctaccttagcatcctccttacttcaataaccacccctgggagtggtgtcataggacagggcttttggtgacagagggaatggtggcagcagctgtggttccccatcatgggcaggcggtggtgtgagtggacagagaccatccgtgtggaggaggaagtggcaccccgtcaggaggacctggtaccctgtgccagcctcgaccattacagccgcctgggctggcggctggacctgccctggagtggccgctcggggcttacccggtccccagcgcctgggctctgtcctatctacaagtgagtaagggtgagagcctgggctgtctgccaggcaggaaaggagtgacaggccggacatcctgagagtggggaggctctggaggaagcaggcatttgggaagtaggtttgcagtgggcctggagaagggtggagcgtgtgagattagggtggggggtgagtgcgcgctacggtgggcaggacagggagaggcccgaagcctgctccttctacccaacccccgctcccaatccccgtggtctgccctcccaacattattctcactttgtatgtggggaaattaaggccggggaaatgatgtgattagagtagctgacaaaactgaatgtccccaggcctccccagggtgggactgggctgaacgctaacatctcctccccgtttccacctgcttggtgggtgcagacctccagaaacccggcctgccaagtggaaccggacagtgaggacttgttgcccaggctgggggggcgcccactgcactgagggtaagcacctgagtgcgtttggggacgcggtaccttctgggagtcctgggcaggggatgctagctcagatctgtggtttcaggcagagaaccagggctgggctgagagctccaggctaccccatattcactgcctgggtctgccccatcctccccacctaccgcagcccttgc

SEQ ID NO: 14166 - DNA, 994 bp, Artificial sequence
  DNA replication origin
cagacaggcacagtcctggccatcaccccttccgcctccccaggcactcccatgtggagttcttgtgctctgggcccttctacagggcccatactggctccctggcccactagagtgaccatgtcctgtctgcctgcctcccgctgtgccgggagccctgtgtcctcacccttcacctctgcctcacactcagaggctcacagttggtgtgtctctcccaggcagtgcctcttctccagccctcctgcagcccctggcaggggctgtgggccagctctggagccagcaccagcgtccctcggccacctgtgcctcctggtcgggcttccactaccgcacctttgatggccgccactatcacttcctgggccgctgcacctacctgctggcgggtgctgcggactccacctgggctgtccacctaacacccggggaccgctgcccccagcctggacactgtcagcgggtgagggagggagatggggcagccacagggaggaggctggacaggggaggaagagagccccagcccccttttccactctgcatctcctcaaggtccaggtgactatgggacccgaggaggtgctgatccaggctggaaatgtgtctgtgaaggggcagctggtacctgaagggcagtcttggctgctccacggtgagagcactgggagagcaagaggctgcccaggcccccacgtgctcctctgacagtctctccaccctccaggcagggtcagaaaaggagcagggggctgtttgggaatgatcccgcagtgggcccccagtcattgctgttgggaggcactgaagcgcagatccagtgaggggccgggaggaaccaggcctagtcccgaccctctgcaactacccccaccaaactctcacagcaccagctcagacaagtccctctacctaactgcccgagcctcagtttccccgccagcctcagaggagtgctgtgaggtagcactttggtgctaagcaatgggaa

SEQ ID NO: 14167 - DNA, 2286 bp, Artificial sequence
  DNA replication origin
tgctgtgagtgtgccccgccctcagtccccaatgctaaatcctgccactgccacaggctcagcttcttgaaagagcttctcctgtcccacaagacggccgttcattcattcaagggcaagctgtgcatcgagtgcttactctgtgccagacacttttctagataagccatatatgcaagaacggctgccgagtagagctgacatggtacacgtcggcccggggggtcttgcccaaggtctacaccagacaccctgtgccctccatggtggtcaccttggccagccagcctggtgtggttgcatccttttgcccttgtgcctcagtgatccaaggctctctcctctccacccagccctgcagtgtgaagggggacaggtatatgaggcctgtggccccacgtgtccccccacctgccatgagcagcatcctgagcccgggtggcactgccaggtggtggcctgtgtggagggctgcttctgccccgaggggactctgctgcacggtgtgtagagtgacaaagggcagaggggaggggcactgagactgggaaggggccactgtgcccttttgctctgagccctgcactctgtgacctcaggaggagcctgcttggagccagcttcctgcccctgtgagtggggccgcaactccttcccgccggggtctgtgctgcaaaaggactgcgggaactggtgagtggggaggtcatcttgggggggacctattgaaggagcactgggccaagcccagcctgtggctgatcccaggacgctgtgtgctcagcacgtgccaggaaggtcaatggcattgtgggggtgacggtggccactgtgaggagcttgtgcctgcctgtgcagagggagaggccctgtgccaagagaatgggcactgtgtgccccatgggtggctttgtgacaaccaggacgactgtggcgatggctctgatgaggagggtgagtgtctttgcccatgcgtggaagcgacagggttggtcagtccttgcacatgtaactgaatttcctggggccaaggcagctgtcctggagtggcttctttagctgctgctcccattgccaggggctgcctgtggcctggagggatgaggggaagggagggtgttctggtccctctggggttcagggcttctctgggcccctacagcagcgtcctgagcctgcctgtttgccccatgctaggttgtgccgccccaggctgtggggaggggcagatgacttgcagctccggccactgcctgcccctggccctgctctgtgaccgccaggatgactgtggagatggcacggatgagccgagctatccgtgcccccagggcttgctggcctgtgccgatggacgctgcctgccgccggccctgctctgcgatgggcatcctgactgtctggatgccgccgacgaggagtcctgtctgggtgagttgtccctgccctggacgccagcccacccagcactccctcccgcaaggcccatctcctcaagagccccgacttcacctccccgctcctttgccaggttcctgctatgaagttggtcctgagggtgtgggagttggggcaccccaaacagtaagagtacagggcagtgccccagagccagttcttcttttctgtgcagggcaggtgacctgcgtccccggggaggtgtcctgtgttgatggcacctgcctgggggccatccagctgtgtgacggagtctgggactgcccagatggagccgatgaggggccgggacactgccccctaccttctctgcccacacctcctgccagcaccttgcctggcccctccccaggctccctggacactgcgtcaagtcccctggccagcgccagccctggtgagtctcctggagggaagaggtgggaaagctggtggccagaagcctgggggagaggggcatggaagcctcagagagaggcatttgtggcgctgctctgggatgggaaggagcagggcgcagtgggagacacccgaagacgctggaatgaatgaagtggagggcgtttgaaagagtctacactctttcctggcgttcaaggcctccctcccagctgcagggagtctcatggaaattcttggcccaggggagagctttgggaaaaccaaccgggcagcaaaatgcagagggattgttctcgggaaggggctgcaggtgggttagggccaggcccaggaaatggccaagggacttggaccagggaggggagcagcggcggaggtggaaggactgacccgggcgcggttgcgggtgggagggcgctcgccggc

SEQ ID NO: 14168 - DNA, 1364 bp, Artificial sequence
  DNA replication origin
cctctcttcaactcactggtctggcgggtgctgtgcaggcctccgggcagtgcagcacaggtgcggcccccattctggggtgagtggcactgccgttgccgcgtcatggtgcccctgcacggctcagagcacacagaccagggggaccaggtgctccattcaccgtccactgtgaggcagggggacagggcaggcagtgaggaccatgggggagggctgaaggcctagtggccttcttctcccttcctctatccaggccccaccaccccagcccctcacctgggcaggctgccgtgaagcaggcctgagactggtgctcaggccctgggcagttctgtagcaccaggaggccgagtggggagcagcggcggctccggccctggccccagggcccacacgtccggctgcagggcccccatgggctccaggggccccaggccccacaaccctgctcttctggggaggggcccacctgccctggccttccacagtcaggctgcccatcacacacctggggagggagtggggtcagggctcttgtgctgggaggcaacatggcactgccgcctcctccacccactcccaccctcaccagctggaagcctatgcaggtgccattggggcaggtgtattctgggcagggaagccctgtcctgttggggcctcccagggctggcagcccccctgggaaagaagaggagaaaaaacacagtgagcggggggtgtgagctgtgtcccgggcccagccagcggggcctccctcagggaacaaagcatcctcaccgcagtccagctcgtcctcgccctggggacagtctgggatcccatcacagagctgctcaggggtcaggcacagccccggagccacaccacagggaaagaggccagggcacagaggcagctgggtggagcctgcgggcactgtgagatgtgtcctgctccgctcctgtcccttcctgccctctccctgcagaggggcagaaaggcgggtgggaggcggccagacaggccagcctgggaggagctggggggcctgtggacagctcgctatagggggaggtagacaggacctgaagggctggcttgcagtgacacagagggtctgctcaggtctggtggggaaatgctgagggcgggatccctccaaacagacacactcctcatccccgcagagcctctgcccaccctcttatcccttcttggccaagtgtggggaaagacaaagcccctttcttcgctctcctgggcctaggtgggagggtaaaaacttttcaaataaagtttcacgaaaaagatcaaaggaacgcaaacgtggcccagcctcggatgcccccaaacctaaatcactctagctgccgcgccca

SEQ ID NO: 14169 - DNA, 959 bp, Artificial sequence
  DNA replication origin
ctggatgctctggcttccacaggggcccaggcacttggcccagggtgaccaggaggaccagccacagtccactgagggagggccaacagtcagagcctgaaggaggtggtggatgtgcagctgggcggtccagggagaggactagggaccccgagggaagggcctcaccagcgcagtccgggttgagtcggcagcgtcggggccgtccgtcttggcagatgcagagctggcagtcggccttgatgcgttgcccaggccagtagcgggcaccgtccaccaggcaggggcactgccggggccacacacaccacccctcgctgcccagcacctgcccttctgggcaccagcagcctagagggggcccagggtgaggcttccatgcagagggctgttgccacagacccacaccctggagccagcacctgggcccagagcccccttacccgggctgccgcagggccaatcaggtgggcacgtgacctggccagagatgtcatcacaggtcagtgggcagggggcacagggctggaacatcagctccccagagcaagtggcattggggcagccgtcctgagggcaaggctctgagagaagccggaagcagaggtcagaggtcagggaagggagctctgcagagaggatggcctcccaccagcagcaccatcctctcttcaactcactggtctggcgggtgctgtgcaggcctccgggcagtgcagcacaggtgcggcccccattctggggtgagtggcactgccgttgccgcgtcatggtgcccctgcacggctcagagcacacagaccagggggaccaggtgctccattcaccgtccactgtgaggcagggggacagggcaggcagtgaggaccatgggggagggctgaaggcctagtggccttcttctcccttcctctatccaggccccaccaccccagcccctcacctgggcaggctgccgt

SEQ ID NO: 14170 - DNA, 853 bp, Artificial sequence
  DNA replication origin
tgggtagctgatgaatggatgaatagaggggtgggtagatgaatccatgggtggatggatgggtggctgatagatgcatgggtgggtgtcggatggatggatgaatggatgggtggatggatgggtggctgatagatgaatggatagaggggtcggtggatagatgaatggatggatgggtggatggatgggtgggtggatggatggatggatgggtggctgatgagtacatggatagaggggtaggtaggtggattgagatggatggatggattgatggatggacgggtgaatagatggatggatgggtagatagatgcatggtggctggctggatgggtggatggattgatggatagatttgtgagtagacagatggttgataggtggctgatgaatacatggatagaggggtggggggtggggggtggggggtgggagtgtgggtgggtgggtggatggatggatgggtgggtgagtgggtggattagtggatgggaggatgggtagacggatggatgggtggttgatggatggatagatagagggataggtagaatgttggatgggtgagtgagtagatgagtctcttcaaaggtcaaacaggttttataaaataggctgagacccaaggcctatcctattcccggtcttgaccacccccaaagacacacacactcctgtttttacccattttctccattccctgctgcccaagcctcccccagatcctttccaatatgagctacaaatgagggcagacactttcctacactgaaggataagtgccaccccctacccacaggacagcaggccctccagcagctcaccgcagtgcctctcgtcggagccg

SEQ ID NO: 14171 - DNA, 759 bp, Artificial sequence
  DNA replication origin
tgggatgggacccactgaccactctacgtgggggattggtaacacctccgcagtctgagaggcagcccttgaactggcctcggtggaggggctttgatggggagaggcagagactcccgcccagactgcctgggcgccaggagcaggctggcctgggtggagcaggcaactgcagagccgggcgagagaggtgaggctggtgggttgagggaggccagcagcaacatttagaggccagatgaaggtgccagatggtttccctctttccacctaccgggtgcttctcagacagtgcctgtgccagtggaggtctctgcagagcaggcgcagcctcactgttgtgcagggcaatgggacgaggtgggcaatgggacgaggtgggcaatgggacgaggtgggcaatgggatgaggtgggcaagggagaggtgggcaatggggaagaaagaggagtgggggaggggagggggagagaggcagggtgcatccagggggtctgggccaggctcttgcagtaggagggaaagaggggccagtggagagtggccggtgggacactgacagtttccacagggactcttaatcagtttctggcatagaaggatcaggaagcgttgatctgggggaaacatgaggattggtggtggtcctgctgaggtgctgtccgagtccaggagagagatgtgggaatgtagttgagcccaggttcacaggaggctctgtgcctggctcctgagggtgagaagtggggctggaggcca

SEQ ID NO: 14172 - DNA, 859 bp, Artificial sequence
  DNA replication origin
ggccccccaaaccctcaagttcaagtcctggcccccagtccctgggaatgggagcttatttggagatgaggtctgtacagaggtgatcaggttaaaaggaggtcactgaggtggccctagttttaatgcatcttatgtcctttataaaagagaaaatgagggaagatgacatgaagagatagggagaaggccacctacaggccaaggagtgccaacgatttccagcaaactcccagaagaggagtaaggccttgaacagtctcccttgcagccctcagaaggagcccacccaccaacaccttgatcctgggcttccaggatctgtgagaccatcaggggccgctgctctagctccccagtgcatggcactcggtggcagcagccccaggaggctaacacaggtggggagagggaaaacaggtgggggacagggggagggaggggcgcaggagggtgcagcctcagagggctggacggctgtgccgaggggctgggggtggggggcacatgtgtctctgtccccgactggagccaaaatccctgcctctgaggagggacagcaggtcgtcagaggtcacagggccataatgggatgggggcggtgtctcaccagttttcacatggacgaaccacagtgctgcccggggggtagaggtgcccctcgtgggcacaggggcagtcctgggtgggcacacacacgttgttctggaatcgaaaccctctatcatcttctggctccagatgggctgggcctgggctccccaccctggtcagagccagcatgcaatcctcaagctcccccttaaaacccagccactctccttccacagacatgcagctctcccctctgccctcctgc

SEQ ID NO: 14173 - DNA, 1140 bp, Artificial sequence
  DNA replication origin
gtacctgggcagggcagagcctggcagacctccccctgtgcccgtggcccctcgcagtaatcccccaggccctggggtgggggctggtcacaggcccgggtccggctccgcaggcctcccccacagctccggctacagtgggaccagggcccccatggaccccatcccccagctcctggggacacagcagaggaaggagtgaggaggggcttggctggggccagggcacagctggtacaaggcagcagcatccacagcgtacagtgggcaccaccctgggctccccaggagggtccaggcgggcagggcaggcaggcactcaagatcacacccctgcaggagacatggctcctcttcagcctcggggcctgagcagagaggtgtgggggtggctggcaggggcagcggagccacggtggatggcactgcactgggggacctggcacagaaccggtgccgatggcaccgggcagggccacaggaggctgaacactggctccaaggggtccagggtgaccacgtgggctcacctaggggatatccaggaggcgggcaggcaggagggggacaggcacaggctggacaggctgaagatggagcatggtgcctctgccccccatctctcctgatggctttcctcccccagtctcagccctggcccactcctgcagctgagggatgggggagccgaggtgcaagtcagaagtggggacgcttccttaccctccgcacaaggccaggagctgcagttggcgatgagcccggagacacaggagctgtggggagcagcagagggttggttggtctatgggctgcattgtggccccccaaaccctcaagttcaagtcctggcccccagtccctgggaatgggagcttatttggagatgaggtctgtacagaggtgatcaggttaaaaggaggtcactgaggtggccctagttttaatgcatcttatgtcctttataaaagagaaaatgagggaagatgacatgaagagatagggagaaggccacctacaggccaaggagtgccaacgatttccagcaaactcccagaagaggagtaaggccttgaacagtctcccttgcagccctcagaaggagcccacccaccaacaccttgatcctgggcttccagg

SEQ ID NO: 14174 - DNA, 1563 bp, Artificial sequence
  DNA replication origin
ggggtgggcacgagggctgagggcagggctggctctgggactgctcctcccgacactctggggcccacgagcccgacgtggaggacctgggtggggccagggcagaggaggtgagagatagctcaggcccgtcatcccttctctgtctcctgatgagacaccctgacgggacacctcagggtgggcatgggggtagctgaggaaaagccagggtaaccagggacagagctggcccagggcctggggtggtgctgtcgctggtgagagcaggacccaggaactctgtcagaagggagactgcgccttgcagagtgaggccctgggtggcagaagggacatctagccctgccagccccgtaccggaagcggctctgctgccctctgggcccgcatgagtggctgcagggactccaggccgaccagtggctccaggcacagtgggtgggaggcgggcagggctgagccgtgcaggagagctgcccagcttggcatgagcagttgttgcaggcatcctggtgctggctccccggggcccagctgtggccctgggcatcggtgcagtcacagtgcccaattggcacgcagccaccatcctgctccagggaccctgtggggcaagggctggagcttgcacccctggccccacccacaccttcccactcagccaccctgacactcctgaaggatagggcagcacctaccctttgggcagcggcagcccttctggcagacctggtcgtcctgacacacaattccctcctggaggtctgagcagcggcgggggcagcggttggcacaggtgaccacctccatgcctgctgggcagccggcctctgagcagatggagggcccagagtcaggagggcccagggctcagaaaccctccctctgccctactggggactccctacctccataaagctacaggacccatcccatcccccacactggtgctcactgaaacacgggagactcgggaagactctggaattgggacattctaggtagacagtgagttcctctcacctcctgtgagttctcagcacctacccggtacccagtaaatgtttgtggagctggactaaatttgtgggtctcaaaagccaataatgtcacctggagcctcttttgtgtccacccagaggatgggtggggatagaggaggggagccccgggggaacccatgccatggggctgttgagggccaattaaagaaggagctgaagcttgggggtgacgggaggaggcacaggctcagctacagccgctggctccatccaccacccacgagtgccacagccgctcctaaaagtgccactgtcaaagcctccaaaaattgtgacagggctggtggctctttcccacctcgggggtgggaaagctgaaaggaggagctctcctgtgggttggggtggccagggtggatccttgggccttggcacagacaacagacatgctcagggtatccttgcccaacgccaggcccagccctccaccccagagggctcagtttccaaactggcccatgaggtagcagccaggccccatgcagagtggagccca

SEQ ID NO: 14175 - DNA, 866 bp, Artificial sequence
  DNA replication origin
agctggctggacgccctctcaccctacaaggagggccccgagggaagagatggtgggaagaggaaaggaactgagcaaaacatgggggcacagacagggcaggcttattttaagggatgatccgggaactaggaacatttattttctgaatctcccaaggtaggaaaagtagagaggtgatttcacttcccctgaacactcacctgggcagggccctgagtagcagccctgggtgtccaggtggaggaaggtgctgttgcaggtggggtcggccttggccatcaggcaggggcaggacccagagcgagaggccaggcccgggccgcagctgcgggaacagggcccccacgggccccaggagcaggcctccagcagccctgggcaaggctgctgcctggtctgggtgtcagggcccaggcagggtgggctcctgtggtgaggggctgcggccctgcaggcccgggttcggacctggtttccacctccacaggagacagggcagtcggaccaggaggaccacagcgtccaagcctcaggcactgtgggagggcacaggtgaggtcagaggaggcggagggagcaaaggccaaaggactgggtggggacctgcatggtggccaagggagtggcagttaagtaaggtgggagaaaatgagacacagagcacatggcaggcaaggcatgaggctagaagggtggctgaggcggggatccggaggcagcccagacctgcacactccgtatcttcgcagatcacaccctccggggtgcaggagctgggaaagagccgggactcaggactctgctctccagcagggcggttccagcccccctccctgccctgcactcaccaccgctggcactcc

SEQ ID NO: 14176 - DNA, 1437 bp, Artificial sequence
  DNA replication origin
tggctggtgcagtgcagctccccacgccggcattcactgtgggagggggtagtcagggtagactaagggaggcaggacccagtccaggacctccggggggtgggggtggtcatgcaagggtaacctgacccctaggcacatttggggcaagatgagggagctgcaaactctagcatctcagggtcctctgtcctgaggctggactgggccccccaggcctccctgccctattccctggccccagccctctgtctcccttccaccatcactcaccactccttacagcccagctgcaggcggtccccaggggccagggtcatcccggctcctgctgctgaggtatgccagcagttacactcctctgggggaatgcagcccccagcctgctccagcagcccctgggtggaaggagagatggggcagtgatcatcgtgtcatcccagcacccagcactgtgccccgcctgcagcaggtgcatatgcatgatgccgagtgaatggcaagctgggaggaggcaccgagttccaaggggtttgaaggaggtggggccgccatggacatcacagaaagaaggaggagcaggagtgtgggcagaagacccccttctccttggaagttgctccagctcccagctctcaccttggggcagtagcagcccggctggcagggtggcaggtcctggcagagctgatggctcaggtgtgtggcacagagcccagcacagggggagccgcaggcatggaactcaaagggaggcgtgcagctgtcctctgggggagatgggggagaggcaggcttgtgggggaacagcccagagacatcactcccaaagcccagagcacatgccgcgtggctctactgaggcccttggggtcacctggtgagagtacaagatgcccaccctccgcaagttggaacagaccagtatcccccatctggcatccactcagcacctgtgggcacctccagggaaggatcaggatgggttgggccttggagagccaggaagatgcctggaggaggcagctgaggagggggctgcaggagtgaggggccttggcaggtgctccagaaattggcagatgggagacagaggggcagagatgggagacagaggggcagagatggagggcagccgcagcaggagctgggtaagacaccctcctagagggcagctacatgggccaaagccacaggcgggccggcagctgcagggtggacaaattgtggtgagggattggggtcgcagctgtgatgagggagtatctggggggagcaggggagcagctgggtttgagggcaggcacgggcgcaggcagctgctctgaggtcttggggcactacattggctgtgaggggaggggagcagggagttccagcagggacccttggtggctgctgccctgcgcagctccctggttaacttgctgctggagc

SEQ ID NO: 14177 - DNA, 2639 bp, Artificial sequence
  DNA replication origin
agctcctccatgcctttctttgctgggctcctggctcattgccttgaagggcacagcgggcacactctgggaatggtgtggggccacagaagacctctgtgggagggggtcaggcacccagtgaaacctctgggccaacctgcaggtgcacaccactgccttggggaaagctctgaccatctgcctccccaactccactgttatctccatcagaagcaccttgtgcctcatggactctggttctgcccaggtcccaggctcagggcagccctcggtggccactggccaacgtgattcccctggcctggacagcaggtccctggctcacctctggcatgacatgggtgctggatgggcagtacccactgcagtagctcacttctacctggtccaggtaacaggtccctttggtgaagtttcgaagctccgtgaggagctggcaggagggcgactgctcctctgtggggaggggcattgagtggcaggaggtgggggtggggcacaggaggcagaggtgactgaggggactgtgggggtggggaggcacaggagaacgaggtgacagggggaatgcagggggaaacaggaggaggaggtgacagaggagactgtggggagggcacaggagaaggaggtgacagaggggactgtggaggggaggcataggaggaggaggtgactgaggggactgtgggaggacacaggaggaggggatgactgaggggactgtggaggggaggcacaggaggaggaggtgacagaggagactgtggaaggacacaggaggaggtgactgaggggactgtggaggggaggcacaggagaaggaggtgactgaggggactgtgggggacggcacaggaggaggaggtgactgaggggactgtgggaggacacaggaggaggggatgactgaggggactgttgtgggaggacacaggaggaggaggtgactgaggggactgtggaggggaggcacaggaggaggaggggactggggactgtgggggggacagaggaggaggggactgtggaggggacacaggaggaggggatgactgaggggactgttgtgggaggacacaggaggaggagatgactgagaggactgtggaggaggacacaggaggaggggatgactgaggggactgttgtggagggcacaggaggaggaggtgactgaggggactgtggggggggacagaggaggaggtgactgaggggactgtgcgggaaggcacaggaggaggaggtgactaaggggactgtggaggggacacaggaggaggggatgactgaggagactgtgggaggacacaggaggaggggactgaggggactgtgggaggacacaggaggaggaggggactgaggggactgtggaggggacacaggaggaggggatgactgaggggactgtggaggggacacaggaggaggggatgactgaggagactgtgggaggacacaggaggaggggactgaggggactgtgggaggacataggaggtggaggggactgaggggactgtggaggggacacaggtggaggggatgatggaggggactgtgggggacagcacaggaggaggaggggactgaggggactgtggggggacagaggaggaggtgactgaggggactgtgcgggaaggcacaggaggaggaggtgactgaggggactgtgcggggggacagaggaggaggtgactgaggggactgtgggggggacacaggaggaggggatgatggaggggactgtgggggagggcacaggaggaggaggtgactgaggggactgtgggggggacacaggaggaggggactgaggagactgtggaggaggacacaggaggaggggatgactgcggggactgtggaggggacacaggaggaggggatgactgaggggacacaggaggaggggatgactgaggagactgtgggaggacacaggaggaggggactgaggggactgtgggaggacacaggaggtggaggggactgaggggactgtggaggggacacaggtggaggggatgatggaggggactgtgggggacagcacaggaggaggaggggactgaggggactgtgggggggacagaggaggaggtgactgaggggactgtgcgggaaggcacaggaggaggtgactgagggactgtggagggggacacaggaggaggaggggactaaggggactgtagaggacacaggaggaggagatggcagaggggactgtgggggggacagagcacaggaggaggaggggatgactgaggggactgtggaggggacacaggaggaggggatgactgaggagactgtggggggggggacagagcacaggaggaggaggggactgaggggactgtgggaagaggggcagggcctgggtctgagggaagcgtgtggggcgaggtgaccaggcgctatgatatgtgctggggtcttcactcctcaaatccccatggtgggttggcctgggggagtcaggcagctgccaggctgcaaaggccaggtgtggggtggcaggggagaagggtctagaccagggagaggcaccccacaatgcacccaggttccctccatacccggagcctccctgcggcaagagggacagcagctccctggct

SEQ ID NO: 14178 - DNA, 1254 bp, Artificial sequence
  DNA replication origin
tgtggggacatggttcagtccatgacaattggtgttctgtaggatgaatcagtcttttgtgaatttcattaatgtgaatgccccagaacccgatcattccatgctgagttgataaattgaactccctgacttttcaaagcagaaaattagattttaaccttgttaagtgtgacagctataaaaggctgaccttgcaccttttgctttaatgtgttgccatttaaagctgttggtagcattcagttggctgccccatttaacctgtcatcattaatagagacgggaagcgaagacagttattatcaggatttcattcactgtcaaaaagcaggagagctctcagactgcagctatcagaaccttagcagtcgcagaagctaggaggataatacaaatgtcaaagaggtgggagtaaaagaacagttacattgttgggctgagtttgttgagagagagagagagagagagagagagagagagagaagagaagagaggcaagagaggccccaggagtcaaggttagaagatgttcgggcagaagtgaggatactgagatgtggaagtgaggccctgggtcaccgtggacagttggcctgctgcgtgtcttggggctgggagtggaaccattttgtgcaagtgtgtggatgtgtgtgctgagtgctggagcaagactttctctgcgtggcatggaggtgaggtgctgtgggggtgtggagaagcaggggtgctgtgggatggtggggagagcgccaggaggtggagacctgtggggaaggactgggtggcaagggacttgcaagtgtcctcttaaggaattctgtttttattttgcataccaggaattttcagactgtttttgaggcttctctctggggcctggcccactggactagagaatcctcaagccccgtccctgcctccaggggcagctctgcttatgtctggtttgttggagcttctgtgcagaatttgcttggttgcttgaagaaagttattccctacttttttttcttaagtcgttggaggatattggtggtcctgccgcagcttcaggcggagaatgtgtggtgatcagagaatgtgtggtgtagaaagaggctagaggaggagcagcgaggggctgagaaaaagggcacacattttagacattcaatattggaagagttcaggtgtgaagaggtttaaggcctagggaagagagttaggctgcagctagaaaatataacagtgggctgggcgcggtggctcacgcct

SEQ ID NO: 14179 - DNA, 1673 bp, Artificial sequence
  DNA replication origin
catctattatgaagcgaatggcccattcctcaaggaggagttctcccggggataccgtctgtctagctaggattcaatatacatattttgtatacctgtattttatatagataatttctaatcattttaattgttcaacattcttaccccagagcctcccttttcagacttagaaattgctgcagaaaacctcattcttctatgccagcaggaattaaaggaaacacccttggcccaaacatgaaaggaactttaataggaaacacactgtaatgggcacacacaggacccagggtgggaaggacgcgtggcgggatccccctacccacacccacaccacacgtgccacacagccatgccgtggctcatcccagggttctgccgatcagccaaagcgcctccctgcctcacgcctgcatttactaacttcagaagacaggactaccaagtggaaagaagttgaggtagggagatgtagtggctccaagtggtgggggcacagcctcaacagaagtttgtgtgtgtgtgtgtttgtgtgtgtatggtgtgtgtgtgtgtggtgtgtacagtgtggtgtatggtatacagtgtttgtgtgtgtgggtatgtatggtgtatgtggtgtttgcatttgtgtgtgtggtttgtgtgtggtgtatatgatatggtatgtgggatgtgttggtataatatgtgcagtgtgtgtggtgtgtatgatgtcgtatgtggaatgtgtggtatgtggtgtgtgctgtgtgtgtgatgtttgtggtatgtatgatgtatggaagaagtgtggcatgtagtgtgttatgtggtgtatgtggtactgtggggtgtgtagtatgtgttgtgtgtggtgtgtatgatgtggtatgtaggatgtgtggcatgcggtgtggtatgtgatgtggtatgtggtatgtgctgtgtgtggtatgtaggatgtgtgttgtgtgtggtacatgtggtatgtagtgtgtggtatgttatctggtgtgtgtgtgtgtggtgtgatgtgtaatgcgtgtggggtttggagtgtgtgtggtatatagtgcagtgtgtgtggtgtgtttgtgtgtgtgctgtatgtgtggtgtctggtgtggtgtggtgtgtggtgtgtacagtgtggtgtatggtgtacagtgtctgtgggtgtaggtgtgcgtggtgtgtgtggtgtttgtgtttgtgtgtgtggtttgtgtgtggtgtatatgatgtggtatatggtgtgtgtggtatgtgatgtggtatgttatggggtgtgtgtggtgtgtgtgtgtggtgtgtaggatgtggtatgtaggttgtgtggcatgtggtgtgttatgtgctatgtgtcatgcgtgtgtatgctgtgtatgatgtggtgtgtaggttgtgtggcatgtggtgtggtatttgatgtgtgtgtatggtgtgtatgatgtatgtaggatgtatggcatgtggtgtgttatgtgctgtgtgtcgtgtgtatggtgtgtatgatgtggtatgtaagttgtgtggcatgtggtgtatttggtgtgtgtgtggtgtgtatgatgtatgatgtcatatgtagcatgtgtgttatgtggtgtgttatgttgtgtgtgtggtatgtggggtgtgtattatgtgatatgtgtgtgtggtgtgtgtgtgtggtattcgaaggt

SEQ ID NO: 14180 - DNA, 1143 bp, Artificial sequence
  DNA replication origin
ccgccttttttttaatctggagcggggtggggagtgggaaccggagagaaagcaaaatattaaaaagccctaaagacagccagcaggagcgcggtgcccgatggcttcgctgtaccagaggttcaccggcaagatcaacacctcgaggtccttccccacgcccccggaggcgagtcacctcctgggcggccaggggcccgaggaggacggcggcgcaggagccaagcccctcggcccgcgggcgcaggcggcggcgccccgggagcgcggcggcggcggcggcggcggcgcggatggccggccccggttccagtaccaggcgcggagcgatggtgacaaggaggacgtaagagcttctcgggggcgggggacggcggcgggggctccgggctgagcgcgcagcgagacgcgtcggccgggggcatctgtgggggggggaatcaggcgccctcccccagcccacgactctccgggcgcccccagacaggctccgtggcgccagatcgcggtcatcgccgtcccggagggagcgggtctgtgtctgcagccgcggcggccgggagttggtggctggagagagcggggtttgggtactgcgcctgctgggatctggaattcgccttacgttccctggatgtgcggatgtctgtttttaacagcatgctgctatggttcctaaggagagaattcgatcggcctgtgcttacgagttggtttattttttatttatttcgtgctccgggaacacagcctcaggcaccttctctccctcccacctgtgtctggaatctctccatcgtgcccctcctctcctactcactctgtcccttgactcaaatgcctctccttcgttcctcttcttacttctcctagacactttttccccccagcggtggtggtggtgattatcctttccggaaaaaaaaaaataccaaaatactggcatctgagccccaaccctctgtcccagggcccagcaattttgctgagagctctcaggccgtgtctgtctcccctcccagccctggactagcacctctgccttagaccgtgttcagtgaaaacttctccgagagcacatttcctactcttcatgggggctggaagcctgggtttcaaaggttggatttgcacatcgcccta

SEQ ID NO: 14181 - DNA, 1015 bp, Artificial sequence
  DNA replication origin
gggagggcggcctcctcaccagcgtcgtccgaccaccccgcgccctcctggtggctctcccacgccccatttgcaccccaggtcctcggggtgtctctggtgttgcttcaagttaggcaagaagagctgggggcgcggggagcccggcgccgcagcgcgtgcgtggctggggcgccccggggccggctgcaccttcagtcgccccctggccggcctgcctgcctcgacctccgcatccccttgcaccgtccgctcgcgtgctgcggggcacgcgcagcactaccttcggcggggccgcagaaccctcagctcccgggactcccccaccgcccccgcacccacgacccgcgtggtccccgcccctccaccctcttcacgcaccctcgcaccctttttgtgcgaccccgtgccctctccgggctgccaacccctgccacccaggcgccagtcccgggcgcggggaggaggccggtggggaagggggcggaggggccggggtggaggaggagctgcgcgaggggcctgggggcggggagcgaggagagcgctcggaatgtgtgcgggtttctaggtggtgccaaattctggggcctaggcatttccctcgctttatgtttttggttttttttcttccttcaatctctttgattaggccgtacgtggctgtggcaaggagttggggaaaaaaattataaaaacaggaaagagagaaagaacagccagagccccggcttcgcgagccgccggggagggggcggaggaggctgagccaggtagagtcgccagcggagactcgcgagtggcgcgcgggaggagcggtcgccggcgctgggcttgccttgctgctgctgctgcctccccaccgccttttttttaatctggagcggggtggggagtgggaaccggagagaaagcaaaatattaaaaagccctaaagacagccagcaggagcgcggtgcccgatggcttcgctgtaccagaggttcaccggcaagatcaacacctcgaggtcctt

SEQ ID NO: 14182 - DNA, 1131 bp, Artificial sequence
  DNA replication origin
ataagtattgtattttgtataaactatattagtatgacatttagtttgtgtaaaaatatgcatgcatatttcatagatagcatatgtatattacataagtgggaccctaactgcatctatatttagtgaaatgtcaggatcgcgatgctgcggtgaatagcatgagctttctttcatgtccatgttaggagaggcagcttcctcccatcaaaagcacagctggggcagaggagggggttgagagcaaggttttctatctatctaattgtggtgacttttaaagtttagttttatggctctgttgcctctgtcttcaaagtcaaatggagcagctgaagctctccccaccccagacccacctgcctggcctctcccatgcagcaagttttgcttagctgttgcaatcctggttttacttggttttgtatttgctatttttttaaagtgtttttaaactcatgtttcttcatagtaaagggtaactactgtggagtaaacagaagatgagcgtggtacaaattttggttaaaccaaaaactacacactggattgaaagcttggggaagggaggcaggtggaagggactgaagggaggtctcttcccaggagacttgttcaccggcatccagtattctcccccgcagttagggaaacagagggagcatgcagtttcaggcccaggcaggcctctctctgggcttggggcaatgccaaggctgggggcgagcctgcagtcagccttgtgcgtggcggccgagcctgttattttgaaaccctaagtggaaacaggcatggaaacccggaaggagcagggagccttagcagtcctgggagatgaagccaacgacctacctccatgtggaaggaggcggcggaatgggcaggggcgggtctcacaggttcccccctctggagttggggtttcccggcccacgttcgctctctggatgtgataggtccttcccggccgggaagggctggaaggggcgcgcaaggaggacgtggggacgagacgagagagacgcgtgcccagcaactccagaaggacggagaagagtgcaggagggagccggggaggacgcgggagggccgggaggggaagagaagccaggccgggcctggagcggagga

SEQ ID NO: 14183 - DNA, 1114 bp, Artificial sequence
  DNA replication origin
tcttgatagtgatacgtgttgagaagaagataaaacaagacaaagagattgtgtggcggggggagagagattttaggtagagtggtcaaggaatgcctcactgcggaggtatcatggggctgacttgaatggcaggaagatctatgagagagccttcggggcagaggagcaaaggcactgatgcagaaggaatgtgatatatttgaggaatagaacgcgggctgatatggccagagcatggagtgtgcaggaaaaaggggtcttataagggccgaggaacagggcgtgcacaccattggaggtcagtaaggagctttggtctcagatgtgcaaaggaggccaggtactccagggggtgatggatctgacttatgttttaacaggatccctgcggctgtcttagggagaatgggtgtgggagggggagtggaagcagggacctcttgggagtgacttcagagattccagtgagagacaacagtggctggggctggattggtgcagccccagtggggaggtgggtgtactgcatggattaggggtatattttggagatgggatcgatgaggcttgctgaatggttaaatgaggtgaaagggaaagtgaacgaatgacaaccccagggcttgtggcttgaccacctgggttggtggtggtgccatttactgagatggaacactggtggaggagcaatggccgtggggatgaggagctctcttctggccacatgttagcgaggacatgttagacatcagagtggagtggtcagatgggcactttgaaaactgagtttgcagttcacttacgaagataaggcttgacatgtaaaaccaggaatcctcatcatatggccagtatatgagactagggcattgagaagctcatccaggaatacaatgcatccagaagagggcaggcagataagacttcaatgctgagaggtcacgcgggaagacagaaccggttgaggaaatggaaaaaggagtggatagtgcaatcgaagggaaaatcagaagagagtgtttcgagatggaagtcagctacatcaaacgtggctgaaaagtaaaattagataaaggccataaaagtggtgaggagagaggagattctggat

SEQ ID NO: 14184 - DNA, 807 bp, Artificial sequence
  DNA replication origin
ctgctctcctggctgttctagggcagaaggatgtctcggaggcattggggtcaccctggtagtcaggggcaagacccaggaacccatgtgggtggcaggggcgggactgctcagcaaggctggaagcaggtggggctgcctgagggtggggctggaagagggtggggcttactaagagattcactctggctggaggaggtggggctgcctgagggtggggctggaagagggtggggcttactaagagattcactctggctggagcaggtggggctgcctgagggtggggctggaagagggtggggcttactaagagattcactctggctggaggaggtggggctggcaaggggcaaaactgtctgagggcggggatgatcagtggtggggctggcagggggcgggactgcctgagggtggggcttagaagggccagagccagcagggggcggggcttgctgggggactggctctggctggcagaggcaaggccggcagggggcaggactgagggcaaggctggcaggggggtgggctgttgggggtgtggctcttaggggtggggcttgctgggggcggggctggccactgcgaggctggcaggtggcaggactgtcaggtcaggggacattggagagagggcccccttgcatcttgcaggtgggcagagccctgtgtaattggacatgctgtccctatcctggcctaaaacagtggtccacgctctctcatccagggataacacgtggcaaacctcgcaccagtacctcacaggtacccacatcctcctacctctgcaccacacca

SEQ ID NO: 14185 - DNA, 806 bp, Artificial sequence
  DNA replication origin
gatgttcccactgaggaagctcagagcggggcccggagaaaggggtgctccaagcggtgcttcctggtcgatggcacgtcggggtgggcaggctggagttgaagagcttctcagcgtggataggaaatcatgaaaatgaggaatgatctagcctccagcagtgagtcggaggaataaatgaatcccggaaatgcagtttctgtgaactccagattgctatggagattgcattgctttcccaagacttaaaaaacgaggagtcagcgaaagctgggagagcgatgatgtatggaagtgaggcgggccagcgcgccgggagtggtgggaagggggcttcgcaggtcattacacggggatttctccgcgcagaaaaagggattagcgttttcacctggtggggatttcatgagcttttccctggcctgctcttcccctgccctttcccagagagcccagcttcagggacagcgcccgcgaggtgctgctggggtggcggggcttgtgggcggaggagggcggctctctggtgtgcagcaccgggtgtgagtgtgggtgagcgtgtgcaggagagggtgtgactgtgagtgggtgggtgggtgtgaaaatgggagaaagtgtgagcgtgtcacagtgtgtgtcactgtgagtgggcgagtgagaaagtgggtgaatgcgtgactgtgcaagtgtgtgagtgtggggagtaagatttgtgtgagtgagtgtgcaagtgtgtgagtgtgggggagtgagtatggggaggagtgagagttgtgtgattgtgtgtacacacacgtgtgcacaca

SEQ ID NO: 14186 - DNA, 1920 bp, Artificial sequence
  DNA replication origin
caatcttttccccacctttcccgcctttctattccacaaagccgccattgtcatcctggcccgttctcaatgagctgttgggcacacctcccagacgggggggcggccgggcagaggggctcctcacttcccagtaggggcggccgggcagaggcgcccctcacctcccggacggggcggctggccgggcaggggggctgaccccccccacctccctcccggacggggcggctggccgggcagggggctgacccccccacctccctcccggacggggcggctggctgggcagaggggctcctcacttcccagcaggggcggccaggcagaggcgcccctcacctcccagacggggcggctggccgggcggggggctgacccccccacctccctcccggacggcacggctggccaggcggggggctgacccccccccacctccctcccggacggggtggctgccgggcggagacgctcctcacttcccagatggggtggctgccgggcggagaggctcctcacttctcagacggggcagctgccgggcggaggatctcctcacttctcagacggggcggctgccgggcggaggatctcctcacttctcagacggggcggccgggcagagacgctcctcacctcccagactgggtctcggccgggcagaggcgctcctcacatcccagatggggcggcggggcagaggcgctccccacatctcagacgatgggcggccgggcagagacgctcctcacttcctagatgtgatggcggctgggaagaggcgctcctcacttcctagatgggatggcggccgggcgcagacgctcctcactttccagactgggcagccaggcagagaggctcctcacatcccagacgatgggcggccaggcagagacactcctcacttcccagacggggtggcggccgggcagaggctgcaatctcggcactttgggaggccaaggcaggcggctgggaggtgtaggttgtagtgagccgagatcacgccactgcactccagcctgggcaccattgagcactgagtgaaccagactccgtctgcaatcccggcacctcgggaggccaaggctggcggatcactcgcggttaggggctggagaccggcccggccaacacagcgaaaccccgtctccaccaaaaccagtcaggcgtggcggcgcatgcctgcaatcacaggcactcggcaggctgaggcaggagaatcaggcagggaggttgcagtgagccgagatggcagcagtacagtccagcttcggctccgcatgagagggagaccgtggggagaggggagaggggagaggggagaggggagagggactatgttaaacagtagtgtttccagtggaagttactcaatattctagcataattgggacacataatggtgtgatttactaacatagggaagaaagagaaaggaatagtttggaggaaaatgtaatcatccgtgtgataggaccaagtagagacactcagtagggagctggctatgaatgtctctagctctggaaaggggtaattctaggagatttaaacttgggaatcatcgactaacaagcattaacttaaactgtgaggttactttccagtttctgctcaggaagagctggagggttacacccaactttaaaacaggagaaaaaaagccagaagtgtgagctcctcacttttttaaaatccactagagagaagatattgcaggacaaccaagtaatccaaatctaagaagagatacaagactacaggctgaaatagggtttgaacacacttgcttagttgattcagatcaagtcagacgtcaataggaaggactcagctggaataacaggtgaattggtagaggtcaagtgtgggttggtgagggacaatggagtccctgggggctgcttctat

SEQ ID NO: 14187 - DNA, 934 bp, Artificial sequence
  DNA replication origin
agaagtgaggagatcctccgcccggcagctgccccgtctgagaagtgaggagcctctccgcccggcagccaccccatctgggaagtgaggagcgtctccgcccggcagccaccccgtccgggagggaggtgggggggggtcagccccccgcctggccagccgtgccgtccgggagggaggtgggggggtcagccccccgcccggccagccgccccgtctgggaggtgaggggcgcctctgcctggccgcccctgctgggaagtgaggagcccctctgcccagccagccgccccgtccgggagggaggtgggggggtcagccccctgcccggccagccgccccgtccgggagggaggtggggggggtcagcccccctgcccggccagccgccccgtccgggaggtgaggggcgcctctgcccggccgcccctactgggaagtgaggagcccctctgcccggccgcccccccgtctgggaggtgtgcccaacagctcattgagaacgggccaggatgacaatggcggctttgtggaatagaaaggcgggaaaggtggggaaaagattgagaaatcggatggttgccgtgtctgtgtagaaagaagtagacatgggagacttttcattttgttctgtactaagaaaaattcctctgccttgggatcctgttgatctgtgaccttacccccaaccctgtgctctctgaaacatgtgctgtgtccactcagggttaaatggattaagggcggtgcaagatgtgctttgttaaacagatgcttgaaggcagcatgctcgttaagagtcatcaccaatccctaatctcaagtaatcagggacacaaacactgcggaaggccgcagggtcctctgcctaggaaaaccagagacctttgttcacttgtttatctgctgaccttccctccactattgtcccatg

SEQ ID NO: 14188 - DNA, 1013 bp, Artificial sequence
  DNA replication origin
agctatacctgggaagcctgtctggtattccctttggggatcatctcggggaactgccctgatgccttcttggaggtctggctcacgatgcaagcaggtgtcagtgtgagaatgggctagggtataaactctttcccgctcatctggggagacgggagaggtcaggatgacatttaaatcactccaggttaaattgtaggactgagtcaaatattggaattcttgtatatatttagtggggtctgatgagaaagagcccagatgctgactgatttggaaaaggtctgatagagaaaaaggtacatgaacccttactgtgccctcagctccagccacctctctaagaggaaactgttgggcaggtgggaggagagctagtcatggaatgaaactgtaagccagactgagtgtgaggaggggaggtgatagaagaattataaggtgggggagcagaggctgaggaggaattgggacttgattcagcctgtcaaggagtggcctggggagggggagagaggtcagaggggtctgcagaaaaggaggattcagaagactctgaggttggggtagagactgaagaagcggacaggagagaaagaagaaggatttgggatgagctgcattgggagcagaggctagggagggaacgaagtataaaaaatgcctggacgtaaggcacctcagaccatttgcccatttttcgacaaaatttatctaggtcttgtgggatggagaaatcgaaagtgccgttttctggccacttggaaccattgtcgagcttgtattggggccaagcggagttgcagaagaaaataagactcttaggttttaggtcaggtgagagtttaagaggttttaagtttttaagaacacaggctaaggcggaagaaggaggaatggagggtggaaggttgcccataggaaaaaggtaagttccaagaaaagagggggtagagactcgaagagaggggggtggtacttgccacccaggggaggttgtacttgccaccaag

SEQ ID NO: 14189 - DNA, 827 bp, Artificial sequence
  DNA replication origin
gggatcagttaaatcacctttagtgagcttgtaaagcagtttggttagaatgacaaagtttggtacccagagttgcaagtatccaacaatgcctaagaaggaaaggagttgttgtttggtggtcgggataggggcctgggagattaactgaacacggtctgcaggaagagcgcatgtatgttgatggaggactatgccgagatatgtaacactaggggaagacatttgagccttgaaggggatactcggtacccttttgagtagaggtgttgaagaagtaggatagtgttctgctgggaagattggtaagaggggctgcaaagaagaagttcatcaacatattgaataagttgggaggcagacgggcagaaagaaagtcatgagagagggcctgaccaaagtagtgtgggctgttcctgaaaccttggggtaggacagtccaggtgagttgctgggactggtgggtgtcagggtcagttcaggtaaaggtgaaaagaggttgggaggagggatgcaaggggatggtaaagaaggcatctttgaggtcgataacagaataatgagttgtggaagggggtactgaggagaggagagtataggggtttgacacaacaggatggttgggaaggacaatttgatttatgaggcaaaggtcttgaactagcctgtaggacttgcccggtttctggatgggtaggataggggagttgtaaggagaatttgtaggctttaaaaggccatgctgtaacaggcaagtgataataggcttcatccctttaaatcctggtgtgggatgggatactggcattgagcagggtaagggtgat

SEQ ID NO: 14190 - DNA, 938 bp, Artificial sequence
  DNA replication origin
ggccaatatggcgaaaccccgtctctactaaaaatacaaaaattagccaggtgtggtggttcacgcctgtagtcttagctacttgggagactgaggcaggagaatcgcttgaactcaggaggtggaggttgcagtgagctgagatcacaccactgcactccagcctgggcaagagagtgagactccatctcaaaaaaataaaaataaaaataaaaaacttggataaagtgtaaagataaaaatcactattcttgggcaggggtcccagctgtagcccaagctggagaactagactggcttggcattaatttgcttggggcaggagaagggtcatctgaaagatatgggaaaagctgaggttgcccctgggaagactagggaagcctgcccccgggccagccccttgaatatgtccaactgaggaggtggaaagaagttcaaggtagccagggagacaaaagttgttcactttggtgcacatgtggaaccaacatgggacaaacaggcattttgtgctcgtccagggaacatgacttcttcggctcccacacaatttgtagctgcaggagtggcagagcaccagagtggatgcaggcccagatgttctctgggttaggtgttaaggacttgtgggagtcatcaggcagcaggcatttgccccagtgtcagaggtgtttaagccagaattactccatcttgaataagggctgggtaaaatgaggctgcattcataggaggttaggcattctaagtcacaggatgagacagaaggttggcacaagatacaggtcatacagaccttgctgataaaacaggttgcagtaaagaagctggctaaacgccaccaaaaccaatatggcaatgggagggacctctggtggtcctcactgctcattatgcactaattataatgcattagcatgctaaaagacactccc

SEQ ID NO: 14191 - DNA, 1270 bp, Artificial sequence
  DNA replication origin
gcagtgagccgtgattgcaccactgcattccagcctgagcaacagagccagaccctgtctcaaaaaaaagaagttacttgtgacacacatcaccacagctgacaacacattggaggcctacaaccacaacaagacaagattccaagggcttctaagctgaagcacggccttttgggctgcacgcctgcccatagtcgatcatgtgggcagcagtcaggaaagcgccctagccaggccacatgggaagcaggcacatccctgggaggcaaaagggaaagcgggccaggccggggtgacggcagggcggggtgatggcacaatgcatggaggagactgtggggagagctgttcaggaggtggcccatgcctaagcctcaagtggaagaggaggaatgatggagagcgcctccacagtgagcctctttcctcatacaggtccatgtgggctattttggggcaaatcttcaggcaagtttctagagaaactgaaggaaaacaccagagggggctgcccaggtaatgctgacaatacagggaggtgagaggatgagcagatctcaaaggtgactgagaggcagaggggagagacaaggaaaaaccaaagtaaagtgaagttagggaaaccaagaaaagactttccaaaagcagtggtcagcggggtcaaaggtcccttcagtgggcggtacagcaggaagtgggggagaagcaggaaccgggaatgctggaggtggggatgggagggaaaaggcttggctctgtccctaaacagagagaaggtgacctgggaagagcggggaggctaactacacagggaagagaagcttcctggagaaagggatccagggcacaggcggtggaagggattggcctcaagagaccaggaagaactctcatttttcctgacagagaaagtaggatgggtctggtagcaggcaagtcctggagtgctgtgcagaagggaagtgaggcagcttatgcctgagagccaggcatgttgattgctcacggggagccgtacatctgtaaaggcagccagcggctggctgagtgatctggcttagcctgggctgggaagcacctccgcacactggctcaagaaattagacctattcttctcgctgctctcaccaagccttttcccaagtgcgtgcccagaaggaaagcggccactcttctacttctcttgtgcctgcaagagaagtagaaccccaccctgggcattccatgattatgccaggcctttctcactccgcccagtccctctccagcc

SEQ ID NO: 14192 - DNA, 1861 bp, Artificial sequence
  DNA replication origin
cccagggagagacacaatgggcaagattaggggtgtagggtgggagtgcgaactgactgattcctagcgtgggcagggaactttgctaaaactgcaggccccagggaacagcgcgggcagggtgggagggaacggagagggccaggcggaccctaaggtcaatttggagaaagggccatttccaggctccttcacctgtgcccagcgttctacaggcctggaccccgcccccgctccccaccctccccccagagcagggcgcgggaggaggcggctcgggctggctcggagagctgaggggcgcacacccgcttcgcagggccagggtgacacggaagcatgcgacggctgctgatccctctggccctgtggctgggtgcggtgggcgtgggcgtcgccgagctcacggaagcccagcgccggggcctgcaggtggccctggaggaatttcacaagcacccgcccgtgcagtgggccttccaggagaccagtgtggagagcgccgtggacacggtgagtagcatggcccgggcaggagcggggagggtcgtaccccaggagaccagcgcattcccacgaagggggacagaagtgcttgggctctgagccccagccctttggagaaaaggccactgtccagcctgctggaatgtgactgcgtgagggaggtgcggatcacaccagggcttgctctgcaccctcagctggctaccggccatcctctgcctgcctgtctgtccgcagcccttcccagctggaatatttgtgaggctggaatttaagctgcagcagacaagctgccggaagagggactggaagaaacccgagtgcaaagtcaggcccaatggggtgagtgaaggggtgtgagagcaatgggcgcatgctgggtgtgagtgcatggacttggggtttggggtgtggggcacatgcctgggtgtgcatgcatgaattgggaggtccattaagaagccctgaggttagagaccccactgcgaagagcctccttagaggtggagtggctcagcctgagcccaaggttgtgagagtggctggtgggagctggggcctggcagacaggaagatggtttggttacccctggacttatcttcatcagagcagggctcacctcggtctgagttcctctctcaagcatcagggcctgggtggaaggagccggctgtgtgggtgtgtctggtgcccccctagcctagcaggactccagtcatcagtcacggtgggggcaaaccttccaccgtgggggtgatgcctgggctgggagtgcagtgactgtgttctagttcccgctctgtgagcacggcctgggctctgtattacaggttctgcaaaggccccagttccctctgtcggctcaaggagggcactggactatagcaatgattcatcaacctcaaaatcaaatcttacaagaaaataaatagaataggtgacagctgagccactctggaggcgttgggtgggaagaacccatcggaggaggattcttgccttcacacgagcacaagcagacacatccatgcatacatcacacacccatccacccacactcctgcatacaaaccacatacatgcgtgtttatgcatgtgccacacaacccatctgggaaggactcctgcctgcacacacatgaaagttccatagtttgaaaactgcatgggtctgacttctgacattctagggtggctgtgcctgaaacctgctggcctgcatgacctcttgctcctgggctcgagggcctagttggggatctggtcccatgatgggcagccctggctcccaccctcatgatgcccaggcctccctcacccttttcctctgctcaccccatgctccccgctccc

SEQ ID NO: 14193 - DNA, 919 bp, Artificial sequence
  DNA replication origin
caagatttcagctgcgggacggtcaggggagacctccaggcgcagggaaggacgtgaggaggggaagcgggctggggcggcagccgggcggaggggcagctgcgcaggcggaatgaggaacgcctttgctctaaggcgaccaccctggcagctcttcactgaggggcctcggtttccacatctgtcgctctccggtcccaagaccaccaggaccgacggggctctccgggagggtcagcccctccggtggccccagtcatgcatcaggggacggatcagaagggctaggaagaggggtcgtggggaaggccccagaaaaaagaggaaggagggaagattttgcctgaagcgggaaagccaagggctgggcggcgcgagacccccattcctagcgactggggctggctggtggcccgcggcagcccccgcgccgggaggattaggcctcccgccgctcccacccgtccggaccctcccacgtgtttaggtcctcccaaaagtattcggcctccggcccctgccccttcccccggctggcctggacctcggggacgtggggggaaccccgtgggagcagggggattctggacggggagggagtagcggttggggagaaggctgagcggggaaaggagagaggggctccggggacggcagggaggagagtgggtcgtgccggagacccagggagagacacaatgggcaagattaggggtgtagggtgggagtgcgaactgactgattcctagcgtgggcagggaactttgctaaaactgcaggccccagggaacagcgcgggcagggtgggagggaacggagagggccaggcggaccctaaggtcaatttggagaaagggccatttccaggctccttcacctgtgcccagcgttctacaggcctggaccccgcccccgctcc

SEQ ID NO: 14194 - DNA, 966 bp, Artificial sequence
  DNA replication origin
aggttgcaggcgccagagtcctccctaaaggagagaccttccttctcagtgtggctcagggagtgggaggcaggatcaggtgtagggacctcgaggtctcatttggtttgagaatgtctgtatttaggggaagaaatcccaggatgagtgtctcagggacgctggggaatggtcccccgtaaaggacccaagacagggcagccctgcctgggtaggagtggggcacagaaagtccttgggggagcagagcagcggagaagaggcccgggccggccgaggctgcggaatgctcaggcccgagccagagggaggtgggaccgagggctgcgcgcctgggcgagccgcctgcagccgcggccagggtcagggtcatgagggctggatcgaggggaaggaggggggtgggatggggagggagggcgcgggagggcatcccgccccagaggccggtcccactggggaggggaggagccagagttgctggagggggtccaggaggtgggggtgggaggaggtgggggccgccccgcgagaagaagagcgggaagaggcggacagcgaggccaagatttcagctgcgggacggtcaggggagacctccaggcgcagggaaggacgtgaggaggggaagcgggctggggcggcagccgggcggaggggcagctgcgcaggcggaatgaggaacgcctttgctctaaggcgaccaccctggcagctcttcactgaggggcctcggtttccacatctgtcgctctccggtcccaagaccaccaggaccgacggggctctccgggagggtcagcccctccggtggccccagtcatgcatcaggggacggatcagaagggctaggaagaggggtcgtggggaaggccccagaaaaaagaggaaggagggaagattttgcctgaagcgggaaagccaagggctgggcggcgcgagacccccattcctagcgactggggc

SEQ ID NO: 14195 - DNA, 1215 bp, Artificial sequence
  DNA replication origin
atgacacctcacaggtagcagccctcagaaagaactgagggtaaatgtttctttcagatctgtaaaggtgtcagcctctcagttaatctttcctagagttagacaagggagagcctcggagaaagcctggctacatcaatgcagatttcctctacagatgcaaatctctccacaaaaagacagctttttggttattctatttccaaccattctgaacagccaccttgaaatgtgtcaaagaagtattttttggggtgaaatattttggtttccttcaagttcttgggctgggaaacatctttgggtgcatcttttctctctaaccccatctaaagctttcagggaacacggatcccatctctttctgcttaagggcggctgagtagctcacagctggggagtgaagtaccctaagtagtggtgggatttcagacacctggaagtggttaatggaagccgagtttctttctggtgcccccagagcacactgtaaaggaaattctcagctctaagtggagaatcctggttaggggtgcgtaagtaggggacaaaagccttgtgctcggcactggacatcagttgcttttcatgtttcttcatttaatcctcaaaacaactccttaagacagagtttctgatccccatcttacagataaagaaacagaagttcagagagagccatgaagttacatgagatcctctacttcaggtgatccctgcggtgtgggaaccagaggcatggtgttggtggttactgacgtgcaaagtctcagagcttcttcatccttgctccagcgtacccaggagtcgagccggtatttggacagttttccttgagtttctgctcaccttatgaattccatcatgccgttctgccacacccgaaggctcccccactccccatgagaatctatcccacggagaatggggcacgaggaatggtcaggaaaggcagatgcaggatacacactggacatctttgctgtcgatcaaggttgcaggcgccagagtcctccctaaaggagagaccttccttctcagtgtggctcagggagtgggaggcaggatcaggtgtagggacctcgaggtctcatttggtttgagaatgtctgtatttaggggaagaaatcccaggatgagtgtctcagggacgctggggaatggtcccccgtaaaggacccaagacagggcagccctgcctgggtaggagtgggg

SEQ ID NO: 14196 - DNA, 1388 bp, Artificial sequence
  DNA replication origin
ctccggccagtcccagagaaacccgggctggtggtcgccatggcaacggagtccgaccctccgaggcctgccgccctggcgcggcagtggcttgagtgacccggcccgctcttggcgggggcgcccgcgccccggccccggcagtccctccccgcccccaggccgcggccgcgggagccggcgactgaccctcggcagctcctgtagtcacgtggcgctgggaacccggcggggggaggttggggacgggcctggcagttgtgaactcgaacctgccgctgtcgccgcggcggggcggggagcgagagtgggccgcggaggccggccttcgggctccatggacgggcgccgcgtccctgcacagcccgccgcagaggtacggccggggcaggggcgcggggccaccgcgggcccgcggggggccgctccacctgcggggcgcgtgaccgtgagtgtgcgcgaccgtgtgtgagtgcgcggggggggacgctgctggatctgcgggggtgggggagcgcacctgcgcacaggctccgcgagctgcgccgtgcgtgggacccgaaatggctcactcgcaagaacgggacccgtgtgcccgggagcgtggacggaggacacgcatcagtacaaaagggcggtgtggggcttctgccacccgcggccagccgcgatgcggaaggggattctgacggagtcgtggtcacaccagctggccctgcgcagccccatgggaaataggcctggaattcctgtcgggaggaggctgggggaaggggagccagcagggattccagagttcctgccataggccggcctttggccatcagggaaagcccagactctggccacagaatggagaattcgttccgtgaccttaccagggaagaaagtgaccccgaaagacagcagtgtgcttccttgttgaaggggcacattcatttattaatccaatgtccattaaggtcactctgccaggcaggatgtggggcttatggctggtgcgtgtggctttgtggggggaggggttgtggctggtgaggacacaaagctgactgccctagaggagctcagagcctcacttctgttttctcttccctccccacaggtaaggctggcctctctgcagtcagaggtctgagctctgccatggggataggggtgtctttattactgcagttttctctaacacctgggggctaccggagtgtgggccgaagcaggcgctgcagccgcggaagtatccccaggaacatccccaagaggagctggaaaaagcctcatccccagctctgcagtctccagggtagagtctggcctttgctgtgctcccaaaccacgccacaacaggggtgcacgggcgtccccatcccggcggaaggaaatggccc

SEQ ID NO: 14197 - DNA, 2197 bp, Artificial sequence
  DNA replication origin
caggatgtggggcttatggctggtgcgtgtggctttgtggggggaggggttgtggctggtgaggacacaaagctgactgccctagaggagctcagagcctcacttctgttttctcttccctccccacaggtaaggctggcctctctgcagtcagaggtctgagctctgccatggggataggggtgtctttattactgcagttttctctaacacctgggggctaccggagtgtgggccgaagcaggcgctgcagccgcggaagtatccccaggaacatccccaagaggagctggaaaaagcctcatccccagctctgcagtctccagggtagagtctggcctttgctgtgctcccaaaccacgccacaacaggggtgcacgggcgtccccatcccggcggaaggaaatggccctttctcatatcctggggtcttccctgtgcacagtctgacactgggaatgagtgacctttgtgttccctgagaagagagagtgcgctctagggaatttagaaggatgtgtctggagcttgtgagcaggcacagaagggcccttaggagcctaactgcttccttcctccttccgcggaggaggctcctgtgcaggaatctgggctcccctgagctgtggaagagctgaacatggggcagcccctggcgaggttggggcaggaccgggcaggggactgagattgcagtctcatcttccctccccttctattgccccagtaatctccagcaccccgagggaggcagagccggtgatcaggccccgagggcagcaggctgtgggtgttccttggattcagggagagccttccttcctgcaatgtcctaatttgtgtgggtggaagagggcaggcgggcagaatgggggcacagtctgggcaggcggtggtctggcgttagactgccgggagtagcacccagggctctgctcctgttccccgagaagggctgttctcacttgtcctccagcctcctacggagactgcagttagtgatgctgaaagtgcctcccctgtggggctaggaatgaaaagctatagacacctttttctctgagatctttgcaaacccaggcgctttagaggaaagaacactggcctgggagtttaaagacctgttccctagtcttgattctgctgttggcttactgtgtcaccttgggcaggtctcgtcatctttgatgtctcacagttgcttcatctgttaaacagggagctcagtgtctgtttgtccagcttctcagagttgctgtgcagctcggatgtggcataggaaacagcagacacagggagagggcagcataaggcactgtagggagcagtggccacattttctggtgagtcctgtggcaggaatgtttgtgcattcagcactggagcatttactccctgtctgacactggggtagctgccatgagggggattctagtatcagagtccctcccttctggaagtttccagggcaacaaagacataagacaaacatccttgaaatgttatctaaaaacccaagattgaaataatacataccacacaaggaaacaggagagtagtctagctccatgtccggggctctaggggttcatagatggcagctcctgtccggggctgaggttgggaggggagaaacaggggcagagtgagttggtctctggagtgactgtgcttttccaccctcagcagaggaagaaccgatgctggaacgtcgttgcaggggccccctggccatgggcctggcccagccccgactcctttctgggccctcccaggagtcaccccagaccctggggaaggagtcccgcgggctgaggcaacaaggcacgtcagtggcccagtctggtgcccaagccccaggcagggcccatcgctgtgcccactgtcgaaggcacttccctggctgggtggctctgtggcttcacacccgccggtgccaggcccggctgcccttgccctgccctgagtgtggccgtcgctttcgccatgcccccttcttagcactgcaccgccaggtccatgctgctgccaccccagacctgggctttgcctgccacctctgtgggcagagcttccgaggctgggtggccctggttctgcatctgcgggcccattcagctgcaaagcggcccatcgcttgtcccaaatgcgagagacgcttctggcgacgaaagcagcttcgagctcatctgcggcg

SEQ ID NO: 14198 - DNA, 1396 bp, Artificial sequence
  DNA replication origin
ctcacagcaagattcacaagcgatccgaggggtcggcccaggccgcccccggcccggggagcccccagctgccagccggcccccaggagtccgcggccgagcccaccccggcggtacctctgaaaccggcccaggagccgccgccaggggccccgccagagcacccgcaggacccgatcgaagcccccccctccctctacagctgcgacgactgcggcaggagcttccggctggagcgcttcctgcgggcccaccagcggcagcacaccggggagcggcccttcacctgcgccgagtgcgggaagaacttcggcaagaagacgcacctggtggcgcactcgcgcgtgcactccggcgagcggcccttcgcctgcgaggagtgcggccgccgcttctcccagggcagccatctggcggcgcatcggcgcgaccacgcccccgatcggcccttcgtgtgtcccgactgcggcaaggccttccgccacaaaccctacctggcggcgcaccggcgcatccacaccggcgagaagccctacgtctgccccgactgcggcaaagccttcagccagaagtccaacctggtgtcgcaccggcgcatccacacgggcgagcggccctacgcctgtcccgactgcgaccgcagcttcagccagaagtccaacctcatcacccaccgcaagagccacatccgggacggcgccttctgctgtgccatctgtggccagaccttcgacgacgaggagagactcctggcccaccagaagaagcacgatgtctgagacggtgggcggggccgtgttggctgagagagggctggggtccttcgtggtgggagtcgcagtgggctgggggtgcctgcctagtgctggagtaggggacaatgggaatcctagaggggatggaagacgcggggagtgagctgggtgggccctgctagcgagagaggtcaaccccggtggccagggaacccacttccaagcgcagggacgccggcctccagctggtgtgtgctaaggctccgtcctgactgccctgtgccctggaaaagcagcaatagcatccgccccttagagccctctggctagaggagccaccagtggaaaggaagaccctccatcctctggtattaacgccttaatgcccctgtcttttactgtaagttacttaagatcatttttggaagcaggcgtggtagagtcctgtaaatgaatgctctgggctagatacagcttggagaacctgctggccttgttagacagcacttgggcctttgccagcagcaagaggtgaagcgaagccactcttacctctcccttcccctcccacctgccccctgcgtaggcacccagacttggagagacccgtctgctgttaatacttccatcctcttccttcc

SEQ ID NO: 14199 - DNA, 1037 bp, Artificial sequence
  DNA replication origin
aaggttaacgggaactgccaccccgagggcgacttgggcaccgggctcccggccctggccattcccggggcaggcggggcgggcacgggtgcctgattggctggcgggcctggccatccccggggccgcccagccactccattggctgcgccgctcagatgacccgcccggccctatcggagcagcccgcggggcggctcctttgttctctggagccaatagccgaggggggagggctgacctcgcccccggcgggcgcgcaaggcccgggcgccgtgagcgcgctagccgccggccgcggggaggagaccttgggaggtcgggccccagatggccggcggcgtcctggcacccctgccaggcctggactccgcgtgcgaccccgttgtaacgcctgaactcagcgcacgttcgccgagcgccacagcgcgccggacgctgtttctccctgctggggacccatcagggcccggacagaaaccccggctgaggctgtggctgccctcaagccgcgatagccccaccgtggggtgtgataacttttagggttcactacgagggaccttagaaatcattatacccgaccccttcgttttctgtttcagggaggtggtctcgctcagaccccagtggcgcgatcatggctcagtgcaacctcgaacccgtggctcaaccgaacctcccaacctgctaactttttaaatattttgtagagatgggggtctcgccatgttgcccaggctggtctcgaactcttgagcttaagtgaccctgcggcctcggcctcccaaagtgctgggattacaaacccgcgcccggcctaatccctttgttttctagctgaggaacggctctgaggttacgttactaggtcgggttactaggtagggttcccgtgagcggaatcatctccgcccagttgccaccccggtccagactgccagaccttcaggaaggagtatcttcgcaactccccaccccattgtaaggaaattcctcacacttctccctcaaagggggcgcagctgggtcaactc

SEQ ID NO: 14200 - DNA, 1578 bp, Artificial sequence
  DNA replication origin
ctcccccctcggctattggctccagagaacaaaggagccgccccgcgggctgctccgatagggccgggcgggtcatctgagcggcgcagccaatggagtggctgggcggccccggggatggccaggcccgccagccaatcaggcacccgtgcccgccccgcctgccccgggaatggccagggccgggagcccggtgcccaagtcgccctcggggtggcagttcccgttaaccttagccacaaagtcaaaggtatttatttccccgtcgcctccctccgagtccctctgcattttgggcggggaggggcggtgcgagggatggaccagcgcccggccccgctcctcccgtgctgcctccgcccggcccgggctggggcggagggatggggcgggggcctggggtgccccgagccccgcgcgccccccgagccccgggtctcaagcgttccctctgccccgacacagccgaggggaaaggggcgcggccgagggtggggagggcgccaggccagggcagcgaggttaggagggaggctagtgagaatggagggaggacgcggtggcgagtagaggggtcgcccgcgggcggtctctcctgggctgtcccgttgttccgagttccccgtccctgttcgcctccctgatagatcagtttctgggggcaggaaccccaatgctcgctgcagagtgacagacacatagtaggtgaccaataaatgtgtgattaaacgagcggggataaggattgggggtggagataagtgagagggaagcaccgcagaagttggaagtgtgtggtgtcgggtgtggcggagaactcctctctaggaagatgggcacagcagccgcgaactcggtggggcggggtgcgggcatcccctctgtgaagaacgttgaggatatctacatgtggaaggtgtggagatgggtcctccttcggccctttgagcaagatgatctgagctggggctgggtgtggtcagagccccaggggttggaggcggacgacagcccaaggcttcacagctaactgttcccatgttcatctgtaaaatgaagagattagatggcagttgtctcctttcagcttgaaggttcatgcttccgtgcttcaaatctgttttgtactgaaatttcttttatttaagtgttcccttatgacagtttttattaatggattactgtgtgtggagcctgtactgggtgcaggggagagagaaggaccctgtgttaagatgcatgtagtcttgtgcagactaacaaattgatgacaatgatgattccatgtagatggtcctaggtgcacaggttaaacagagaagggattcctggctgtgcctggtgtgtccaaaaaggcttcctggtcaaagcgatccctaatctgggctgggaaggggagaactgagcaagggccttccaaggttggtcacagggtgcgaggacacggtgagttcaagagccacgagaggatggggcgtgtcggggtgcaatggggaaagatgagcagagttgagttctcagttccctcttatccgaggtgtgcgtgccagcaagtccatttggtgggggtctgggttt

SEQ ID NO: 14201 - DNA, 1382 bp, Artificial sequence
  DNA replication origin
ggcatagtggataaggcaagtgacctgcttgcatgcagatcaggtctcctgggaatgtcgaggggagcaaactgaagccatgaaaccaggctggctgttcataccctgaggtacagttcttataaccctgagtggggagcgggtgatggcaacagcaacgacctaaatcgaatttgtcttgcaccttgggaatgtctctcagagtcctctcacactgtttgcgtcccgccatccccaccccccaccgcccccgccccacttgatataacaattctgtaccacgagcaagcgttatttccattttcaggtggggaaactgaggcccagagaaggaaagtggtttgcctgggatcatgtggctaaccagaagcaaacccaatctcagtccctgtctggggcctctcagcggctttttccactatggcctgttctttgggttggacagtggcccgccctttcccttggctcccctcctctgttccctccccagattgaggactggggtgtttgggagactgaggtctgaagatggtggagtaggaagaggggaagggtcagggctgggagagtggtcacagtgggggtggccttgtgctgagtgggatccgggaagttggagaggagcagggtgggtcatggggggtgggacaggggagttgtgggaggcttcagggtgcctgatgctgggtgtggggatggaggcctccaggtgggggaggggatgcccacctggtttgggctgggacctctgggaggggcatgcagaaccaccctggtaagtggagggctctgcagacagtgccacaaccagagccgtggcaaaccctcttcctcctgcatggtggagcgtggaggctcctgtgtggcgctgggggcctctgagattcccaactggctggaaggagtgatggcttaggaggagtgagtggcagcggggacgctggcagagaggcttgtacagatactgcccgatgcatccggctcaggcttgccgccctgtggtgctcctcccaaactcagggagcaggtatttccgttcacctgcgccttcaagaacctgagctcaaagcgctgcaatgactggccagggactagcagcggctcagtggtgggtgggctgggacttggggttcttgattaagacatggggtcctgaggggagggaccaggaagggtggccttgagaaggacatccctgccagcctcaggcagtgggcttctagggggagactagggctgaggagccagccaggtggcggctgagggtcacccaaagatggctgaaggggagagggcccgctgcatccccttgggccagagcccacaggccaggccctgaggatcttaggctgcaccaggcttgccggacacaggctcattgt

SEQ ID NO: 14202 - DNA, 2203 bp, Artificial sequence
  DNA replication origin
gtgcttgagcaggtgctgcttctggcggaagccgcggccacagtgcgggcaggggtgcgggcgctcgcctgtgtggttgcgcaggtgccgcgtcaagttgggcttctggctgaagcggcggccgcactcggggcacgcataggggcgctcgccagtgtggatgcgctggtggatgttcagcgacgaccaccaggtgaagctcttgccacactcgttgcagatgaactggcgcggctcgcccggcccctcggggccggagaccgcggcccgggccccgggctggccccaccagccctggcagagccccagccaggcccactcggggcgcccccgcggcggccccggctgcaggcgacaggcccggcgcgccgccgcgtcctgaatcagctcgtgcaggccggcgcgggagccctggcggtcccgggcgtgcgcgcgctggtggatgcggaggcccacctggtgacggaagcagcgctcgcactcggggcacgagtgggtggcgggccgggagtgggtcttctggtgcttgagcaggtgctgcttctggctgaagcgccgcgcgcactcggggcagcagaagggtcgctcgcccgtgtggtgccgctggtggcgcgccaggttcggcttctggctgaagctcttgccgcacttgccgcagaggtacggcttctccccggtgtgggtgcgctggtggatcttcagggacgaccaccagctgaacctcttcccgcagtccaggcatacaaagtgaccctcgccggaggaaagcgaggggctcagggggccggaggctgacccgggagcccggcctgccagccccgcatcctgctcagtgggaggggcccaccttggactcccagactcctcctgtccccccagggctcgaggccgccccatggtctggcgtggcgggaggccccggtgctgctgaaatatgttctccttgtccttctccacaagcatggcctgcggcgccagcgtctgcagcagccgctccggcttctcctgcttgaccttcatcaccagcccagctcctgccagaggcaagcgggagagaggagggagagaggtcactgctgctccgctgggtgggatggagagaaggagcaagagagagggaagtggtgcaggagggcagagaggggctgaaaagagggcacgagaaaaggcagaagggaaagatttttaaatgaacctaagaaaacaggggcaaaagaagaaaaaagagtcgggaaggcagaaaggacaacaagggcaggttaagatatagaaaggagtgaaggagaaaaatacaagaaaggaaccgtaagtgaatcactcgggtgcccaggcctcaggatccccgaggcaccggctgctctgccttctccaccctgaggccgaggagatgcagagaaggtttaaagaaaccgatccagtgaaatctgctgacccagggggcaaggagaaagtggccaagctgcaaaacataccattctttttctaagaggatcgacgtgctggaagctttctaagcaaaggcatgctcagtccctcagtggtcagggagaccaacccctgggtcactgcagcaccgtctatactgtcggggctcctgctccaaggcagaagccatggcgggggagcacttcacctgctgggaccttggctgtctggcaactcatcttccttcaacaaaaccaagaacaagaaagtaggccagaaagacctcagcacccaaaagaggtgtcgccttccctttgtgttaaatccaatccactttactcatgggggtcccacacccactgctcccagcccacacttgggccgtgcacaagtctacagaggcactttgtcttcccagctcacagaataagaagccataaagaaaccatctgccacagacactaaagaatgcatactgtgtgattccatttatgtgaagaggagaaactggcaaaatgaacccacgagttagaagtcaggataatgccctattacagagggcactgtgggtggaaggcagcatgggctctgaggttctggcaatgttctccattgatgtgggtgctagttacaggggaatgtttgctttataagaatttacagagcttgtgatccatgcacctttccaaaaaggtttacatgtaattaaaagtaggtggaataaaacagctgtgaacaaagagaaaaatctttaaacagacgtcaacgttacaaaccc

SEQ ID NO: 14203 - DNA, 1540 bp, Artificial sequence
  DNA replication origin
gcgccctgccccagctgcggtaagagctgccgcagccgcgccgcgctgcgcgcccaccagcgcgcccacgctgtcgctgagcccgccgttccggccggggaaccgggcgaccagccgcaggccgaggccatcccgggcttggccgcgaggccgcggagctcccaacggtccccgggggcccgggacacgctgtggggccggggacaagcgggcctcgctgggcctggcgagccgcgccagttcatctgcaacgagtgcggcaagagcttctcgtggtggtcggcgctcaccatccaccagcgcatccacacgggtgagcggccctacccgtgccccgagtgcggccgccgcttcagccagaagcccaacctgacgcggcaccggcgcaaccacacaggcgagcggccctacctgtgtcccgcctgcggccgcggcttcagccagaagcagcacctgctcaagcaccagcgcgtgcaccgcgcggcccctgcgtgcagccccaaggaggaggcgcgctagtggactggacctcagcggacccgtggtggtgcgggggatgtttgcggggtgtgtgtggggagtgggggtggccaggattgctggctcttagaaccccttagagcgggaccggtggattccttaaggctctgaagggctgagaacagttctagaagcgtcccaaagggtgctgggaaaggtcccagcgtgggttgagggaggagggaagatccgagttcctcaccgcgggccgggatgtgaccaccctcttcagaggttggaccccaggcttcaagcaccgagtgaggggtctgttggggacgctgggagagtctctggtgtgaagtggcttaggtctggactggtcagctgtggcaccagccggtcctgcccacgcttcaggatggccgggggctgcccctgtgggagagttgccaagactcggcgataccaaggatggaagccagaggctgtggcgagggagagccaagcatattcccagcaccagggccactgctggcacgtcgtagacatccaataaatatttttggaaggagtgaatggtttgatgtccctctccatccctgccagccccctgcccaaggtgtgtgtgtggttgggcccgactctagaactggtatgtgtgtgatggtcaggcaggcatgagcggggtgggctctgctgaggcttggctgcctgaggaggtagctgtgcaggagagagccaaacacgctgcttctattcctgtctggggcatgtctgaagtgggctggctgtcttgactggcttggatccttatcagtctggtgttgcagaagagagaatggatggaatattccacgtggtctcactttcctttctgaaccacccttgctgaagcccgggtctgtgtgtgctcagagatccatttgccccaggctaggagcacagcactccccacacccagttcttgccaggggtgttttctctcttcccttctccaagtcagtttagtgtcttcccacataccctcctcggcctcctgcccccaagaggtcacccc

SEQ ID NO: 14204 - DNA, 1002 bp, Artificial sequence
  DNA replication origin
agggtccggctctggcctcggtaaatacggtaacctcccgccgcggccccagcgcggccccgcgcgcactcacatggcgccgcctcccgagccttccgtctccgctgcagcgccgcagtcgccggcgtcgtcgcagccgcacagcagccccgtgaggctgggaggtctaactctccggcagcccggctggcggaaaacggggctgccagcgctgcgcccgcccgggccggagcggcgaccatgcgggggccggttccggggcctgaacgtcccacggagcgggccctctcaagccccccgatccgccgacccagacattccccctttcgggattccctgaggcctgcattcggccgttatagcaccatccctattttcctaatcccaaggccaggcccacaaaccgcccccagcgacaggaaagagggtcggacggaggcgccggcctttccccgggtgacatgggctgagcgccggagcccggcggcggagcggccctgggcgagggtttcaggactggagacaatagtcaaaggggccgaatcgaggagctgccctcgctgacagtttcgccaaagtctgcctgactatatggcctgggttatatcactagagtgaccagagggaaaggaagaagacatcaggcccctgctgaccccacctcctcagaacggaacccgcagtcaagccagagatatcccataaaagagcaacttacgacgtctggagtagcagcgggcgtgagagggcagaaccaaattacagcttccagctgccatttaatgataatgtcccttactcggacataactttgccttttacaaagcccttttccatgttatgatctcgtgggaaccttccaataaccatgtgcaccctaccttgtgtgggttttatcccattttatagacgggaaaataaaattgaaacacagagtggcttcctccaacactcacagctctaagtagcagagcacagacgggaacacggcaccgtgaccca

SEQ ID NO: 14205 - DNA, 2551 bp, Artificial sequence
  DNA replication origin
cgaaagggggaatgtctgggtcggcggatcggggggcttgagagggcccgctccgtgggacgttcaggccccggaaccggcccccgcatggtcgccgctccggcccgggcgggcgcagcgctggcagccccgttttccgccagccgggctgccggagagttagacctcccagcctcacggggctgctgtgcggctgcgacgacgccggcgactgcggcgctgcagcggagacggaaggctcgggaggcggcgccatgtgagtgcgcgcggggccgcgctggggccgcggcgggaggttaccgtatttaccgaggccagagccggaccctcgggggcgggtcactgcgggcgtgctaccgtatttgccgggtcccgcgcaggtcctttccgggagtgggagcgccgggacttaattacgtatttatccagggttgcgtggctccgcgggggggcgctgcggccgtggggggtgggctgcattcattccctctgggagctggggcttgcagtcgggcggggtgggttgcggcagcagggtggaggcctacgtattttcgtgggggtggggttgcgacgcagagtttaccatatttctccagggttgctccggccgcagaagttggcaaggttgtgtgtaaggtcgggtggggtggggtcagctctcccgattaatgcagctatttgataagagcaacgtcgcgggacgcttgccgtctttatgggggcggggagaaggggcgcgggtgtcgctgcgggagagttaccgtatttgcgttgagcagcgcagactgtagagcaaagagctgcggccggagaccggaggagcaggggctcagctgggctgtgagtgtggcatgggaggaaagaacttgggggagagacggggggcctttcggcgtgcaggcggggcctcagtcaggggtatagctggggagagtgaggaggctgcccagtcacagggccgggctgagattggccaaggggactttgatgatctgtctttgcagatgtcagtgcagctgcctgtggaaaagacttgtgggtggggtctcttgcaagtaggacttgtctccttccccagggtcagttccaccccggcctcgagggtacggaagacagaggaggtggccctgagaccccactctgcagataggttgactgaggctggaagtgaagagaggccttcggggaggtccagtggaatattcagccggcttccctgatggggttggggagaatggatgaggcaggccttagggccctgcaggagcccaagttttggtgggggtcgtgggagtggtggcagtagacagtgcatctacaggagaagtggccctttggaatgcatggctctgtgacggctgggatggtggcagtggggggtgtgtgtgtgttttgaggagtgtttagttgttgagcagctagtacattgaaaagagctttcaacagtgagacaggagacttaaggcctagtccaggctcaccttgctctgtgaccttggcaagtatgttgacctcactgagcctcagtttccccatctttaaagtggggctcaataaccctgctccgcccctttctcagggctgttgtgaggacaatgggaaacaatttaagaggaacacagtgtcctgggaagaggatcctttggagaagcagcatgaagggagctgggtttgggggtgttggctgggcactgagggtgctgctcagccttgggccaggctttgctgtgaggataccaagaggaatcacgctgagaccagtccccctgggagcccacaccctggttcagtgacttggaaaccttttgaacacatgcctcattttgataaacaaagagctgccgcctttaatgtttaaccgaggtcactttcaagtttacagggttgtgttttttttcctgttttaagcttcacaaaaatatctttaaatcactgataatgccacccttttctccaagtttggggtgcacttccctacctccccctgtccttgagatctggttggagggataagacatatctagacgaaggtaactgaaaatcctagctgaaactgaaactgaaaatcctaactgaaactcatcaccatctgtctagtgtcttgtgtggctggctggcatggtgctaggtgctggggttgaaagaaggcagctctgtccttagggtgctgggagtcgggggacagaggtggcatgactgaccctcgtgcagtatgatcagtgagagccacatggttgtgtcacacggtgtttaagcccggggtggaaaggtcagggaaggcttctaggagaaggtgcccttgggaagggactggaaggagtgtaggccgtgcttaaaaggcagtggaggaagaggaacaccaattcccagcaggggaacttgagcttgaacaaaacggggcgaaaggtggaggttgtgggaggtgagtgtccctgccaggctgggggttggctaaccctcgtgttccccgacccctctctctccaccccccacccccgcccccgcttctgtctccctagggactggtgattgcagctggaagtgccca

SEQ ID NO: 14206 - DNA, 810 bp, Artificial sequence
  DNA replication origin
ccgcacccgcgccgccccggcgtcttcggggagcggcggccctacttctgcccccgctgcggcaagagcttcgcgcgcgagggctcgctcaagacccatcagcgcagccacggccacgggcccgagggccaggcggcccacttaggacgcgtgctatgatgcgcccggggcctgctgccgacggctgcttcccgccccgcacgtgcgtccccgacccctggagatggccctgggccgcagctccctctctagatgggatcccgggagaggggcagcgctggcttgggctcttgaaggtgtgggccgccgccaggctccggccgcccgctcgcgttcctccctcgggaccctctggctggctgcgcacagctgcttccggctcctgccatggttctccttctctggcccatccggcctagagcaggtgagacctgcggggctggccagagcccctctcagggctgggagtggtgggggtggagtgcgtggtgttgattcttgatggcaggtggggcggtctgggtaccgggctgtaggtttctctgtgatgagctgcttaccggatcttcatccccagaatgtcagagttgaaagagacttggagaggccactttccacaaaccccacgcccaacctcagcccctaggcctcctggctcctgtacacactctctgctgtccttgagatgtcatttcacttcatgtttcagtttactcatctgtaagttggggatatagatgagggactcttcctcgctgggatatattgcagctactggatgagagagggtgaggtcactggtgcacagag

SEQ ID NO: 14207 - DNA, 1346 bp, Artificial sequence
  DNA replication origin
tgtctgaagctgcggtgggctctgccccgtgccgtgcagccatccagatgattccagagagaggcctctgccaaggcccttgtgggctttgcctcgcccttttcgaaagtgggccctgccactgcctttactacctccctgggtcattccctgcagtgcagcctctcccctgagtgccacagaccccattttttgaaaaggtatgaaccaccaaattgctgcacagaaaaagggctttcccactcttcactttcttcggcgtatctgctgcattttgcttgttcttcaagtcaataaccatcaactcagaaacaagtatttatcagatactttctttatgttgtagatacagtggtgagaaaaacagagcaagtccttattctcatggaactcacctgtagtggtggcagactaaaaagcactaagcaactaaatgcagatgtgaagggtgacagtagtgggtgttgggtacggggcggggggcacagaggagtcacgactcttagggtggcagtggtgggtgctgggtatggggcgggggtgcccgtggggcatagaggggtggacagctcttagggtggcagtggcgggtgctaggtatggggtgggggtgtcagtggggcacagaggcatggacagctctttaatagcgggtggaggctggagagggcctcctgtactaaggggacagtgtgatagagacctaagggaagtgctcaggcacatgtcttgcacatgtctgcaagggacaatgccccagttcagatgaacagcaagcatgtttgaagtacagcgcaggctgatgtgactatggcacacaatgtgaggggaagggggtgggagatgaggtcagagagcagctgggcacaaggtagggtctcgtgaccactataaaggctttgccttttactttgaatgggtggagagtcactgggggtggggggaggtttagaatgaagcgtgacattacctgtctcttgttttaacaggagaggagaactgtggctattggtggacaatagacagctggagaagggtggaaaccggggagcagtgttaatattactgcaaaagtccaaagaggagctgatgaccagttcaatctggaaaagttaggaaaggcttgacatggagcctcagagtccttgggctaagtgatggagaatgggtaggaacgttccaggcagacaggaggatggggtgcaggcaagggtgtgctggaccatctgggaagctgtagctaaggtgtcagtggagagatggggccttgattgtggaaggtaccacagtaacaggctgcacattctttttgagcctacaggaacacttacaaaaatttcactgag

SEQ ID NO: 14208 - DNA, 835 bp, Artificial sequence
  DNA replication origin
tatgagaagggtgaggggagacccaggccagtgctgcttcatggattttaaggggacagaatcttccagaatcagagctgcagagaggtcaaggcagaggaaaaggagaggagagccacctaggtaggagccaggcagctggtcccagggcagccggggcatgtggactcacgggaaggggtctggtttctcatcctgtcttgcaggtgactcagatattgctgggggttgtgagttgtgttcttggagtgtgtctcagcttggggccctggactgtgctgagtgcctcaggctgtgccttctgggcggggtctgtggtgagtaaggaacaggctgtgagcctggagggaggcaagtggtgatgggcaagaaggcgcttatggatcttggttggggctttggggaagcgaccaaagtctctggagccaaatggcctttggccatgaggaggctgctctggggtgtagctaaaaccctgtcacttccatttttctcttgaagacagatgggaggggtggggcaggtataggtggaatcctggtctgtgtgtcagagttctttgtctgtccctgggatcctgcttcacattggctattctgggaactgctggtgggagggtgatgatagaccaattcagaagagtaaactggaggcctttttctggtgtctcttttcaggtgatcgcagcaggagctggggccattgtccatgagaagcacccgggcaaacttgctgtgagtcttggacaccctctctccaccttgttcactgaccccctcctgaattctgctccattatctgtcttctgccctttggttgtcaatatcttggggtc

SEQ ID NO: 14209 - DNA, 1292 bp, Artificial sequence
  DNA replication origin
gggaaaccgcgcagcctgggcggggccgcagcccccacccgtgcatctgccgtctccgccctcccgtcgctcccctgctcggggtcagctagtgtccgctctgctcggccgcgggctcccggaggactgcaggtgaggcagggcctccgcggcccgggagaccctcttgccgcaggaccctctgtcacgaggagtccccagggccatgcccccaccccgtcctgtccacaggacgtctttcttcctccaacctggtttccaggaggactcacgtaggagggagggacagctgggtgcaggtgtttctccccagaaaaacggctggagagcgggaggagaggcctggggctggcgcgtcccgtccaccttctgccgcctgcacgcctggaccctggctggagccctacggtggggtggctcctgggacggggccagggagcggcggggctgccggacgctttccccagccccggggcacgggaagagctggacagaggaaagtgttcggggcagccgggaagagcccaccacctaccaggcgtcgggcggcccgcaggggaatctccgtggtgccggcctggttcagatccgactcttcaggcgggggcgaggcagatctaggggttggcgtggggcgggggaagcggtggtcctgggggcccggaggtagctggaacccgaggtgccctcagggcgaggcctgggccgtcaagggaaggtctggctggaatctggggctgggctggaagcagtctgaagctcctttgtacgtgtgcggaattgtctaactcctgtcctttctaaccccaaggaggccaggtgggtgaaagagtgaaactgctttgaaaagtaggtagagtacgaatgggaggtgttattagaattgttaataatatttgatttaaactgtgatacttagccaggatgtccattagaattgcctatgcaggatttattttagagccaggcaagctgattctaaagtgcatgtgaagaagtagtctagcaaaaatggccatgacaattctgaaagaaaaaccacacgaggggatcatgaaacagcccaattagcattaagctccatgttaaaattgtggtaatgatgcctagcccatgagacatgccaatgggcagaatataaggactagaataggcctacattcctaggggaacttcatttctgctcaggagagaattttaaatcactgagaaaaagaggatgtattttccgcaaatggaacgtatctttcagaagttaaacatctgaatgacagcaacagaacttggatccg

SEQ ID NO: 14210 - DNA, 1023 bp, Artificial sequence
  DNA replication origin
ctcccagctccccagagcccagtgaccctcgcgcagcaggagaaccccagacggaccccaggccctgcagcctgtcatgaacccgaggggctgaagttcagccccacccccgcctcccctccccgcctccccctccaactctcaacccacttctccagccagcgccccagccctcccgccgcccgctcgcaggtcccgaggagcgcaggtgaggcggcaccccactcccggcggcccccgggcctccttccgcacgcaccccgagctgcctccgcacagttggaggagcgtaggagggacccccacccagggatgacactccaggaaggggactgcagaggaagccaggtgcggccccggcttttgacctacctccgcaccgcagcgcggtccttcacggggcaggggcggcgtgaacccgtcgggcgtgagcagcagtcggtggagcgggaggtcggcggtggcggggatgggggtatccggagcgcagccggggcgcagctgctggcacaggagctccacaggcagccaaggactcggtcctgtcccagagcctgcggactgtggaggggaggccgcaggaagagcccgggaggagggggtgaggggtcgaggtgtggggcgctgcttgacccagacgccagggccctgggaggaggatgagggggacagagcagatcttgggcgaaaggggaggttcccgcaggctctgtagtcgccgcagttccagcatggtcagcaccccctctgctacacacattcccctcgtgaggggccaggggtgcggccctgtgaccaggacagccattcattgggtgactttgagccaccactggcccctgacctccccaactccaatgaaatctgcgaaaatcttctgacagccgttcctctctggtgctcccttcctcatagactgtgtccctgacaatgggaacagccgacagtgatgagatggccccggaggccccacagcacacccacatcgatgtgcacatccaccaggagtctgccctggccaag

SEQ ID NO: 14211 - DNA, 1337 bp, Artificial sequence
  DNA replication origin
ccttcctttttaaacaacaccaagtgctttatgaaagttctagggatggtgggatcctgtggataaaagtcatggggtgctggagaagatctcaatgaagggtgagtctatacagagtgggcactgttaggtctagaagcctgtcctaacagtgcccaataatccactcagctgggcttgaagaacaggaaatctagtatgtcccagtggacaggtggacctgaatcctgtttggctaattctgtaattaagctgggtattttgccacaggctgggtgaaggtaattactctcggcttctgtcagtaaatatgagtgttttagtgctattctgagagtgtaggtaccatgaccagcctacccagctcctgtgcaaactgcacacacccatctgttgacaacaattcctgggtttccattgtgtacagggcctgtggaggacaatgagaataaccagggggtgatgcttcctgggggaccacatactatctggaacgctctgccttccccatctcaatgcaagtatctggagatgagcaggtccttagatccttagttgacattaactgttgaaggcagggagaggcagccagcctggtgggaacagcactgggaagggtatgggagagcagacagtgtgaataggacatgccaccaccgccctcagctgtttgctcatctgaacaggcagggaatggtcctagataatcagatctctccgactgccagcattctgtggcgccatgttggaggaaggcaatcaggagagcaatgccccacccctctcacaggcagtcaagcactgtcctgctctactcaccacagcccctgtccagatggcagctcccgaggtgacgaggagggtgtagtcgcggatgtagaaaaatcctcctaggactgcactcaagatccccagcacgatctgcatcacctgaaagacaaaggacccaagatcccggctcctaggtggacctgccactgcagggattaaccgctaaaaccccaaaaagagagggagaggtagagagagagagaaagaaagaagagaagagaagagaagagaagagaaaaggagaagaaagaggaggagaaggagaaagaagaagaggcaggaggaggagaaaagagaagggaaaggaaggagaggagagccggcccatcctgagtttggcccagaggaaaggatggactcagggctccactgattgggactctgcatggtcagtggctcctccacaccccttcagcccagagcctcccctccccaggctcttactgagaaggccagagaatcacatcgctaagtaagaagacataactggctcggtgtcctgttca

SEQ ID NO: 14212 - DNA, 1229 bp, Artificial sequence
  DNA replication origin
ttggaggctcaagaagagggtccttcctctcctcttccagcttctgtgttgccagcaatccttggtgtccctcagtgccttggcttgtggccatgtcactccaatctctgtcctcacatggcgtcctccttgtctcagtacctctattttcaagaacaccagtgattgtattgagggcctaccctactccagtatgacatcatcctaactaattcatctgcaacgaccctatttccaaataagaccatattctgaggttccagggaggacatgaatttttagggggatgctatgcaacccagcacaccttctttacctgcctcattgcagagagcatggtccttggccagtgagtgaattccaagccctgtgccctggggggctgctgccccgaggatccacaaggtagagcctgtgtggggttttgcgatacacgagggacttaggaggaagaggacacactgggcaggggcgggggtgggagtgggagtgtgagtgggggtaggagcagagtcctgaactgagatgtggtgtgtttcccaacatgggaaaaggtcagggctgatgcggggagtggggtgcggtttgtgtcgctgtgctgaggaagggcaggtggtgtgtctggaaggaggaggtagagtgaggaacctccctatgcgcttctagagaagtgtgggggtgaagaggggcttgtgggaatcctatagagacagaggagatagagaagccctctagagaggcactgggaaagctgaggcgaacagaatccttgtgcagaaaagctggtaagtctgttgttatatacatatatatatttgtagagacggggtcatgctgtgttgcccacgctggtcttgaactcctggcctcaagtgatcctcctgccttggcctcccagagtgccgggattacaggcatgagtgaccatgtctggccaaggccattgtttctgctcatgtttgtgtgcactgtggctggggaacttgagatgtcacacttgaaatttggggtctgttgccttgccacctctcttcctgctccctggctggggctggcccctccatactgaaggtgaccttggtttctgaggtgtggttcctcgcttgtggaattaatgattgctgacagttagagatagcacttgggcaaagaccgtatcctgtcagttgttcgctgcttgcctttcttaaggaggtccaggcctaaggaggggcagcgctatatacaaa

SEQ ID NO: 14213 - DNA, 968 bp, Artificial sequence
  DNA replication origin
ctccctgcaggctggggtatggcgaggggaggggtctggcagaggtccaatgcatcagagtgagccaggcttggggaactgtggagggggtgttccaaccgagggcgacagcttgatcgaaggcacacagttgagaaacatcactgcattctgtgctgggagctgtaatagtccagggtgcctggagtaaaatgtgacaggtgggcagttgcctggctgagcctggagagggcccgaccttggggtttactgcacagctggcggggccttggcagagctctctgcatggcagtggcacaaagagatctgtgagcttgccatgatgacagcggggtggggggtggattagggaggaacaaaaacagagaaatcatgcaggagacagaaaatcttcatacgagagatgataggagtctaaatcagggccaaggtaggaggctttgaaagaagaggcacatccaggaaggatcccagaggttaaagcaccagatctcagagaatccaggacacacagaaggaaggagggggcatcaagcttgggcacagatatactgccaccgcccacatcgggacccaggagggagagctggactgcagggtgggggtgggaaatgttaccaagggggtaggagtcaagggcatgtgtcaaagcccagcttgtccctgagcctgcaggaatggtcgtggatggcgcgggaacagttgggctgcggggtggggaggctgctgaggcagagcatattagcagcgggtcagcagcagagagtgaaggagacagggcaaaatagggagcttggaaaagagggccaatgtctctactgagctgagaaaatgagacagagtgacagagatgaaaactcagagggagggagatagagactcagagagagacagagagacagagcatgtgcacacccagcacaggcagctggggccccacccccatccccaggagccacacctttaca

SEQ ID NO: 14214 - DNA, 1384 bp, Artificial sequence
  DNA replication origin
acacttagatttagacctgagttatgtggggaagagggaaagtgcagaggtcccattgtggttggtagcagaagccgtgcactgttggagctggcggctgatggggcttcctgctctagaaactcttgactgaggcagaggcaaggggctggtctgcggtatcacacgggaagtcattcttgaaagctcattcttgagtctgtttcttccaagctccaagatcctatgatctactacaaaccccgaatcaatccttttcttcttaaactgagtagaggggattctgcagctaataaccttatcaacagatttgctcctaccaggtgttaatgagaattcacttattcaacaaatatttactgtatgacttccagggagacaaaatcttttttcactaggagcttctaagtttgtggagacagacaataaagaaataaacgtgtggggtgtgtgtgtgtgtggtgtgtgtgtggtgtgtgtgtgtgtgtgtggtgtgtgtgtggtgtgtggtgtgtgtgtggtgtgtgtgtgtggtgtgtgtgtgtgtgtggtgtgtgtgtggtgtgtgtggtgtgtgtggtgtgtgtggtgtgtgtgtgtggtgtgtgtgtggtgtgtgtgtgtggtgtgtgtggtgtgtgtgtggtgtgtatggtgtgtgtgtggtgtgtgtgtgtgcggtgtgtgtgtgcggtgtgtgtgtggtgtgtgtggtgtgtgtggtgtgtgtgtgtggtgtgtgtgtggtgtgtggtgtgtgtggtgtgtgtgtggtgtgtggtgtgtgtgtgggtgtgtgttgtgtgtgtgtggtgtgtggtgtgtgtggtgtgtgtgtggtgtgtgtggtgtgtgtgtggtgtgtggtgtgtgtgtgtggtgtgtgtgtgtggtgtgtgtgtggtgtgtgtggggtgtgtgtggggtgtgtgtggggtgtgtgtggggtgtgtgtggtgtgtgtgtgcggtgtgtgtgcggtgtgtgtggtgtgtgtgtggtgtgtgtgtggtgtgtgtgtggtgtgtgtgtgtagtgtgtgtgtggtgtgtggtgtgtgtgtggtgtatgtggtgtgtgtgtgtggtgtgtgtgtgtggtgtgtggtgtgtgtgtggtgtgtgtggtgtgtttggtgtgtgtgtggtgtgtgtgtggtgtgtgtgtggtgtgtgtggtgtgtgtgtggtgtgtgtggtgtgtgtgtggtgtgtgtgtatggtgtgtgtgtggtgtgtgtggtgtatgtgtggtgtgtgtggtgtgtgtgtcgtgtgtgtggtgtgtgtggtgtgtgtgtggtgtgtgtgtggtgtgtggtgtgtgtggtgtgtgtgtgtgtggtgtgtgtgtgtggtgtgtgtggtgtgtgtgtgtggtgtgt

SEQ ID NO: 14215 - DNA, 931 bp, Artificial sequence
  DNA replication origin
tatttattattcatagtcatcagcatcttcattaattattcatatgatccttaattattatccttaacaataagagcagtaaatagcagaaaagtccttgaggtgcctaaggcccagggccgggtgcctccgggcagttagaccagctaatgccctcagggcagtggggggaccacaggccccacctactgccggccctgcccctgcccctctcactggggcccaggggactgcaggagaagatggtcccaagggctgggggaggagctgtgctttcgagttcctctccccttccacggtcagggcctcctgagcagggcctccaaggggagcggcccagcagcgccttgatccctgggtgagccacgtgtccacactgggcagccccactaactgcccgggtccgagccgtgtctgtgcaggggctgggaggtgagggcccccagctggcccggtagggagaggcgtcgtgtggggccttcttggggaagctctggggcccccgggggcagctcctcacacgccatgaactgggaaacctgcaatacacacagagcatgggcaggcgaagaggccatggaggaggaggaaggggagggaaaggggcaggagaacccggggacagaggatggacgggaggacaggagggccaagaggagagtcaggtgggcagagaagctggaggggacaagagccaaggcagcgagagcaggacaggggccaccaaggggaggcaccaaggtgggaagtagagaaaggcattctctgagagcaggagccaaacaagagagctgggagcagggaaaaccctaggcccctgtctcttcccgagggaatgtggccgctgagcccaacccaacctggaacaagcagtctctgtgttgggacagaagctgggacagaaaaagagacaagattccttcccgcaatc

SEQ ID NO: 14216 - DNA, 1848 bp, Artificial sequence
  DNA replication origin
cccgggggcagctcctcacacgccatgaactgggaaacctgcaatacacacagagcatgggcaggcgaagaggccatggaggaggaggaaggggagggaaaggggcaggagaacccggggacagaggatggacgggaggacaggagggccaagaggagagtcaggtgggcagagaagctggaggggacaagagccaaggcagcgagagcaggacaggggccaccaaggggaggcaccaaggtgggaagtagagaaaggcattctctgagagcaggagccaaacaagagagctgggagcagggaaaaccctaggcccctgtctcttcccgagggaatgtggccgctgagcccaacccaacctggaacaagcagtctctgtgttgggacagaagctgggacagaaaaagagacaagattccttcccgcaatccagaaagaactcggggacctagaaacagaggcaggctggcggccaggcatctgaaggccagggagagggccggggcaggcgggaggggtttgtgggtactgagcgtctgctggtgagagctctgcgggggcggctgcgaagggagactggcacatttgctgacgtgggccctcgtgtctgcaaacaggagcaggcagcatatgggaggggggagcggatgccaagggaagtggggagggagcagatcccaggccgcctctggcagccagaggagtccccaccatggacgcggaggttgacacagacaccgccatcctgcagaggccaggaacatgcaggtccacccaggagaggacaaggggcaactaaggcccatctctagcagagggggcaaagcaggcccaggaagtcctcccctggaggcttggcctctgcaccctgggaaatgccaagcaccctcaagatgaccctgtgacagccactgccaagggcaaggatgggcaggacggtgagaccagggagtgtcactcacagaagggacccgggaccctgtccctagatactctggtatgcagcctccaccgccacgtctcgggctcagtcagttcttggagaccacccgtggccgtgagacaggcaccaccgttggagctggctcttcaggcgatgctccggggcctggcggtggaggctgtggacactaggggagtgaagctgcgggccacttagcctacaggttccctgcacccagctgtctaggggctttggacgggggactctcctgccctaccctgagcctgcagctcctgaagcagccttcctccaggaggacaggggtgggaggagggcaggaacaaggttcagggaggctgggccacagagcccagcagaaaggcagcaaagcaggtttgggctggaatcggggaacaagcgggtcacggtacatcgaggaagcagggctggagcttacctgagaaagcgagtccaaggtgagggtggggagggggctgacgggcaacagcggggatgtggaagtggggccaggccccggggtggtcacagcactgtaggcgggcgggaccagcgtcatctgcctctgtagcagctgcaggacagtggccatgtctgcactcagccgggtctccagcctggggcaggaagtgggggatgctcagagaagtggggacaccagtgacagcctccaccgggagtggggaaggggaaggggaggggggaggggcagcctgtcaacccaggccctccgcgctagaggtgtggcagcccccagctgggctaggaatggaagaaggggatccagctgctgcacacacagacaggccctctccctctaccagacaacaccgccaggacctggaccagactccagggcgtgcccccccaccccacctgcactccct

SEQ ID NO: 14217 - DNA, 1044 bp, Artificial sequence
  DNA replication origin
cgccgacccgggctggagagggggatgttgaggaggctgggggtgggggcggggcatcgagggagctcctggtactggcggccccgactgtccccccagaagctgaaaatgttggacactcctgagaaggcgcctgcagccagagagcagagctgggtgagcggggtagacgcaccaccgctgccacgcccggtcctccctcgcccgcccgtcgcccgggatacctgacagggggttgcaagtgtcgctgctcttctcgcagtcctccatcaggggctccccacccggcggctctccggggggcctggggctggagaagggcaccaggcggagggggctggagctgcggcctgggccctcatcctcactgctctcagggctggaggggccactggacgggctctccccccacggcccccccggccggccccggctactcggccctgcccccgcccggcccggccccaaggccgacacctcccctggctgctccgtgtctgtgggaaacagagaatgggcctcagagaggggaggagaacagagaggagggggcgagggtggaggaggggacaggagcgagcccgagagaggactgggcaggaagccctggtttgtccccagtcgcttcttctgctatcttgcacccactgtcaagccgaccaagaactcccaggaccccctgactgcccaagcactggcaatggtgcttcaggggttggcggatctctgggactgcggggcctcagccccatcgttggctccctggccctcctttgttctatgttctttcctcctcagtgctcacagagaccccagccctgtgaagtccaaaaagcctaggcttgccctggagggtggaagagggcttcctggaggaggtgacagctgcaggggccctgaaagatgggcagcatctggacagctggggtgtggagtgggcacactggaggaagggatgggaaggtctgaggcctgggtaaagcagacacggcccaccccgccttccagctcccagcctcaccttgtccccgccctcccccttcc

SEQ ID NO: 14218 - DNA, 791 bp, Artificial sequence
  DNA replication origin
tgtacaaacacaaatacacacccccacaaaactaaaatcaaagtttcactacataacactgggccttactgcatgtggttcattctagcatttctgttctgtgctgtgctaagctatactactgtatgttctttcagtaaaaaaaaaaaaaaaaaaaaaaaaatgctggttttgattcactactgtgttctgatctttggtttgaagaacattgcttataagggtgcagtgattggctaagagggtgtttgggacctggggtttggggtagtcctgctggctgggtctcatttgctgggagaccctgggctcctggcccctctggcactgtcgtgcctgctgggagctgagggagggtgggctggcagattgcttccccggttgtgtgggttgggggccggctggcaggcgacccagctgaggggacatgctctgcccggggtggggatgccgggagaaggtgcctgctgcctggatgccgccccccggggctgagctccctgtcctctccatggcctccagggaagaatgacatctttggggagcctctgaacctgtatgcaaggcctggcaagtcgaacggggatgtgcgggccctcacctactgtgacctacacaagatccatcgggacgacctgctggaggtgctggacatgtaccctgagttctccgaccacttctggtccagcctggagatcaccttcaacctgcgagatgtgagttggctgccctgagctggaccccatcctcctgcttccagctgtgtggctgcccctttgctgtgtgacatt

SEQ ID NO: 14219 - DNA, 1083 bp, Artificial sequence
  DNA replication origin
tttgggactcatcaactatggcctccccaacccaaaagcctgagggtgtgggggcctgggagtcagtgcttctgggagcagggccagcacctctggaattcatgggggctgggcaaggccttgggttcagctggctgcccagggatggcagggagagcttggggagggggcttttgggttgagctgcatgcctgagagaggattctagggagacccagaagcttctgggacagtgtggagaagctggccggagctcttcttagtttgccttgggagcaagagggacgtgcctgctgtcaccgggtccggatggccagcctgcctctgtctgatgactgtggaggaggcagagtgtgagtgtgagctggtacaggggctgtgtgtgtcactgctgagcagtccctgtgtgcacgtccctctgtataagttgggtgccatctcctcccagctgggctatgtcttctttgtccctttgtaagagggtgggaggatgaggactgtgggctgtcccggacctgtgtggagagggggctgagggagcgaggtgtgcgagtggagggtgggagtgtcttggtctttctccatcctggttgcctggtgtcctcgggcctgtggcatgaagaggggctggtaagaactgcagtgactaccagtcagtggattggggctatggctcctggggccactgcccaggttgggagctgttgtccttggaaccctttccggtctgagactatggcgtgtgtggttgggtgtgtgggccagcgtctcagggcagtcacagtggcaggtctgcatctgcattgccggcggggagcagcactgggtgttcctgccgagtggcctgaatccacgtctgccgggaaatgttggaactgtttggagccagtcctgtgctgtgtggcattttgggaaccatgatgcccaaacctgggggtggccatttgctgtggtcgcttggctgaggggtgggcattctgatggaagctttttttggcctcctcctcattctgcttggccccggcagagatgtcatcgctcctgcccccgaggtcccatggcctgcctcacccacacctccgc

SEQ ID NO: 14220 - DNA, 1638 bp, Artificial sequence
  DNA replication origin
cccggctgctggcggagggggaggggctcaggctgcgggagcgccgctgcaggagcctgggcgggctgcgggggagggggccgctggctgggcaccggcggggcgggggagcctagtgtggcggggtgggggtggggacctggtagaaggaggggccggctggaggagctgaggttccgagtgcggccgctgctgggctggcgggcgggcagagcacggcaccctggcagcagggcccacgccacggggccatgggcagctcgagccaggcaggctgctgcccacgcttactgccagggtgaccccagccctggggcccagccacaaccaccctggcttcatgccaggggctgctctggttgccagtcggccagcctcgggggtgcagcctgggctgggactgctgctggggtgcaggtgaggcagtggccgggccctcaggccccagggcaggcaggctgcagggagccaagtcctccatggcggccccagccgggaaggcgagcaggacaggggctctgcggcccagggcccagaaaggccgggtgaggcgggccgtgcgcatctccagcctcgtggcccaggaggtaggtgacacccggtccttcctcttctttctggggccggcacactgaggcaggtggctggcccaagggctctgactccaggctggggagagggctgctgggaagtaggaagctttgggagccgtggggcctggccctgctcacccgcgcctggctcctgttctcattccctcccaggctgggcttacagagtttccgttgctgggacttccccgctcctgtgcctgccatggcccacagtcctggagctcaaaatgcaaagtggggagatgacaggaatgagatgggtgcccagagagatggtggggaggcggagtgggacaaaggagcccatgggcaggaccaggagaagccggcaggcgacagctgggcctggcatggaggcgccggggctcctttgctctgtgtgctggggttggaccctgtgggcaaaggaggcttgtgctgttttggggggtcgaggaggctggaatgtgcggaagccactgtgtgggtggtgagggcgcgctgggctgaggcacctggctcatctcttcatgggcagccgaggtgtggtggctgggccatgcactactctgtgacctcctgggagccatccagccgctcttctgtcagcctggggcaggcttgggccgacagtggaggaggagtgggaggtggctcagggctaagtctgggaatcccatccctgcccccaccaccccacatctgcacattctgccttggctcatacactctttccagctgggggacaggtacaggtaggtcttcccacccacagctgaggagtcagggtttggcttaagcaagccagcttcagtattctataggacaacaggctggggggacagacctggcccaaggccataggtgagctggtggctgcagagctgggactggcccctgtcaggtgtgccccatgcacgtgtgagtttgtaccctggggcagtgttgctcatgctgtgtgcagactcaggggtagggtcactgctgttaggggtggtcctgacacctccgcccagaggcttgacctctcaggcacagagaagag

SEQ ID NO: 14221 - DNA, 989 bp, Artificial sequence
  DNA replication origin
acagggtgaggacagggcagttgaggctggggacatgacagggccagtagcaaggggggaaggcggcctgagggacatgaaaggtctggctgcagggtgtgtgaaggaagtactaggggccaagccaactgggaggcttcaaatgagaaggggtcacagaggtcaaggacaggagggtcctaattcttccaggccaaggtgatgtgccaggcagagggtgggcctcagtcctgtggggatggccaggatggcctcgaggggcccaactatgtccctaaagcatgggagaagcaagttttcttctcatagggaggtggtgggtacaaagatatggaagggtcaggtccctgaatcctgggccagagaagacccctcagccttgggggcattagccagcctggtcttctgtcccctcctgggtttggggtcctcctggcagcaagaggacctgcgacccctccatggcttcatccacccgacaccttatcctagcctttgggggctgggggtgggtgggtcaggagtgcagatctctgcagtgagtgagaagcctgggataatgtggaggactcctgtcccaagctgttccctcctgccccttccacagcagctgcctgggttggctcatgtaagggagctgccctgctacctcggcgggctcctggccctgctcccaccgcctggctttctgggtccctgccaggtctccagcccactggccttgactccagagcattccccctcaccccaggcccttatctggccacctacccctctcttcctcctcccttgcttctctcttggttcccacctgagcccctggcatctgccctgctcctgtgcccgctgcatgtgcccgtgagttgcggtgggtctgtgcatgtgcgcctgtatgtgtcggcaggcgtgtgtgttcctgccagtcactagcagtctctccatctctgggtgtctctgtctgactctggctggctcagcactggaccggc

SEQ ID NO: 14222 - DNA, 1126 bp, Artificial sequence
  DNA replication origin
cctggtctcagggctgtctcctggctgcttccttagagtgggacaggggtctgacctctcttgtttcttgtgactcccctggtctcttgagctgaccccatggactcctgactgtgcagggcctggtctccactctcgatctatgggtggcctgcctggcctggggccctgggctgctggcctgaccacgctgcctctccacctaggggccatgcacccactgcgcagcggcttgctcaactccacctcggactccgacctcgtgcgctaccgcaccattagcaagattccccaaatcaccctcaactttgtggacctcaagggcgaccccttcttggcttcgcccaccagtgaccgtgagatcatagcacctaagataaaggagcgaacccacaatgtcactgagaaggtcacccaggtaggcgcccagcggccgggctctcctctcaccttggaggagcttggagagggggtgggagtgggctgtgatccagagccgggtggagggggctagccagtgagggcctcttggagggaggcagacctgagggttggggttggcaatctattccagagctgcgatggggggagaggggacagtctgagaagtcctggagaggggactggagaggtctggtaaagggctgggaatggcagagcggaggtcgggtggatggggtgcgtgccttcggggcacagggtgaggacagggcagttgaggctggggacatgacagggccagtagcaaggggggaaggcggcctgagggacatgaaaggtctggctgcagggtgtgtgaaggaagtactaggggccaagccaactgggaggcttcaaatgagaaggggtcacagaggtcaaggacaggagggtcctaattcttccaggccaaggtgatgtgccaggcagagggtgggcctcagtcctgtggggatggccaggatggcctcgaggggcccaactatgtccctaaagcatgggagaagcaagttttcttctcatagggaggtggtgggtacaaagatatggaagggtcaggtccctgaatcctgggccagagaagacccctcagccttgggggcattagccagcctggtcttctgtcccctcctgggtttggggtcct

SEQ ID NO: 14223 - DNA, 1689 bp, Artificial sequence
  DNA replication origin
aagtttttgaaattcttgctctcaacgtctgtccttatcttgtgtgctgacacaacggctggtgctaatctagagagaacagagagacagatagtaacagctaaccgtctgtagtgtgcggcatacgccaggcattgcctaagcgctcagcatgtgctgacttggttaatctttataactcatgagaaaagaattatatacattatgtgtatcacaacatcactgtgtaccccataaatatgtacaattattgtgtcaattaaaaagttaaaaaattttaaaaagaaaaaattattattcttcccattttatagatggaaaaaatgaggcacaaggatgttaaataatttaggaaaaaagcataagtgattaagcagcagatccgggctatgaacccagagatcgtaggcctaaagtctgtgggcttaagcactgtgctacagcgcctcgcttgagggaaaggcagaggtgctgggaggatatgaggaaatgagatagggaggaaatgagatcaaagatggcagaagaaaggatcatagccagcgtgagaaaaagtgcagccgggaaagagctagataaatcatataggcagagagaggggtaggggagcctggcagcaacaagctggggtagacagattgaggggagccataagggcggcaggcacatggccgggtgggggatcaggacgggagatcccggagaggaagggccatacggggaggcagaagtggacgggcccacttgggttccagggtccatcctgcgtggctttctgctctgcccactgagtgggtgccaagggggctatgtcctcccactctgcagggagctgcttcctatgtctggtggatgtggtgcccgtgaagaacgaggatggggctgtcatcatgttcatcctcaatttcgaggtggtgatggagaaggacatggtggggtccccggctcatgacaccaaccaccggggcccccccaccagctggctggccccaggtaagtgtacttgctttagggcaggctcaggggttcgtggtctcatttctttggggctgtgagctgtccaaggtcaacgctctgcaggaagggaggatgtaatggttgggtggggggtcccccctttggaggtgggaagtgaaccctgtaccctgaggatgtggcttggttcccctggcccaggatggacacataggggtggaatgacagggcccagaatcacaggtccttggcgtgggctagcaccgtttccctagcttcatctgttgggcttcccatcccagcatcccctgggagcggtcctctctccagcctggcttgagcagcccagggtggggaacatgaccacctgggagcagctcctcccctcagtaggaagctgtgtcctatggactcagctgtgtgtagtttctttcatctgctccttgttcatggactggccaagtttcctgggggtctgggctagctgaggagaggctttgagggaatgcccacctgggctggaccatccccttgacaacaaaggctcggagccccttcctctgtcaggatgccctctttggcttaattttaatctttccctcagcatcatgacaaaagtgctcacctcttggtttcttacactctaaaatgacagtgtcagtaaaactggccctacctgctcatcggatgccacccctgacggcagggcccctg

SEQ ID NO: 14224 - DNA, 1147 bp, Artificial sequence
  DNA replication origin
cccctgggcctgcaatgtccctggcctttcctaggcccctggctgcccatgagagctgtgttagtgacacggtggccccctgccaggagcggctcctgctgcatcttcctgtcgccgccaccaggctaaatataacctgacactgcacagccctgggctgctgctccggagacagcctctctgcctgggggcggacaggccgactggagccccagcctcctgccctcagcgtgactttgggcctgtcctgggcacagctcctcctgctccgagcgaggcagggaggcgactagggcgaggatggctgcctccctgaggtcaccttccctgcagggacccagcaccccgccttgttagaattctggatgcttccacaaagccatctgtcatctcatctggcacccagtgcaggaatcacttgtccccacagtacccgcagggagcctgaagcccagggaggtgggtgacctgcccatagccacagaaaatagagggaacgcaggagccaccatggctggggtagagtggctcggctccctggggctcctccacctgtctggcttgttccctctccttccctcttgcccatgcatcaaactggggtcctgttggatgggtggttcactgggggcaggtgccaggcgtgtcttgttggtcacggtggctcaacacttcgcaggcacggatgtgcttagtgatttgcagaggactgggaggagctgcctgggaagaagctgtgatagcacctcatttacggaggagcgcacggagactctgaccccagaaggtgcctaaggtcactcagggccatctgcagcctcttcctccccacctggtgctgacatgggagataaggcctgcccctgccacagccaaatgtggctcctgcctggggcctggcctaggctagcggtgcccagaggtggggaattgggtggagcccctgacctcggatgggttgggatgctgggcaggaacagtgccccccaccccaggtagactgctgggtgtggattggcaccaaatgaaagcaagccggcgttgtgttctgagaagtgatggacaccttctgtggtagcaggatggcgctgtacctgccactctgggaatgtgtccaggcctggctctcccgctctgctctgagctg

SEQ ID NO: 14225 - DNA, 851 bp, Artificial sequence
  DNA replication origin
cacctccctgggcttcaggctccctgcgggtactgtggggacaagtgattcctgcactgggtgccagatgagatgacagatggctttgtggaagcatccagaattctaacaaggcggggtgctgggtccctgcagggaaggtgacctcagggaggcagccatcctcgccctagtcgcctccctgcctcgctcggagcaggaggagctgtgcccaggacaggcccaaagtcacgctgagggcaggaggctggggctccagtcggcctgtccgcccccaggcagagaggctgtctccggagcagcagcccagggctgtgcagtgtcaggttatatttagcctggtggcggcgacaggaagatgcagcaggagccgctcctggcagggggccaccgtgtcactaacacagctctcatgggcagccaggggcctaggaaaggccagggacattgcaggcccaggggacagagttagggagcccaagaggccaaccagtgaatgagagagaaggagggagagagacagagacagggagagagtgtgtgtgtgcgcgcgtgtgtgtgtgtgtgctgaatgagagagagaccagtcctaagctcctgcctccaggatctgggaaatgcagcaggttgaggggccccaagctcagaccctgaccccacagaagcagcatctccagacagactcctccaccaccccttccagcctgagacccagccagcaatccatgggatcatttatagggtcttgggggccgctgtagtcatctagacccacccaaatccactgcatgtggcatgcctgagccatctctgccccggaccacagcaatgcctcagaagatctctgtcct

SEQ ID NO: 14226 - DNA, 933 bp, Artificial sequence
  DNA replication origin
gagtccccgggcggctgtgtgagtggagaatgtggggaagggctgggagtcccggaggctggggtccccgctcacgcgcactctcctccccgcccccctaggccgtaagttcatcatcgccaacgctcgggtggagaactgcgccgtcatctactgcaacgacggcttctgcgagctgtgcggctactcgcgggccgaggtgatgcagcgaccctgcacctgcgacttcctgcacgggccgcgcacgcagcgccgcgctgccgcgcagatcgcgcaggcactgctgggcgccgaggagcgcaaagtggaaatcgccttctaccggaaagatggtaggagcgggccggggcggggccacgaccaggggcggggtcaagaggggcgggaccacggcgaggggcagggtgcgtgggggtgtgggggtgtgggggcggctggagaacgccccgagcccgggcagggttctgtgggggtgtgacgcgggcgggggccctgcggtgtgcctgtgggaggcgcggttccggggcctgcgcctcactctgctgagatggttttcaggagggcaaaggagttgctaggctgtgggtctggctcctctggtcctttttttccctgggcaggtgtgggcacgtagagcaagttggactagagttagaccgagctgggatggcaggtacgtgcgtggatggaggttaaaggtcagattggcagttgtgcgctgacatccgggcacaggcccctatctaccttagggcagttgctgccaggtgacaggtctgggagatgtcatggagggacaggagggctgcaggactctggctgtctctgctgcccccctcctgccctgcgcttcagcagcacctgggggaggtgcgtgcctctccccgcaacctcagttccctttgtctcagctgtcgagcgccccgccctgcc

SEQ ID NO: 14227 - DNA, 1138 bp, Artificial sequence
  DNA replication origin
gcggcagcgcggcgctgcgtgcgcggcccgtgcaggaagtcgcaggtgcagggtcgctgcatcacctcggcccgcgagtagccgcacagctcgcagaagccgtcgttgcagtagatgacggcgcagttctccacccgagcgttggcgatgatgaacttacggcctaggggggcggggaggagagtgcgcgtgagcggggaccccagcctccgggactcccagcccttccccacattctccactcacacagccgcccggggactccccgccacaggaagcatggctgggactggggtcccagcagggggcgaacgcagctgtgcgtgtgccccgatacaggtgcctggccggccgggccgcgcggcgcgccccctcctccgcctggcccgcgggcgggctgcgtggcttcccccgggcaggccgccagcagcccgccgcctcctccatgcccgaggctgaggccagcctggcgggtgtcagcaacgcgtgtcagcagccgcggcggagggataaacactgggcctagaaagggagcctgggaaaggccagagatggcggccaggattccctttgcatcggctctctggattctgcttttaatttccctgctctccagactggggggcgctccctgagccactccttatcctgaggctccctaggaaatcactccccgattatctgaggatcctaccaggtcagtaccccctagaacttctgcacaccacccccgccccaagggcagtcaggagctgaggggtgggtgtgccagagaggatgagggaagttacacgttgaacacctaaggacgctgcatctcattaggtcctctgacaaccccataaggtaggtgttattatcctccttttatagatgaagaaaccaaggctccagagaagttcggcaccatgcccaagtcttgcagcttgtaaatgatagagccagcttttgaaccttggtctggcagaggcagaagaataagctgagggtcacaggcagaagcccaaggtcataggaagcaaagagagggacctgcagctccaaaccctggacacacctggagcctgggcggggcctgagactttggccccacttgtaggaaaacagacccaagaaaggggacctgcccagggatgtg

SEQ ID NO: 14228 - DNA, 1921 bp, Artificial sequence
  DNA replication origin
agcgcggggacgcggcggagcgggccccgcggctcggcgggggccggcagacaggtgtgccggcggcgggcggctcgcgctcaggcggctccaggccgggcccggggtccggagcggggagccgggagccgagcgaggacccggcgcccgcagtccagtcttggccgcgcccgtgctcggcttggccgcggggtgcggggaccacggcccggccgggccacccgaagcctagtgctgggccgggccgggccggggtgggtgggggcccgcccggcccgcccatgggctcaggatgccggtgcggaggggccacgtcgcgccgcagaacaccttcctggacaccatcatccgcaagtttgagggccagagtgagtgggggagggggctgagcggggagggggctctgggggcgggccgagctcttccgagtgtggatgggggggcgtgcccgggccgtgtgcgtcggcaagtgcgagtcaatggggcctggtgggccccaggctttggcgaggggacggcgggggcaaggcttggtgcaccggggccgtgggcaccgggccaaagggtttggggttggggcttggggcgggaaactcagctcaggcttttgggatcggagtgtgtgtgacacgctgagtgtgcagggaagggatgtgggatggagtgtgcaggtgtccccaactctgggtgcgtggacgtggatggggctgtgtgcaagggcataagagtgtgtacgacccaaaccctgggatcccgagagtccagcgcgcacactggtcttgccagatcttgactgtgttgtgccggagggactgaaaagccgtggatgcagggtcagctcataatctcttcttgtgtgtgccgtgtgtatataaccctgagcccatgtgtcacccgtgagttagaccctgtatgggcggtggggaggtgtctttgacaaggctgcgagcttgtgggctctgtggagacagggtgtcctggggctagagctgggctttgagggtaagcagctccctgtggtacccccaagttgtgggttttcttgccctggagactgtcacctaattcccttatggggaccgggagtacagcacccctaatgcctgcctggtagggaggcttctagaagggtcccagattaggcaaatgtcctgggggtgggcagcattcatgtgcctgtccctaaggctgcatgagccacagtgggtgtgactgccaagggccctgggagttgggagaggatgacattccttgtccatgaccctgtgagcacaggacaacgcgtgcttgtaacggtggttgggggaaggaggggtcagtccgatggtcagtattgtgtgaagcggaggaacaagatgatcctgagggggtggagacaatgacactggttgagggcctccctgagaggtgggggtgggcccagggggaggctgtgggcgggcctacgaggaggctgggatggatgtgggggggggtgctggattctagccctacctttgccactgactgccatgtgaccttgagtgactcttccctctttgggtctcaggttccaggtctgtggaggaggggcaggctttctgtcccatccctgtattccaggatctcagtgaagggtgtgtggtggggtggggcatgccttcgaagaaacttgctcttctttccccagcctgggagagaggacaaggggtggtttttcttctatgaagctggggtgtgtggctgggcctctggactgccttggactgtggcagagctggaggccgagttagggggtcttttcaggtgacaggaaaccctgactcctggaattgatggctgcctgggaggtctggggggccttgggaactggccaaaagatgaaccagttccaaaaggcaactttctgggggccaggggaagggagaatcgagaaaggtgg

SEQ ID NO: 14229 - DNA, 1046 bp, Artificial sequence
  DNA replication origin
gctgcaagccctcaggagcccccacatggccccatccatctagacaggtctctgatccggctgcagggaggggaccctcggctgttcagctgcgactcctccctccccgcccgcccactcagctgtcaacactcgcctccccgccctggccttcccggggccctgcctgactgctaagtccgaggacaccgcgcccggagaccctcactcagacgcaagcaggcgatgagcaggcggcggggcagacaccccgcctgcccttgagcatccctaggcctccttgcctaaataagggagccgcagctggagcgagccagctggccggggggaggggcctgcggctaggccagggctttccgaggggctgggccgtggccgccgccgcagggccccgagcccgccgattgggcgtgcaaggctggccccgggctgccgggggagggcgggccgctcgcacccggggatcccctggttggaacctcgcgctcagggacctctctttgatcctgcagctaggaggccgcaactgctgtcagaatgtccctctctgtgcagctcctatgcagagccccacagagggctctctctctctccgtgtgtgtgtgtgtatgtgtgtgtgtgtgtgtgtgtgtgtgtgtgtgtgtatgtgtgtgtgtgtgtgtgtgtgtgtgtgtgtgtgtgtgttggggcagggggcgtgccccttctaagtttaaccctcccttatttcagagctctgctgctctggggccttcagattgtcttgcttttcctatttccagggtctcccttgactccgggctcgtcttcgagggtccaggcgttgccccggtcacccacagtaggcactgagcgcgtgctgtgtataccaagccagtgctcggcgtggtggggaaccagggcataaggacccgccgtttcccttcaaatcaggtttcttagtcgctaatctggggtgggggtggaatcccttcccccatcccggccgcctacaagccggccatggcacctgtcctcacggtttcccctgcctaagggtcccttcc

SEQ ID NO: 14230 - DNA, 1350 bp, Artificial sequence
  DNA replication origin
cacacggagagagagagagccctctgtggggctctgcataggagctgcacagagagggacattctgacagcagttgcggcctcctagctgcaggatcaaagagaggtccctgagcgcgaggttccaaccaggggatccccgggtgcgagcggcccgccctcccccggcagcccggggccagccttgcacgcccaatcggcgggctcggggccctgcggcggcggccacggcccagcccctcggaaagccctggcctagccgcaggcccctccccccggccagctggctcgctccagctgcggctcccttatttaggcaaggaggcctagggatgctcaagggcaggcggggtgtctgccccgccgcctgctcatcgcctgcttgcgtctgagtgagggtctccgggcgcggtgtcctcggacttagcagtcaggcagggccccgggaaggccagggcggggaggcgagtgttgacagctgagtgggcgggcggggagggaggagtcgcagctgaacagccgagggtcccctccctgcagccggatcagagacctgtctagatggatggggccatgtgggggctcctgagggcttgcagctgcctctgtccttggagcaggggctgggtcttgtcaccagcgagaaccatcatggggggaggggaagaacaaagggcagggaaggaatcggagtcccgaaggaggaaggcgcagaaaactgtcgtcgtgagaccaccctacccggactctcaccttccacccaggagcacaaagatgcaaacactggggccaaatggggccactggccagcagatgacactcttttttatttgctggtgggtgggcagtgactcagggaggcagccagtgggagagaaggaggtggctccacagctgatgctaaaaaagtccagaggctcttgcctgtgcagttattcctcaggccctctccactgccagcagtttcctcactcacccccccgggggcccagggccttccacagcacaagctcctccttggtgtagcatttggcatcaggtgcatcaacacatctgggttccgggtagaacctagtccacgactggcccagcccccgccacgccccaaggccacccctggctgctgggttgcctaccatgaatccaggatgattcatgtgtgagtgaagtgtcctcctgtccaggccaggggatggagagaaagtgagcaaaggccagcagctgagaatgggcatgggagggcaagaagggaaagggacatctgtagcctccccctctctccagaccaagggagagggagagccaggccctgaagggaaggagccactcatctgagctggccagctgtcct

SEQ ID NO: 14231 - DNA, 1821 bp, Artificial sequence
  DNA replication origin
ctttcccctcctccagccaaggcactaccatagggcctgataaccaggtcttcactactgggctgaggttcccctgggtgctgagggtggggcagtccccctacctttccagtctctaagggaaaaggcaaggatctcccccacagtttgggacctcccagcccccgggaagccttaggaactgccccgccaccccgctccccttttggtagcgcccgggtctctcagtcgctggccagccgcacctgcagcttcccccactggatccggcccacgcagcggggagcgttgcgccaggcctgcttagccccgaacaccagctcgctctccctaagctggtaggtgcctgtggctgccacctcggcttccacctcttgaagccgctgttcgtgggcctgggagccgctcctggggaggagaggggtgggaaggggacaagcaggaagttgtgtgggacagggaggccctcctccaggctttgtgcaagtgctgggggagggcgggaggggcccacgtggtgttaggatctgggaagggagggggtcatgggaaggtcgtcacggggtttctggggcctcagtgggacaagggaggctgtggcgtccgggaagctgtcacctcttaatggagctgtagtactggttgatgaagtcccgggcctgactcagcagctgctcaggggccggggggccgggggagggccggccctgtagtttccgtggaaataccagggagcccaggcagcgtcttggggtgcagggcccatcctgggtcgagggagtgcaaaggtcaggacaggccagggtgcaggggtgggatgggagttgggggcagggaggaggggtgcaggggtggaacagggggagagggaggaggggtgcagtggtgggatgggggagagggaagaagggtgcaggggtgggatgggtgagagggaggagaagtgcaggggtgggacggggagaaggaggaagggtacaggggtgggagaggggagagggaggaggggtgcagaggtgggatggggagaaggaggaggggtgcaggggtggggtaggggcagagggaggaggggtgcaggggtgggatggggagaaggaggaggggtgcagaggtggggtaggggcagagggaggaggggtgcaggggtgggatgggagcagagggaggaggggtgcagggatgggacggggagagggaggaagggtgcagggatgggacggggagagggaggaagggtgcagggatgggacaggggagagggaggaggggtttaggggtgggatgggggagagggaggaggggtgtaggggtgggacggggcagagggaggagggatgcaggggtgggacgggggagagggaggaggggtgcaggggtgggtcggggcagagggaggagggggtgcaggggtggaatggggcagagggaggaggggtgtaggggtgggacgctggagagggcgggagtgcagggtgggacggggagagggaggaggggtgcaggggtgggagagggaagaggggtgcaggggtgagatggggagagggaggaggaatgcaggcaggggacggggggagagggaggaagggtgcaggggtgggaggggggaaaggggtgcaggggtgggatgggggagagtttgagccagggttgggggtaaggctggaggctgagggtcacccaagtcccgtgcatgtccctcaactcctctggttcttcccagtcctctcctctttttggaaacaagggaccaattcaaagaagggttgagcttccctctccggccccatctgaggccaggccttacccaccctttcc

SEQ ID NO: 14232 - DNA, 1374 bp, Artificial sequence
  DNA replication origin
acacctgagccagccgaggcagcgggagaggagggtgaggagagagacggggggtcttgagtatcagctccagaggagctgctggtgaggaggcaggggccatggttcactccatggcgccctcctgaccattggcagccacactgatcccttcctgccctgctctctgacatatgtagcaccatccgggctgcttctcatctcctccctgggccaggtgtctccccatccctatggaagctgacttggtatccagtacagaggagggactcggcctctgccaaactgatgcttgggttaggcaccaacggatgtctaagaggccgcctaggagtgtgggcagcaaatcccccatgatccatggcattcaagaaaggacgggtgattctctttgagcacatggatggtgggaagggaaggctgcaccagaggcctcctaggaccctgctcatcctgacattctgagtggaggccccaggaggaggctgggaggtcccactcctgcctgagggaggaggaaacatgtgtcagtgacaggggcaggggagtggcagggaccaacctggggtcaagggagggacgcagctctgagtggggtccactatggcagctcagatggatcgaagttgagctaaagctttgaatgacttagagggtcaggcaagtgtcagataggattgtttttattttagttgaggttcctttgggattcactgggcacgtggctttatttcaaactctttggcggccagtgatggtgaaggaggccaaggccatgggaccaagtcccccatggggcagcttgcttctcttagtgctgtggtcacaggcgttccagtaactaaggccagccccgagtctgtgggctggggtgtgagggagggtgcgggccgaagcaggggaactggggtagcagtgggtgtgggtgaggggctgcactggactggcctggcgggagaagccttctctcttgggggagaagcagcagccagggcttttccaggaggctgctcctgctactgacagcaccgcccagggaagctccgctcagctgtcctcacccccgcagcaggtctagacttcctcacccccgcagcaggtctagacttcctcacccctgcagcaggtctagacttcctcacccctgcagcaggtctagacttcctcacccctgcagcaggtctagacttctttcccctcctccagccaaggcactaccatagggcctgataaccaggtcttcactactgggctgaggttcccctgggtgctgagggtggggcagtccccctacctttccagtctctaagggaaaaggcaaggatctcccccacagtttgggacctcccagcccccgggaagccttaggaactg

SEQ ID NO: 14233 - DNA, 2248 bp, Artificial sequence
  DNA replication origin
cccccagaactcttccttctgccccccgagctggtccttgaggtgcccctggagcaccccacgtgagcaccaaagggattgactgggtgggatggagggggccatccctgagcctctcaagaagggcctgcaagggggtgctgatcccacaccccaacacccccaggctggagtggtttgcagccctgggcctgcgctggtacgccctcccggcagtgtccaacatgctgctggaaattgggggcctggagttccccgcagcccccttcagtggctggtacatgagcactgagatcggcacgaggaacctgtgtgaccctcaccgctacaacatcctggaggtgaggtgcgggatggggctcgggcaccgaatgcacctgtccaaggcaggagtctggctctcactccatccccaaaatgccagccacggggacaatcagagcaggtccagggttgcctcctaaatgggaactgaggacaagctctagaaccactgaagcaaaggggtagggggtggcaggggtgtgtgtgggggtgtgagtgggtgagtgtgagagtgtgggtttctggggtgtgcagtgggtgagagtgtgggcttgtggggtgtgtagtgggtgtgagactgtgggtttgtaggggtgggtgagtgtgggtgtgtgggggtaggtgggtgtgggtttgtgggtgtgtataggcagtgactgtgagactgtgggtttgtgggggtaggtgactgtgggtttgtggggtgtgtaggggtgagtgtgtgtgggtttgtaggggtaggcgagtgtgggtttgtggggtgtgtaggggtgagtgtgtgtgagtttgtaggggtaggcgagtgtgggtttgtggggtgtgtaggggtgagtgtgtgtgagtttgtaggggtaggtgagtgtgggtttgtggggtgtgtagggggtgtgtgtgggcttgtaggggtaggcgagtgtgggtttgtggggtgtgtaggggcgagtgtgagagtgtaggtatgtgggtgtgagtgtggatgtgtgtaggcggtgagtgtgaaattgtgggtttgtgggggtgggtgggtgtgagtgtgtgggtttgtgggtgggtgtgggtgtgagtgggtgggtgaggggggcatggggatgggtgtgaacatgtagttgttctttcaggcataggacccatagctctagagctttcatcagattctcaaaggggaccttgactcggcaaaggttaagacccattttagagatgagaaattaaagcctggagctgaggagcgactggcccaaagtccctctctgctctgaggtgccttcgcaggcaaaaacctgaaccagccccctaggcagccaggcctcccaatggacaccactcacctcactccttccagccatgtacgggaaacagagatagtctccccaccccacccccgtgatcacctctgtccctaccgatgccacacacccttctgccccaggatgtggctgtctgcatggacctggatacccggaccacctcgtccctgtggaaagacaaggcagcagtggaaatcaacgtggccgtgctgcacagttaccaggtgcagaggcccagactggccaggaaggcaaagggtttgcatacgggggcagcaggggcgggggatggaggagaggcagccatttagaaactagggcaggatttggacaggcagaagaagttccgtagtcccagtgccatggcgcacactggcctgcggttcggggacagggcaggtactattccaggcgctgtcatctggtggcttactgtgtgccagggaccttgctgtttactgcatgcccagtcatgctgattctcagggcatattgggtattgcagtttgtgggacccgctggatcctggaaacaaataccaggatcaagggcacaccaggagtcgtagtttgaggaagccggggcctgctgagaatttctgtgggctatttggtttggggaccaggcatgcagatgctggagattagagctgcttgttgcatgttgaacctgcagcatgaccatgcatgatgtggtttggggtgagggtgacattgtggtttgaggggacacagggtgtgttagatatggggtaatcgagggcacatgtggtttggggtgaccggagtggtggaggaagaatgggcgaggtctgtgggtctggtttgagcctctccccctctctctcccttccagctagccaaagtcaccatcgtggaccaccacgccgccacggc

SEQ ID NO: 14234 - DNA, 837 bp, Artificial sequence
  DNA replication origin
ttcagccaggcacaggctgggcctcacaagtgggcgcacaaagggagggggtgcagggcagggcaggggaccccacccaggatgggcaggatggagggagaaggaagggacagagagaaggtcagacagaggcaagggctgaagctgaggccagcacagaagccacaggaagccagaggccagacagcctggggcggtgcctgcaccgcagaactggtcccgggccgggcaagcaagcacagggagaggtggatccctgggggctgtggctttttaagcctgggcttcctcaggggcagtgctgcctgtctggggatcatgtctgcagttgacaagggctcggtctccccagtgccacactgttcagggcagtgctgctgtcccggggcccaggctggagctcagcagatttgccttgattggaggaggagggcatcctaggaggagagggagtgggggctacctcagggacggggaggtcaggctgcagaaacacataggccctgattgggaagaagggaacggaaaataagacttaaagaatttaaacaaaaagagccattgcagcgggatgagaccacatcatcaggttttgggaataggactttagaggcgtaggatccattacagcatcaccgaaccagaagcaggaaggctgagctaagcagagcagcagcagtggagataggaaggaagggagggaggggccgaggaaggaaggaagagatataagacttcacacgcaccacaaaagaaagattaacgggacttggtgatatgaggctcagccaatcacgggtgagccctgcatttcaagcctgggactggcccagcagt

SEQ ID NO: 14235 - DNA, 878 bp, Artificial sequence
  DNA replication origin
agattgctaggggagcctcggagaggagcccagagggaggggacagccttttggtgggggtgcatttgagggtgtggggatggtccagcaacaaggccagcccggcagtgggcagcacagccagctctgagcctgcctgctgagctgtggaggaggtggccaccccctgggtcgggtcctgagctcctggaggcctggggccgggggtggggctgggcatggggctggtgtgccctgttgcttcccaggctgcccctcaccagggctgcccttctccagctgctctactgccacgggctcagtgggcgccggcgggtcctccacgcggctcagcagcgcctccacaaggccgggccggttgggcgggcagacacctatgtggtcccccggctggtactgcagcccctcctggcctccggtgtccaggcgcaccaggatggtggccctcctgggggtggggagaggggcacttatggggagtcagagaggggtgggggcgggagaatgtgggaggaggagggtccagggtcagggtgttcaggacaggggtgggggggcggtaaagccgtcgtcctcacgtggacttgctgctttgcaggttttccactgagcggattgtagcctggaacatcttccgcctgtgcacgtggatcagacctgggggcggggaggggcaaatgaggcagcctgagctagggagcagggcctggccccagagtgctttagtcccggggtgtgggggcctcagagaaccagccgggttagggtgagggcagggcccacctggcagcaactgcaggccctcggcctgggcgctcagccggtacctctggcgcttccagctccgtttggggctgaagatgtctcgggcggcggcc

SEQ ID NO: 14236 - DNA, 1577 bp, Artificial sequence
  DNA replication origin
cctggtgattcaaatccacccaggtggctaaactacaaataaaccgtacccatctactgaacataaactaaataccactattaaggatacttaaaataaacacacttagtgaacccattatgaactgaaagtgtctttcacccttcccacgttttctaaatcccctgagtcatctaagtattcttcaatccaaaatgaactatatttcctttggtgcaatctccagaaaccacagatccaaggagtttcagcaagtagagttgttttttgttttttgttttttttttaatttttttttgagatgggaagaacttgggtcctccttgctccacccaccctgcatggtgagaatggtggagcaggaaaggcaaaggggacctgatggagtgtctctcctgccagggctccctccttccggctgccacccgatcccagcttgccctgcatcctggtgggtccaggcactggcattgcccccttccggggattctggcaggagcggctgcatgacattgagagcaaaggtgaggctggggactaaaggactgcctgaagggagtcacacaatctagggacagaggggtggggctggaaggcaggaaataggaaagagagggcaggaaacaaagtccacaaagctgaaaagacgctcatgagaccaaggggagggcaggtaccaaaggcaagggctgggccctgagcttctggcttcctggtgcctggtacatagtaggtgttgactggattgaggacaaaggaaaatagaattttcaaagggattagggctaagactcaaagaagaactgcccaaggtggattcttgactgtgccagagctgaccgaggtctgtccaagacctaaggatgctacaaggtgttcatattgagcatggggtgcccagggtggtctgtcaatcaaaagaagagggctgtgactgggaggagagttataagtatgggagaatatgaagtgggagcggggaaggggactgcgatgtcacacaatgcaaagggcatggaattctgagtccgaagccgcgcattctagcgcagctccaccaggggccaccacctcacccgcgcttcccttccctctgtaaatcagggctgtgcagggtctctgtgaaagcattctacactctcttagagatgaaacagccaaagtaatggtggtttcagcccaaaacgctgggctgccaggctgggcgacggtggcctgtggggaggccccactagcactgtgccccggagaagagccttcccaagcgcggggttgcttgcagggctgcagcccactcccatgactttggtgttcggctgccgatgctcccaacttgaccatctctaccgcgacgaggtgcagaacgcccagcagcgcggggtgtttggccgagtcctcaccgccttctcccgggaacctgacaaccccaaggtgtgagaccctgagggcgcaatggtaacctgaagatagggagagaggggaggactcgcgctctccagcggggcacaccaaccacggccctcccgtggcctcccacgaccactcagccacccctgcacactctggcccacccttgt

SEQ ID NO: 14237 - DNA, 961 bp, Artificial sequence
  DNA replication origin
agcctggtggacactgggcatcatggaactgcccagctgatggcctttttcaccaggctccagtcctgcctctagccccagacaacagtggggaacccagaaggcccggaatctgttccccggagggtttcaggtgaccacagacacccagaaggagcctgaccgggcctcttgcactgactgagacgactcctcagggtcagtattgcctcctgtgaggggagggagaaaggacggcataggtagttggtttggagtccgacttgaagcgatgggagcagtggtgggaatttggggtgatgggaggtggtcatctctggaatctagacccctggactgcttgccaagagccgtctcctcccacaggtaccctggcttcggcagccacaggagattggagggtggagtagaaaaacacaaggagtcattgttagaggccccatagatgacaggcccaggtgctttagttgggcaggacctgggagtcagtgaggaactcgccccgagaacagagaaaaggtaggcaaggagaggagatgctgatggcatctggaaacaagtcttagagatggtctgcacccagagggaataaggggagacatccccaactggaatgtgtcctggagcagctgcctgggaagaagtcctcgagtttcctcaaggtgggggacagaggtcaaggatgaggccgagctaaatggaagggcgacagtgaggcaggtgggctttaaggctgtggattcgtcatgctggcggctgccagcagcactttcaggttccttggggcttgtaggggatggggacttgtcagtggaaagacgggagggatgatgtttttggacttcagtacgggtgtgatgtcccaggaagtgggtgtggctccccatcctgtatgaaataagcagtaaagcttgctcatggctgttgcacatctctgtgactcttgtttctggcaggcccc

SEQ ID NO: 14238 - DNA, 1339 bp, Artificial sequence
  DNA replication origin
cagggtacctgtgggaggagacggctcttggcaagcagtccaggggtctagattccagagatgaccacctcccatcaccccaaattcccaccactgctcccatcgcttcaagtcggactccaaaccaactacctatgccgtcctttctccctcccctcacaggaggcaatactgaccctgaggagtcgtctcagtcagtgcaagaggcccggtcaggctccttctgggtgtctgtggtcacctgaaaccctccggggaacagattccgggccttctgggttccccactgttgtctggggctagaggcaggactggagcctggtgaaaaaggccatcagctgggcagttccatgatgcccagtgtccaccaggctctgtcccctgcaggccccaccctcctcaccgtcacttgaccaggatggcttctcctcatcaggcgagggtggctgtgaggggctggagcagggcctggacaggatggaggctgcagcctcaccccacggctcctgctgctgctgctgctggtgaagctgcatggaaaggaggaggaatgagggctgcaccccaaggagggcagggccaagcacctgggctagaggcagagggcttttcagcctcctcctgccactctgctagacccttccgtagactccaccccacctcagtctccatgttgttcacctgccttctctccacatttctcctttgggcacccctctactcacctggtgcaggtagatgacatggagactcatctcggcagaagcaagttctgggagctgggccagcttctggcccccagtgcctcctggggacacagagctggaacataacatgaagcaggtcaaaagtcatgccctcctcccgccacaccccagaggactccccttctgaatcccccctcagcgccccagctccccactcctacaggatcagcccacccccctccacatgcccctgcatctcagcctccactcctcacctggggtcctgggcaattcgggaaatggaggcaaggaggctggctgtggccgcagctggacagggggctgtcgggctcagatctctcggaggcaggagagggtgcacgaagaggttggccaggaaggcctcaggctgggtgcaagaggagagggaaagccaaagagggagtcagaagagaggacagaaacggagtagggaggaagcagaggcctaaagaaggcaggagagcaggctgggggcgggggctggtgaggcaggttactacctaaggtgagcctagaggggaagggtttggagaggagttgtgggggtgaaggcagaaggggaggccaggcttgggactcaccaggggcga

SEQ ID NO: 14239 - DNA, 981 bp, Artificial sequence
  DNA replication origin
ctcagcgccccagctccccactcctacaggatcagcccacccccctccacatgcccctgcatctcagcctccactcctcacctggggtcctgggcaattcgggaaatggaggcaaggaggctggctgtggccgcagctggacagggggctgtcgggctcagatctctcggaggcaggagagggtgcacgaagaggttggccaggaaggcctcaggctgggtgcaagaggagagggaaagccaaagagggagtcagaagagaggacagaaacggagtagggaggaagcagaggcctaaagaaggcaggagagcaggctgggggcgggggctggtgaggcaggttactacctaaggtgagcctagaggggaagggtttggagaggagttgtgggggtgaaggcagaaggggaggccaggcttgggactcaccaggggcgaggtgcagttgctgagcacccccggggtggaggggccgcgagccgaggtggcaccccaggcagctgcatcttgttgtactcggccccagaggtgcccaagaaacttagagctgtgccctggggggcgccagagtggatgcgccagggagaaccgcatcaaagaaagctcagtcttgccgtcctccgcacgctgagacagcgaggcctcagtctgtcccgccgagagccactgtgagcaaggacagtctttcaggtgctaagaacactgagccttatgggaacaggtgggacaggaaacactgccccatcttccacgtgaaggaaacagaccacaatggggacttgttcaccatcacccaaaaatacagcagcagtgcagaacctgggcctgtcatctattcgtcacccctggactgattgccagctcggggatagggctgagcctcagtgctttgcccagggtgatcctgacagccttggtccaggcaccagtccttactcagccccacccaccggccaagcccattcctcacccccaggtggt

SEQ ID NO: 14240 - DNA, 1117 bp, Artificial sequence
  DNA replication origin
cccccgcgcccctgcgcacgctgctggcccgccagctcgttttcttcgcgggtgcactcttcgccgcgctgcttgtgctcaccgtctacgacgaggacgtgctagccgtggagcacgtgctcaccgccatgaccgcgctcggggtcaccgccaccgtcgccaggtgcgacggcagatgcccggggtggtggtgtgtgttggtttctctgatctggggccatgtgaggttccccccgaatccttacctctcccaccactggggccctctagccctacatcccaccgcgcgtcctcctaatcgcaggccccttccccccacggatcccgcctttcaggtctttcattccggaagagcagtgccagggtcgtgcgccgcagctcctgctgcagacagccctggcccacatgcactacctcccggaggagcccggccccggcggcagggaccgcgcctaccggcagatggcgcagctgctgcagtaccgagcggtgagggtgggcgcgacggcgggctgaggaggaagttgtggggtctgtctgcgcggagggtctgtctgcgcggagggtctgtctgggagagggcatgagacaaacggactataccaggagtctagggagtgactgggtggggaggcttcttgccctggcgagggtcgctggggactgcttggtcctgataacgcgcgtgggcccctcagcgacccctgctcagcctcaccgctgcttccccaggtctccctcctggaggagctcctgtccccgctcctcaccccgctgtttctgcttttctggttccgccctcgtgccctggagattatcgacttttttcatcacttcactgtggatgtggctggggttggggacatctgttcctttgcccttatggatgtgaagcgccacggacaccctcaggtcagagccgttccctggccctgggggtttgggctgggtgggagttcgcttgcctctcgggagcagacctgagttccagccctggctccattgcttgctacctgtgccgttgagcgggtcacttcccttcctgtgctctcgtgccctcgtctgtcagatggcaacaatggcaatgtgctctccagagcacagccaaggccaggct

SEQ ID NO: 14241 - DNA, 745 bp, Artificial sequence
  DNA replication origin
cctggcgctcaatgtcgacctgctgctcttccgcggtcccttctcgctcttccgcgggggctgggagctgccgcacgcctacaagcgcagcgaccagcggggcgccctagcagcgcgctgggggcgcacagtgctgctgctggccgccctgaacctggcgctgagcccgctggtgctggcctggcaggttctgcacgtcttctatagccacgtggagctgctgcggcgcgagcctggcgcgctgggggcgcgcggctggtcccgcctggcgcgcttgcagctgcgccacttcaacgagctgccgcacgagctgcgcgcgcgcctggcccgcgcctaccgccccgccgccgccttcctgcgcaccgctgcgccccccgcgcccctgcgcacgctgctggcccgccagctcgttttcttcgcgggtgcactcttcgccgcgctgcttgtgctcaccgtctacgacgaggacgtgctagccgtggagcacgtgctcaccgccatgaccgcgctcggggtcaccgccaccgtcgccaggtgcgacggcagatgcccggggtggtggtgtgtgttggtttctctgatctggggccatgtgaggttccccccgaatccttacctctcccaccactggggccctctagccctacatcccaccgcgcgtcctcctaatcgcaggccccttccccccacggatcccgcctttcaggtctttcattccggaagagcagtgccagggtcgtgcgcc

SEQ ID NO: 14242 - DNA, 927 bp, Artificial sequence
  DNA replication origin
ggtgcgcaggaaggcggcggcggggcggtaggcgcgggccaggcgcgcgcgcagctcgtgcggcagctcgttgaagtggcgcagctgcaagcgcgccaggcgggaccagccgcgcgcccccagcgcgccaggctcgcgccgcagcagctccacgtggctatagaagacgtgcagaacctgccaggccagcaccagcgggctcagcgccaggttcagggcggccagcagcagcactgtgcgcccccagcgcgctgctagggcgccccgctggtcgctgcgcttgtaggcgtgcggcagctcccagcccccgcggaagagcgagaagggaccgcggaagagcagcaggtcgacattgagcgccaggccgcggctgaggaaagccgcactgcctccccagggcagcgggcagcgggccggcagcaggcctttgttggccagcgccacctggtagttggtgtagcgcaggatgcggtggtggatgtccagctccgtcaggggccgcggctgcacgcacaggcccccgctccgctgcagtgccaagaggcgggactgcacctctgcccagggaaccgagctcagctcctcctgaaaggggcactgatgagagccagcgaccccccattcctctccacagtgatgctcaagctccacacccctaagtgtgcggcctgaaaacccgcaaactgagtttgcgatcacaaactcgccatgaccaagctacatcgtccccctctcccacctttctctttctgccctcccttaaccctgtcactaacaagggcgcgccctacttccttcatcctcttctaaactgccctgttcatcatccctgccattcatgtggccagtagtcatgcacttcctggggacgcctccaggtgctggacctggcttctcagctccttaagggcctgaggccccctcagt

SEQ ID NO: 14243 - DNA, 1577 bp, Artificial sequence
  DNA replication origin
taccttgagagctgctggtctagctagatccccctcctcatgatggtttttcctcactcccgaagtctggtctgcctctttctcaggcgcccacctttctcccccactgcccgcccaaccccatacaggatccgctccagcccgctgctggtcctcctcctggtcctggctgccggcttctggctggtccaactgcttcgctcagtctgcaacctcttcagctactgggacatccaggtgttttacagggaggccctgcacatccccccggtgagctgggtggctgtgtctgtgcagagggtgccgtgagagggtgggcagaggagaggggaagaagtgggactgtacaggtggaagggccaactggaaagagggcagaaagagcgaggtcttattgacacctgccctaggcccagaataatgtcaggagggggctaccaccacctagagagcatggcccttaccctaagggagtttagtttatttagatggctcatataagatgacatatagttacatgtttgtgctaaaaacattgattagagaaaagagaaagggcagttatctggcttttcagagctggaggaatttgggttgggcttcggaagggcaggacaggaggggaggggagcacattctaagccccagtgcaggaaggtggggaaaagccatgagcttttggaagctgcagtgaggagatggacccatcagcctaaaacagagccttcaaagccatcccccgcattgcaggaagccactgcattggcctgtcactgtccactgcttatgctctgccctttgtttcctcaccatcttgagtctgctcctccctcctctgtatctaagttctttctttgaggcacagcttgaaagtagccttctgcagcttgcttcccttgctcccctgggaggtccggagccctctgcacagcctttatgtgcagcaaggggagaggtcttagaaggcccctgagcagaggagagggaggaggccggggaagcagaggtggtgagagcggaagctggacctcggattggctctggcgggagactgctcacccgtctcgttctcctcctcccttctttcccctcctcccctgttccttccaggggaagggaagggaagacactgggatgtactggagaggccagcctgggggacttgactaacctggactgggaaagctgagtgaaactgggctgaagtgaggtttgcagccttcaaatgagatctgacagtgccccactgccagatgtggacatagcccaggtcctgggaaggcttctggtgacagagccgaagatggcctggagtcgggtggggctgggagtgtaaagcatgcccaggcagaaggtggggaggattctgttccagagttggtgggtgcactagaaatgggaaggagagattctcccacgaactgccagacattctggttttttgtttttttgtttgttttgtttcttttgagacagggtctgggtctttcacccaggctggagtgcagtgctgtgatattggctcactgcagcctctgctccccagtagctgcaaccacaggtgcacaccaccacgc

SEQ ID NO: 14244 - DNA, 776 bp, Artificial sequence
  DNA replication origin
tcagattagggagcacgagcagaaacggggcacgcgagggtgtccatgcagctgcggaaatgggaggaacgtctctgtggaatgtcaggtttggggctgaaaatgggagcctgtctccgtccgcctcccgcttcctgggacagtacaccctgcagtgaggggttctgatccggcggacacacacgcaggggtgcaccatgcagcagggcgaggacacatgcctcagtagaatggggtgggggccccggtggaagagcaggggggtcgtggggggagggatggggtggcagaggtgatgcacggttcgtggagacgggtcttcaccctttgatgatctgttacagcatatttactatctcattatttaccataacatatttatgtagaactgcttgtgtttagcttggaaagagataggaggggggaggcccgccttgagctgtctggtgatcagctctggtcatcccagaggctcagctgagcgggtggttttggaccaacgcaaagcaataagctataagggtggggtgtgtggggacaggggtcagcttgtcatccctggaagtggcaggcatggggaagggcagctcacacagcctgtcaaggatggtccttccatgcatggaatgtcacagcctgcagcggaagggaattcggacagggtgcaacacggaggaagctgaggacacaatgtggagtgacaaaacgcagtcacaaaaggacatagtctgactccacttagaggacgtccctagagttgtcaaatcataaggaca

SEQ ID NO: 14245 - DNA, 1135 bp, Artificial sequence
  DNA replication origin
agatggctcctccagccgtgttgatacactgtccagatgccagctgtcctcactgggtgctctcccacatctcttttgggtggcactttccttgtgtctctgatcctagtactttctgctcatttgggccttcttggggctgcgtccttactgacctgtcaccctgctgtcaccttgaggttctttttggctcccaggctgccacttgtgctgtcctctgtgggcttcgaatcccacctccctggagtcactggaccccagagcccatgtttgggtgctggatgttccccacagccacagagacccgggaggctgggaaggtggcttggaactgcaggcacagggcagggtgtgggtcatcctggcctgaggcactgccatggctggggaggggcatttggcaactcccttggagtgcaccaagccctgctggcggtgtcacaccaccctcagaggcagggcaagtgtgcacagtggctgagggacccagaggtgggatgagccagtgcagggggaacccagaggaggagtgtacacagtgtggggtggggggtcagaggcaggaggagggtgcacagtgcggggtgggggtcagagacaggactagggtgcacagtgcggggtggagggtcagagacaggactagggtgcacagtgtggggtggagggtcagagacaggactagggtgcacagtgcggggtggagggtcagagacaggactagggtgcacagtgtggggtggagggtcagaggcaggactagggtgcacagtgcaaggtggagggtcagaggcaggacgagcgtacacagtgcggggtagagggtcagaggcaggacgagggtgcacagtgcggggtggggggtcagaggcaggaggagggtgcacagtgcggggtgggggtcagaggcaggaggagggtgcacggtgtggggtggggggtcagaggcaggaggaggatgcacagtgcggggtgggggtcagaggcaggaggagggtgcacagtgctgagaggggcacttagaggatcttgatgggcgttcaggaaggaccctgtgcccctttgtgggccaccctcaagtgcacagcttcaggctcctgccctgcccctcccttcccaggtgaacggggcacta

SEQ ID NO: 14246 - DNA, 882 bp, Artificial sequence
  DNA replication origin
tggagggtcagaggcaggactagggtgcacagtgcaaggtggagggtcagaggcaggacgagcgtacacagtgcggggtagagggtcagaggcaggacgagggtgcacagtgcggggtggggggtcagaggcaggaggagggtgcacagtgcggggtgggggtcagaggcaggaggagggtgcacggtgtggggtggggggtcagaggcaggaggaggatgcacagtgcggggtgggggtcagaggcaggaggagggtgcacagtgctgagaggggcacttagaggatcttgatgggcgttcaggaaggaccctgtgcccctttgtgggccaccctcaagtgcacagcttcaggctcctgccctgcccctcccttcccaggtgaacggggcactaccctgtctgggggccagaagcagcgcctggccatcgcccgagcccttatcaagcagcccacggtgctgatactggatgaagctaccagcgcgctggatgcagagtccgagcgggttgtacaggaggccctggaccgggccagtgcaggccgcacggtgctggtaattgcccaccggctcagcactgtccgtggggcccactgcattgtcgtcatggccgatggccgtgtctgggaggttagttgtcctgggggcgtggatcagtgggttgaggatggcttcatcacggacagtggcacaatgctgcaatgagttatatgaagttgtggcctggccccagggccttgggggctatattctggaagcagcgtcccatatagagtcaggagttcctgcattcagccaagccctggcctctcaggccctcagtttcttcttctgtcccctgggatagtataattgcaccatcagctcccaggatcaaaagg

SEQ ID NO: 14247 - DNA, 1085 bp, Artificial sequence
  DNA replication origin
cccacatcccccggcgcaggctcaggctgcctggcccgaagacgtggcccagcccgtgcatcgagcagttgctggcgaacacgcggatgtccgaggctggccgccgggcctcctctgggcctgaggtgggcttcatggccagaacccaggagcggaaccagctacagaggcttggaagaagcgagagagagtcagtcagggggctaaggaggctaagataggattcaggaggccaggcaaggagaggagaagagagggtgggagacagccaaggttggaaggcagggaggcactagcctggcaggattggaggaggtgatctggccggtcaggtcccactgttccttcccgaggaacaggcggtggctccactgggctaggcactgggctggggactccgcagcagaccaggtgggacgtagctgaccgtggcaggcaggggctgcggagcggtgctgagccggcggtgctgagccggcgctgctgcagaggattgggtttcagcagtaggggggaaagggggccgacagagcagtctggggggtaggagaggtccctagggccccaggctgagccattagtgcagcatggaggggggcatggctgtccaagacgagaggcgccaggaggaaaccgcagtaatcctagggagagcttgagaaaagcccagaggtagattgggcctggagatgccttggggccccctaggctcccagttgcaacccctgtacactggccgcgagggtcagtcgctgacccctggcctagctcctctctccttttgcctctgcggccttccctctagcttcacccaggatctgttccttcacgaataccagagctggctcttggccaagctgggaaatggttggaaggctggcatcagcagatctcttctttctgtgcccctagcatctcagcctacactggatggccagggcactcttcatgtcccacttccagggcccgtctgtttcctaagtgtccctctctccctagggagtcaaagcctacctccccacactcaggcctctgaggatgttggcctctacaatggttatgggctcacctgccaccccaggtag

SEQ ID NO: 14248 - DNA, 790 bp, Artificial sequence
  DNA replication origin
cccacaaggttggccacggaagcgacagtccagcagcatgtcatccagggagtgcccagcacgggcatagagttgcgccatgtcaaaggtgggactgggcatgaagccgggcggtgcagggggccggcccagggcgcgcaggaaggcggcgtgctctgcgggatccaggcccagcagcgcagacccagcccagtgcaggtcgttgggcgttaggcgcgagcggcgcagtgggttgatgttgcacagggtgacagccgggaagatgagccggtggctttctcgctcatccagggcagtctggtggtggaactccctgtagtagcgcaccctctcagccacctggtagaggaaggtggccactgacaggaccacggccgctgcccacatcccccggcgcaggctcaggctgcctggcccgaagacgtggcccagcccgtgcatcgagcagttgctggcgaacacgcggatgtccgaggctggccgccgggcctcctctgggcctgaggtgggcttcatggccagaacccaggagcggaaccagctacagaggcttggaagaagcgagagagagtcagtcagggggctaaggaggctaagataggattcaggaggccaggcaaggagaggagaagagagggtgggagacagccaaggttggaaggcagggaggcactagcctggcaggattggaggaggtgatctggccggtcaggtcccactgttccttcccgaggaacaggcggtggctccactgggctaggcactgggctggggactccgcagcagacca

SEQ ID NO: 14249 - DNA, 1704 bp, Artificial sequence
  DNA replication origin
cctcccctcccctcccccgccccccgccgtctctgttttttaaaagtaaagattaaaaaataaaaggaaaggaaaaaaaaacagacccctgggaggaggcgtcagcatcccccggggccagaaagattaagcaaccagcacggagccccagagccagtgaggctgcggaggctgcctccgcccgggctgtgcgcactagggctacggcctggcctgccccgttccgccccgtcgggagcccccggctcggaggagcccgcccgccccgcgcagctcacgcgatgtaggcctcgctgcggttgagcttccgggccaggaagcgcgcggcggcgcggctcgggatccgcaccatggagagctccttggcgtagcgcgtgctggcgcacgggttggggcaggcgcacgagtccttgcgaagcatggcatctgcgggccaccgggccgcgtcagacgcccgcgggcggagcggggcggacgggaggtgggggaggctcgcccttacctatggccgggtgggcacagttcttgtactgctgggggctgcacactggcacgtcgcctgcgggtaccggggagatggctttagaagcagcctcagctccctgggccctgcccgccatgggacgaaaaccccagcccctcacctggcatgtacaccattcggcagccgcacttccgagccacgtagcgggtttcgcaggccaggcgacaccccataagggtatagggagggctggggctggggctgggggagcctaggggatcagagggctctggctcatagttggggttcagagatgctgaactgcaatcgccccagggcggtggcaggaagctcagctgtggggggacagggttaaggaggcttcccggagagcgtgagaggccagctggggagaggcccctagacaggtctgaggagctgagggtttagggtctgaggtggtgtgggcttgaagtagtaggtgtggaggcacacggaagggtacctgctgctgctggcaagaaacaaaggtctggtagcccggggacacccccaagcccagctgatcgatgatgggcggctcctcctggctgtggatctgcactcggatccccacctcaaacggggtctcctctgtcggggagggacctgtgaggcctgacctgtgtggtcaggtctcctgcccaaccagacaagacctctcactgcagcccctctccccaggactgggatgagccagcccagcccctttcacaggttctgggggaacaccctgacacctcctctcctcctctccttcccctagccttttgcactccatccgtgccctcccccagcctcatttgtgtgctccctaccattgtccctccacacaggtagatattcctcctgctgcacgtccagcatgatgtccagcccattgcccatgccacccctagtagtggtgagcagctctgccccatcagcgccagagttaaatgtgtagcactttcccatccgggtgaagatctggggcgggcagacagggtgatggccatctcccccaggcaggcacatggtcatgggacctctccccacctcatggtatgtttgcgtctcttctttgaatactgaagcccgcatctcaatgcccccagccccacgctccagtgggcacatgttgcaggacgctcttgggagcccatcaactcagctcctccaccccgccaatccccaccaaa

SEQ ID NO: 14250 - DNA, 1520 bp, Artificial sequence
  DNA replication origin
gcaggaagaggaagggagggctccgcctacccccacccccacccccaccgtctcaagcctggggcctttagctcttgtggggaggctgaggaggcagaacttgtttgtatggagacaggctgtgtgccgcacttggtcccaaatgtgggaaaggagtcaggatgtaaggcaggacacaggtgttcttgaaagtggagtcaccccgtcttctccctgcctcttcttgctgagctctgggcagagttttcttccagttatacctttattgctgactgtgattctgcacctcacacctaacccgggcttggaggatacctgtcctcccttctctctaagatgtcagtcggctaaactcactcacactgaggtgcaaatgactgataacctcttgctaccattctcccctagagattcatgggggttcaagggcccagctccacatttcagaagccacgtccagctggatgatggctggcagaagacttccaatgcctaagttgggctgaccttggcttggctagtctctgccctgtaagagaaacagctgaggctgatgcattaggactttatttggggtgaagacggaaaagctacgtgcaggctaggcatgtccaggatgtcagggcggggctccgaggacacagacagcaggtctagagctgtgtgacaaggtagcaggtgcggtgggaggcggagagagtcttggtgacggcacagggaggggtgggaggtcttcggaacagagcagagtgctggggtgggaacgggcacacccactgtcctgagcctgcccctgccctcccttgattttagggggccattatgtgttacctggggcccaggctgaggtggggaacttgggttcgatggctgcccagcccttcctgaagctgtgtgaggacgagagggtcagaggtggggagtggtcctcctcccagggaccagtcgaggtcactgcacaccctcctgcctgtttctcctcagctggggcgggatggtggtctaggcttcaggggtgggccctagcacccttggagcaggcaagggctccagaagaggggctgttaccagattggtgctggagtgcctttgggagtgctgtcggttccagaaatatcccaggaccttgtctcggaacacctggaggcaagcaggatgggaggtggccagtgcacaccttccccctcatcctaggggccctgattcccacctcccaccccctgcagtgggggccctggcccacctcacagaggtagtctaggatctcgaggatggtgagcaggctggccccgatgaacagccccatctggcccccaatgtcacctgtggagacagggtcacccttcaacttacagccacctgcctgcccacacccccccagccctgggggccctgcacacacaccaagcagctctgacatctcataggccttcttctgctccacggtctcatagttgagggcctcaaagaagatgtccagggccagcacgttctccctgaggacaagaatggcctcaaat

SEQ ID NO: 14251 - DNA, 1108 bp, Artificial sequence
  DNA replication origin
cctctcgtcctcacacagcttcaggaagggctgggcagccatcgaacccaagttccccacctcagcctgggccccaggtaacacataatggccccctaaaatcaagggagggcaggggcaggctcaggacagtgggtgtgcccgttcccaccccagcactctgctctgttccgaagacctcccacccctccctgtgccgtcaccaagactctctccgcctcccaccgcacctgctaccttgtcacacagctctagacctgctgtctgtgtcctcggagccccgccctgacatcctggacatgcctagcctgcacgtagcttttccgtcttcaccccaaataaagtcctaatgcatcagcctcagctgtttctcttacagggcagagactagccaagccaaggtcagcccaacttaggcattggaagtcttctgccagccatcatccagctggacgtggcttctgaaatgtggagctgggcccttgaacccccatgaatctctaggggagaatggtagcaagaggttatcagtcatttgcacctcagtgtgagtgagtttagccgactgacatcttagagagaagggaggacaggtatcctccaagcccgggttaggtgtgaggtgcagaatcacagtcagcaataaaggtataactggaagaaaactctgcccagagctcagcaagaagaggcagggagaagacggggtgactccactttcaagaacacctgtgtcctgccttacatcctgactcctttcccacatttgggaccaagtgcggcacacagcctgtctccatacaaacaagttctgcctcctcagcctccccacaagagctaaaggccccaggcttgagacggtgggggtgggggtgggggtaggcggagccctcccttcctcttcctgccagtaaggacacaccaggccccagccacaggcccaacttccctctctttcactggaccccaaacattgggaaactgacaaatagggagtgggagggggtgttcctgatggaaccatatctttggggctctcctgtgccagcctgcaggccttggtatgggggggatgatgagggaaaggacaagaggatccacctgagat

SEQ ID NO: 14252 - DNA, 889 bp, Artificial sequence
  DNA replication origin
ccaggtggtcacactgtggtaccgcccaccggatgtcctctttggggccaagctgtactccacgtccatcgacatgtggtcagccggctgcatctttgcaggtgatgtgctggggtgttgcagaggcaccttctttcccatttgagttgacaaatagggtctggagggtcccctctgggggaagggagggaggccctgggactggagctggaaggtcagggggtacctcagagtgaggggtccttcacatgtcacatcttagccccctgtctatcccccagagctggccaatgctgggcggcctctttttcccggcaatgatgtcgatgaccagttgaagaggatcttccgatatccttgctttcctctgccttgagccctctgggaggggagagtccatggagttttgagcacaatgggtgagggcagtgatggtgtggggtagggtgatggggtctgtagggcttctcctgagggcaaggggagagagcaggggtgctggacaccctgattgtcacagtgcaaatgcacactggagaaggtgtggcttggagacaggcagcgtgccctgaggggtgaagccgagagggtgtccctccaggtgagagatggatgccaggatgaaggagccaaagagaacaggacacattttgtgggagcagggcaaggactgtttcattaggactaggacagcagcatgtgggttaggtgattgtcatgggaaacgtggctggatatgcgagtgacctgcctggggctgcttctgtcaagctcaagccggagggtaaagggagggtgagaagtgggcggtgggtatgaggaatccctccccaggaggggaagaggccctcaccctgcccctgaagatgcagctgtggccctttcccaa

SEQ ID NO: 14253 - DNA, 1242 bp, Artificial sequence
  DNA replication origin
ccccaacaccactctcctcacctttacaatctcaggatcgaggtcaccattgcaactgtcaaaatacttcttcaggtcctgaaaagggatatgagtgggggaatgggacagagtttaacctcaatctgggcccctataccttcccaaggctactgtcctccaaaccccgcctttcacctggtcacagaattcaaaaaccaaagtcagcttcttgtcgctgtgcaggacgtcatgaagcctagggcaaaagaagggctcagccaggcaggtccgcctgacagacgtccagtgtcagcccccgcctcccccaagcggccacaccggcaaggagcacccgcctcccgcacacctgacgatgttcttgtgcttcagctccttgagtaggcagatctcccggagggcggaactcggcacaccctgcatatgtgagggggccggtgggcagcagtcagatcccacccagcccaggccctcaaacccctccccaggccgtatcccactccccagtcctacctcatcatcgtcatccagcctcacccgtttcagagccacgatctcatgagtctcccggtttttggccttgaacacagttccgtaggtgcctaggggaaggaggtcaggggtcagggtgaggatgcggcactcttccctaagccaggaaatgcctcctgagagaggtgaaggcagcgtctcagtatgcaagggaagggattcagggtgaaggtaggttggtgagctttgtgagtgaggatgtggcaggtggggagggaggagaaggtgcccaccgaggctccaggggctcggcaggaggggcgagtgcggttgccagggcaaggatgtctaaaatgaaggcggtgctccggaagggtctggaaatagtgaggaggggtctgggagaggactgaggggctgcagaaatattgaggttggaggtctgcagcaagaaacgaggctgggggtcggggtgaggttgtccaagtgctgctgaggctggggtgagaaatttcaggaagtgtcgcggttgggaggtcgggtctactgggaacgctaaggttggagtgagagccctgcgggaaatgctaacacggggaagactggtgtctgcacggagtgctgagctagggggccagggctgcagccgctgctgagatcggagcctgtaggcattgctgacggtaagggagccagggcttcaaggaatgccgaaggatctgcagaggagctcttgcaggaacatctcga

SEQ ID NO: 14254 - DNA, 1633 bp, Artificial sequence
  DNA replication origin
ttcaaggaatgccgaaggatctgcagaggagctcttgcaggaacatctcgagattccattaccttccccaatcttttccagtttctcgtatttctgcatcgcggcggccgcggggacccctgcgggccctcggttttaagactctggccccggcgttgcagaggaggcggcacctgagcctccagccccgccccgtctgcccgcgcagggccttctggggcttgtagtcctaaaacgactaggtctccccgcaatgcccgagaccgaggacaagaagactacaacccccagccgtctgcgctcacgctctctgcagcactcgactccagggctccgtttctaccgcggaggcaaaccttggacttcaagtcccaggaagcaacgcgtgtccgttttccgggcgccccgccgcggcgccgtggttcccagtgtgccccgctgttgttattccttttatgtgctcccagccctcttgaaaagggccgctccgggactacgcgttccagaatgcagcggaaatgggggcggagcgctctcggttaggggtttggggtttggcggcctagatcccgggcactggcggcccagcgctgacctggttggtggcattgtgttcccaacggcctcttgacgacctcagcacgggtttccacctctccccaagccacctagtgaccccagaattgactggggaatgcctgtgagcgatgatgacctcacagggaacagctgaccgcagggctgggagaacagctgtgccccttcgaggctggattttagtggagggacacacgccaaagaccccctctctgctgagccccgtttgttgtctcggagcccacccgactctagccgctgaactctgacatgctgaggaaaactgggtggagccctgggggtccccctcagaccccagtctccggaacagggcccactggagtcagccagggtgtggcaggcaggttggttaaccccctccacagacaagaccacagaccgatgctcaacttgcagcagcctctgcctcaccccttaaaggagctgattatagattcccttacgctgcctctctaattgtctcatgattgcattcttgagggctatggaccgagggaaaaggatcccaaacagcactcctcagcaccggaaccagagttgctgctaaacacgtgttaattaactcgtttctatctgaatgcttttgcatacacaagggaaaagaagcaaaaagtgtattccttatctggaagactttgtgatttcgttgggcaaaaaagaactacacacaaaggtcttgaatgataagtgatggctctgcctagggttcggttcagtgtggaggttccattcaagaggaaggaggccagcacagcgaatctctgtccctctctggaagtggagagcctctaacaagttaccctctcccagatcagctcagggtaccgggcggccagcctccagcccctgtcacccttctcacccactcgccacccgtccctcaggggctttcttggaggcacgggggttattgaggggggcaagagaatctcaaccccgatacgtttatgtttcgacttccccgaatttccttgtgcctgcgttttgctgcctgggatccctagcgtgagaaggg

SEQ ID NO: 14255 - DNA, 850 bp, Artificial sequence
  DNA replication origin
aggggctttcttggaggcacgggggttattgaggggggcaagagaatctcaaccccgatacgtttatgtttcgacttccccgaatttccttgtgcctgcgttttgctgcctgggatccctagcgtgagaagggctcctttacactcagaggtgccgtaatggagccaagggacggcatcctcggggctcccgagccccgagtggagaagcttggggcagagggacggcgggggcggcccctggtgccgggctgtgcctggaagcgcgcccccgccccggcccccgctcccgcctccccacccgcgaaggcgggaccgcgcacggtgcgccggggggcgcgcacgcagggggctggcctgcccgcggcgcgggggaaagttgagttgggagaagttgggagcggcgggggcgcgccccggggtgggcacggggcagtcgtcgggagcgcgcgagtgcgccggaggacggggagagaccccgagacccccggggcacgaagtccagagcgagcgggtaggcggagaggtggtggcgggggacggccagggccgcagagggaggaagggagggggaaggagaggggggaactcgggactcgagcggggagggagtggaagtggaggaaagggcggagactggggcgcggggaaccgcggtcttggggagaaggatggggaggcggatggagtgctggtcggaagcgggcattccggggtccccttctcagagttccctaaagccagggtgccgcgccccctgccaccaggagggggtagtctccccgaggcgccgccggccctcccactccccggctggctccagaccacccctcccctccggcccccccgca

SEQ ID NO: 14256 - DNA, 1375 bp, Artificial sequence
  DNA replication origin
agtcgtcgggagcgcgcgagtgcgccggaggacggggagagaccccgagacccccggggcacgaagtccagagcgagcgggtaggcggagaggtggtggcgggggacggccagggccgcagagggaggaagggagggggaaggagaggggggaactcgggactcgagcggggagggagtggaagtggaggaaagggcggagactggggcgcggggaaccgcggtcttggggagaaggatggggaggcggatggagtgctggtcggaagcgggcattccggggtccccttctcagagttccctaaagccagggtgccgcgccccctgccaccaggagggggtagtctccccgaggcgccgccggccctcccactccccggctggctccagaccacccctcccctccggcccccccgcatagtccttcagtcccgtccggggcgcccagactgggggttgcccggggcccccatccccaatctccgggttgagaggcgaagccaggaaaggcgggtggcgggtaaggtcggacaaggggtcagacagaagagggagcagctgggtgggaatgggaaagatgagcccggagagttggacctgactcccggggtcggtttgtccaggcgggaagttctgtgctgggtgtgagaggcggcactgcctgaaacccagggtctactttatcccccttcgtttcccccgccagccccacatggaagagctgcggaatttacgagttcacttggggggtggttaatgcccaagtgggggtccgaggtgctaatcccttggtcaaggggagagatactaatcctctgggccggtcggggctggtcccgggaatgtgcccctacccggattatcggcaccgatgctctggacagaagctgctttgtgttctgggacagcaggggagggggtgcagaggagtgtggaggagcgcgacgagggcacagcctgaggtgggagtgggcgcctgcaggtgctctgggcggactctccccacacccttcccagactgggtgcactcacgctcacccacaccacccgccctggctgaaggcctgctgagggggaggggaagagcgtggttagccaagttggagtgcttgccaagaatgtgttgccaggctccccatcctgggtgacccccccagacctatattgtttgacgctacactgacttgtcttactcctaagtcaggcacccccagtccccagcaacacactgggagcatgggttgttgggtaccgtcactttttgccagtcttgggtgccccctgtgctgacccgctaggaatgcgccccctatttgcagggattgggctccctcctgcagctccttctctgcccccaccacacagtgtcctcccca

SEQ ID NO: 14257 - DNA, 905 bp, Artificial sequence
  DNA replication origin
ccagtcgtggcaggcgagctccgcccagaaccctggcccgcgtgcagacttgacctgcgcctctaaggccagccgggtctgagacgggttgctgggtgagagacccagggttctcaaagttcctcaaccgctgaggctaagctacctaggtcttcaggtaacagcctcaactccctccccaggactggaagacgtctgatacccccactacccatccccccctacgaccatcatgcaaagtcagggtagggatggcagcatcctcccagtctccacactcacacacgctcacacccctggttggcgaggacccttggccggagcacccaaggctgcccagggagggaaggttgggctggcgacctgggggccacactcaccgtacagaaagaatctgcgcccttggcggggcgccgaggggcgctgctcatggccgaatcttagcccttttcgctgtcgctgcggctttcagggcaacgaggcggaggcataacctggatgggggagaggcctgatcaccatcgagagccctgggagggcaggagccaccacgcgcaggctgcgctgctggggatcctcctggagtatgaagggcctcagagtggcccttagcggcagccacagcacagaggagagttatttataggaagaaaagagaagaacaaggagacaggagaggactgaggcgaggggggccgaaaagggccgagaggctgagtagagggaggaggagagaggaggtgggaaaggccgcaagaaaaatgagggagaaaggagtcaaggcccaggcccggagagaaagcaacaaagatgagggagggagtgataatgagctggggaaagaggggagtgaaggcccaggcagacaacggagcctcgcagggtcagggcacccaccagaggtg

SEQ ID NO: 14258 - DNA, 1010 bp, Artificial sequence
  DNA replication origin
gcgcttaggggagccaggagatggacaggagccttcctcacagaggggagaagccagccccctggcccgctcaccttctcttatccggtgttctgccagtcccagctgctccagtccccacctcgcccctaagacccgcccttcaccccagccctccccgcgctcttccttgttctggctgctggcaccgctatggagggggctgcatacccccgcccttggagatcccgatgcccttcaggtccagaagctcttgagcaaatatttggcggcgcctggagctgagaccgtgggtgggtggggggctggaccaaggctgcctggccaggcggctgccgcttagctgggctgagctcttacaagcgccgcattccctgccggctgtgccggccggccgctgctccgcgcccgcaggatgactcaggtgggggctgtgggggtggggtgaggggtggggctagggacctggcccagggctcgggccgggggcctgggggctgggggagctctcctgggggctgaagggcatccattccggtccctgcggggctgggtttgtttgactcggacaggctctgggtcggttagcttgggcgccgccagaagttactttttgggctcagcagttgtcctcaggccaactggagtttcttcactatctgtcatgtgaacttcccggttcacacgccctccctccaggctgcagatgggctggacacacgggatttcttccacctgccctgaactgactacacagccaagggggctgggctgggatgagggtagctcagaacccaggggacagctgctggggggactgggtctctgcatctgagggggcagactgctggggggacactgggtcactgtgtttgaagggatgtctactggtagggtgactggcttcctgcatttgagggggcagactgcttgggaggactgggtccctatatttgtttcctttttttttgtttttgttttgagacggagtctcactctgtcacccaggc

SEQ ID NO: 14259 - DNA, 1122 bp, Artificial sequence
  DNA replication origin
ggctctcctcacccagcagccccccaaaggtgatggcaggagacagggcggcaaagtagatgaagatgactgcggccaggcactgagggtcaagtgcatctcggaagtcactcaggtagtggggatagcggcgccgcacatctcggatcagccccccaaagggccgccccgtccgccgaaggggatcatcttcagctgcccctgccgcctctaccatctgcaggagcgctgcaacccaggcctccgtcagggcgccccagcccctcttgcccacctcaccccctcgaggcagccctggccccagcccgccctggccgtacccttatcttgggcagatttgggctccagcccagcccctgtaggtagcagccggccctgctcctctcgcttcttgagcatctggcgctggaagtgggccacagagcgcagcagctcctcgccctgcacttctgaaggcggcagcaccacgctgcagtccaggaaggcgttgatggccgtcagcaggtcctcccgctcgtcagccaggtaggctgcctcgtggaattgctgccaaagcagcatggggatgggggagagcacaaagaagagggctgagggcctggagctgagggtgggcaaggccagtgggtgggaggcagtcatggggatcaagactggcctaggatgggctccaggaagcagggcccagaggaggagggtagctgaccttgtctgacatgagggtggagatggagcggccgatctcgtggtagtccatgttggcactactcgggcccagcagcaggaagaggaaacgcacaggcaccggcacctccaacactgcgtccaactccacagcctcccggagccgcacaaaggccatggtggggcgggagaggaactccacgcagcctaggggcgtgggaccatcgtgggcaagagcagagcagcaggaccgccttccagtccctcgcccagggtggcaccaaggcagggccagggagactacaggactctgcctcaaggcctggccaccaagccccctacatgtgacctgccccacatacccacaaggaccaccgtggcctcggcattctcaggaatcttctccagcagtttcagctcgtgcttggacttggagcg

SEQ ID NO: 14260 - DNA, 1340 bp, Artificial sequence
  DNA replication origin
aggtcggtgggaggctggtgaaggggagcggggaggggcagaggagttccccggaacccgtgcagattaaagtaactgtgaagttttcactcttgcagtgtgtctgagtgtgtgcgggctggcgggcggggagtcctcgccccttgggagagaagggcacggactgcgcctggggtctggccctccgccttcccttctccccagcgttctgctctggctttggcgccggcctccgtggccccgccctcggcgccgggcgcgcacttcccgcgggcggggctcgcggctccctggctcgcagtgcctgccgggagccacgtctccgaagaccgatagctgcttcgggattggcgtccgggcggctatctaggggctgctgggaagatggcggactcggtggctagccgatgaggaggccgcggggggaacccggcccccgggccccgagaccgactgagggagcgacctgcgcagggcccggggagtcatgtaggggtggcgcctgcggggagggctgcgggagggcagcgggagctggtgttagcggcagcggccacggtctcctggcgtccctgggccggggtgggtgttggggcccccgacttcgccgactccgcgccatcgcaaagcggtgcactcgggctccacgcgcgccctgcgaggtgggcgctgcgttttcatttcacgggtgaggagacttagagagacgaagccacttgtccaaggtcacgccgctggtgagtgggagcgcccagcatggaacccagcaccgtccagccgcggagcccgcgttccaccctctgtgccgccgccgcctcctgtgggagagggaggtggtcgggagagtgcacgccggtgccgcctgggctccagactgggcgcgaccactaacccggttaatgacctcgggcttaacttaaccccttcgctgctctgggcctgcgtttctccaccggtgaaatgaggtaatgccagccctgcctactcttcatgggcgtgtaaggagcatcagagatggtgcatgtggaattgctttgcaagtagtgctgcgctgagcgcactgaggattatgattgctgtttcaaaggcgtggaaggaggcagaggggcggggtggggaagaggcccagagcagtcacaaaggcttgctctgaccacaggccccctaaatgaggagtgaggtaagcagtaggtagcaggtctttctcccctttggagaaaacctcacccccttttttgggctgcccctcagggtctccatcacccaactccatgcttcgagtcctgctctctgctcagacctcccctgctcggctgtctggcctgctgctgatccctcca

SEQ ID NO: 14261 - DNA, 2244 bp, Artificial sequence
  DNA replication origin
actgcatcacgaacacgggtactctgacgtgctccagctgacgtcggtgtctggtgtgatagatgccctggctgttggcaggggagggggcggacgctgctgccgcccaaacctctagggggtagcacaacccccaaaaccgcccccgccagccccttcgcgatctgcaggcgcagagaaccgcgggtggagccccacacgtgggtccgcagggcggagggcggggacagcgcggcgccggactacaagttccacaatgccccgggccgcggcggcggggaaggaggggtgcttcaggtgcctgcgacctccgcgcctcccgcccggaagtgcccgaggggccgcgatggagctgggggagccgggcggtgagtccccgcgccgtgaccgcgcccaccccgccgcccagggccccggtcgggccgggatcgccgtgccctcctgcggcttcggggggcgggaaggtgggaggggtgatgagaggtgggggtggggaacgtgaagtctcggattccgggcgggatctggggtcaggcagcccggggggcttggagagacttccagaggaggcgcggagttagtcctccgcggagtggggttgaggggacctggagggggccgagctgggtgggtggtgacgctcggtggctccagattgcccaggggcggagtttgacgtttgctgtgggggaagcctgggaagcagtcctgtgccgcgggtggggtttaggtgaaccgtaacgcggggggcgggggtgggggcacagaggctctacccccacctcttagaaactttagcagcggagtagatgagcctggggtgaagtcggtgaaggagtagacacactggggtgaagtgggcaggagaatagatacgcttgggggtgaagtttggttggggtgaagtttaggagaggcgttgcttaggcccttaccttgggatagggtttgggtgagttgggagctggttgaagacctcgagctcagatgacagaaagttaggacttgggattcggcgatgggaaggggcacccggaggcaagtttggggcgactgggaggcagagaagccggtaccctggggtgggtgaggggacggaggctgaggacggtgggagcgtcgcggtggggtgagggcaggaccctgtggaggttccagggctcctggccagggggcccgggcctcacgggctctttgtgcctctccagctcggtagcgcggcgggcaaggcaggcgccatgaccctgattgaaggggtgggtgatgaggtgaccgtccttttctcggtgcttgcctgccttctggtgctggcccttgcctgggtctcaacgcacaccgctgagggcggggacccactgccccagccgtcagggaccccaacgccatcccagcccagcgcagccatggcagctaccgacagcatgagaggggaggccccaggggcagagacccccagcctgagacacagaggtcaagctgcacagccagagcccagcacggggttcacagcaacaccgccagccccggactccccgcaggagcccctcgtgctacggctgaaattcctcaatgattcagagcaggtggccagggcctggccccacgacaccattggctccttgaaaaggtaagtaggtcaagaggcaggagcaatgctaaagacaggggttgggagagtggtcgcagaaggcccccagagacacctaagacccagccctcctttatactggaggcgctgagcgccccagatcacaactgtacttgttcccctggcagacggcccctcccaggccagggccggtgtgttgtggagggcagggggagggtgggagtgctgttccggggccagggactaggattgcctgaggcctgctctcttacccaggtccctctctcctcaggacccagtttcccggccgggaacagcaggtgcgactcatctaccaagggcagctgctaggcgacgacacccagaccctgggcagccttcacctccctcccaactgcgttctccactgccacgtgtccacgagagtcggtcccccaaatcccccctgcccgccggggtccgagcccggcccctccgggctggaaatcggcagcctgctgctgcccctgctgctcctgctgttgctgctgctctggtactgccagatccagtaccggcccttctttcccctgaccgccactctgggcctggccggcttcaccctgctcctcagtctcctggcctttgccatgtac

SEQ ID NO: 14262 - DNA, 1903 bp, Artificial sequence
  DNA replication origin
ggtttttacaggccagtcttgatttaaaataatctatcctagtcttcccatggttcttgcctactgtgggagcaagtggcccaaatattgccttaggaatgtcagtctagattgataccatacagaactaacctacctctagttccatccctcctgttcattcatttattctactaacatattttttaaaagatgtactatggccaggcgcagtggctcacgcctgtaatcctggcactttgggagccaaggcaggcggatcactgagttcgagaccagcctggccaacatggtaaaaccctgtctctacaaaaaaaaatacaaaaattagctgggcgtggtggcgggcgcctgtaatcccagctactcgggaggctgaggcaggagaatcatttgaatgcgggaggtggaggttgcagtgagctgagatcgagtcactgcactccagcctgggtgacagagtgagactccgtctcaaaaaaaattacacacacacacacacacacacacacacacacacacacacacactatatcccaggcattgtgcaagatactgggaataaaatggtgaatcagaccctcttcctgccctcatgtggctccatatactagtagaagagctagacgtgtgaacagcccaacagtgctataacacgtgtgtgctagttgctggggcaacacatttgaggagctctttgctcttagtgtctctcttgggaggtatacctggtgctacttcctgctgtcaattctaattaagcacctaaaagagatgttggatgttacttttagaattatacaacatcagaactaggttttatgttcaaccactatatttcgcagatgaaacccagagagggcacaagatatccttaagcttatgcagggagatagaaacacaggttcctcaggagcttaggagaccctgtgtgttgattagcttgcaccaggtgctttggaaggtacaaggaactcgggaatagtgactgggttggttctggggctgagttgtgtgggtaatcaaacagtggacagcttcatgctgggaaaagatccagcttggccagggaagtggaagtgtgcgtaagaaggacgatgtgtgtcactgatgccctaggatatctgggggtagcagataccctgcaacatctctggcagatttattggctgcggcctctgcaaatgtcacctcttgtaggttttaggaaacgtgtgtgtgttggtgggggggagggggctaacagaactgcagcccactttggcaatgggactgcagaggaactgggacatttcagggagctccctggccctagagggagtgaaaggacaggatggacaaggggtgaggacaagaaaaattgagagccacgtgggctttggttggtctctccaatgggatgagtaggggagaaaggcatatactatttcatccctccctcttcttcctctatgtaccaatggggtcgggtagcatttagctaatctcccaagtccggcagggggagggtcttttaggagagcactgctgcagccggcagtggagagcctgggcagggagacagggagaaaactccggcagcagggtggtctctagggctgacctcggagcctggggacaggggagcctatgccgcactgaaggcgggacgctgtaagcgaggagcagctgggcctgggcggactcctcggccaatcagcctcggtcagcagcaccctcaggcgcagggcactgtttgggcattgcctagagatccgacaccccgcccagatcagcgcagggaggcgaaagcgacagccgggcgcgggaggagaccagggcagctgtcccctccgcgagggtggccctcgaggcaatgcgggtgggggctggtgaggaggcggaagggccgaggctgagtggg

SEQ ID NO: 14263 - DNA, 746 bp, Artificial sequence
  DNA replication origin
ccgcgctcccgctcgccgctgccgccgccgccgccgccgccgcctccgccgcgccgccccgggcccgcctcgggccccacggctccgaagccatgaacttccaggcgggcggggggcagagcccgcagcagcagcagagcctggcggctccggggggcggcggcgctgccgcgcagcagctcgtctgcggcgggcagttcggcggcgcggggcccggggccgggggcggcggcggcccctcgcagcagctggccggcgggcccccccagcagttcgcgctctccaactccgcggccatccgggccgagatccagcgcttcgagtccgtgcatcccaatatctacgccatctacgacctgatcgagcgcatcgaggatttggcgctgcagaaccagatccgggagcacgtcatctccatcgagggtgagcggagccgggggctgcgggagccggggcgcagtggcctctccggcgccggccgagggctccacaggccgtgcctggccatgctctccctgtcgggggtccttgcgcgcttgaggaccaggccacgaggtttgccgatctgtgttgcagaaccggcgggcagcttcgccatatctcgttcggggacactttggggttgggggttttctgctgactgtgttccagggcgcgaaggtggtgtcgcttgggggggccgggaccagatctgtccaggcctggccggggaaggtgggcgcggcagagggcttcagctgcgggga

SEQ ID NO: 14264 - DNA, 1378 bp, Artificial sequence
  DNA replication origin
aaccggcgggcagcttcgccatatctcgttcggggacactttggggttgggggttttctgctgactgtgttccagggcgcgaaggtggtgtcgcttgggggggccgggaccagatctgtccaggcctggccggggaaggtgggcgcggcagagggcttcagctgcggggaggtggggtcgtgaccggggaggcttcttagccgctgcccgggccctgctccgcagtggggcgggggatcggagcctcgcgttagtggatggcagccttcccgggcccagcgcccgcaggcccggagggtggcgctcgccgcggcgccctctcccgacgcacaccccctacgccgcggcggccaagcgggagcgggccgggcctggcgctgggctgaggctcagcgaccgcgtgggaggcgccggcaggtccatccgcgctttggccgggtcatgagcctgacggggatccgcggctcctcggtctggaggcagctgctgggcagccgggtgctgaccgaccgccagggacaccgcacccggagtcggggaccggaaacccccggccactgcgctgcctagcgcttttttctctgggcccttaggccctggactttcgaccgctgagggcacaggaagtggtggcacgctgctggcagatgcctcgcaagccctggtgtggtgggtgctggaggcacccgcaggcaccccggtggcatggtgaccttcgagcgggcacggacagatgggcctcaccctgggccatctgcttcctcccccagctctgtttgaaaggggacgcccaccggcaggtggtgggtttggcctcagtggaaatgcagtgagagccaaggccttttgcgataacatggagttatgggcaggggcctgtccctgacttgggccttaaggttagggccccactcccagcttcatctgcttgcctgaggttctgggggatagtgcacctgaacacctccctttctgctttcagaggtccccatagccggggaagaagtactgggtctggggggaccccatgtggtgctgggttctatcttttgttgtgacatgccagtctgacttccttctgccttttcccaacccgttcttatttctttcctctcaaggctgagttctctgtgaactaattaggtgacagaaaaaactcattaacgtggatctgagtaaatggcctgaatcaccgctgtggctggggactaggagatggcatttgtgcgagccctgggccccaaagacaggagatgaccaatttttcctcttagatctgaagagggtggaggcgggagagacatcgttgctgcagcttcactgtccttggaggaagtaaagacattcctgatttgctccaagcttaccttcccccagc

SEQ ID NO: 14265 - DNA, 1119 bp, Artificial sequence
  DNA replication origin
tgaggtgaaggtggctcagaggctctgcacatagtgagccctccagctctccctcccagctgaaggctgtacttcttccactccctaaggccaagtaatgggcaggttttctctttccttggcctctggtgggaaaggaacttttcaaaatggtctccctctcctcaaatcctgtcctgaaacacaggaaagccaaacatcccctgcttcctcctgtcctggacacggggtcagaagtgactgtgagtggcagagactacaggaggcccaagtgcccactgcacttcctcagagccagatggatcctgaccgcaggtcccacgtcaccttcagagctgggacaaacaaacccttcaccgaagtctaaacagagtgagggaggctttgttatacactcggaactgccgcccctttccaccgagaggcttagccccaggaaacacaggacccggctcccagctgacactgtgtttatgtaacagcctaggtctgttccgccctggggctgggggtggagggctgggtctcagtccagcctcagactgtgctcggaaacgcccagggagtctgcgcctctccctcctcgcagaaagaaggtggggacaccgcttcgcaggacagaagcaatatggtttggcagatggagaggagttctatcgcaggaaggatatagggcagaaactggagaaggagtggttttttttttcttttgaagactgcctacagcagaaaagtgggaacgcaagacgggtgaggtggataaagatgacggtgccaggagaggctgggcaggggggagggagggacagcagggcagcagggcagcagggcccaggagtgggaacagcagggctgagaacggatgtgtgagccgcggctgggtcggtctggtgacagtgagacaccggctcccgggatttcacgagggtgaggccgagcttccaggcctagtagacggaaccatggggtatttccaaaccgcaatggagaagtcggtcaggggagggctctaggaggggaaattctgcctgttgtgttaaatttaagatcaggcaaaaaaaactcaagggcgccccaggaatcagccttcacatcacaaaagatgctcaaccagaggct

SEQ ID NO: 14266 - DNA, 1867 bp, Artificial sequence
  DNA replication origin
caggccccggcggccgaggcgcgggcgcaggaggccgagcaaaaggccgcgggcgccggtgggcggcggctccgggccgcccgagcacacgctccgcggccgcgccggctgctcactggcggcgcagagggcggcctgcagggcggcggcagcgcggccggccgaggcgccgtgcaggtccagcgagtcgcagacgctgtgggcgcggcggcaagcggcgggccgctccccgggacagctgtccccctgcggccagccccgctccatgctcagggccggcgggcgcgggccaggcccatggcgaggggcacggggctgggcccgggccggggccgcggccggggcgcacggacctccggcctctgggcacctggtgtgggccgaccgagtccctcaactcctccacctcgcggccggcaagcccagacctggagaggccgggagtcagcccagcccggagagagaggcggcaagtctggcctggaacgcccgggaacggcggcgcggcgcgggggagccggcctgctggggcagcccctgggagccctcgaaaacaggaaattccagcccagggcgcctcctaggatccggcaggtaggtgaggagctgtcattacgagcaggccaactaaataacagtcctcagtccaccacacactgggccccattttggagaaaagcgggccatttctcattcttcaaaggaagagccagaagagccaagaacatgaggcccagaagtatgacaagcctgagtgagacgtcagaggcagccatgccgggtctgcgcgcgtgtcctcgtctgcagcacgcgagcttcaacgaggtggtcctgtcttagtttcggctctgacattctgaggtcgagagttgctggctgctacagtcggtttctgttgatgactgaggctgtcttctttggagattataaaatccagaagatactcatctgtctggactgagttaagcgtcctgcctaagggcagcagagaagtcaaagataacctccgctgcagttctgggtgagtgactcacttctgaggcccggacctctccaggcccctgctgctcactgggtctcacctcctgtcgggatgatgggctgagatcaagtggtagcctgcggtactggctccagcctgacgttctgtaaatgaaaacactcctccaagctccgaggcccttccaattcatgactgtgggctgcctggacacccagtaaacccagagctcacccagaattggaggcaagagctccccggctgtgattgacactgcattgtaaacatcagtcctctcccaggctctgaagcccagccagtttccggtcatccataaagtcagaaaccactggctgcctcaataccagccacggatcaggagaaaccagtttaagtagtggcaagggaccaggggcttgcatttcctttaaaaagacaatactgcccactttcctccacccccagtccagcccaactcccagcgtccctttcagctttagaattccatggacctggtcagagccaagtgggagatacaagtggcacattcctgaggggctgagtgggaatgcctaaggaaggcagggcctctccatcctaggtgctccctgcagaaaagagcgctggaaattcccaagtcctgggctggatctcccaggcctggagaggccctggtggtgagtttgtatttccgtgggactagttattagcgttggtgaagacggcttcttcctgtatgggatgcatgttccccccacaatggaagtaccagcagaggggcccttcccaggtccccaggcaggtacagagacaagaacacaactcagtgaagccggccaacgtcactgagctgcagatcaaaaggaa

SEQ ID NO: 14267 - DNA, 1881 bp, Artificial sequence
  DNA replication origin
aaactagggtagagcaagtaaaattagcacccgcaactggacctggcaaactcccatgcagggcaggtgaactcaagtagacccttctccctggacataccacctctcccagtcccaaccagcaagctcgagaaagggctccaggcacagcggtgggccctaaccctgggcaggagcatcacctggagctcaggggggcctccttcatctcggatcagcagcaggtaactctggccatccaccacaatctccttcttaaaccgcccccctaggacagagcgcgcagtcaggtccaaagtgtggagaaagaatccaggggccaagaagaaatctacagcttcccatgcgggagggaagaggactggaagggggctggagaccccccacccagaccctgtgggcaggagctggaggagtggccggcctcagggcccaggctgggcctgtgacgctcaccttcaggggactcctcctggacataggtccccgtcagatagcggtgcaccagggctgacttcccgctagacaggttccccactatgccctgcgggagaggaaggggtgagtgggtcagagggcagagggcacgagggagaagacccagcaggaaaagcaaagaagcagcaggagggagaaaggccagggctgaaggggaggagagagggcagagagggccaagctgagcagagaaggggacagaagccggagaagcaaggcccaggcccgcggcacccagcctcgcccccccagctccaggccgccggtgctgcccatgggccacactcaccactttaagctccggtacggagcggctcagcgtccactcctggctgttcacaaacgagtctgcggaagacagagccgccccgtcagggccagggtggcacacacacctgtcccaaccactgctgcctgtgtcacctatgatgccctccccaagcccaggccagaggacagcagcttcctccacgggacccccaaccctcacccctagttccccaggaggcagtgggaaggttcttcttgagtgaagcagagtaaggatggtcttcagaacaggactctgagggctgtgggctcagtccccctggtttcggccctgtgtccttcctcctcttcctgctccagcaggtttattgtccccccaccaagccacacctggcctagtgcccctgtggcccaaataccaggcccaggttagaggccactccagcaggtctcagaacagacccaagggctgggcacctggttggggggcagactcctgcaagtaagaacagcgcaccctggcagggtggggccacccaccacattcctgagccgggtgaagagggaggagcctggcctggcctggccctgttctgccaggggcaggtggatagggagccatctaccccacccgcctcctctctaagctcctccttagcagggaggccgcctcctgggctcccttcccttcagtctgtcctcagaacctgactggcaagtccctttacccagagccctccgacagccaggcccccatctccgtcacctccaggttccacatgggtgctcgggctagctctgggaacccctctctagctgggcagcactgcttccctccctggctcccagaggcactgtcccaagtttgtgtcaaagagcagttatgacgaccaggtccacagcagtccctaacctcatgcacaggggcaaccggaggcgagcgcgctgccccgacagggaactaggaaaggtgtctggcctagcccagagccctctgactctggtgagtctcctcttcctttcctgggccgcacccgagagctccccctccggcctgtcctcctcggccactgccgaagaccccagacgccaggcgcggacgacactcggtcc

SEQ ID NO: 14268 - DNA, 860 bp, Artificial sequence
  DNA replication origin
ctgtcttccgcagactcgtttgtgaacagccaggagtggacgctgagccgctccgtaccggagcttaaagtggtgagtgtggcccatgggcagcaccggcggcctggagctgggggggcgaggctgggtgccgcgggcctgggccttgcttctccggcttctgtccccttctctgctcagcttggccctctctgccctctctcctccccttcagccctggcctttctccctcctgctgcttctttgcttttcctgctgggtcttctccctcgtgccctctgccctctgacccactcaccccttcctctcccgcagggcatagtggggaacctgtctagcgggaagtcagccctggtgcaccgctatctgacggggacctatgtccaggaggagtcccctgaaggtgagcgtcacaggcccagcctgggccctgaggccggccactcctccagctcctgcccacagggtctgggtggggggtctccagcccccttccagtcctcttccctcccgcatgggaagctgtagatttcttcttggcccctggattctttctccacactttggacctgactgcgcgctctgtcctaggggggcggtttaagaaggagattgtggtggatggccagagttacctgctgctgatccgagatgaaggaggcccccctgagctccaggtgatgctcctgcccagggttagggcccaccgctgtgcctggagccctttctcgagcttgctggttgggactgggagaggtggtatgtccagggagaagggtctacttgagttcacctgccctgcatgggagtttgccaggtccagttgcgggtgctaattttacttgctctaccctagtttg

SEQ ID NO: 14269 - DNA, 1017 bp, Artificial sequence
  DNA replication origin
aaagagaaaaagacagagatcacagaatggagaagaaacagtagggcagctcctccaggactcgggaagcatgcacggcacaaccaggtggtctgcaccgcaactgccctcactagagcgtgtggcctacccggctgcctcccttgaaccctaacctgtacaagaggtgcttggaccactgcccctccacaacctgcccctcgggacagggaccactgcagaagtgagctgcgcaagccccactccgtcggtgtcgggcggggctgctcagagacagtaagaaggacacagccctcctcctcctttttcccacatgggaacgctgccgccttctcacagccctgaagggaagggtctctgaaatgcaaccaggctgtcactggaataccagctgcagccagggcaggccttggagagatgacggtcattggcagaggtaaagtgcagtggctgctgccttgaccatgccacctgtggatggcccaggactttcagcagagggcatcggggtagggaatgcaggctgtggaatggtggagagcagagagaagtggggattgcagcgggaaggggcaggcaccgtggggcagggatgaggccaaggctacggtgccggctaaatggaattccaaccaatgtttccaagcaacatgcaaggctgggaggccagaggaaggtggacaggtgtgagcaggaggccagcagaagtggcaggacgcacagaggcaagacagacatggtggggacaggaagggcagggcggggcacaggccgaacctggttgatgtgcacggccgggatggaggcggcggacacggccgagtggctgggcgagttgggcagtgacttgcagggcccgatggccagttgctgcttctttcgcaaggccactaccttctgggccactgcaggggacagcagagtcaattatacccactggagagaagggaaaagcctggcttagcacctccccccagacacacagccttgctctcactgggagccttcctatcgcca

SEQ ID NO: 14270 - DNA, 888 bp, Artificial sequence
  DNA replication origin
cagcaaaggcagctgggcgggggaggagggcagtcacgtaccgtgaagatgttggagcgccgcttggactgctttcggatgggtgtgggggtggaggaggcagcgatggtctcgatgcgcagctcccgctggctgatgctgggggtggaggggactgaggacgagtagtcgctgaaggcgctgccgccgccattcgtggcctaaggacaaagagggctgctgagggcagctccgggtcaggggcgggacgggcaccaggcgggtgccgggaatccctgtgctaatgggggcctggccggggctcatgggcagcagaggggccactagcccctacagatgatatggggggaacattcacctggcctggaggccagcaggatctactgtcaccttgccagggctgccccactagggcagcaaaccctcgtcctggggccccggcaggagtgcttctggccaaccagggagctaagtcagaggcacaggctggtaggtgggaatcagctgcagggcctggcagtgaacagactggagtcctgacctgcaggtggtctggaaggaggtagagggtcaccccggacaaactctcacattcaggtatgtatgtttagagtgcaggaggccaggaggcgggagccggaggtggcccagggcactgcagcatgtttctagcatgcccatggcagggaaagggattccgggacagctggggcagagagaacagagctatgactcccaatcagagtaaggtgtggatgtggaacagagaagggaaagaaagagaaaaagacagagatcacagaatggagaagaaacagtagggcagctcctccaggactcgggaagcatgcacggcacaaccaggtggtctgcaccgcaactgccctc

SEQ ID NO: 14271 - DNA, 1578 bp, Artificial sequence
  DNA replication origin
cctagccttccctgggggtggggttagttacaaaggttcccgtgggtctctggagtggggagctcggcggccgcttctcatctgagagcagtcccagggcccggcccgcctccggccccgcacagggggcatgtccagaggtgctgtgtgtcaccaactggtcttctaatttggaaggagttggaaaggcctttttgttgatgaaaagttggaaacagtggcacatatctgcaaatatcgaaagaataaagattttggcaagttatactcaagccccgcacaagtcggtcagcaccggtgagggcagagacccaggcgcctggggagcggcggcagcgggatgaagaggaggaggaggaggaggagaaggacgaggaagaggagaaggacaaggaggaggaggagaaggaggaggaccaggaggaggaggaggcggcggcggcggcgggcggcagcggcacctgctgggcagacacaggccaagcgtccacctcagcacggaatggtatgttcgccactcggcagcccaggccccatccctcccgttctcccaggctgccaggagccaagggcacagcgaggggacacagggccacaactgcagcgtgggagaaagcaaggccagagggaacaaggagaaccgggcaaaagagccgccggagagcaaagtgccacccagcagctccacaggcggcaccgccccatcccctcctgggctccacggcccagaccgccacagccctctgcccctttggcccagggaggaggaaggtggatgggactgctgccaccgggtccccagacagaagagccggtttggggggagtggggtgcagcccaccccagccagattgtgagccaagaggccccgaccaccagaggacccctgggagcccagaggggcacctccccatgcggacaggaactggggcaagagcagcaacgaaatgagcacatgaagtcacaggagagactggggacagcacaaccatgtccagtagggggtcactagccacagagcaggcaggacacaggggctcgccctcgagcaagcatgtcgctgctggggaggacgatgagggagaagaggggaggccccaacagcaatgatgagaggggaggtcccgagatacacccacagagacggacgcgtcttgaggccgtctcagggacaatggtgcaagtgaggtcaccacagaaacaatggaaggaaaatataaggtcgccgctgtgaggatggagagaatggaagcgccagagggaaggccgtgccgtgagcagccaggagggagggcagcagagtcgaggcaggcagcagagagcacaggatggcaggaagcacggggcgcaagggaggaggccggggactgggcgtgggcggaggagagggtagcagggcagggaaaggcagggggtgccctggggttgctacagagcttgccaacgaggggaaggggagattaagaatggaactgaggcagcggatgactgaggcacgatgccagggagcagggtgcccaggccctggcagtaggcaccgtggacagaggcacctaagggtcccgcagcagcagcagc

SEQ ID NO: 14272 - DNA, 3184 bp, Artificial sequence
  DNA replication origin
tgaccgacttgtgcggggcttgagtataacttgccaaaatctttattctttcgatatttgcagatatgtgccactgtttccaacttttcatcaacaaaaaggcctttccaactccttccaaattagaagaccagttggtgacacacagcacctctggacatgccccctgtgcggggccggaggcgggccgggccctgggactgctctcagatgagaagcggccgccgagctccccactccagagacccacgggaacctttgtaactaaccccacccccagggaaggctaggagcgccggagcccgcgctgggggctgccggggaccaggcccggccggacgctgcaggctcgctgcatggagaagaaggcagctcggccccacgcccggcgctggccagcgcgacgaggcccagaggggcgggggagtccaagcccgcccggcccggctgctcctggggggcgctttcctgcccctcccctcctctgctccttcctgcatggacctctgccgttcctgctcctgctccggaagccgccgccgccgccgcgcttgccttgccccctctttttggcctccccctatttcctaggatccgcattcgggtggactctgccccaggagcttgacagggtgcagggcctcttctggcctctctcctctctctgtccatccactgtgccccttgggccacgccgacgcgctcggtgccacgtgccgtgtggtgtctgtgccgcagacgggccatctgcccgctcacttgtggactttgcgctcccggttgtcgcgccctgtgctcccgaccagcagccccaccgtccacctcctcgcccccgcttctcttacgcccccgccccgggcgtgctcctcgcgccctcggcctctctgtccttgctcttttgtaaggggcgggcccggctcagtgacctgtgctgctctgtatggtgccgtgtgtaagaataaacccgttggaatactcgtggtctcagttccttcccgtcccgccgccccggcccgacccactgctagggctgcccaggaggagggaggcaggagggaggccgggaagtccaggtgggcagctctcggcagaccctgggcctctttaacacgcctcttgttttctcttccagtctcggaagggtgctgacctggaccgggagaagaaggctgccgagtgcaaggtggacagcatcgggagcggccgcgccatccccatcaagcaggtcagcgcctcccttcccgtgtgctccagggctcagaatgaggcccaggaatgtggcgcttcccagggcctcttctcaggcctctgtgatgggggagatggcatcagaggccagcaccaccctcctaggcggagtccttaacaagggactggctctccagtgagaagccaccttctctgcgccgccaccttcaggccacgagctctgcctgtaccttctgatcaccaccggagggcagcagagagctacctgccgtgttcagccaggcgctcagcctgtcccgctggttctggagttgggtctggagagggttgagtggctctctaaggaaaatgagcaacccgagaagcctgcgtggaaggggatactgagggctagtccagcgctaggtctgttggcatggttttgttaataagggcctctgttcgtctttaaagaaaaaagtagactacctcctcacctctcccacctcctttctagtcagtcctgggggccctgggcctgccttcttccacacctccggtcttggattcctgcagtggacacggcattgccccacggagggcgtctctttgatgtgttgagccagagcagctggggtggatggggaggcatgtctttggtgtgtgggcaagagcctgaggagctggggtgcccataagaacgggggcacttggcacagaattttttgggatctggtggttggagaggccatgtacataggcagccgtactgccaggttttgaccacagaggaggctcacgtggccagagcccctgagcctggcgtggcaaggcctgtggtcaggtgtggctctcctgggctgggactcatgggcagtgtgactgcttgtggggaggggccagtcggtgtgaccaggattcattcgttaaggctaggggtttctgacccccagccaaagtccatttagaatgaagagttccaagcagagtagtgtcccagagggcagggtcccacagggtcccatgccgtgatccgtattgtttccactcacccctctcttgaaatgttcgttgcatttatgtctggcagtgaccaccccagttgggccagactactggagggccccctggaaagccaagagcacagtgacagcagccagaggcttccctgttcgttcgcggagtgcgtgtgtatgtgtgtctttgtgcaggacagaccctgcacaaacctgttgctcatttgatcccctctctccgggcacctcctttgtgggggaccctgctaggtgacgccctctgctttgggcgtaggctcctcagctccctgcttggagatggggagtgcaagggaaggcgtgggcggtgagtgggtgtgtagacacacttcaccgaattcactacgaaaatgggaccactttccttggggtcctacgtgctccctttcctcactggtcgtcaggggctgacttatttgttccctgaatccctcacatgggaaggaaggagacatgttgggttggggaggaagccctgtgaacttgaacctggggttctggtccagtcttagagttagtaggtcacttgggtgttttcacccctaaatctcagggacgctcagtaggaaggccctctagctgcacagcccagagtggtgccgccagctgggggcaggtgtcagaggcctgtgcctgatgcagtgacaccctttagggggtgcccgctgcttcccgttctgtaacgatcgctcgctaggggcggggcgcgtccgttctcttcttccagcctggtggccattcctggcgcttccccgctgccgccggtccagccccgccagatctgcagcccctccttgctccgccctcctgtcccgttctcccggttctattccttcccctccccccagctcctgctgggagtggagattgcatttcagttgccatttgcattcccaatcaatccggactccgcaattaagtcggctggcggagctgggagg

SEQ ID NO: 14273 - DNA, 1465 bp, Artificial sequence
  DNA replication origin
tgggggctgtcgcctccgcgcctctgcgccgttcccattccgccccagattgcttcctgctccgccgtgcgcagccggccggccggggagggagcaggaacccctgtagcttctttggagagggagtgggaagaggcacgggctaggcgggtttcctcctgtccgcttcccgggagcgggcgggtgggtggggtggggcggggctgagcggcccggtcgttccgcccgcgcccccggctaacgagcgtcattacagcggctccctcgcctccgcctggggagggcgttgccgaggacgggggcgttcagggtggaggagggaccccctccccgatcacattctctgcgaggagggaggagccacacgtgtctgggtcggaaaggaggtgcggagaccccttcccgccctgactgtcggagaaaccgcgcgcagtgcaggccttgaggggctccaccttccaggccgctggagatgggagcagagcggagcagagcagagcggagcggggcggggcggggccggccgtggagtctcctgctgaaggctgggagaggctgggagaggctgggagaggctgggagaggctgggagagggaagcacgcctagtggggtgaggggagtcgggacgggggcggggagccgggtccatccctcacacttggttatttctttggtttgtgtgctgggggcggggcggggggtattggggatgactccaaggcatctccagagcctgagggacttagagccttcgagcacgctagtcccatggctggtcgcagcgggagggggaacagctgactgcttctgagctctcagtgcacctggcccctggccagtgacaggaataccacacccagaggcaggtcaccaaggcccagcctacctggaagactccttcgcagaccaagaggcagggcccgcttgccttgtggaaggtccccttagtgccgctagttttcagaaaccccttttgaggatagggtctcccaggccaagggggccaggtagcaggatgtgtctgcacatggccatgtacttcaactcccagcccgcatgctcgcacctccagcaatggcatttggccctggtgtggccggaggaggagcagcaagaatgtgaaacgtgctggaaagtcagcaattgatgtcacagctgctggggccgctggaagtgggtgccctttctggcctccccctcacctcctgttggggagggagaggtccaggaaacgggaatctcttatcctaatggcatccatctaggagttagccttctattaggaagaacttagaggaggaaggtgcagttgaatccagtatttaccccccacccttgggcgtcaggaccacgagctgcagactagggactgccgtttccttgtgcctgcatctcttagtccctgtgttgttggctgtcttctggcggggccctccattcctaaaggagatgccatcgcgggg

SEQ ID NO: 14274 - DNA, 1176 bp, Artificial sequence
  DNA replication origin
cggggcgcacggaggcgcccagagaggagcgccccggggcggccgcagctccgaacaagatgcagcgggccggaggcggtagcgcccctgggggcaacggcgggggcggcggcgggggcccgggcactgccttctccatcgactccctaatcgggccgccgccgccgcgctccggccacttgctgtacaccggctaccccatgttcatgccctaccggccgctcgtgctgccgcaggcgctggcccctgcgccgctgcccgctggcctcccgcccctcgccccgctagcctctttcgccggccgccttaccaacaccttctgcgcggggctgggtcaggctgtgccctcgatggtggcgctgaccaccgcgctgcccagcttcgcggagccgcccgacgctttctacgggccccaggagctcgccgccgccgctgccgccgccgccgccactgccgcccgaaacaaccccgagccaggcggccgacgcccagagggtgggctggaagctgatgagctgctgccggcccgggagaaagtggcagagcccccaccacctccgcctccgcacttctcagagacttttccaagtctgcccggtaagtgctagggccgaccagggctggcgggaggccggttcacctggaaattccagacaggaacctgctcggaacctcggcacctcggcacctgcctggagccttgaagtcccagacctttagatcgcgcgcaggttctgactccaattcagttccaaatacagcctctttagattccagaacccccgccctgctctgtccccatagccctgaaggctaaccgaagactttgcagtgctcccttcacattagtgcctttccctcagcatcctagccatcaagacttggccctgtctccttttcagaattccttcatttttttcctcctctgtcaggggtagacaagctacaaggatgggatttccgggggcaccaagatgggggtatgttgaagcagctgtcaattcagcaatggagggcacgttctggcttctaaggagatcatactgaccctaaaggctcaaaggataggaataggctctgtggatgcaggggcaaaaagagtgtgtgtgtgtgtgtgtgttggggggggggggttgcgtctcaaagccgtgacttctgaattggcagattcagagc

SEQ ID NO: 14275 - DNA, 1898 bp, Artificial sequence
  DNA replication origin
cggaccagagcccgaagccgggttaggcgttgagaggcggctgaggagaagcggagaggaagtgagggggcccggattcccaccctggcctcacggaccttgggctgaccggtctgtctggcttcaggtactagggcgcggctctgggacgcgggtgcgggtgggcaagcggtggaggctcctcgctgtggaaaccccaggcggaccccgaccgcacaggccccacctcgcgggcaggaagcggctgccccaagacatgggcgggaacctggtgcgcgaggcccactcctgtcgagggcctgcggggcgccccgtggagaccgcggctcgggtgggggtcccgggggacgccctagtgctcgatggtttgttccgcagccgttccagggcctgctgcgttcaggcaccgccgcacgggggcaaggactgccctccaggcccccaccagggtccgcttgcgcggggtagccggagcgcggcgcacaggaggaagcggcaggtgctgccgagcccggggagagacgtgcgggatggggggttggcagtcggtgacagggaaacctgctctctgaggaggtgacatttagcctgagacctgagtagagcagatcagtaggagtggcaggacggaccgtcctggctgcgggcgtgggtcggggggcacctgcggcggtggtccaggccagaggtggtcgcggcgggcgagattcgggatccctgggaagaactggggggccgccgctgggggggatgtagggggctgcagaatagcgctgtctagggcgactcgcaggtttttggcttggacccctggacggtggtgccagatgctaagatggggaagacgaggaagtaacgggaagcagaaggccgttgctggggagatggcactggagccgcctaggaagcatctcagaggctgtggcccttggcacggggatctggggccaggtcgagcgcaggtctgggtatcatgcgagtgcgggctcgctggtgcgggaaagagtttggagctctgctcccagggaatcccgactcccgcagatgacttgcccgagagagtcctgctggtggattttgatggaaattctatttgatcgcacccacttggttcactgtgtgcttccgggtccccaggttttaggtgcttcatgccctgctgggaacgagacacgctcctgccctcagtgaatcttcagtctagtctgagaaacaagggtgtgaacaaccagttagaatacaaggggcaataggatgaatgcaagataaacgtgggagcaggagctgggggcatgaagaggagggtgaggaatggggttgagatctgggagggcgtcccagaagaaggaccctcctctaaagtgataggaagatgggggaggatttctggccacatctggagagcctgcgatcatgggatgcctttttaaggacggggaagggaagaaaggcgatgtggagtggtggctgtgaaggggctgtgcacaacttcacatattgtccccttagcgggcaatgtcaggagggtcctcactggggttagacattcagactcttgcgagccagggcgctccctccccagcctcctggctgttggtcccgcgggcccagaacctctccctggtaattgcttttcgtaatgtgtttgctccaaaccaatttcacgcctccgtgaggactccgccctgcactgaggcgcggacctccccaccaccaacctacccgcgtgtgaacgcgcgggctcatacatactgtacacatttaacacaacagaaatacagggttcgggtaccggggcacactaaacatacttaaccctacactcacgcacactagacgttaagacactcacgtacaaccccccgtccccaaacagtgcattcacagttaagcatcta

SEQ ID NO: 14276 - DNA, 1317 bp, Artificial sequence
  DNA replication origin
gaggcagcccaggtcgctgcagcatttgagccgctgtgcgctccgctcccacctggagggcagcctgccccaagcgctgccccgcctccccctgccaccgcgcctgctccgctacctgcagctggattttgagggcgtgctctactaggtgagccccgggatctgtgagcagtcacagctgcttggggtccagggatgtgtggaaggcaagagaagggttggggagggccctagccagaaccggcccgtccccgaaccaccagaagcctctgaatccaaacctctccttccagatgtccatggccttttgagagggcctgaaagcagatgccccagcctgcagagggcgcgcctctgcactaactcaggccaggtagccctggcagcaggaggcccagctccgcaggcaggtgtggatgctgcaattcccaatgcagagaagcggaccgacagcggcagccgggtgatgtctgatgaagacacactcctactggggctctcctgaggcccccttctagcctgtgcaaaccctgtatgtgcattaaaaatctccaggtctgtgtttggtgctgtctccaacagaccttcctctgaactggctcccttgcaggggagtcgggatgggcggactgacaggggctccctgcctgccccacggttccagctgaatcaccttcccctttggcatcagccggctgctaaggggtcccaggcttgccagctccatgaaatgacagaatgaccgccaggtgagaacgcgtttgaaaaggcctaaaggaggtgcagggtgcacatggaggcagtgcagagagttgggcaggaaggcacaggaacccttggggtaggaaggtgaggaggcaggagagccacccggaaggaggggcatgtggggtggccgatcgcagagggtaaccatggctcaggtgacagcgaaaggcccaggtttagaaaaacagaaccagttctgcctattgcctgacacggtaggtcagggagcaccagaagcatgcctggttcctgcctcttttatctgctccttccttaaatttagctctggccgcaagagcgctgagttgaaagttccatgacacaggttctggtcttaactctgccattaacttgtggaacgtaagtctcttccctctctgggatcacgtttctgcatctgtaaaaagagagggaggagagtccctgagggtcattgcagtatcaggattttcagaacctgccagaggccccagcagtcgggagctgcctgcaaccacaggcgaagggcaggtggtcgggacagagcagccaatcaagtgcaccgtgatc

SEQ ID NO: 14277 - DNA, 1557 bp, Artificial sequence
  DNA replication origin
ccctgggggaagggctttgccccaggcagatcctttggaggcctggctgccagaaggagctgaggagggggctgggctggggactggagggattggagggaagggagccttcccaggtctggtgacatcttggcaggctgggaggctaccactggaggcttggagccttgggaggaaggaggggccaggggctgctgtgtgggagtggaggtcagagacttgttggggggccagagggctggacccccaggagacgagagcaggccgaaagaggcaggggttggcttcagcagggaggggtccgtgcacggcagtgggtgaggaatgagcccggccgcccgggcctatcaacagtgtgagctcagcgttttcagtaattgtctctgcgcagagtgatatttaaaatacatttgggagccaatgaggcgggaaagtggctgcgagagcggctgccaactcggccgcggggcgggggtgcaggcgggggctggggccggaggctccaggggagggtgtgctggggaaatcgggcaggggacagcctggatgcatctagcagactcattattagagtaatttacacagacgaattcggctccaaacacagtttctcccgatgcaggcatgcccgttgttccgtgtgggtgtgtgtgtgaggccttgtgtgagcgtggtgttggggaaggagtgggtacaggcgtgtgtgcccgaggctgggggctgcatccagactggttgctggttcctcccactcctgagcccctcagcctctcttccactcccccagctcccctcacccaaccaggtagagcacctgagcatcatctcccagccatgcctcgtggaggatgtccagaggctccgccagatggagaaagaggaggagttccgggcagcaatggtgaaggcccatgattctctggtagagacagaggggcctgacatgaaggagaaaatgaaggagcaaatccgacagtggtttatcgagtgccagtcagtgtcctcagctgaccctaccctccatccttcattcccttcgctcagggtccctcagggctgctcctgccccatcccctgcatgggttctgccttctagtccagatggggccttttctcctctacccccaggtccccaacacactgctgaccctcttggtttcaacaactttgggcccccagtgtacaggaccatctccacacctgacttctcaattccacaagggagagaaagtgccagaatagggtggggaaagcacccatggatgccccctgagtgatctgtcctcctgtttgtaacaatccatttctcccacctctccctccgtcaccctggtcctttatttttctctggtgttctccatccatccacccacccttttatccgcctctccatctacctatccatccatccactcacccgtctacccaactgtctatctatccttccatctgtccatctgcccatccacctacccacccttctacctacctctccatctatctacccatgcatctgcccatctgcccacccacccttctacccacctctccatctgt

SEQ ID NO: 14278 - DNA, 1605 bp, Artificial sequence
  DNA replication origin
gaatccaagcacttgcactcctgtgatcaattactgagcccagcaggcttcctgaatgaggtgactctaccctgaccctcctcctgggcacctagggttaccttctgtatggtgacagctgcttggccctgactgaacttgtgccatccatcctcccgaatcctcccatcctgctcctcatctcttcgaatctctcgcatgaaggtggctcgaagccggccttgcctcgcccgctctgccttttgcactagaattatggcctcagtccggtgcattcctgtaaagctctggccagagcaggggcaaaagagcaggagcacatgagggagagcttgcatccagggtgggccgctgggagaccagccatcaaaggatgcaccaggacaccatcctcccagagtatctgggaggccaagtcttgtcttggcgttggagggttaccatcagcagaagaacagccttgaaggaggccagggattacctaaagggcactctggtagagagcagggaggggcctctctgcattctggagtctttcaggagatggggtatggaagagtctgggagggtgtcacccccgtttaccttctgggaggacactggctccagtctggacaggatctcggccagtatcagccctcgctcccgcacagtggtggactgctccagcaggaagtatttggggattggaacctccaggtcagcctttggagcaatgttgggggaggagggtcaggaatcaaaagtctgagccatctggccgatccgttaccatttttaggggcttacacacccccagcactgttttcctccattttagagtcctgactaaacttaaagggtaatggggcagatacccccaagagccactcctctcttcctctgcccccatcctctggctggagttgaattctggaggctcatggtaggtggcagtggtctcagacctggttgtgcatcacaatcaactgggaagctcttaaatgcagattcctaggtcctcctcagactactacatcagaatgacaggacctggggaatcttccctgcgcccccacccccgaccaagtgcactgctgcagctggttggggaaactttgagatagtcttggatatgaagcagttactgaaccctgagccggactggaggcgccgcagaagctctgtgctctagaacagccttctagaacttgcccgtgcacacagatcactggagggtcttgataaaaatgcaggtgcagatttagtgagttagggattcagagtttctcatttgtgatgtcaatgctgctggtccagggaccacactttgaggaggctctaaaggactctcctcaccaattccctgcggttcgtgggtcttcccagtcatgcaggggacctcaccctgactccatccaacctctaagtacctccatgcacaccccccaccgccaaggttcctgaagcccttcctacaaggccaaaccccatcctctgatcttctctgccctccttcctttcctagcagttgtcccaacaccagggatatccgtggggtggcgggtaggcaggggtggtcggccccatccctaccccacccgaccccaagctggccagggcgtg

SEQ ID NO: 14279 - DNA, 1800 bp, Artificial sequence
  DNA replication origin
cccacccgaccccaagctggccagggcgtggctctgtgtcccaggtggtcaaggccggtcccaccccacctctcccctcccgctagctggctgggggcgtggcttcgcggctgcgcacacgtactggggtgagcttgaaatcctgcagcacgcggtccaggcagtggttctcacacaggtcggcgcgcaccagctcgtccttgagctccagcacgcggcccgccacgccgtccagcaggcgtcgcagcagccgccgcttctgcggctgcaccatctggtcatagacggtgtcgaagcggcgcagcagccccaggtagtgcaggtagagcgatgcgagcctgtactggaaggactgccgctcccggtcgggcgcaggttcgagcagaagctgctcttggtccagcagctcctgcagggtcgcgtgggaggactcccagaggcgctggtaagctctggggagagggtggcgggcgccgcgtgctctgagccacggaggagtggggagacggagcagcctggccttttgaggagtgtgggctcggggtaccagaaggtgtgatgtcactcatggctcctaaatggacttcaatgaggtaaggagcccgcagggcaatgagtggacaccgacctggtcttagggagagtgtgggattgggctccgctgtaggattagcagagagaatgggcatgacctttgggggtttgggggaaagccagcccaggcttggggctctggtaaggaaggggtctttgggagtcaggggcagtggggccctccaggtgtggggcagcccacggatgctgcagtgatctgggctggtggatgggaagtgggggtgagggatgaatgtggaggagggacccttccccaagcagagccctggttctggaattaaccatcggagggaagtttccacagtgaaagctgccagggcagcagcagcagctggggtggcccagtgcccaaaccgccactctgcccctgcctctcaggactaaggagatgctctgccctttgctgtctctgccctgggagccccactccagcccctcactcacccctcagacattgtgtccactcctccacgctgccccttgtttgctggtggtggaattcacagaacctctgtggctccctgacttccagggccacagggcagaacagcctgtttttaagagttctgacccattgtaccagtgttctagggctgaggcgagggggctggtgggtgcagaatcggggacatttatctcggaggacgtcctgggagcagcgcgctgaagggactgtgggtgggtggctgcaggctcccgcagagcaagctttggaagcttagggcagaacatgttgtccaactttggccatttttcttgtaaggaacaagtaaaataagtttctatttgaagtcccctgaaagctttggcgctctggatacatctgtcctaaagacattaccccctaacaaggcatcaccgcagcttctcactctcagcggcctctgttccttctctcagcccccgcctcctgagccccacagccctccttcactctctggatgacagcacggggaagcccatgtggtggaggggaaaggcactgatttggagtcagaaggccctgaagtcccagttgcccccttgggtgaaagtgagcataaccatgctttcctccctggggcctgccaagagttcacaccattcccatgagccagacccgtgtgaagcatcatgctagaaagtatagtggatgctgttctgcatgcttggggcttacttggtcacctgtgggtaccacctccc

SEQ ID NO: 14280 - DNA, 1008 bp, Artificial sequence
  DNA replication origin
cccctccccgagcctcgcgcatcctgatggcgtcacgcggccccgcgaggtctgtgggatacatagtagtcctcaaggcgggtctcactcttggccgctgcaacttgaggactacacttccaaggaggcagcgcggcgcgccgagaaccacccgaggccgtgattggctggtgagccggccgcacgcggaggatcctaaggagcagctctgttgcgacataggccgagcagcgaggcccagtgagttaggggaaggggagctgtagggagagggtccccgccggtgagggggaaagagaattagaagaggaagcagggacggggtttggatggagggctctgcgagggggaagatagggctaagggagagaagctgacgggcggggtgggggaggacccgggggtgacgagcgtggagactcggaggggactcacgcgggcgaggacgagtgcgtcccggcaagaggctgggctcgacggccgggtgatgtggagagggacgatcgagaagaggcccgagacggacgggaggaggaagcccggaaagtgaggcggctagctgagtgcggagcgccaagttgtagggaaaccggagacggagacctccgctgaggggcagaacctggtccccagccggaggccctgaaagaaggagcgtttccaaagtgaggcagtccgtgggggactggtgcctgtgggaagagatgttaagattagaagagccgctgagaatcggcattggtttgggataccctgaccaagttggaacagacgaggcgggggcaggccagggcatcagaggcttgatgttgatacgaagattcctgagagggatggagcagggcccaggcattcttactagtaagtttagggtttgggggtatctgtttgccttccttcaggctccctgaaacaacagtaacctacccctgtgggtcatcatcatgccctccgacctggccaagaagaaggcagccaaaaagaaggaggctgccaaagctcgacagc

SEQ ID NO: 14281 - DNA, 992 bp, Artificial sequence
  DNA replication origin
agccagacgccaagcccctccgccagagccgcgcagattccggcgcccctgcccctcctacccatcgctcccacccatcgctcaacgctcagggtcaccagccgagggtctggtgggggaggggagacgccggctcaccgcgcctggagcggggggccctggtctgacccacgggcgcccgtttctgcttcacccccgcccacccccagcgccccgggatgccgtctggagcccggatgccccaccagggggcgcccatgggccccccgggctccccgtacatgggcagccccgccgtgcgacccggcctggcccccgcgggcatggagcccgcccgcaagcgagcagcgcccccgcccgggcagagccaggcacagagccagggccagccggtgcccaccgcccccgcgcggagccgcaggtgagtgggaggcccggcgaggagggggcgtgcaggggcgggccctgggggacccgcagggaccaggtaagcgagtagcggggattggaaggggcgaggaagaatgattagcagggagcgaggcttcccgggtcgaatgccctctggggaggtaggcttagggggcaccggcctgattcttttgtgtgcccacggtagagacaggctgcggcgtcggcagccggtaccgcttccctgcacgctcccctcacccttctccttgtcacctgctcagtccttctctccacccatcaggttctgggtgatgcttcagtctttggggtgggggcggggcttccagtgggactgagggcagaggtgtaggactgtgttccccaaagtgtggttctccgctgagccttcctgccggcccccgggctgtttcaaagccactccagattttctcaatgggactctctgaccatgggggtggagcttggggatttgccctgtgggtaggtggtctctacccagtcctgctcttaattcttaggcactctggcccaggtctgctctcaagccaccagggcca

SEQ ID NO: 14282 - DNA, 1832 bp, Artificial sequence
  DNA replication origin
gggcattcgacccgggaagcctcgctccctgctaatcattcttcctcgccccttccaatccccgctactcgcttacctggtccctgcgggtcccccagggcccgcccctgcacgccccctcctcgccgggcctcccactcacctgcggctccgcgcgggggcggtgggcaccggctggccctggctctgtgcctggctctgcccgggcgggggcgctgctcgcttgcgggcgggctccatgcccgcgggggccaggccgggtcgcacggcggggctgcccatgtacggggagcccggggggcccatgggcgccccctggtggggcatccgggctccagacggcatcccggggcgctgggggtgggcgggggtgaagcagaaacgggcgcccgtgggtcagaccagggccccccgctccaggcgcggtgagccggcgtctcccctcccccaccagaccctcggctggtgaccctgagcgttgagcgatgggtgggagcgatgggtaggaggggcaggggcgccggaatctgcgcggctctggcggaggggcttggcgtctggctgcaggaagctaactgaagccaggcaccgcacagggcattgcgagcctcggggctgcggaaggtaccgcaaaaatgaatattaatggcgcctttcaacctttcaaagatgttcacatccacatgctcctctgcaagacagcctgagcaggtcctttcatccccacttgacggatggggccactgtggctcaaggagaaaaatgacctcgccaaggtcacacagctcatcctggcccaggcagcccctgaagggctgcctcctgggggcccagggctttgctctctgcggcttggttgaggtccggtacccggctccctgctccgacttctgctcctcctcctgctcctccttctcaggctccacttcttgggcggttctgcctggtactcactagctcatctcagccactctgctccctgtgtccctgcttttgacccttgggtcccaaaccccactcccctcggctgactccaagtccccacatccagggtcttcgctgaccaagctgcccccataatttgctcccagggtgagggctggaggcagggcaggcaagggcagcctgctggggcgccccagacacagccaggattctctgattgggaggaggggaactgcgttagaggtgggctgcccaggggggcctggggtgggtcagggcagtgacacttgcactcacatttcccttcctgtctgcccaggtcagcagccacctcctcctcttcccatccccaccccagtgaggtcagcagtcagggttcatgggggctgtggagactgagaggaggcggctcctcctcccttgccactacccctgggtggtcagatggggtgtaaatgagatgcaaatgcatcgagcgaagtgttccaaaccccacttgtccagactccagaagggagatggggagggccagagagagtttcaggggctgtgaaacagaaagagcggggtgggatggggactgggaccacgaaagcaggaagaagatcagagggcaggggatgcagaccctggcactgttaacatggacacaccacccacctcacccccaggcatgaggaggggcccccttgggcttgctgttttccttccaactgctacctctccctcctggtcctccaggctctgtgtctaaccctaatgtcctcccaccctcggtcagcagctgtctctgcctatctctcctgcagtgaaacctgcctgtccatgtgtctgcttccctcaccccacctgaccctgtcactcaggcctccagggtagcagcccag

SEQ ID NO: 14283 - DNA, 1371 bp, Artificial sequence
  DNA replication origin
cggcggcggcggcggcggcgggcgggcggcggcggcgtgggccgtgggccgtcagggcagccctgaaggggccccctccccactccgctcgagtagaagtgtgagagagcccagcaggactcagaggggagagttggaggaaaaaaaaaggcagaaaagggaaagaaagaggaagagagagagagagtgagaggagccgctgagcccaccccgatggccgcggacgaagttgccggaggggcgcgcaaagccacgaaaagcaaactttttgagtttctggtccatggggtggtgagtgggggaaagttagcgggggagggcaagcgagctggctcgggctgaatggagggctgatcgggaggggccgggagggcgctcccgctctcccacccctctagtggggggcgtcatggcccacggcccggccgcgggactgtgctggcgccctggcacccgaacacgtcgccaggcggccggccgggtctgacgcgaggcggggaagggaggcgtttgcatggctcttgtcaggggcgggggtgggacttggggactctaccccccaagtagggggtcctcgctgtagccgacaggttgactttcgttcttttccttgtgggcccaggtgttgcccctgccctgggggtgggggtgggggatggggacatggcagaggctgggctgggctgtctgttcatccgttgggacagtgtcactgcttgtgtctccggagcaaggagcaggtgaccctggaggcactgtagcgggaagctcgcaggctgagccacctctgcatcccagcgggagggctctggagcttctgccttagggtgggggagaggaccgctctagggacttagcccaagttaggggctctgagggtctccttggcggactcagccaccagaagctgatgtccttaactcctcgaacatgtgaaggaaggggctggagttggggacatgaggcctagagaccgaagggacaggggagcactgtcctgccacaggcaggctgtgaaggcacgtgggagcccgggaggctggagctgagtcagtagggcccggctgggaggggtatggaggggtggggaatgggagaagcaggggctgcgactcttgggatgggtgagggagtggaggccctgtgtagaggaagctgtcgggtttactatggccaaatttggttgtgaccccaaggaagacaccctctcagtaaggccagagtccctaggattttggcctttcatggggatggggctggtggcgggcacagctctctgggggctctgaaagcctccctctcagggcctcttcagcagatgggccagtatccctggccttgataactggggagagcagctgacaggaagag

SEQ ID NO: 14284 - DNA, 1926 bp, Artificial sequence
  DNA replication origin
tgtgtgcaaggtgtatctattgtctgtgtacacttaaggatgtctcccagaggggtggctcaggagagcgcttatgtatggacttgggtgaagctcaccagctcctccacaggggcttcaccatagcccctcgtctaactacctcccgcaacctcttccaccaccaagaccaagcccgggatctcccaggccctgcctcaaacttcccagctacccaaactggagtgcccagcatctcctctgctgtcttcttttcccaaaaggtctctccaatagttgagaacactgagctttaacaaagcctaggggtgtctatctccaacccccagaacctccaaggcctgtggtttcccatgcccctgctagacgcacccatggtgggtgggggtgcccatggtaactcacaccatcaggtaaatggcagagtaccagctccatgcattggctcattaagctttgcaagcatcaggtatctggggtactgttgagttcctgtgcccaggcatggaggaagagtgggagttaaagatcagtctctgaccttatggggaccttagcctctctgggaaagcaaagctaatgtccttgaagcacagtgcacgtcaggccagtccaatgccaattcatggtgctgggtagatggcaatgagcatttggagaagagaaaaatctttgcatacaagtaggacgaaggaaggcttcctggaggaagtggggcctgggctgggctttaaagaataggtgtgatttggacaagcagagggaaggcagagggcaggcaaagggcattccaggtaaaagaatcgggggcaggggctaagaaatgggagtgagcggggattctggaggttagcaggcagactgggcaagtcacttccccaggttcccagcagcatgacctatggcagacagaggcaggccacccacccatccccaccgtgtcagggcccaggctctgtgtgtgggggtgtgtggggggtagtctaggctaaagccctgggagagatttggtagcaaggggatctctaggtcccctttcaagctaggggtggtggaggagcaacctggaccagatgtcctccctgacatttcagattgacagtgggcacctaaatgaacagtgacagccaagagcacaaccagggccagcagaaatcaggctgcaggcagaaaggaccccctgggcaaaggcattctgaagggtttagggtcagtacccttcagtcttcagggcccaacttcaagtaagtgtttcaacaaactcccctaggcactaggctatggtcctgccctcacctggattctcacagtgaggccccagcagacccccaaacttgacccaagggccttgttccaaagcccacggctcctccccaagaaggagaaaaaaggggcgtggcctttggggacctgggtaggcccaggactccctgcctgggtatgtcaggatttgcccctcctccttccggtccctcctccactccagggactgccaactccttccacacgccccttctggggctcccttgccaccccacgccacaccccagcctcaagacccctctctttggggtcttgaggccggcccaatatacccactatacccagcccagctgccccaactcctctgggtcccctaaccccactccacccccaccccaaggaaaccaagcccagcttgcctcgttctctccacgcacccacccgagcacccccctggcgctgcgccattccccacattcattctcttcctgttctcatgagcacaatccctgtccctctttctgaaatacttcccctattgccctcactttctcacagagcggcaaacaaagactcacatacccagaaatagcctctcacagagctgaaaggcacaggccatgtcctgccacacacgcaggcgcgcgcgcacggaggctgtcg

SEQ ID NO: 14285 - DNA, 1046 bp, Artificial sequence
  DNA replication origin
gctgggccccgggctgaccttcaccgggagggaggccgcggcgcgcatgcccaggccggggaccggcgcgggcggagggaggggcggcgcgggccgggccggcccgagcccccccagctccccggccgccgcccgctcgctcgggcgcggtgggggcgaggcggccgagcccgtcccgcaggccgcggcgcatctctccctgcgcggggagcggcgctttgccatttggtgctggtggtgcttcagcgagggaaggagcgatggggggacggcaggggggactgcggcgccgggcgccgggcggccgccctcgcccccgacaggcgcacggcctgccccaagtgcggcgggcgccctattgcgctgggaggaatccacgctcttcccgggcctccttcccacccgcaggagccatcggcggcgtggcacaccgagcgcccttctggggttaagccactggggatcctggcctttgtgaggagggagccctggcccgggcccccacactggcgccgccccagctttctggtctgaaggctcctcctgtcgcccacctaaaagcagtacgcaaatgtgtctgggcctgccttgtgaatggggcccaccacgggatgtggaggtgctcaaggtgtgcctgtgtgtgcagagccatgtggcttcctcgaccttttggtgcttgtattggtgtgcctgctgtgtgtgtgttgggagggtgtgtgtgcaaggtgtatctattgtctgtgtacacttaaggatgtctcccagaggggtggctcaggagagcgcttatgtatggacttgggtgaagctcaccagctcctccacaggggcttcaccatagcccctcgtctaactacctcccgcaacctcttccaccaccaagaccaagcccgggatctcccaggccctgcctcaaacttcccagctacccaaactggagtgcccagcatctcctctgctgtcttcttttcccaaaaggtctctccaatagttgagaacactgagctttaacaaagcctaggggtgtctatctccaacccccagaa

SEQ ID NO: 14286 - DNA, 1086 bp, Artificial sequence
  DNA replication origin
agaagggcgctcggtgtgccacgccgccgatggctcctgcgggtgggaaggaggcccgggaagagcgtggattcctcccagcgcaatagggcgcccgccgcacttggggcaggccgtgcgcctgtcgggggcgagggcggccgcccggcgcccggcgccgcagtcccccctgccgtccccccatcgctccttccctcgctgaagcaccaccagcaccaaatggcaaagcgccgctccccgcgcagggagagatgcgccgcggcctgcgggacgggctcggccgcctcgcccccaccgcgcccgagcgagcgggcggcggccggggagctgggggggctcgggccggcccggcccgcgccgcccctccctccgcccgcgccggtccccggcctgggcatgcgcgccgcggcctccctcccggtgaaggtcagcccggggcccagctgcaggactccgcggcggccggggaggcggcggagggaggagggatgcggggaagagacttaactccttccctgcgggaagatggccacctaggccgggccccagccgcagtcccgccctcctgccctccgtgaaggtcccaccacggggactccgctcggggggcgcggcaggaggagcaggagagcggggaacatggaagaaggggctggaaggagagaagagaagctggcgaggggatagggaggaagggaagggaggaacaaaggaagcgagactggagggagaacggattgcttgggagagagctctttcctctattcccttttccctacacccccagcaataaagctctccttaggagaatacgatcaccctcactggggcggcctgagtgagtgtgtgtgtgtgtgtgtgtgagagagagagagagcgagagaacgcgagaggagagggagagagagaaagaaagagagagggagaaagtgagaccacttggcgctgtgaggaccacaaagccttggtttcggtgttctggccatctctaaaccaggccccactttccgccatccagcctacctgcccgggctaagcaccagcctcgggggacctctggctagtccttggggtcacgcccagctc

SEQ ID NO: 14287 - DNA, 914 bp, Artificial sequence
  DNA replication origin
tgtttggagtctcaaccaccctatgagtcccgaggccatgcgatccccttgtgtttgccctgggtttcagccacatctaagccactgaatctggccagatgtgccaggtgttgatccggagggagaggagaggagagtgaggatggttctgagtgacccatccctccctccagggccatacagccagcaggtcagggcactgcccaattcagggtccctggacgtggccctattgcccgccagcagagccacaccctggaaggtgggagagaagttatagcacccctcaggatcccatgtaaacaccatcccacagcccagccctgtccgtgcagaaatggggaccaggcctgtgtggcacgtttttatggggtgtgtgacctgctacaagcgaccacctcattaatggggagtaagagaaaacctgctgtgaatccaaaatgtgccttccctgtggccagcgggatgctcagatcccagcgcccagccccgctctcctgccaccagcagtttattgtgttgtgtgtggtgggaggggtgtcaaggagcatcccattagactgaggaatcccacgcaggcaaagagaggaaggaggcctcattcattccactaaccttcgcatgcacctgcctgccacacaggaccctggggaccccaaggtaaggcccaccctgctgtctggatgctgaaggtgtaggggtgagggctcagccaggtgtgcgtgacaggggcagagccacccagagagagctactctgaggggaggacggagggagtgagtgggagggccgcgtccctgaggaccccatagaggagggggtgctgagctgggaccaggcctcactcatggtgagcagcccccactcactcggtgcgggtctgcttcccggcacagctccgtcgctctgctccc

SEQ ID NO: 14288 - DNA, 886 bp, Artificial sequence
  DNA replication origin
ctattcaggaggccgaggcacaagaattgcttgagcccaggaggcagaggttgcagtgagctgagatcgcgccacctgggcaacagggcgacactctgtttcaaaaataaaaaaaaaaaaagccaggcgcagtggctcatgcctgtaatcccagcacttcaggaggccgaggcaggcagattgtctgaggtcaggaagtttgagaccagcctgggcaacacggtgaaaccccgtctctactaaaatacaaaaaattagctgggtatggtggcaggcacctgtagtcccagctacttgggaggctgaggcaggagaattgcttgaacctgggaggcggaggttgcagtgagccgagatcgcgccactgcactccagcctgagtgacagagcaagactctgtctcaaaaaaaaaaaaaagtacatgcaagggaggttaaaatggtcaattgtgttatgtgtcaccgtcaaaacaaccaggagattcaatgtgtaagagcaaggggtagctgtggggaggggtgcagagtggtgaaatgaagcagaggttccagaggagtcgcaggatttggaggtcagggagctggacagggtgaactggaaagaggaaaaagaggagacggtggtcagcgagtagggtgcatgggactgaaagtggggggctgcggttgctgcagtgatctaagagatgaccttgggagtgcatggctgagggaacagggaggatcgctggaagaggagctgccaaggaatggagaggccagagatgtctggaagagcatgcagcaggctggacaggagtggtgctccggagagtgacatgagccaggagccagaatccgcacaaaggaagcctccctagctgggggtaagatgcagagccagggct

SEQ ID NO: 14289 - DNA, 1038 bp, Artificial sequence
  DNA replication origin
tggtggcgggtgcctgtagtcccagctactcaggaggctgaggcaggagaatcgcttgaacccaggaggcggagtttgcagtagattaagaactgacggcagcatttgccaatgtggaggctaccggtggccctgccaggagcatttcagtggagcagcgggagctgcatctgacaggattgggattcagggagaatggaggagcacaaatgagacaactcttttcagaagttttgttgctactgggcagcaacctgtaggataagtagggttaagagagattgtttcaggaggccgggtgcaggggctcacgcctaaaatgccagcagtttgggaggctgaggcgggaggatcacttgagcccgggagtttgagaccagcccaagcaacatagtgagattttgcctctattttttaaaaagtaataaaaaatgaaagaagagcgcttattccaatggggatgtaacagtacttgtgcatgctgctgggggaactccagggaagaggggaatgttgatgaaatgatggtgtgggagagaattgctggagcagtgtccttggtgtggaggagggacggagctggcacacggaggcacggctggctgtagtcgggaacacagatagctcatctggaggaacgggatcagctgctggcaggcagagggtgtggtgggaggctctggaagttcttcggaagcttcttttttctcagtgaaggggaaaacgggcacaagctgggagtgaggaggatggaggagaggttggaagtcagaggagggagaagctgcaaaaaactcctgtcggggtgtgggagcgggcatatttgtgactgtgctgtgagaagagtggcctgccgggcagcacgatgccagctgagctcgtgccgaatccacaatgagaccgggtggggtggctgtgtgtctttctctggccacattcaggtgcgtggttgcaggggaggagctggtgaagctggatttacctcttaagagagtcaagagtgtacacaaggggtcaggtgcagtggcttatgcctgt

SEQ ID NO: 14290 - DNA, 2042 bp, Artificial sequence
  DNA replication origin
atgctcacatgaacccaaaacttggtttcaggtagcttgtccctggctcagaaaggctttgagaggcaggacctaaggacaccaggaggtgagaggacacgcaggaaagggagtgtgggatggagggaaggacattaatgacaggtgtcagcaggggtggggagagggacagagaggccctgccatgggcactaaggagtccagctgggggcagaaatgccgggagggggccatgtggtgggagcaggagccgagggctggccgactcgccatggggccccagagcttctgctcctgggctggcaggggaggaagcacctacctgtaccacggtgggtgggtgctgaagacctggagtcatagatggcagggtcctgcacctggagagtcatccagtgccccctcggtgcctgggcccggagcccaccgcgcctgcagcaccaagggccattctgaggatctgaaaggagaggtcagaccctgagccccagcgtagattcaaggaggcctcgggaagctgcgaagaagccaaactccccggagtggaggtctgaggaagccaggacactgtgcagaaaaaagggcctaggatggaggcaaccagcatgggccagctggggctggggtggcacaaggcagggcgcaggtgggagcagtatgtgtgggaagcagacagagaccggccccagggtcctgcgggacaaagaacttgaaagacagagcagggaccccaggcagagcccaagccctgactggagaggccagttttgggggtgtggcaatggttggagggagagagctgggcattggaggcaaaggccagagggcaggtcaggatggtaactgggatggccctggagcccaggggcatggagggactccagaggtggcaggcaggtagtcagcctgctccatgactaccagctggcctaggcgcctccctcctggtccctgctagtgcctgctctgtcctgtcctgccctgcttccttccttgctggaagagcaggaaggcctccagctcgttgggtcaggacccaacttatgaaatgaagtccctgagcagacggtggggcatgggagctaagaagagagcagtgctgtaggagcggggtgtgggtgacagaggtggggcttgggagtggctcagggtctggttaagccatgtgagcaaaagaggctgctgcccatggatcaatcctgagcagggttgggaggaaaggggatgaggaaggaggaggctggagacagggagtgctggggatgggagagctggtggggtccgggagacagagtgggaggggaggatgaggagaggaagatgcggtaggggaggggctaccagtccagggtcgggggggaggtgccctgcaagaaggtgggggacagagggacaacctgaataggagaggggtatccagggaagacggtggccaagtggagacagagaaggtgccaggcaggggaatgatgggaaggtgctaggtaggggaaggagggagaggatgccaggcaggggaaggagggaaggtgccagacagggggagtaggaagcagagcatgccaggcaggagcaggttgagaaagtgctcggcaggggggaggtgacaggcaatgggaggaggtggtgccagacagggggaggaggggaaggtgccaggcaggagggtgccagacgagggaaggaggggagatgcaggtggagggaggataggaaggtactggagagggaaggaggggaagatgccaggcagcgatggggaggaggtggtgtcacagaggggctgaatgggagtctgccagtcagggaagaggtgcaaggaaggggtaggaggaagaggtacgaggttggggtgggggtggagggaggtgccaggcggggggacggaaagagtcaggagtggggggagatacctggaaaggaggaggggaggaagatgccaggaagggagaaggggatgccaggtagggaggaggggaagtgccaggtgaggagaaggtgccaggcaggagaaggaggggggatgcctggcagtgggagaa

SEQ ID NO: 14291 - DNA, 857 bp, Artificial sequence
  DNA replication origin
ggggagatacctggaaaggaggaggggaggaagatgccaggaagggagaaggggatgccaggtagggaggaggggaagtgccaggtgaggagaaggtgccaggcaggagaaggaggggggatgcctggcagtgggagaagggaagccaggcagggggaggagggggaagccaggcagggggagaagggatgccaggcagggaggagaagggatgccaggcagggggaggagggggatgccaggcaggggggaggaggaggaggaggatgccaacagaggcgagcagagactgccaggcagggaaggcgggggcgccggcgcagcgcggccgggaggcgccttcgccaagggccgtgggggccgcgcggcgcgggtcgctcacctgctcccccgggaccccggcccggagcgcggccgcccgctccctgctcggcgctcggctcggcccggcgcctgcgccgctgcagcccggagcgggggaggcgcagggagcgtctgcaaagagcgaggagcttaataatgagttagggaccggagcaggaagcgtcgccccatccagccgtcggtgtgctcgccagctcggaggccctcggcgggccctggccagacccgttgtgatcttcagcctgtacacagatgtgtcgtaggcctgtgcttgcatctgcacgcccacgagtcacacacgcagtcagcatcctgtgtggccgcagacatcacctacactaggaccacacacgcgcatgcacgtgggcgcgcacacacaggcacacaaacggttgtcctcacacagattcagtcagatcatcctatgtggctgcagacattacctagacgaggtcccggacacccatgtgcac

SEQ ID NO: 14292 - DNA, 1986 bp, Artificial sequence
  DNA replication origin
ttttcattcctaatattgtatttgtggcccagtcttggctcactgcaacctccgcttcctgggttcaagtgattctcctgcctcggcctcccaaagtgctgggattacaggtgtgagccactgcacccggccagtattgtgtatttaaacataatgaaacatggaaaaggtacagtaaatgtacggtataatcgtatgggtcccatcatcttatgggaccaccgtcatgtatgccgtctgtcattggccagtatcattatgcagcacatgactgtgtatttgggagtggaatatgccagcattccatttaggggggttcaagacgttcgttgtggcatgacttggagggcatctcctgcttcctctattagatgataacctccttgaagggcagagctagaattaacgctggggcgggggggctcagaggcatcatctagtccaatccccttgtgtaggtggggaaactgaggcccatagcgaggcagacccctgagaccctgagaggcaagaccatgttggtgtcacgttagagtccagggctctttctagtcttccacagggtgtgtgtgagtgtgagagtgtgagtgagtgtgtcagtgtgtgggggctatgtgtgtttgtgagtgtctgactgttggggagtggtgtgtgagtgcatgtgtgagtatgggtgtgtgtggatatgagtgtgtgaatgtgtgtgagagtttgtgaatgtgtgtgggtgagtgtgtctctgtgtgtatgaatgtgtgggggtggtgtgtgtgtgcgagtgtgaggagtgatgtgagtgcgtgtgtatatatgtgtgaatgtgtgtgtttgtgtgagtgtggatgtgtgtggggtgtgagtgtgagggagtggtgtgtgtgcgtgtgtgtgaatgtgtgagtgtggatgtctgggggtgtgtgtgagagtgtgagggagtggagtgtcagtgcatgtgtgtgggtgtgtgaatgtatgagtgtgtgaaggtgtgtgtggctgtgagtgtgggggagtagtgtgactgcatgtatatgggtgtgtgggtgtgtataaatgaacgtatttgtgagtgtgggtgtggatatgtgtgagtgtgggttgtggggatgtgtgtgtgtgagtgtagaggagtgtggagtggtatgtcagtgcatgtatgtgggtgtatatgagtgtgtgaaggtatgtgttactgagtttgtgtgtgagtgggtgggagaggtgtgagtgaatgtgtatgggtgtgtgtgggtgtgtatgagtgaatgcgtgtgtgtgagggtgggtgtgagtgatgtaggggaagtggtgtgtgagcacgtgtatgggtatgtgtgggtgtgtatgagtgaatgtgtatttgtgagtgtgtgtggtgtaggagtggtgtttgagtgcatgtgtatgggtgtgtgtggttgtgtatgagcatgtgtgagttcgtgtgtgtgggagtgagtttgggatgtgtggggagggtgtgagagtgtgagtgtgggggagttgtgtgggggagtagtgtgtgtgcatgtgtatgggtgtttggtgggtgtgtatgagtgagtgtatttatgtgtgtgatgtgggggagtggtgtgtgagtgcatgtgtatgggtgtgtggttgtgtatgagtgtgtgtgagttcgtgtgtgtgtggggtgtgtgtgtgagagtgtgtgtgagtgtgggggagtggtgtatgtgtatgtgtatgggtgtttggtgtgtgtgagtgaatgtgtatttgtgagtgtgtgtgtggtgtagggggagtagtgtatgactgcatgtgtatgagtgtgtttggttgtgtatgagttcatgtgcgtgagtgtgggtgtgtgcgtgactgtgggtatgagtgtgtgtgtttgtaagtgtgagtgtgggtgtgagatggaaaggggggcaggggtggagagagatgaggcagcctgagccccgggacgctccccacccgttgacccaggaggctgagtca

SEQ ID NO: 14293 - DNA, 1412 bp, Artificial sequence
  DNA replication origin
ctgagcaatcaacgggctttttcctgatgtgctagaagccaacaccatggcacgggcttttgagaaaagaaaggctttattgtgagttgactgtcaaggagacatgaggaaaccctcagctctgtctccttgagcttggggctgggttgggttttataagcatagggtaatgacgcatgatcggattagattttgcgatgaggtgatgctgggatgctcatctgactggaccctgccatggggtgacaccagggcttgatctgattgcattctggatctcaccatgcagtgcccatttcttaattcagtccctgctttgatctgagcactcaggttccgcccctggttgcatgcttggttcacctgggcatcctcaggttacgtgcgaaaccttccatctgggagtccatgcaactgaaaaacaactcacaacttgggtatataaaaggcgaatcagattggtctggtgcggttatacagttattaatatccctttgtcagaagtcaaaattaccacaaatttagattaaagatctattggtttttattgattcatgaatcaggatggcatcttctctgaaaatttagaaacggtgctccaacgagctgggcagaggaggtgggctttataggtagaaaagggctaaagaaagcagcaacagggaacgaaaaacggattggtcactgcaaggttacaggagtcccctctcgtccacacacaggtggtgtgtcccaagacccacagtggatgcctgaaacctcggatagtactgcaccccattttacatacacacacatatatatatactatatatatacacacacttcatttttcctatacatacgtacatacctacgataaagtttaatttattaggcacagtaagagattaacagcaataactgataataaaatagaagcgtcactgttgagcacagccttgggaataggaccttggaagtaggcagagctccctaggccttgtggtccctagtggccgtggacagcatgggggaggaaattcccgggaagcagcctaatttcaccccagggaagcccctggtgggcttgtggagggcggggtgaaaagccgctggtttagggaaggggtccagcctaggctgaggaatgagatgcgggttgggacggtcccgacccttcccccagcctctttcaaggattctggagaaacaaagccaggatccatttcctcttgatggctggcaaactgagcccgggcgggaagtcctggaagactgagcctggggtggcgttggacaccaactcccaggtcctcgccccacacggccacatcctcgcccagccccgcctccgcttagctccgccccgtcgcggctccgccccgcggtaaccacgcccacacaaccgtatccccgcccacagctggctt

SEQ ID NO: 14294 - DNA, 1566 bp, Artificial sequence
  DNA replication origin
ggtgtctgggctggcgtctgcaggggccccgcgggatcaggccggctgcaggggcgcggcggcgcagcccaccttgttgctgaagagccgcgagaggctgcgcatgggcggagggggccgcggggcacctcggagcccgcgcacgtcccagaggcgcagggcgccgtcgtgcgaggcggtgtagagcacctggccgtgcacctgcgggcgcaggggcgggcgtcaccggtgacgcggtaggcgggggggacaccgctgcccgcgtggatggatcggggcggggcaccttccctcccacgggcggcggccccgagaagggcagagggacctacctggatgcagttgatgatgaatgtgtggccccggaacaccctccgcagctctccagactgcgcgtcgaaggcccgggcgcaagcgtccccgctgcccgtgaacactgcggacacacagcgcgcgctgggcctccctccctgctcggccccccgcaagcagggatggggcggcgagagcgtgacctggggcgtctccgagactccgccccacgggggtatcctgaggctcatatgggaagtggacagtgcccctccagagaaacgggtccccacggttattctgctccaccctgcagatgcctgcgcgccagctggccctgcccctgccctgctgaacaccgcccgggcccagtccccactccgcggtttggtgaagttggtttccgtgcctgcttgggaagcccctgcctggggataatcgtcaggtcctcgagtcgcttcccccctaccttccgctgcgtcggcaaccttatcctcccgtcctcattaacggatcggcactcaaatcaaagcccagccctctggggttcatgatcacgcacccccgggacccctagcgggggcgagcctccgacctcagtctgtctcctcccccaggtggctgcctctccctggggtttctcctaagatttcagtccaatcgttttccaactgcaacctgcatttgcatccgtcacttggaggtcttagccacagatcgcggggccgcatcccagaatctgatttagcaggcggggcctgagaatcggcatttctaaccagttttaagtgatgctgctgctagtcaggaggccacactgaggatgtggactagaagaactcacttggcctaggctgggctctccgaagccgaccctgatgctaggacttgatgcagacagttcacctggcaggcgtcccaggaaacgctcacagggaaatgggagatggaaagggagggaggaagtcctgtggggtctgtcaatgagcaggtaactacggtgggcagctatggtgcaagcctgccagggaccttggggaaaaggggtaggaccacctgagggtaagggtgctgggctacctatctatctgagggtgctctgtgggtacttgttccccagcctttttttttttttttcttacagggagacagggtctcactctgttgccgaggctggagtgcagtggtaccatcttagctcactgttaaccttgaactcctgggctcaaacgatcctcccgcttcagcctcctg

SEQ ID NO: 14295 - DNA, 791 bp, Artificial sequence
  DNA replication origin
aagaagggaaggtcagggtgcactgctcgcacctgttttttgcgtgccttttaactcgacatcatccttatgctgaaggggcgtgttttggggaggcacactctgccactcttcacgctccccggccctccctccgtgtccttacttgtcagatgctggtggtgataacagctcttctagtctcccagggttcccgtgagagtcagcactagtggcccgagactcgtaaagagctgggggcatccgaggcctctttcctgccaggcagttccgtggtgggcagtatggagtgaggctgagaccccccctacctggctcatgtctgtgctctgagcttgccagggcagggggttgggaggggaaggggccaggagttcgctgggaggcctgtcccagatggagctggtgactcgccctcatgtcaccagtgaaagaggaaccagcgcaggcatagaaaggccactggccaggtggaggctggtgctggacggaggggggagaaaagcagcactgccctcccaggtgacagctgtcctcactccaggggtggcaggattccccgggttcgctccctggggtattctgtagggtctcagtgctgttcttcctggagagtgggagcgtagggtgtcctggcagagagtcaggaaggctaaaggagagagtgcggagagacagctcccaccccacacacctgtgtgcacacacaggcataggcgcacacactccacatgcacatgcatgatacgcgcgtgtgaacgcacaccccacaggcacacatgcacacacgt

SEQ ID NO: 14296 - DNA, 878 bp, Artificial sequence
  DNA replication origin
ggtcagggatcagaaggcacgggttccagaatccacacagcctcccgacatgccatgctcggcactgcagctaaaataacctctccctgtgtctgcccagcttgccacactcgtcttccaaggtccagctcaaatcgcccccacctccaggaagctaccctgactcccctcatgcccacccttccttgcctgcccctgggcatgtacctgtagcagggaccaagcttagatgctccgctgggatccctccagcatccccacagcagctctgcaggagcagcgggaaggggatgggggaggaggtaggggagcagcgggaagcgggtgggggggaaggtaggggagcacggccctctcagcttgcccggagttgaaaagcttctggggatttagggttttcagcctaagactgagaaagtccagggcagagtgggacacgctggtcaccctgggaacagggccggctcaagtggctgggcagggcacttcagatgagggccctgagaagctggagagcactgggaactcccatagtgcacccaggggtgcttgtgggaggcacagccaggggtcacgctacagccagtgggggcctctgctgccagctctcacagcaatccccatgcagactgaggtcacagcctcaacagggttctagccacatggctgggaactgggggttgggtagccaagagagtccatccattcagtgcaactgaccaacatgggagaccaaggcccccacattgtattcacgactcttattttcattttgatggaagccaagaactccccagaaaaacacacatttgtctttagtgcagagctttgcacagaacctcagaaggtctgagcacacacccttggtaagaagccct

SEQ ID NO: 14297 - DNA, 694 bp, Artificial sequence
  DNA replication origin
ctgggaactcccatagtgcacccaggggtgcttgtgggaggcacagccaggggtcacgctacagccagtgggggcctctgctgccagctctcacagcaatccccatgcagactgaggtcacagcctcaacagggttctagccacatggctgggaactgggggttgggtagccaagagagtccatccattcagtgcaactgaccaacatgggagaccaaggcccccacattgtattcacgactcttattttcattttgatggaagccaagaactccccagaaaaacacacatttgtctttagtgcagagctttgcacagaacctcagaaggtctgagcacacacccttggtaagaagccctgcacctcaggagaggagaccgccaaggggtgcggccgtggctgcactgtaacaaggtgcatccctgccggggtgggaccctcctgaatcaggaccacggccggccctgctgctcctcccgtcctcccgcgaagggcttgctggccagcctggcatggacaggagacccactcgggacaagcctgctgcctcccgcctccacaggatcccaacagcattcctcacttcccgcaagcagctcaacgacacatgactccactcaaatgccaactatccctttccaactggcttcttccctgagacccagataggatgattgtcacaaaacatgtatt

SEQ ID NO: 14298 - DNA, 878 bp, Artificial sequence
  DNA replication origin
gctttgcacagaacctcagaaggtctgagcacacacccttggtaagaagccctgcacctcaggagaggagaccgccaaggggtgcggccgtggctgcactgtaacaaggtgcatccctgccggggtgggaccctcctgaatcaggaccacggccggccctgctgctcctcccgtcctcccgcgaagggcttgctggccagcctggcatggacaggagacccactcgggacaagcctgctgcctcccgcctccacaggatcccaacagcattcctcacttcccgcaagcagctcaacgacacatgactccactcaaatgccaactatccctttccaactggcttcttccctgagacccagataggatgattgtcacaaaacatgtatttatttatttattttgagacggagtctcactctgtcgcccaggctggagcgcagtggcacgatctcggctcactgcaacctctgcctcccaggttcaagcgattctcctgcctcagcctcccgagtagctgggattacgtgtatttttaaaggaaatgatgccttgatgctgctgctgcaaagtgcgggaggaagagggtgtagcgggaggaagggcatagcgggaggaagggcatagcgggaggaagagcatagcgggaggaagagggtgtagtgggaggaagggcatagcgggaggaagagggtgtagcgggaggaagagggtgtagcgggaggaagagggcgtagcaggaggaagggcatagcgggaggaagggcatagcgggaggaagagggtgtagcgggaggaagggcatagcgggaggaagggtgtagcgggaggccttggggtatggagggggtggctgagtcctgcctggtgtgagaaggcag

SEQ ID NO: 14299 - DNA, 1332 bp, Artificial sequence
  DNA replication origin
ccttgtgcaccagagacgcagctgccttgttcgcccggtggggtgtggatcctccgagcggtgctgggaagggggttctctctgcccgcgcgcccaggactctacccagggcggaggtcccgagtgggccgccccccgcagcgccctgggttcgcgggcccagaggctggaggcagcggggagctagggtccttcaccctcccctcgccgcgtgcctccgcaggagtcgggctccccgttccccgcgatggccgcgggccgcagtcgtacggagccgccgcgcggaccccggggcgcccctccctagcggggcgcagctccttcttgttccccgccctgccagcgggatggggggcggcgggtcggccctgagggtctgcgccgaccaccgcgggggcatcaactggctgagcctgagccccgacgggcagcgcctgctgacgggcagcgaggacggcacggcccggctctggagcaccgcggacggccagtgctgcgcgctcctgcaaggtagaccctcccactccctccctgacctcttcgccgcagctcaccggccccagaccgcggaccccagctcctgcgcccgcagacccctttctagaagtccagcccccgctcatcccggcacactagcggaagagcgcttgtctgggcccagcatctggctgttgagcgcacggcagggcagggtgaggtctgggggtggggtgcgggtgcagagcagggtgcggccgggatcgggtgggtgggtcgaggggcgtccgctacaaaggcgaagatcatttgtcaaccagcggcaggaaatctcccttgacaacaatgttaacaaacaaaaagttgcacctatactccttctaagcaaaccttcccttgtctctaggtgccttgtggcctctttgtggccaattgtgctcttctgctggcatttcctgttgacgactctcacagcaacagtagacgcttgttaagggccagcggtgcggagaagtgtgccgtcgtcacactatgttaccccacatacagacgtggaaacaggctgggagttaagtaattcgcccaggtcgcacagccagtgaggggtagatggcagtctgagccctctcattgctgtaaaccctgcctgcatgcctgttggtttctatttgtgccctgtactcactcaggaggtcagtgtgcctcgggtgcaccttcccctgggcctgtcccatgcactgtgaggtccctttcagctctggccctcctactgcccaggtagcacacgtagtcccctggatgagccgcgaggctttctgctgtgggtagttctttatcaccgcgggcttttccacc

SEQ ID NO: 14300 - DNA, 1669 bp, Artificial sequence
  DNA replication origin
tgccacctccgccgccgccgcctgggtcccctgagccaagggccgggacgagggagggggaggcggacaaagggtcggggtcggggagaatcgcgcgccgggaactcatttggggcgcagctccaccgacccctcggctactcgcctccaccaggcaagccaggtcctcccatgctctgagccctaaggactctgcccgaggggctctcggggacttgggggcggtcccccaatggagggtgcgacagggaaagccccgagtccgccctccctgggaaatcacgcgcacacccaggattctactttggtctggccggagtggggatgaggtgcgagccgctgcggggtcggtggagccgggatgtcaagttcaccttccagccgccgcgggctccctcggcctggggcgcctctaatggaccccggggtcggcctgagccctcccggagcgcccggcggctggtttccattagggcagttccggcgccgacttcgctggggacggggaaggtgacccccctactcggatcccccaggtcctaaaggtagcaggatttccagaacgctccagggctctctcaggagcctagggagaagggcaaggaaggggcgtctttggcgagctagcccgcaatgggacgaccagtactgcacgctctgctctatccagactccaaaagaaaaccccatcgtggggtgtcccaggccgttgggtcgtttatacccagagtggcctaaccagagaaatccgttcttttccctcaaaacttgtaaagcagctggcgcctcagcttaaggagcgtggcccttccttagcaggtggtggagagaggggcagtggaggagcgttaggacgagatttggggtcatccagccggagagagggaggccgaaaggagagacgttttcaggaggtggaggcttcagcatttggatgcctgcgaggcgggagaggccggggagcctgtcttgtgctgagaggctgggtagactgttttgtcccctacaggctgatcaccagttcctcttaggaaccggtgaacctcagggggcccattgcacatccaggtgtgaaactgcggtgtggcctccaggtgaggacagactcggtatagtggggatcttgggcaggccctgcggctgcagcccttggggaaggtgaatgtgaggaccatggaggctgggagggtttatccggagaagtgccagaggaaacccaaactttctgggcagaggggccaaggagaaccaggcatcgactcttttggaaactaagaggggaggggtttgaaagcagtttgggagctggggacagatcgtaggttgggcgagcttgcctggtcgtgggccagaggaaagaaccaccaggagaaaagcttaactttcaaggaggtcacccaggattcctgagcaaggtggcacccatgcactctggttcctctcctctgcagccaacacaagccatcagccccatgctcagctcccagcaggcagagcgttcagaagcgccagcgccatcatcttgggagcctgcagtccacacaccgctgaccttacctacttcctctttccaggttgatagattttttgttcttggcttctccacctcccccacccctccttctccggtttggcacaaagtggccccctggtggggatgagccagcca

SEQ ID NO: 14301 - DNA, 1545 bp, Artificial sequence
  DNA replication origin
ctaaacaagcctcttgccagtctaacaactcagtcatgtttcctctgggagcctctttgagtcttgacatcaaggagtaagtgcccccaccctccccgtttcctaagaagcctgacttcagctgtcacctgactccaaattgcaaaacccacctccagtcatagagatacaagaaaatcagcaattttatcctgaaaacatgaatgcagtgggttgtgtctgcttggctacagaagagtgagatctctctccatctttgcgatctcttaggggagagatcgtgatgcagatcgcattccagtttaaagtttattcaataataaaattgtttttttttccttctaccttcgtggagaagttttctgggttggctggagattttgtttttaattttatgtccccaccagggcccaggtccagagagaaacattggaatgtgtggcttggcaagtaagggcgccagtggaggcagctgggcggcgtccctagggaggggcgtccctagggaggaccgtccctgggttcaagggtgacatgcaggttctggtttgtaccctgtctacttttgaaaacctcccacagcagaggcaaggtcacccctctgccccaagaatcacataacctcctcttcctgggcctcagtgtctcatctgtgaaatggtcataaaaatatactgtttgaaggaagagcagcccaaactcctccccaaagctcctccctcccctccagcagaagcccctgtggagcacctgcccctctctcctttgatctcagagcctgtcccccaccaccccagccatctgagtcatgagtcctgtgttcccagctcatctccccagccgtgtgggggctgcacatcctgtgggctccatgttcgctctgctcactccacaatctctgagcctctgctgtctgccaagtgctcgttctgggccctggggaactctccctccgcggtggggctgctttgtgctgtaaactgatcctgggcgtccagggtggcttagttggtgcagcagagaggcaaggggcagagcactgtacccccagctcagggcagcgcgggtcacctggtcaccctaggcaggatcttcaaggagagagggacccagggagggagagtgccagggagggaggcaggcaggaagagagcgggaggagggaggcctgacctggcctggcgttttgtggggtgtgggggggtgcatcaggagctgggtgagttggagccggaggtctaaggtggggacctgggagctcagaccagagcagccaggggaggggcggtcaagggctgtctgtctgtccggggaagcttgggttgcatcctcgtggagacaaacaagttggcaccaaggcgagactacctgcagccaggtgagaaaggggagtgggctggggagctcggaacaggccttgggagggagggagatgggcgtgagggctgaggggcagcgcaggggaagaaaggttggagggctagagagacacctcccctcctccccccaccactccagggcagggcaggggcagccgcgggctgg

SEQ ID NO: 14302 - DNA, 1535 bp, Artificial sequence
  DNA replication origin
gggccggggctgaggaggccgccaagatgccgcagtccaagtcccggaagatcgcgatcctgggctaccggtctgtgggtgagtggccggtggccgcgcggcctcctcgcgccgccggggcctcgcctgggagccgggtcgcggccgggcctgcgaagtttggagccggcgcggccatgtggcggggcgggcgggggccgcgcgtttcgtaaccaccattctgagcggaggtggtggcggtcggggcggcgtccgcgccggtggaggagccgcggtagctgggcgccctccgcgggccgggcgggcaggtggcggccgggcggagggcgtgggaggcgcggggcgggggccgtcggccgccgaggagtccgggtctcgtctggggaagtgaggcggcgccggggagccgcgctagaggctgccgcgagggagtcacacctgcctccccgccttcgccgcgggcgcgcgtgaccggggctggcggtctcccccaccccgcccccgatgtaaggaaaagaaagtccgtgggattttaacaaaggaagcagcgcctcggcttcattccatctgtggtgaagtttacccttgtaaagaaaactagggatttagaggacgtttgggcactgaacgcaagttttctgcataggaaacctaggcgatcccccaaaagaggtccctctggaggccctcgagatgctgctggcggcctgggtaggaagacagagaaaaaggaatgtctgatctctcggtgccctatttttgttcgggaaggaataaggtcaggtacttgcaaccaggctgttgaagtaattccaaagtctttttgttttctttttcttcccccaaaaggttgacatacatttgaaacagttcctagcagtcgccttattgctgaataaggtggcttagggtcgggttggggggcggacggggtgttacagaacgagcggttttctggcctgtgtgaaaccagagcgattgaacttagacacgcttcagggtgaggctgtattgtctcccgacatccggaagcctggagaaattagttcatcttttcgggctgttttgaagtaactgtctatagaaggcgtgcaccgggccacagttgaggggatggggaggtgaaagcgagggttccgaggctcccgtgattgcggaacggggtgactatctgtcatgggaagcttgtacctgcctgccgctcactggatgcactccccaactgcgctttccaccgcctgtgccagggtctgtgctctttgaccaagatcagccactgcatgcttactcatccttttaccacctctccgtcgagagccggggggaaattaagggctgaaagaagcttggctagagatgcggggtgcctagagtcgtaggggaactcttgtgcgatgcggtgctgaatccgaggggatgcataggtggcagctttaacagctgcagccaggaagtaaccatgaatcaaatggaggggttcaaagtcactaattgttcaaatatcaacatggaacctgggatccagcctttattgg

SEQ ID NO: 14303 - DNA, 1210 bp, Artificial sequence
  DNA replication origin
gccaccacctccgctcagaatggtggttacgaaacgcgcggcccccgcccgccccgccacatggccgcgccggctccaaacttcgcaggcccggccgcgacccggctcccaggcgaggccccggcggcgcgaggaggccgcgcggccaccggccactcacccacagaccggtagcccaggatcgcgatcttccgggacttggactgcggcatcttggcggcctcctcagccccggcccaaccacatcaaccgcggcggcggtggctcctgctgctgtgatcggcggcggccgcgccgggagagagcggcatacagagcaggggcggcggcgggcgcggctgcctctcgctcgctagctcgcgcgctcccaaccgcccggaaccgaccgcgcggcggcgcccctcccccccacaacacgcccacgtgaccggccggcgtcagcaccgcccctcttcgcgccgtggcccgccgcctccgccccccgaaatacgcggggggtgcgtcggggcgacgttttactttaaaggcaaaaaaaggggacgccgcgatgcccccagaaaagtcacgactgaaactcgctgcgtcatgaccctcccaccttcttccgccgctttttaattacgccattctccccgagcgccgattggacagctcctgcacagccgcgcgatgacgtgtcggaaactccatctcccattgggggaaacaaggaggcggggaggggggggcggggctgcccgcccgggagctaaaaatacacctcgctgctaccgcgctgttgggcgccggctaggtttgaaggcttcaaacttccaaccggttaggggcgggcgggagaggcggagagacaaacggtggctccctggtgattggccagaacggagcgcagggcggggcaataggtgggaggtgcggtgattggcgaaacgctaagcggttggcgggttcgcgcccgctgagcccgtgaagggcgcgaggcgcgtggcctgggcgggtgggctggctcctccctcggggttttttgaaaattctccttgagctgcgttagcgttcgtgtctgggtttgaggatgtagtggtgactaagcgtcaccgacggccgaaggactgtgggaagcatggagtctgcgttaattcaaagtgttaggaatttcattaaaaacagggcgagcctcgtcagttctggtgtccgcttcgcttcgcgcggagct

SEQ ID NO: 14304 - DNA, 972 bp, Artificial sequence
  DNA replication origin
gtgcggtgattggcgaaacgctaagcggttggcgggttcgcgcccgctgagcccgtgaagggcgcgaggcgcgtggcctgggcgggtgggctggctcctccctcggggttttttgaaaattctccttgagctgcgttagcgttcgtgtctgggtttgaggatgtagtggtgactaagcgtcaccgacggccgaaggactgtgggaagcatggagtctgcgttaattcaaagtgttaggaatttcattaaaaacagggcgagcctcgtcagttctggtgtccgcttcgcttcgcgcggagctcggcgcacctcctggaacagcgccggggcgggaagccggttctccgccagcaccggggcggctggtgcggcgggcaggcccgagccgggtgccaggaacgcctcgggccgcggtgtggacgggcggagaccgtggtgtgggcacagccttcccaggggtgcagtgcagaggggcgcgggaagggaagcccggccgggaacgcaggtgccgttgagggaccagcctgcaggcaggcccggcgtggtggctgctggagggcttggcacttgccgagttagcagagactccgccgcgccggggaacccgcccctattctgcccaggctgtttggcagtggggacctgcagaggccgggcatggcccttcgccctttgccagtgatcggtggggaggaatgaagccaggggaagctgagtggcaggccttgtattccagcgtaggaaggtttagaggtgactggagtcgacttggaacacccaacccaagagcgactccctccagctttcccacggaagcactccgatgaggggctggggtgtgcattcttgtcctcggggatctacagatggaagccccaggcagccagccagaagtgatcaatgtctggaagttctatgtttccatgaaatgttgaggtttacgctatagttattttaagtattttaaaataa

SEQ ID NO: 14305 - DNA, 1466 bp, Artificial sequence
  DNA replication origin
gcctcgggcgggtgggggcagcgctcccgctccgcccccggcccccgctgcccgcgtcccctgccaggcccctcctcccggcggcgcggcagagccaggccccagcgctcggccggccgcgagcccgccggccggggacgagcgtcgcagctcatgctgatcgctgtcctcctcctccccctcaggcggcgctggcggcggccctgggacccgcggaagccggcatgctggagaagctggagttcgaggacgaaggtgagtgcgccccgcccgctgccggcccggcgctcccacggcccggccgcccgaggaccgggacccgcggggaccccgcgccccatctccggcgctgccccacggcgagctgcgtcctgcggaagcccaggggccggggcgggaaccggggcggggatgcgggcgccggcgagctcgggctgcggggtaccgggcgtccgcggaggggacgcgagccaggctcccagagcgcagccctgagcccggcatccacacggacgggcggcccttttgtccttactcgccgaactcgaattacagcaaggtgtcagggagcgctaattgtttgtgcttgtcaccatgcactcggaggcaaccccgaatcatacccacagtccagaccctttaatcatagactggtgcccttatctgcgcctgtgaagatatgaccggtagggtgtgtcttcttttttaatggggaaagttaaataggaaaacctgaagaggttattgaatcggtgttgagttcaggcgaccctctcactccgtcatttctgtcgcctctcctctcacttggttgttttttttccctctcctgtcttcttcttgtatcttacaggtaaataacttggatcttatttggaggctgttaacatttgaaaggcatgagctcgttctttggcaaaattaatatttaaaatggaatgtgacgagctttcaccaggatcttattttgaagctgttaacatttgaacgggatgagcttgctcttacgcaaaattaatatgtaaaatgaaatgtgatgagctcagagtcgggaaagaactttatataagatgcttgacaattcgaggacttgaaaaggcgttcacactgtcttgtgtgcttccattatttatttagcaacttctcttttttccaggagtattgatagaataaagctctcgaaacaaagaacgtgccatgtggatgctgtcccttgtgccaactttactttaatacctctgttcattcacagtcaggcaattacttaaataagcctgcacagccagcatggacgtgttaacccaatagaattagccgggtgcctgttatctttgagattcactgcagcatttcacaaacatgttagctggaagagaacgcgttcatagtcattgtcattaaaagtgtttgtctgtatttattggtaacaaatggtgcatttcagaattttaccggacttaatttgc

SEQ ID NO: 14306 - DNA, 1127 bp, Artificial sequence
  DNA replication origin
ctcctccagtggctgcagacagccgtttgtgaccacaaggaaaggtagtggaagcccagatggacacagagagaaagaacacagacttgctggtctgggacaagcattgttgttcaagccagttcgcgtttgagtttctgttacttccagccccaaaagcaccctagataggagagtctacctaatacagcaagaccatggccctttccagaaagggtggaggctgctagctcaggaggtcggtctataggcaattaaatctctgtgggtgtaacacagactgtgttcttactgctatttgtggaaaacaattttcttaaaatagatagaacagaccttgacaccctgaagtcaagcactgacagcctctgttttgaaaacaaagcaccgtcaagctctagaaaatgcatgcagggctccagagcccgtccagatgagcagaaatggcagagggggacagagggggatgaaggaggagagaatggaggggatggagggggatggaggggatggatggggacagagggggataaaggaggacagagagaatggaggggatggagggggatgaagggggcagagggatggaaagggatggagggggacaggggattgaggggagagagggcaatggagggtttggaggggatagaggggacagaagggcatggaggagaatggaacgggagggagagggtcagaggggatggttggggacagagggtagtggtggggggaatggagggggatggagagggatggagcggggtaataagggcagaaggaacagaaggagatggagcaggcagaggggatggagggaatggaggagaatgaagaacagaggggggtgaaaaaggacagaccagggtggaggggcatgaagggggcagaggggatggaggggacacagagggcagagggggacagaaggatagaggatgtcagagggctggatggggcagcctggccacctacccaggcatgggagccagaaccctgcagccgcccagcactcaggcttttctggggtcccatccctgcagccacccatcctgcatcctgaagcgggggtcctgtcccctctctgcatctcgaaaatgccccttcctgcttcctctgccatc

SEQ ID NO: 14307 - DNA, 1554 bp, Artificial sequence
  DNA replication origin
ttttttgtttttgagacagggtctccctctgtcgctcaaggctgcagtgcactggcgcaatctcagctcattgcaacctccacctcccgggctcaagcaatcctcctacctcagcctcctgagtagctgggattacagttgtccatgcccagctgattttttttttttgaccatttaatatgaaaagcatttagattctctgtttatagaatatcccagttagccactattccacctaactatgggaatcaggacaaatcctgagaataaatttacaaacaagagagtcttcaggcagggggtggtgtctcacacctgtaatcccagcactttgggaggccgaggtgggtggatcacctgagctcgaccagcctgggcaacatggcaaaaccctgtctctacaaaaaatacagaaattagccaggtgtggtggcctgtagtcccagctactcaagcagctgaggtgggaggatcacttgagccccagagatggaggtggaggttgcagtgagcaaggtgacactactgtactccagccagcttgggtacagagcaagaccctgtctcaaaaaaaaaaaaaaaaaaaaaaaaaaagaggttcttcttcaagtggtgggtgctgtgtgtgcaggtctagggtgggatgggggctgagagaagccagtaggaacaacacacacaggcaccagggtggtcctatcacaaggtgacataagctggtcctgggtggaggcccgggtttggtcacagctcagtttcccgcaatgtggacaacgacttggttgtccaagcctcgttcccagggctgagacaatcacgacagcagcctcgagggtgtgaaccggaagaggagccgaggccacatgggaggaccggagggaggggtgggattttggagctgctggaaaggtgagcccggacctggtgcatggacgtgctctgtttacagcatagggagcttgctggggagccgggggagagggccgagccaatgcaaatgtccagtcctacagggaaacagagacacataggggagcggggccccaggagagcttgcagagtgcccacaaggccgaagcaccataagcaccatgcagatggataaatggcccggagctgaaacctgccccttaacagaggccctgacccagaggaggccctgacagctggctaggcttcagagacgcagtgacagggccggggaggtgtccagtgcccagagacagaggagaaggggtttgaagcacagagacagagggccggccattcacttgggccaccatgagggtgggggtcacgggggaagttgagccatgagcccctggagaaccagtcatgaaaggccagtttaaccatatttgatgagcaagggggaccccaggattatcctgaatggggttccattctgtattctgaatccaggccagtggagtcgggcatccagggatcaggcctgaggagggagccctaggaagcagccctgccagtcctgtctctggaaaatggccgaagcatgctggatgctgggccctgtctgacccctctcaccgggaa

SEQ ID NO: 14308 - DNA, 851 bp, Artificial sequence
  DNA replication origin
ggcaagaagctgactgtgggggaagcgtcagatctgaccagggccatttgggcctctgcagcagaggtcaggccggggccatctcactttcacctcgtggctggttttttcctctctgaagtctgggtggccgatgactggagggtgtgtctgcagctggctggccgggccgggtgtggggcctcggggcctttcccttgagtcggtagtgcccacggagggctctatgctggtattggctggtggtttggcattttatttgcgagccaataaaacctccccagaaccccagagctggccttttcacaccctgtcttggtagaatcataatgtcagagctgaagacagtcctagaaatgaagggctgttccctccgtacaggggctggaggtggcgcatcaggatgtcattcccttatcccgaggtcttggtgtttactggcccccgggccgtcctcagtcatttacgccccagcttatgaccactctccccgtgtcagctctgcgaaggggaaggacagaggctcatggaatccagccctgggaggagccggtgactcaggggtgaaaaagacgcggtccttgccgagctccaactgggtgtggcaggagacaggccctcagtgacaggacagggtgacaagatgccatgacagacacttgcacgactgttacccagcgtgcgaaggcaagaggattgccccactctgctgccaaggctcagagacgaggctaggaggtgatcgtggtgcttttctaaacctgtgattgcccttcacgtactgtgaatgttccctgacagtcaaaggaggacatttggccatttcctgttgttctctaagcactgccagg

SEQ ID NO: 14309 - DNA, 1280 bp, Artificial sequence
  DNA replication origin
aggtagtgatggtagtgatggtaggtagggatggtagtgatggtacgtagtgatggtaggtagggatggtagtgatggtaggtagggatggtagtgatggtagtgatggtaggtagggatggtagtgatggtaggtagtgatgatggtagtgatggtaggtagggatggtagtgatggtaggtggggatggtagtgatggtaggtggggatggtagtgatggtagtgatggtaggtagtgatgatggtagcaatggtaggtagggatggtagtgatggtaggtagtgatgatggtagcaatggtaggtagggatggtagtgatggtaggtagtgatgatggtagcaatggtaggtagggatggtagtgatggtggggatggtagtgatggtaggtagtgatgatggtagcaatggtaggtagggatggtagtgatggtaggtggggatggtagtgatggtaggtggggatggtagtgatggtaggtggggatggtagtgatggtaggtggggatggtagtgatggtaggtagtgatgatggtagcgatggtaggtagggatggtagggatggtagtgatggtaggtagtgatgatggtagtgatggtaggtagtgatggtagtgatggtaggtagtgatggtagtgatggtaggtagggatggtagtgatggtaggtagtgatgatggtagcgatggtagggatggtagtgatagtagtgagggtaggtagtgatgatggtagtgatggtaggtagggatgatggtagcgatggtaggtagtgatggttgtgatagtagtgatggtaggtagtgatgggtagtgatggtaggtagtgatagtaagtagcggtggtagcatggggatgctgccgtgaagcagaggaggcttcacaattctgattgtgaaggcttcagaactctgatcttctcaattcaggtggaaacgtgtctttaggatagaaaacaagtaaactgcaggattcccttcaaggtctagttcttccctgtccctactttgggacactgctgaacaggctccatctgagttcaagaatctgggtgtatctgtgcaggccaacaagccaatacagcaggcatttgaaagacacacatacacgcaggccatgcttttagtcatgcaaacacacagtgtctatatatctatgtgcacagatttctgggcatgaatatatgtgttccaagccccagtgtacctacaagttttgatataaacctacacacagacgtgcagcatatgtacacagataatacttaagtg

SEQ ID NO: 14310 - DNA, 1379 bp, Artificial sequence
  DNA replication origin
atgagaattaaatgataccctatgtaggtttgccatgatatgccatgtagcaaacttgagtatgctataatttttaagaaatcttctttcttcatttgctggagaaaccccaagggcagaatgtgtggcctgtgtctggcgagtgtgtaggacttacgggtttttgtgtcttaacctctctccagagaccgccttactttatcttcctgtggctactgtttttcctcctttcaaggtattttatgtaactgcattgcaagcatccttttggaaatggagacagggtgcacatagcatcatggagctcagctttcgcctaagcgaggacacagactcatctgtgaggtccatatggtctggagcaggtgtggctctgagcctctacccatccctgtggttcctgccgcccccacccctctgcctgcccccacccacccacttttcccctatggcacagcccatgcctctctgcctgcagcctctctgcttggcaaaaacatcccagtgtctgcagtggtatgtgtggaaggtggtgtgtggagtgtggtgtgtgtggagggtggcgtgtgtggagggtggtgtgtgtgtagggtggtgtgtggagggtggcgtgtgtgtaaagtggtgtgtgtggagggcggtgtgtggagggcggtgtgtgtggagggtggtgtgtggagggtggtgtgtggagcatggtgtgtgtggaggatggtgtgtgtggagggcggtgtgtgtggagcatggtgtatgtggagggtggtgtgtggatggtgtgtgtggagggcggtgtgtgtggagggcggtgtgtgtggagcatggtgtgtgtggagggcggtgtgtgggagggtggtgtgtgtggagggtggtgtgtggagggtggtgtgtgtggagggtggtgtgtgtggagggtggtgtgtgtggagggcggtgtgtgtggagcgtggtgtgtgtggagggtggtgtgtgtggagggtggtgtgtgtggagggtggtgtgtgtggaggatggtgtgtgtgtagggtggtgtgtgtggaggatggtgtgtgtgtagggtggtgtgtgtggaggatggtgtgtgtggaggatggtgtgtgtggaggatggtgtgtgtggagggcggtgtgtgtggagcatggtgtgtgtggagggtggtgtgtgtggagcatggtgtgtgtggagcatggtgtgtgtggagggtggtatgtggagagtggtggagggtggtgtgtgtgtaaagtggtgtgtgtgctttccccagctccagccctggagtatggagccctcagccatcctggaactgggctgcgaggccatccctctgctcagatgtgtcctttctttgactgagccctccttccgtgactcccccgctgcct

SEQ ID NO: 14311 - DNA, 1246 bp, Artificial sequence
  DNA replication origin
ccagccagaagaggcgttcgctgcgcgtgcacattccggtgagtcccagcactcggtcccctgctccccagccctcctgtcgctcccgtccccggcgccgaagcggttaacgctggacgccccgcgcgcgccgtgcgtgcccctcctgtcacttcgggcggcttggggaaagggtagagggacagggcccgagctgggctggcggagccggggctcaatctctctctctgcccgcgtgcagccagggctggggctccgcctggggcgggggctgggcggctgcagactagagggggcgccgggcgcggcgggtgggcggctgggcgtagcccggtatccagccgggtgcgggtgcggggggcggtgcgttgtgttgttttgctgaaaagggacggtgtggactgcgctccggggaggtggagcccgcgctcggctgctggagacggagagaggggaggggagggaggagaggggaggggcggtgggtggggaaagcagcggggcgggggttggggggagctgtgtagctgcgtcttccaatgcaccccctccgctccagtttctctccgggcgtttctgggcctggagcgggggtctcctctgccgccgttcccttcccccgccccgggagtgtactttgggtctctgtggtatttgggggctcggagctccctaatccgtgcaggctgcattgaacttcagccccgtccgcgccagccgcccgggaggacattggcgactcggatctgcctgcggcttcactttgtccagccagaggggcggcgggccgcgtagtggttctcttttcggaaggcgccccggtagcccgcggccactgttcctcgcctccacgtagcggggtagggcggtgggaggtgtggcccactgggtcacaccctccgcctcagccaaccaagtaaatgtttgtgtacacacacacacacacacacacacacacacacacacacacacacacacacaccagagtgctccgtagagaaagttattttgctctcccggggcagggtgggagtgcgcagtgaatgggctgtccggacccctcattaaagctaatccttcccgacagggtcaggcgcagctggcatggccgaggcaggccactcacttcccactgtgaatcccagggcgcactgccccgtgtttgctgagccacccttcttttagacgccccgctaaggtcctcctgtgtaaactccggcccacacgtgcctaacgcttgggtgaa

SEQ ID NO: 14312 - DNA, 905 bp, Artificial sequence
  DNA replication origin
gtttcgagaagcacgtgctacttcgcgcgcagcgcccccggagactgtgggcttcctcgctgcctggtctacggcagggcgggcgcgggggcgtgtttcaaagggtagggcacacagtgagacgccgggaggcgggatggatccgaaaccagctcgcagcgagtcccaagcggctgcggccgccgcaggggtctgggcgcggcgacgagggcggcgtggggcgacggggagcgggacggtggcgctgcacgccgcgcacttcctgttcaacacgcgccgcctcccaccacccgcgctccccgagcttgcgtcggtgccaggcccggcccctcactgtccccttgcggtcccctggggccgcggcgcggcggggggcgaggagcgggcgccctgcccttcttggcccgctggactccgggcgccccctccggcgcgcagggccgcgagcgccgccgccagaacttctgccagcggccgcccgtagcctaattgcgcagagggctcgccttgcacctcctcttcccccgccgccctccctctcgcccagaaaggaggacggacccagctgcaggctccgagctggtttattctgcggccgaggattacatttatgcacgaacgggcttactggttccagattccccacttgggcacaggcataggaggcttgttttccaaattgctggttttaattgcacctgcctttcagattacctctgggaatctgtgggaggagccgagagggtggaaaatgtttcttagctttgcaaaaggaagaaaactttgtcacccagcgggagacctcagccacgagtaacccggggagacaccagaaccgggacgggctttgactgatttgcctacgagggttccgtaggaaaggacgcttgaattcggcgcttcgg

SEQ ID NO: 14313 - DNA, 1523 bp, Artificial sequence
  DNA replication origin
gcaccgacgcaagctcggggagcgcgggtggtgggaggcggcgcgtgttgaacaggaagtgcgcggcgtgcagcgccaccgtcccgctccccgtcgccccacgccgccctcgtcgccgcgcccagacccctgcggcggccgcagccgcttgggactcgctgcgagctggtttcggatccatcccgcctcccggcgtctcactgtgtgccctaccctttgaaacacgcccccgcgcccgccctgccgtagaccaggcagcgaggaagcccacagtctccgggggcgctgcgcgcgaagtagcacgtgcttctcgaaacaccgcagcccccgggtcccgccccgcccggcgcgcgcactcgaacccgcccagagagcggtgcgtggcgctgggtgcgagcagggtctagccacccccaccctcaccccaccccaccccaccctgcttttttcaggttcatcaaggtttgcgcagtggatccgcggtaagtgcgtgtccccacgccgcgggaaacgtggggctcctgagactgcggaaagaattgggagaaggggagggctcgaagacccgggcgagggttcccggtgcggcccaggtcctttagagccccgggtgggcatccagtaccgcctgctgccgagggccctagaggggttgggggagggggctggtgtgtcccccacccccagatgcgccccaggatggcgcgacctcggctccctggtggaaagtagggggagtgctggcttgggggtcgcttcccctcctgctctagtttctgaggatgtgatgaccccaaaggtcattggcgctcccagaatgctgacgtcagctcagccgctccgagtaatcagtaatgcagggaggccacccgcagaaagaacgcgacaggggtcgctttggggacaccatagggcctttactccttttgaggtgcgtgctttcgcaggactccctccccagaggaggaggcatgatcagcccacccaaaggatcatctcttaggaagcaggcgtgcgcccacgcagggagaagcatccttcctttcagctgcttgccgggtggcttttccaacccgagttccagcagcttgcacaaaatccttacagcttgggtggttccctggctcataggggtgggtttatattctttctccttctcctctgctctctggtccagaatgaagccagcctggaagatccccagtctcgagacagagcctgacaggggcagatgcactggaaggaccctgtctgggtttagcaaccaagcagccatcctggccccacaggtgtgggacttctgggtcttctcctggctggcttcttgctagaggatttcaagagacccagcaagactgtattgtcccactgaatgctcaagatattggttagaagtagaaaaggggagggggtagtatttagcctctgtccccactaaaaattattcccaattgtcatttgtgtcatctgtttagcttacagttttaatccttgtcaaaatgatcatttgccagggtgcataa

SEQ ID NO: 14314 - DNA, 2779 bp, Artificial sequence
  DNA replication origin
cctgaaagcctgggtgttttcactctacctctgaagcccactcatggtgaagtaaagaggggtgtgggcccttcctacctctgggctagtaatgagcagcctcctggaaaaggggcacccgagcaccccattacccacagacagaagggacacagaggcccgccctcagggccccccccagcaaactcagtggtgggtgtgcctgaggttgggggctgtcccttcccaaggagtcccaaagacccctttgctgcataaggaggcaaaggaactatccagggagaagccaccctggggccccacgactggagttgtgacatctgctgtaccttctgtgaccataagggtcacatgggacccagacacctggggctgagcctcctcactgctcctccctcacctccctctgctccggccggactttcctcctgccgtgtggctctctgaaatgcccatcccagcaggcacgaccaagccaggctgacatcctcatgaaggaacttggttccttccttctgcggcctcctctgatttgtggcatatgacagtgatcataaggatgctgcctcatgggcctcctccttcaaggcttaaaataaaggactgcgtgttctgggtgctgattgtgtggttgaggaagccgaggcaggtgcacagtcatgctggggctggtgggtgactggagcccaggacctgcctggcttcagggagaagcttcatgcagggtgtctgtctagcagaagccggctatgttgtgagcagtggctcagcatggctctctgtggccctgtgaccttgaatgagtcactcttcatctctggactcagtatcttcctcagtgaaaagtggggggtgggggggtgagggtggggatgacagcagagggcccccaaggctcctctgggattctgtagcaaggatagtgatgctgcaccctcagtttctaagtcacaggtcagaaggagctctccggagccctcccagaggccaggcacacagacacctggcgccgggagagcacagctgggcccgggcaggctcctcacatcccacagctccctctaaagccgttctgccagcttacacggtgtgtcatgaaagcctggtgatgcactggccgtgattgcagatgagctactgtctgccttaattaagcttacagggactaaatgtggctgctgacacgctgaatgcaaattacctctgattcacatttggaatggctcctcatgtcccctttctgtgcataactgtcatgcggcaagatctggaattgttttttctggagtttgacgcttgagggggtttaactctggggctctgcccaaatcccaccattcatagcttttgctttagtctgcatgacaccatgactggtcaaatgaaggagtcagtcctaaaagaccaaaagccccctgcggcctgggagtgagcgttgcacaggtgtggtctgaccagtgtcagaacatggacagaggctgctctcagatactgggtttctgtaggacctgcacccgtgaggcctgggccttctccggcaggccctcaaaacatgttgaggcctgttgagtgtgctgaggtctgaggtctaagactagttggctccaaaaataaacaatggagtcagtcttgaaaagttataacagaaacaaacctctcggcaaagaaaaggaggagtcgttgcctaaaagcctcttatggagcaaggcgagagaggaaaataaatggggcaagtcagtgtataattaagcgtaacctgaagggtgtggcacagcccgtgaaagtgttgggcacacagcaaggcagaggagcggggagggcggaggagcggggagggcgaacaagcagggaggacggaggagcagggaaggtggaggagtgaggaggacgcaggagcagggagggcgaacgagcggggaggacggaggaacaaggagggcagaggagcggggagggcgaaggagcggggaggacagaggagcagggagggcagaggagcggggagggcgaacgagcggggaggacagaggagcagggagggcagaggagcggggagggcgaacgagcggggagggcggaggagcggggaggatggaggaggggggaggacagaggagcgggagggaggacgagcggggaggacgaaggagcagggagggcagaggagcagggaggagacaggattggggagggcagaggagcagggaggagacaggattggggagggcagaggagcagggaggatggaggagcagggagggcagaggagcgatgagggcagagaagccaggagggcggaggaactgggagggcggaggagcggggaggacgacggatcggagagggcggaggagtggggaggacggaggatcggagagggcggagggatcggggagggcttgagcccttattgcagcttccaggtggggcctggaaggagacagatgccggggagatgtgggagagaagagagggtgttccaggcagcagggggcccggacaaaggcacagagggcagctaagaaagacctgggtaaggaagcaccacaaaccaggtggcttaaaacaatagaactttcttttctcacagttctggaggccgaagtctgcagtcaaggtgtgggccgggcccgctccctctgaaggctgcatgggagggttctccccgcctcctccagctcctcgtgctgcaggcagcccctggcgtccctccgcttgcagagcatcatgccaatctccacgtctgtcgccacacaagcttctccctgtgggtttctgc

SEQ ID NO: 14315 - DNA, 1349 bp, Artificial sequence
  DNA replication origin
ggttcaaaccaatacaagagccttgcaggttgtttgtagcactaacaaaggataaatgcttgagaagatggataccctgcttatcctgatgtgattatgcattctatgccatatcaaatatctcatgtacctataaatacatatgcctactatgtacccacaaaaattaaaaataaatttttttgagatggagtctcgctctgtcacccaggatggagtgcagtggcgtgatctcggctcactgcaagctctgcctcctcgattcacgccattctcctgcctcagcctcccaagtagctgggattacaggcgcctgccaccacgcccggcttattttttgtatttttagtagagacgggatttcaccgtgttagccaggatggtcttgatctcctgacctcgtgatccgctcgccttggccttccaaagtgctgggattacaggcgtgagccaccgcacccggctaataaaaaaatttttaaagagatttattctgagcgaaatgagtgtctatggcccatgacactgccctcaagagatcctgagagcatgtacccaaggtggtgggggcacagcctagttttatacattgtaggggaacatgagtcttcaatcaaatacaggtatagactagttcgggcaggaaaggtgggacaactcaaagtggcggcttccaggtcatgggtaagatgagagacaaacggctacattcttttgagcctctgctctgccttttactgaacacacaatttacgccatggggcaggcagaggaatagccacttgtgccttagtctggctcagtgaatctgcatttttacataaatacagggcagaggaagccgtcagacatgcatctgtctcaggtgagcagaaggatgacttgagttctgtccctgttcctcacctgcgaagacaagctgtcaatttacactgccagggtgcaattccacacaactgtttcagggtaaagatgtggaggtccacagcgaatttcctcctggccaaagggtgagggagctgtgtggctttttatctttgcagctgtcttaggaacaaaacttaggggcaggtttgcctgacgcagctcccagcttgactttggcttagtgatttggggtcccgagattaaatttccttccacactattctccctagttttgtgtatgtgtgaactattctatttctgggcacttttaattttaaaaagtggacaatactgatctggacttcattttaggaaatgctgggggaggctgcaggatcaggtgtgcctccgtcctaaatacgcgaaaacgaggccagcgccctggtcctcgcccccacgcccgcgaacaagcctcaggagac

SEQ ID NO: 14316 - DNA, 912 bp, Artificial sequence
  DNA replication origin
gcagccccaccgccgctgtggcctagttgccaccacagcccgggaggagcccaggcaccgtcacccccgccgtttggggaacaaatggttcagggtaagcaacagatacggtttcatcaacaggaacgtcaccaaggaagatgtgtgttcatcagactgccgtgaaggagaaccccggggaggaccctggcggcgggggagctgcggaggccgcggagtccgatgttgagggagaaaagggcgaggcggcggcaagtgttccagggcctggtggggcccaggtcaaggcagtaaacctgcggccaccgtaaccactgcagacgcgggacctccccgccgtcaccggcagaatcaccagaatcctccgtggggaacggaaggagggatgagacagcgctgccgcgggccaggcccaccacgcgggccccaccgcagagtcccactttcctccatggaggccgcagttctccagcctccggggcggccgggagcagcgatgcgggggtgacagcgcggggagcggggacaccagcggggcagcgagtgtaccggggacgcagaccacgattccgcaggacccacctcacccaagacggcctgtagaggacagcgaggaagaggataaagacaatccgggagatgagacccaaggtcaccagccacctcagcaccggggccgccgcaacttcgattaccgacgcggtcgcacagaaaaccctaaaccacaagatggcaaagacacagaagcagctgatccaccagctgagaattcctcgctccaggctgggcaaatgcggctgctacctctaccatcaccccgtttagtcatcaaacaagaactaggaaattccagcgataagaaatgaacgaaaattggagctgaagaccctaagtgcttgcttttcgtccact

SEQ ID NO: 14317 - DNA, 983 bp, Artificial sequence
  DNA replication origin
cgcccgggctcccgccggcgcccggctccgcacactttacttttcagtcgggccttttcactgggtcttctccgcgactcttcttttggagaaatttctcgtagccgcgtcttggcctagctggatcattgagaaaacaagcccggagcgcgcccaggtagtccccggacggactccgggcgaaccgccgagccgtcggcgctcgggaaactctcggagctgtcaaaacgcccgggccaggtggtctcggggcgcgggctgggggcgagaagaaagcggccgggcgagtgcagcttttgtttgtcagcgacttgctcctggaacttttcctggtcccaaacctgtgttttcttcttttgatgatatattaggaagccatttgacttcttcctcccccctcccccaacacccagcaccgcactcccgggctccgaaagcacaagtcctgtgggatcccccagcttcggggaacggcctgcctaagttttggagacgtagccagcgtcccctcgtaaggcagaataccaagagcacttattcggagagagtgcagatgtaaatgtcgcttccctcgtaagtcttagctgtaaggggcttgggaatagggtcgcctgcctttgagcgtacagtagggctggaccccagcttattagaggaccagaaatgtcttcttacagaacggttatttgacggctttgcttgtaaattaagacaccgttttagtgccagcgaactgctcggcttctgtggctctcgcgtgtgccgtggaagaactgtgaatgtctctcgaagttgtagaatggcgtgtgtgcttactcatttcgtgagatgatattctcattgaactgtcgggagtggaagggtgcgctgggacgtgaaggaagccagcacgtttatggataggctgtttctttggttcgggtgcattcacttagtaatagtattgttgtttggtgatttgtagtaaaaatagtagcgtgaac

SEQ ID NO: 14318 - DNA, 1234 bp, Artificial sequence
  DNA replication origin
tgggtcgtcctggtggacctctggagcctgacctgggtccacgtttgaggtctccgactttagtgaccctgggaaagttacttgagtttcctcatttgaatagccaagggtttctcgtgtttgatgccaaatgccttgtgcggggattggctccaaacctcagcctcatcagtcaatttatccttacgttcaagagcagccatttacaaaacgagctcagaaaattaaaaaaaaaatacaaactttaaatcgccagaatactgcataaactaaaagtaggccgggcgcagtggctcacgcctgtaatcccagcactttgggaggtcgaagcgggcggatcacctgaggtcaggaattcgagaccagcctgaccaacatggagaaaccccgtctctactaaaaatgcaaaaattagctgggcatggtggtgggcgcctgtactcccagctatttgggaggctgaggcaggagaattgcttgaacccaggagacggaggttgcagtgagctgagatcgcgccactgcactctagcctgggcgacagagcgagactccatctcaaagcaaacaaacaaataaaaacaaagtaaaagtaaattccccaggcaaagctgattatattgctgggataatcgactttgtcactgcagtctcacttggtactttaagaaactccatcttgatcctaggtctgggtcgatctgggcgttcctgctaattttctgttttaaaaacctaaagcaataaaaatgttgatattgacatttatcatttttatcctcgccctctgccttgttttgctgggagatctgttccacttggctgagtttagggagggcggggaagcgggggagaaaccgaggcgcagggtggagaaagggagaagccttgcagactgaacacatgagaaaacctggagaagggattcgctgctgcttatttcagggaagaaaaccgagaagtgaagcacagaggggtcaggttccgggagcggcgggaaggttgtagggggccccagggcaggtcctggagctcaggcagccggcaccgggagcccagctcaggctgcggggtgcaaccgggcaagagcgctcgggctgccgaaacgggaggagatcagaaaaaggagagacatggaaaaaaggagaggaagaggagcaacactcaagagggaaggaagaaggcagacactgaggaacgcccgcaggaacccgcagacaagcagagagccggg

SEQ ID NO: 14319 - DNA, 970 bp, Artificial sequence
  DNA replication origin
agccgccccgtccgggaggtgaggggcgcctctgcccggccgcccctactggaaagtgaggagcccctctgcccggccagccaccccgtccgggagggaggcggggggggggggggttcggcccagccgccccttccgggaggaggtggggggggtcagccccccttccggccggccgccccgtccgggaggtgaggggcgcctctgcccggccgcccctactgggaagtgaggacccctctgcccggccagccgccccgtccgggagggaggtgggggggacagccccccgcccagccagccgccctatccaggaggtgaggggcgcctctgcccggccgtccctactgggaagtgaggagcccctctgcctggccagccgccccgtccgggagggtggtgggggggtcagctccccgcccggccagccgccccatccgggaggtgaggggcgcttctgcccggccgcccctactgggaagtgaggagcccctctgcccggccacgaccccgtctgggaggtgtgcccagcggctcattggggatgggccatgatgacaatggcggttttgtggaatagaaaggcgggaagggtggggaaaaaattgagaaatcggatggttgccgggtctctgtggatagaagtagacatgggagacttttcattttgttctgtactaagaaaaattcttctgccttgggatcctgttgatctgtgaccttatccccaaccctgtgctctctgaaacatgtgctgtgaacactcagggttaaatggattaagggcggtgcaagatgtgctttgttaaacagatgcttgaaggcagcatgctcgttaagagtcatcaccactccctaatcttaagtacccagggacacaaacactgcggaaggccaaggccgcagggtcctctgcctaggaaaaccagagacctttgttcacttgtttatctgctgaccttccctccac

SEQ ID NO: 14320 - DNA, 1268 bp, Artificial sequence
  DNA replication origin
ggggctcctcacttcccagtaggggcggccgggcagaggcgcccctcacctcccggatggggcggctggccaggcggggggctgatccccccacctccctcccagacggggcggctggccgggcggggggctgaccccccacctccctcccggactgggcggctggccgggcggggggctgacccccccacctccctcctggacggggcgtctggccgggcagaggggctcctcacttcccagtaggggcggccgggcagaggagcccctcacctcccggacggggcggctggccgggcggggggctgacccccccacctccctcccggacggggcggctggccgacccccccgccgcctccctcccggatggggcgcctggccaggcagaggggctcctcacttcccagtaggggcggccgggcagaggagcccctcacctcccggacggggcggctggccgggcggggggctgaccccccccacctccctcccggacggggtggctgctgggcggagacgctcctcacttcccagacggggtggttgccggacggaggggctcctcacttctcagacggggcggttgccaggcagagggtttcctcacttctcagacggagcggccgggcagagacgctccccacctcccagacagggctgcggcccagcagaggcgctcctcacatcccagacagggcggcggggcagaggtgctccccacatctcaaacgatgggcggccgggcagagacgctcctcacttcctagatgggatggcggcggggaagaggcgctcctcgcttcccagatgggatggcggccgggcagagacgctcctcactttccagactgggcagccaggcagaggggctcctcacatcccagacgatgggtggccaagcagagacgctcctcacttcccagacggggtggcggccgggcagaggctgcaatctcggctctccgggaggccaaggcaggtggctgggaggtggttgcagcgagccaagatcacgccactgcactccagcctgggcaccattgagcactgagtgaacgagactccatccgcaatcccggcacctcgggaggccgaggccggcggatcactcgcggctaggagctggagaccagcccggccaacacagcgaaaccccgtctccaccaaaaaaaaacgaaaaccagtcaggcgtggcggcgcgcgcccgcaatcgcaggcactcggcaggctgaggcaggagaatcaggcagggaggctgcagtgag

SEQ ID NO: 14321 - DNA, 1368 bp, Artificial sequence
  DNA replication origin
caaggggacgcgggagagcgccgcgggggacgcggaagtctgacgtcacaggaactgggggcggggcggggaggcccgcacaccctattgcgcatgctcccgcctccccggccgcggcctggcgcagtgcgcacgcgcgcgggtgggcgggtttgactggccgtagagtctgcgcagttggtgaatggcgttggtggcgggaaagttgagtctctcctgcgccgagccttcggggcgatgtgtagtgccttccatagggctgagtctgggaccgaggtgagagccgccgggttgggagtgagggagatgggaacaaggccgccggtgggcgaggggagccgagggaacccgggggattgggaggcttggggcggcgcggcctggccgggctgggaccggcctctcggcctagacgcccgcgatgctggcaccctctgccacctctcacctgggccccaggggtccgcccctgggcagcctggagtcctccgaggtgggaggaccgggcggaggtggaggaagtctttctttggaagacttgctgcctgcccagatcgatataacatacgaggtctctcctcccaagagttatggtctaaaaacccctcacaaattaactaccgttggaaatgtcaagctatgcaagaaaagctagaaaaggggaggggtcgcccgttggagcatttggagcttttctggaacaggtggtgtttgcggaggttgcctcacctccctgtagcccacgtgtctctgcttagggcagctggccctcgccaccccctagtattcgtttccagcccaggtagctccagagccacacaagccggtggatgcccctcaagaattgaaccaagtgtccagcacttactgtgtgtcaactacgtgttaagggataggagtaagcaacaaaagacataacttctgccattaaagaactagtaagggaggctgctgtaagaattacagtattgcacaaaagtttgttgtccattagaggggcgggcatcatggaagatgcaggaggagatgactgaagtttcaaggaccatttgaaatggtttggcaaggagaggatgacattcagagcggagacagtcgggagtacatggattctgaattaagcaagagcatggctaatttagataactgcaagtatttctgtaaaattggaacaaagggagtgagggacaataggttgggaagtaagcgctgagcagtgggcagggtatgaaggatcttttatgcagatgagagaggaagcaatctcaaaagagtcagcaaacatttttgtggagggccatgtggtaaatatttaggctttgcaggccatgccgtttctgtcacagccactcaactctgctgttctaa

SEQ ID NO: 14322 - DNA, 1302 bp, Artificial sequence
  DNA replication origin
atgccccagaacctgatcattccatgctgagttgataaattgaactccctgacttttcaaagcagaagattagattttaaccttgttaagtgcgacagctataaaaggctgaccttgcaccttttgctttaatgtgttgccatttaaagctgtcggtagcattcagttggctgccccatttaacctgtcatcattaatagagacgggaagcgaagacagttattatcaggatttcattcactgtcaaaaagcaggagagctctcaggctgcagctgtcagaaccttagcagtcgcagaagctaggaggataatacaaatgtcaaagaggtgggagtaaaagaacagttacattgttgggctgagtttgttgtgaggggggggggaggggagggggagggggagagggagggagagggagggagagagagggggagggggaggggggagaggggggagggggagggggagggagagagagagagagagacagagagagagagagagaggagagagaagagagagaagagaggcaagaggggccccaggagtcaaggttagaagatgttcgggcagaagtgaggatactgagatgtggaagtgaggccctgggtcaccgtggacagttggcctgctgcgtgtcttggggctgggagtggaaccattttgtgcaagtgtgtggatgtgtgtgctgagtgctggagcaagactttctctgcgtggcatggaggtgaggtgctgtgggggtgtggagaagcaggggtgctgtgggatggtggggagagcgccaggaggtggagacctgtggggaaggactgggtggcaagggacttgcaagtgtcctcttaaggaattctgtttttattttgcataccaggaattttcagactgtttttgaggcttctctctggggcctggcccactggactagagaatcctcaagccccgtccctgcctccaggggcagctctgcttatgtctggtttgttggagcttctgtgcagaatttgcttggttgcttgaagaaagttattccctacttttttttcttaagtcgttggaggatattggtggtcctgccgcagcttcaggcggagaatgtgtggtgatcagagaatgtgtggtgtagaaagaggctagaggaggagcagcgaggggctgagaaaaagggcacacattttagacattcaatattggaagagttcaggtgtgaagaggtttaaggcctagggaagagagttaggctgcagctagaaaatataacagtgggctgggcgcggtggctcacgcctgtaatcctaaca

SEQ ID NO: 14323 - DNA, 1263 bp, Artificial sequence
  DNA replication origin
acctgttgccgtgggaggctggtggagatgtggatggcggagctctgccactgtggcaacatcgagtaatgtcagtgagcacctgcagagcgccaggtcccactgcgggcgctgagcagccagggcatgtcagggctgtgctgggagagccgcaagagcccagggtgggcctccgtgtggacaggagtgtgaggatctgggtccgtgctctccagtggtgctcggtggtgatggcagtgtctgtctctgtgctgcccagggtggccactgagcccctgaaatgtgactggtgcagctgaggaacagcgttttaaactttaactattgtgagttaaaattgccatatgtggctgatggccgtcctacaggacgactcagatcaactcaggtcggagtgaaggctggtgtgacctggtcagtgcagggaatgcagcatgggaggggaagggttttccagcagcaggatctgtgtgcagcactagggtgaaggagaagtagcgcaatcctgtgggtctggagggaatttagcctccctggacctcatgtttgaacatgggaatggggagtgtgaagcctgggatgcgcttggggccagattacacagggcttatggggaaggcacaggggccaacattatcaactggggctccgaggaaagacaggcatatccacctggaggggcctcgcatggagttagattttatcctgagggtgttgatgattttctgcaggagtgtaatgtgacccaacttaagttctagaaaagtgcttgggctgcaccaggggatgtggattggagatggagtctggatttaggaaggccattgtagaaccacgcggaggcaggacagtgcccgtattgggaaatggctgtaggtggctcatggaggaagccgggagaggagagaggctccagagcataggtgagagcttgacaagtgggaggaaaaggttcagggttcttgctgcttatctaggagggtggggggtcatttactgacaggagatacaggagcggggcacccttctgaggcagcggaagactaggtctagtttggtggagatgttgagttgcagttgtaggttggaggctttgcaggtctgggccagacatagagatttgaggaccaaaggtgtgctcacagaaataaaaggtctgcaaatggatgtcaccaagggagagtagcaggtgaggacaagacggccttagcctgaaccagcagaaaggtcaggcttttaaggatgagcagagaaagaagggca

SEQ ID NO: 14324 - DNA, 1147 bp, Artificial sequence
  DNA replication origin
tattcaacagatttagacataaactcagctttacgatggtgagaatatgatacgaacggccttaacttaaaaaaaaaatctggcaactagtatgtgaatatttaacaaacattacctttctaagatgatatgaccgctggctcagagttgctctttccaacacacctgaggaaacagcctctcacttctttgcggatattcatcagctgttcctgagggtttaacttctgtttcgtgaacttttaagccaagattagactaagtaacatgaagcttatgagtttgtttctgcatatggtgagggttggggaaaaaatgagagaaaagactcctgaagtggggtctgtagaagaggagccaatcagggctgctgaggacgggggaggtgaccgcatcgcttacagagggaggaagggtaaacgcagaaggcacctggtgcttgcgttgaccaactgcaggtgggtgggggactctctctgattgagtttccatttccatgtagcctaaattgaggagggaagaaggcgaggctttcttaggggttggggtttgggttttgccaggcaaatgtgatgatgggtggggcaggtgtcctgggggcaggcaggtgtagacggggtttctctgctgctaacatgagggaccacggactccaggtagggtgggagcagagggagatgagagattgggaggaatggaggcgtctgaggactggcggccctgggcttcaaggttaggaggttgtggtcctgaagaacgatactgattaagatttcagaggtggagcacctctcagtgataacagggtcatggaagtggtgattgtgtagagtttaaattcactggaaatggaagaatgtagggaattttgagagaagggcattggataggttgtctggtgggtgctggctcacgcaggacgctgtgggggtggagatgaaagtaagactggtccagctgcctgaagtcgtgcctcagtctcgggggtggcaaggagctgagcattgaccgtgagctgggcactgcgccgagagtcaccccacgttgggagtgatgctgtgtagcctcctttcacctgaaccgaaccctatgaagttggtattgctactcccattttccagacaggaaacctgtggctgaaagaaat

SEQ ID NO: 14325 - DNA, 2052 bp, Artificial sequence
  DNA replication origin
aggctctctcatcctacagtgaatcccagtggtcacgccttgtgctcctgagatccgaggacagcagtgtttgtccagacccttcctccccgccttgccctccaggtcgcaccctgatttctccaacttaatgtgcagctcctctcaagcggcgaagggcccgggctctagaaaagcagcgccagcttttaagtggaggttctctcggatggccctggagcagggccggtttcttgagttgggacgcaggtgatgccctcacccttggggcaaacgcacttcctgaccctgggggtcacctggggggtactgcaccccgtatgcttgcatctggccacctgctgcctccctggtgagagggccctgtgagccggggcattgagcctgtctctgtgaggcctgacacagagccagctccagaatctctcctgttgctgccgccacttccgttcagagcatggccgagaggggagagcgcctggcagccttccccagggtcccagggctctgcttttctggggattgactgatcctcaggatagacaccctcgtggcggcaaaatggctgctctaggcctcatagtcacacaccacacccccagggagagaggccgtccttccactgtgtcagcgtgcagccaggcttcttacccagatgccccagaaatcacctgtgtgtcattcatgacccgtcacggaaccagtccccagagccagggcccaagcccagcaggtcccagtcttgcagctgtggtggtcagcccatttcccctgacacccgtgaacccattgaggagtctgataatcagagtacagttaccaagaggagggggatggacgcagcggggcctaacatagcaggacttcactctagcactcactactgatgaaactgttagctcagattcttgggaattcatgaattcccaagaatgtctttggcccaggttctccttctagagctggatcccacaatgacagactcctgggcaacctgtggcagccgtgacttttgtatgtgtggggtcgtgttacctgctgtctctcagcggtggctctgggggccacacgatctcagctccaggttccccagaatgcagcgcatgaggcggtgactgaagtgcagggctttgctgtggatgtggtcacagggaatggagtgggcggggaggagggcagtgctgagaggccacgcaggaggggcagtctggtgaccacgcaagaggggacgtctggtggccatgcaggaagggtggtccagtggccgggcaggaggggtggtcaggtggccatgcaggaggggcggtctggtggccacgcaggaggggcggtcaggtggctatgtaggaggggcggtctggtggggccatctggtggccacgcaagaggggacgtctggtgaccatgcaagaggggacgtctggtggccatgcaggaagggtggtccagtggccgggcaggaggggcggtcaggtggctatgcaggaggggcggtctggtggccacgcaggaggggcggtcaggtggctatgcaggaggggtggtctggtggccgggcaggaggggtggtctggtggccgggcaggaggggcggtcaggtggctatgcaggaggggtggtctggtggccgggcagggggggcggtctggtggccacccaggagggtcggtccggtggccatgcaggaggggcagtccggtggctgggcaggaggggtggtccggtggctgcgcaggagggttggtcgagcggccgcgcaggagggatggtggagtggccgcgcaggatgcctgctctgacctgcctgactatctgtctatgctgtgacctgtctgggtctgtgctgtgaccgcctggaagccgtgtggactgtgtctcagagtcacccctttgctggggagagaggagggagtgttatccactccttcggcccccccgccgctcaaagtttgccccatgtctcatctcacacatgccaggaacttgcccttcaggtccctgtgacgtgctctcctgcacataagcagggaggccagggtggcagtgaaggta

SEQ ID NO: 14326 - DNA, 1019 bp, Artificial sequence
  DNA replication origin
ttcgacaggcatcggcatttgtgaagattttaaatatgaacactgtactcgtttgctagtgctgttgtaacaaagagccacagacagggtgccagaaacaagagcggcttctttcctcgcagttctggaggctggaagtcagaaatcaaggtgtcggcagggtgggtttctccccggggcctctcttcttggcttgtagatggccgtcttctccctgtgtcttcatgtggtcgtctgtgctgcatgtctgtgtcccaatctcccctggtcataggaacaccagtcccaccaggttagggcccaccctgatgacctcactttaacttcattacccttcattactcttgaaagaccctatttccaaaagcagtcacattctgaggtcctggggatgaggatgcaacacatggatctgggaggcaccattcagcccacagaggtgcctttgcatgcctcagtgcactgtgggggtgctacggggacatgctgtggggacactgtggggacgtgctgtggggatgctgtggggatgcactgtggaggcaagctgtggggacgtgctgtggggacactgtggggatgctgtgggggtgtgctgtggggacgtgctatggggacactgtggggacacgctgtggggacgccctgtggaggcgctgtgggacaaactgtggggatgtgctgtggggacaggctgtgggtacgctgtgtggtcgcccgtagggacaccgtggggatgcactgtgaggacgctgtggggacaggctgtgggggcactgtggggataatgtggggatgggctgtggggacacccgatggggatgctgtggggacgcccagtgggcacgctgtggggacgcgctggggctgctgtggggatgtgctctgggggcgctgtggggatgccatgtgggaaagcactgtgtgggcgctgtggggacgcccagtggggacgctgtggccctgagttcgcacagaccccacccatttaaatcctgcctcctgcactcgcttgctgc

SEQ ID NO: 14327 - DNA, 1168 bp, Artificial sequence
  DNA replication origin
cgcggccaacagacgggtacagcgcccagggtctgcgtctgggttcttgtttccaaagagcgcagaggggcttatgggcacgtttactccaaaggcaaaatcacaaaatccttcgctctctcagccaaatcccacgtggttcattgctactgcacgtaatgaaaagattttaacatcacttaaaagggctgctgcaggccgcttttgctccattccttcagatttcaacccaagggacctctgagaatgaacagccgtgcatgggttcaggactttaaacccccagcgctctgcaggcaaagggcggagcgcggctgcggccccgacgcgggcaggagtggggggcgcgcgccctctggcgtccgcctcggggacgcgcgggcctggaaactacggcccaggtcagaggcgcccaccgagggccggggcgaagggggagcgccccagcctgcaacccccgccctccagaaccttggggggcagagcacagagcagaaggcacccggcacccagaggggtccgggccaagcatccccgcgtcccctcaccgcgcctgccaccaaccttgacctcaagtcacagcctccatttggaggcctggaaaccgggttaagaaagctgctgaggttcacccaattcagaatccacatcgctctccgactcttccggcaggtttcacaagcacagctgtgaacgagtaatgaggagagcgcatggaaggcggagcgggggttaggagggcaggatgcgggcaccgggccgggtgggcacactgacaagggagaggaaccctgagctctcggtgagatccagggcgctcggtgagatgcagggcgctaggtgagatgcaggatgctcggtgaggtgcagggtgctcggtgaggtgcagagtgctcggggagatgcagggcgctcggggaggtccagggtgctaggtgaggtgcggggcgttcagggaggttcagggtgctcggggaggtgcagggtgccctgggaggtgcagggtgccctgggaggtccagggcacttggggaagtgcagggcgctcggggaggtgcagggcgctcggggaggccatgtagggaggagttgagttctgtaagggggagtcatgttcatatatttatcatcactcataaaaccgttaaactgcaaactgaagattaac

SEQ ID NO: 14328 - DNA, 1099 bp, Artificial sequence
  DNA replication origin
aaaagcttgctacagcgtgacagatgagatcagtccacatgggcaaattatttaattgataaatgacctatatgagttttggaagactaacggcagcaagactatcttgcaacaattcccaagcaatgtcctctaacaaacagctattgtttgtggcatcaacatagtggtaattctttggtctccaacaccaggctcaggggtgtgacgtcagtgagcggttcacaggccctgctgcttcccatgcaagactcagcatcttgcaggtgccagggcccctgggggtttccagcctgggatggatgagtctctaccctctggaagagctctccctttctgcatgtaaccccgggcgagggaaagcagaacttggggggagactgtaaaacccagagtaaggtggaccctgggcagagtgggggagctcacacctgcaagctgcgtgcaaccgaaaggctggcgacctgtagcttgtcagattcagatatggtgcaggtgagggcctggcaaacatttagtttaatttctgagaccgttagagacaaggttaaattccaggtgaacgcggttccagagtggctgggattcccactctcagatgggaacccttcagacaagagtaaaacaggagggacttcttcgccgcccgccctgcggtgtgtgccacggaggccgctgggtgggggcgtccaaatgtggaagcgttcctccagcatgcgtggatatcctgaggactcacggacaccgattccctcttccgggcccagacgtcctaattcccgtcccccttgaggtgagatcccgttttcccccagccaaagggactccggagccgcattcacctgacttggctgccagcgcccgccttcctcgagttctcagggcaaggggctgtggtgcattttctggggatggtttgtggatgtggaagagggaaatcctttcagggattttagtcatttggcaattggtgattttcatatgacgtgctggttttaggggccaactctgataagctgggacgccctccccttgattctagaacagaaggcattttgggctaaggacgctcacaacccggtttcctgtcccgcgtggt

SEQ ID NO: 14329 - DNA, 969 bp, Artificial sequence
  DNA replication origin
acgttcaatcttaggttcctgaattttggcagtctgccaattgggtgattcacactggccggtggatgggatttacactctgcactgggggctgcagaggacctagaggagaagggaggaaaaggaccagccatgggggagattttgggggtctgcgcttagagggtcagtgcaggtttggaggagaagggggggtgagggtcttggggtgagtggtaggaaggccaatgagtcaggtgcacaggctgcacgctgttctgtccccctagccctccaggctcggcactgtggacgctgtgctccctgaacatgcagttcagaacatgacttctccagtttgataaagaatcaatcattggtccagacccagccaccttcagccatcaccaagaggcagggcagttgaggaaatggggtggggtggaggggagggagaggtgggcacaacagcactagctgctttcaaaactcatataaggcccctcgtggtcctcaaagccactgtgtcacgctgagggagagcaggtggggaagtggaggcgggagaagggcaggaccgtcctgagtggcagggctgcccgaggtcatcaagtgcatctgcagcagccagtttgctaagctttgctaagtgctctgccacgtgctgccagtatagacgcagagaactcatccgggaggagacaccaggcctgcgagagagcgatccactaagatcatgcaggtgttgcccagtactgccccgggagctgtgtggctctgaattgatgggtgttgttggaaggaagcctatgtgggaaaaagtcacgagggtgggtagggggcttaggctgagcagggagggggtgggacatacacagacaaaaggaaggggtgacttagagcctcctggatgaggacaggtgaggaggcccaccgtccagagggaacaggtggcaggcaggactgcagccagattctataagacatggt

SEQ ID NO: 14330 - DNA, 1010 bp, Artificial sequence
  DNA replication origin
ggggcgcctctgcctggccgcccctactgggaagtgaggagcccctctgcccggccagccgccccgtccgggagggaggtgggggggtcagccccccgcccggccagccaccccatccggccagccgccccgtccgggaggcgaggggcgcctctgcccggccacccctactgggaattgaggagcccctctgcccggccagccgccccgtccgggagggaggtgggggttcagccccccgcccggccagccgccccgtccgggagggaggtgggtggggggggggtcagccccttgcctggccagccgccctgtccaggaggtgaggggcgcctctgcccggctgcccctactgggaagtgaggagcccctctgcccagccagccaccccgtccgggagggaggtgggggggtcagccccccgcccggccagccgccctgtccgggaggcgaggggcgcctctgcccagccacccctactgggaattgaggagcccctctgcccggccacgaccccgtctgggaggtgtacccaacagctcattgagaacaggccaagatgacaatggcggttttgtggaatagaaagacgggaaaggtggggaaaagattgagaaatcggatggttgccgtgtctgtgtagagagaagtagacatgggagacttttcattttgttctgtactaagaaaaattcttctgccttgggatcctgttgatctgtgaccttacccccaaccctgtgctctctgaaacatgtgctgtgtccactcagggttaaatggattaagggcggtgcaagatgtgctttgttaaacagatgcttgaaggcagcatgctcgttaagagtcatcaccactccctaaccttaagtacccagggacacaaacactgcgaaaggccgcagggtcctctgcctaggaaaaccagagacctttgttcacttgtttatctgctgacattccctccactattgtcctatgaccctgccaaatccccctctgcgagaaac

SEQ ID NO: 14331 - DNA, 1211 bp, Artificial sequence
  DNA replication origin
ccgggcggggggctgacccccccacctccctcccggacggggcggctggccgggcagaggggctcctcacttcccagtaggggcggccaggcagaggcgcccctcacctcccggacagggcggctggccgggcggggggctgacccccccccacctccctcccagacggggcggctggccgggcagaggggctcctcacttcccagtaggggcggccgggcagaggcgcccctcacctcccgtccgggaggctggccgggtggggggctgacccccccacctccctcccggacggggcggctggcctggcgggggctgacccccacctccctcccggacggggtggctgccaggcagagatgctcctcacctcccagaccgggtggctgccggacggaggggctcctcacctctcagacagggcggttgccaggcagagggtctcctcacttatcagacggggcagccgggcagagacgctcctcacctcccagacggggtcgcggccgggcagaggtgctcctcacataccagacggggcggcggggcagaggcgctccccacatcccagacgatgggcggccgggcagagacgctcctcacttcctagatgggatggcgggggggaagaggcgctcctcatttcctagatgggatggcggccgggcagagacgctcctcactttccagactgggcagccaggcagaggggctcctcacatcccagacgatgggcggccaggcagagacgctcctcacttcccagacggggtggcggctgggcagaggctgcaatctccgctctttgggaggccaaggcaggcggctgggaggtggttgtagcaagccgagatcacgccactgaactccagcctgggcaccattgagcactgagtgaacgagactccgtctgcaatcccggcacctcgggaggccgaggctggcggatcactcgcggttaggagctggagaccagcccggccaacacagcgaaaccccgtctccaccaaaaaaatacgaaaaccagtcaggcgtggcggcgcgcgcctgcaatcgcaggcactcggcaggctgaggcaggagaatcaggcagggaggttgcagtgagccgagatggcagcagtacagtccagctttggctcggcatcagagggagtacagtccagctttggctcagcatcagagggagaccgtggaaagagagggagagg

SEQ ID NO: 14332 - DNA, 1017 bp, Artificial sequence
  DNA replication origin
gggggagagagattttaggtagagtggtcaaggaatgcgtcactgcggaggtatcatggggctgacttgaatggcgggaagatctatgagagagccttcggggcagaggagcaaaggcactgatgcagaaggaatgtgatatattcgaggaatagaacgtgggccgatatggccagagcatggagtgtgcagggaaaaggggtcttataagggccgaggaacagggcgtgcacaccattagaggtcagtaaggagcttcggtctgagatgtgcaaaggaggccaggtactccagggggtgatggatctgacttgtttcaacaggatccctgtggctgtcttagggagaatgggtgtgggagggggagtggaagcagggacctcttgggagtgacttcagagattccagtgagagacaacagtggctggggctggactggtgcagccccagtggggaggtgggtgtactgcatggattaggggtatattttggagatgggatcgatgaggcttgctgaatggttagatgaggtgaaatggaaagtgaacgaacgacaactccagggcttgtggcttgagcacctgggttggtggtggtgccatttactgagatggaacactggtggaggagcgatggccatggggatgaggagctctcttctggccacatgtaagcgagcacatgttagacatcagagtggagtggtcagatgggcactttgaaaactgagtttgcagttcacttacggagacaaggcttgacatgtaaaaccaggaatcctcatcatatggccagtatatgagactagggcattgagaagctcatccaggaatacaatgcatccagaagagggcaggcagataagacttcaatgctgagaggtcacgcgggaagacagaaccggtcgaggacatggaaaaaggagtggatagtgcaatcaaagggaaaatcagaagagagtgtttcgagatggaagtcagctacatcaaacgtggctgaaaagtaaaattagataaa

SEQ ID NO: 14333 - DNA, 1068 bp, Artificial sequence
  DNA replication origin
aaaaatatgcatgcatatttcatagatagcgtatgtatattacataagtgggaccctaactgcatctatatttagtgaaatgtcaggatcgcgatgctgcggtgaatagcatgagctttctttcatgtccatgttaggagaggcagcttcctcccatcaaaagcacagctggggcagaggagggggttgagagcaaggttttctatctatctaattgtggtgacttttaaagtttagttttatggctctgttgcctctgtcttcaaagtcaaatggagcagctgaagctctccccaccccagacccacctgcctggcctctcccatgcagcaagtttcgcttagctgttgcaatcctggttttacttggttttgtatttgctattttttaaagtgtttttaaactcatgtttcttcatagtaaagggtaactactgtggagtaaacagaagatgagcgtggtacaaattttggttaaaccaaaaactacacactggattgaaagcttggggaagggaggcaggtggaagggactgaaggaggtctcttcccaggagacttgttcaccggcatccagtattctcccccgcagttagggaaacagagggagcatgcagtttcaggcccaggcaggcctctctctgggcttggggcaatgccagggctgggggcgagcctgcagtcagccttgtgagtggcagccgaggctgttattttgaaaccctaagtggaaacaggcatggaaacccggaaggagcagggagccttaggcagtcctgggagatgaagccaacgccctacctccatgtggaaggaggcggcggaatgggcagggtcgggtctcacaggttcccccctctggagttggggtttcccggcccacgttcactctctggatgtgataggtccttcccggccgggaagggctggaaggggcgcgcaaggaggacgtggggacgagacgagagagacgcgtgcccagcaactccagaaggacggagaggagtgcagaagggagccggggaggacgcgggagggccgggaggggaagagaagccaggccgggcct

SEQ ID NO: 14334 - DNA, 1095 bp, Artificial sequence
  DNA replication origin
aaccggagagaaagcaaaatattaaaaagccccaaagacagccagcaggagcgcggtgcccgatggcttcgctgtaccagaggttcactggcaagatcaacacctcgaggtccttccccgcgcccccggaggcgagtcacctcctgggcggccaggggcccgaggaggacggcggcgcaggagccaagcccctcggcccgcgggcgcaggcggcggcgccccgggagcgcggcggcggcggcggcggcgcgggtggccggccccggttccagtaccaggcgcggagcgatggtgacgaggaggacgtaagagcttctcgggggcggggggcggcggcgggttctccgggctgagcgcgcagcgagacgcgtcggcaggggaaattttttttggggggggaatcaggcgccctccccccgcccacgactctccgggcgcccccagacaggctccgtggcgccagatcgcggtcaccgcgtcccggagggagcgggtctgtgtctgcagccgcggcggccgggagttggtggctggagagagcggggtttgggtactgcgcctgctgggatctggaattcgccttacgttccctgggtgcgcggatgtctgtttttaacagcatgctgctatggttcctaaggagagaattcgatcggcctgtgcttacgagttggtttattttttatttatttcgtgctccgggaacacagcctcaggcaccttctctccctcccacctgtgtctggaatctctccatcgtgcccctcctctcctactcactctgtcccttgactcaaatgcctctccttcgttcctcttcttacttctcctagacactttttccccccagcggtggtgatggtgattatcctttccggaaaaaaaaaataccaaaatactggcatctgagccccaaccctctgtcccagggcccagctcttttgctgagagccctcaggccgtgtctgtctcccctcccagccctggactagcacctctgccttagaccgtgttcagtgaaaacttctccgagagcacatttcctactcttcatgggggctggaagcctgggtttcaaaggttggatttgcacat

SEQ ID NO: 14335 - DNA, 1319 bp, Artificial sequence
  DNA replication origin
atcacaaggctattttggggaggatgggggagggagggtgggtagacaagacgagtttgctctttaaatgcaagcagcagagagaggatccgaagcaggaagctgccgctgcttagtggggcttctccaattagcaacagcctctgcaatcgccacagaaacaatgataactgcttagcaaccggcaagtggcggctgggtgcaggaaggggacccgagtgatgcgcgctgcctcctcgcccgcctcccggcccggcgcccacggcgcatgctccggccgcccgctcagccgggctggggctggggctggggctggggctggggctggggctggggctggggctggggctggggctggggagggggccgcggaggcagcgactgccgcggagacgccgcgcccgcagccacagcctcggtcaccgcatccatcagggccccgcgccgcgcccgggtgtctgaacctgcggcccccacgcagggcgcgccagacagcgcgtacctggacagggggcagaggtggccccaggagggatgccctttgttttttcttggtgcaaagtgtctgatgcgtgtttgagaaggaagggggtctgggagcaccggaggcaggcagcttttctgtttgcccagtggatttggcaggaacactggttgttgaaatcttgggctttgttttcctcaaaattcagaaaacttatgttccatcgttagaatcaaagaatctacatttctctaagaaaatcaaccaggacctcaagggtgtttgtccattaaaagaaagacagggagagagagagaggaaaaaaaaaacattccagcctgtgtgatgaccttacagaaacatgagggctccccactgtgtcctgagctcaaggagaaagagacaaagcaggacaggagacggactgtccagcactccctgcctgaggccagaggctgctgtcgtgtcctgacccaggtaccactgcccctgcctggctccctgcaccggagcagtcagttagtgggtagagcggaaatgcaggtggcaaactctaaggaaagtgcaatcagccagtcatttgcaggtgggagtatctcctggccctccagaagcagctcagaactcagtgcccagaggcctggcactctttctctgcactccaggccagcatgtggccaagctctctgttgatgcatttcccactcctggtctggaacctctactttcacccattggcacttggtcacaggcattcactggcctgagagttcagccatttatatatacggggaactctcaataataaagtccttcaggccagggcctgaatcag

SEQ ID NO: 14336 - DNA, 2460 bp, Artificial sequence
  DNA replication origin
ctctgccttgctctctgagggtctccactttgtcccttcaggctttgactaaatcttcacgcagacactggtcagctacctggccctgagcaagtcgctttgggccttggtggaactgggaaatgaagggacattcgcttcctagggctgcggtgagaaatcgccacaaactgcgtggcttaaaacaacagaaattgcccctcccagttctgaaggccagagatgtggacacagttgaaatgacagtgacagagaagggtgtggaggagaggagcggggctgcggtcacgcccaggacactggattttaaagggtgggcagagaagatcccacagagacgaggaccagagagggaggtggggggagagctgggagaaggggcagtcgagagggaggtggggggagagctgggagaaggggcagtcgagagggaggtggggggagagctgggagaaggggcagtcgagagggaggtcgggggagagctgggagaaggggcagtcgagagggaggtcgggggagagctgggagaaggggcagtcgagagggaggtggggggagagctgggagaaggggcagtcgagagggaggtcgggggagagctgggagaaggggcagtcctgaacatcaagacagagaagcagcagccgcagcatgtgcagggagagaccacccaggcccagcacggggaggccacggactttggcacctcgatggacacagaagatcttcagagaagcaatttcagctttaaaaatggatggaagccatattgcagtgggttagggacaggagagaaggtcagaaagtggccctcagatttggaccactcactggattggaccaagaccggtaggcgttgggctgatgatgggttagaggctgcgtggggaggaggtgctcatgggtgggtggagaggctgcgtgggaggaggtgcccagagatgggtgagaggctgcgtgggaggaggtactcatgtgtgggtggagaggctgcgtgggaggaggtgcccacagacgggtggagaggctgtgtgggaggaggtgcccagtgatgggtggagaagctgcgtgggaggaggtgctcatgggtgggtggagaggatgcgtgggaggaggtgctcatgggtgggtggagaggctgtgtgggaggaggtgcccagagatgggtggagaggctgcgtgggaggaggtgcccagagatgagtggagaggctgcgtgggaggaggtgctcatgggtgggtggagaggctgcgtgggaggaggtgctcatgggtgggtggagaggctgcgtgggaggaggtgctcatgggtgggtggagaggctgcgtgggaggagatgctcgagtgggtggagaggctgcgtgggaggaggtgctcatgggtgggtggagaggctgcgtgggaggaggtgctcatgggtgggtggagaggctgcgtgggaggagatgctcgagtgggtggagaggctgcgtgggaggaggtgctcatgggtgggtggagaggctgcgtgggaggaggtgctcatgggtgggtggagaggctgcgtgggaggagatgctcgagtgggtggagaggctgcgttggaggaggtgctcatgggtgggtggagaggctgcgtgggaggaggtgctcatgggtgggtggagaggctgcgtgggaggagatgctcgagtgggtggagaggctgcgtgggaggaggtgctcatgggtgggtggagaggctgcgtgggaggaggtgctcatgggtgggtggagaggctgcgtgggaggaggtgctcatgggtgggtggagaggctgcgtgggaggaggtgctcatgggtgggtggagaggctgcgtgggaggaggtgctcatgggtgggtggagaggctgcgtgggaggaggtgctcataggtgggtggagaggctacgtgggaggaggtgcccagagatgggtggagaaactgtgtaggaggaggtcctagttgtctgcatttcctttgggagaacagccttagggaaaggaaagagactggtggagcaaaatccgagaggctgaggcagcataaaagtctctcctccatggaaaaacttggagccaaaagcgcacattcctcagtgaaagacgccaacctgaaaggctacactttgtatgattccaactatgtgacattcaggaaaaggcagacttatgggggccttaagcagatctgtgcttgccagggtttggtggggtgggaaggatgaatcggccgagcacacagaggtttggagacccaaaagacgtctgtatgatcctgcaatggcaggtgcaagacggatggatttgtcacaactcacagaacacacaggcaaagggtgaaccctaatgtcagctgtgggacttagttaataatgtttcaatattggtttatcaattataccacatgcaccacactaatgcaagatgtttgtaatttggaaaactgagggcaggg

SEQ ID NO: 14337 - DNA, 1080 bp, Artificial sequence
  DNA replication origin
aaaaggcagacttatgggggccttaagcagatctgtgcttgccagggtttggtggggtgggaaggatgaatcggccgagcacacagaggtttggagacccaaaagacgtctgtatgatcctgcaatggcaggtgcaagacggatggatttgtcacaactcacagaacacacaggcaaagggtgaaccctaatgtcagctgtgggacttagttaataatgtttcaatattggtttatcaattataccacatgcaccacactaatgcaagatgtttgtaatttggaaaactgagggcaggggaagaaggaggatatgggaactctctgtagttctgttcagtttttctctaaacatgaaactgctctaaaaatataaagcttattaattaaaaatagtaataaataagaaaagtttaccaggaaggtaaatggaaagtatttgatagttctaggatggaacaaaaaaggaggtacaggaggaagtgctggccgagacggaaaggggatgcctggtcattggagactgagaggagggaggagcaccaggtacttcagtgtgtccgggaggaagccttctgcagggaagcagggaccctgggccaagctggagcctcccagaggcaaaggctgagagtgaggctgatggagagggaagccctgtaggcaaaagggagagggagtgggtgtgggagggagagccttcagtgctcctctgtctgccccacacctccttgtccctttagagtaagggggcagtaggtacaagagagatgtaaggagagcaggaaagattggaattggcattgaggacagacgtgtctcacactctgggtggttgtgatgatgggaatggttagtggtcagctgaggttggagacattgcatttgtcattcccaaaggtcattctcaaaggtcaaggtgttgatgtggaggaggtagattcggcataaaaccaagttgggcattcgctagtctgggcagagaaggagttgtgtgaggaaagccattcagtaggggattggagcagaggatgaatgaccaccaagtggctcatccaaaagggaattcccacagtggaga

SEQ ID NO: 14338 - DNA, 1990 bp, Artificial sequence
  DNA replication origin
cccttctgccatgttcccacctgtctcagtcagtctgcagtaacagctatagaatgtcttcatttggaacttggagaatttgcacaaagggaagcagactggacaaagagctcagatcgggggtctccgggtctgggcacagccgttacccttcccctcccatcctccgttctctcctgccgccacccacactgtgctcctggtgagctagagccagagcgaagtggaacccagagcactgtttgccaacacccgcggcactagacaacgccaagagaatggcttagtaataatgagataataacttaatgaaaaacccctgcgagccctgcggggcggggagggagacctggtgtgtggtgctggacgcttcctgagcacctccctgcacagcctgcctctggagtttctcgcgcatggcggtaagcagggccaggcctcactctttccccttcacagtggagggtgtgagcagggcttcgatgccttttgctcacggtgtccagcagtggatgcgctggttggaacggacgtgcctataaccatgactcccaccgaggccttgtcctgcaagcccagttcccatcaacagctcattctagggagggtggaggcccagtaccgcaggcttgctgcatttgggtatttccaggtggctcaagtcaaacttaagagcgcgacccattcggaaaatcaagtgaataaagcaggatggcatggaaagggatgggggctttactgagagagggtgagggaggataggacgggacaggagagagagggatggaggctttactgagagagggtgagggagcataggatgggaaagagagggatggaggctttactgagagagggtgagagagcataggaccggaaagagaaggatggcggctttactgagagagggtgagggagcataggacaggagggagagggatggcggctttactgagagagggtgagggagcataggacaggagggagagggatggaggctttactgagagagggtgagggagcataggacaggagggagagggatggcggctttactgagagagtgtgagggagcataggatgggagagagagggatggaggctttactgagagagggtgagagcataggacgagagagagagggatggaggctttactgagagagggtgagggagcataggacaggagggagagggatggcggctttactgagagagggtgagagagcataggacgggagagagagggatggaggctttactgagagagggtgagagagcataggacgggagagagagggatggaggctttactgagagatggtcagggagcataggacgggagagagagggatggaggctttactgtgagagtgtgaggaagcataggacgggaaagagagggatggggcattactgagagaggatgagagagcataggatgggaaagagagggatggaggctttactgagcgagggtgagagagcataggacgggaaagagagggatggaggctttactgagagagggtgagagagcataggacgggaaagagagggatggaggctttactgtgagagtgtgaggaagcataggacgggaaagagagggatggggcattactgagagagggtgagagagcataggatgggaaagagagggatggaggctttactgagcgagggtgagagagcataggacgggaaagagagggatggaggctttactgagagagggtgagagagcataggacgggaaagagagggatggaggctttactgtgagagtgtgaggaagcataggacggaaaataccagagtgcaatagagaaggtgcaaaggagagctgcttcccacacccttgctcctggcctgtgtgtgtccgtgatgctgggtcatggtcaaaaacacggatggccgctgacatgggtctttacagagaaaggctccatccaatctgaaaggcctgcagcaggcagaacctatccgt

SEQ ID NO: 14339 - DNA, 1911 bp, Artificial sequence
  DNA replication origin
tgatgaggatggcgacgcagaatcccattttatttttctgatgtctcctgctcattataagcctgccaaccaaccaatcattccctgcatttacagcatcttcagaacaatccagctgccctttcaaacacaggccatgacaatgtaaaatgtactttcttcaccagaaacttattattctgacagctgtgactcagatttccagcctcctacagcactgaacatttttattaatgatcccatgatcaacaggaactttgtgaatttccttttcagcacatcagtaaagatccggcatttctctagtctggagcttctccattaccctagtcactgggaatggcttctcaccctaatgaataacaaagaccctgccctggtctgattctgaaagcacaaggctgtaaacaaagctgtctgctggagccaatctccttgaactggtgccccctaagatgaatccatttgagtatttaggtagccagatgatttctttaacacacaaggtgaaaacagagataggactacaggtgaggggaacagagcacatttgtgaaattgtaatttacatccagaccacgtccaaaaaaaattggaacacaaattcagataaaataatatatcttcccagacaaaagagaggttaggactatgtttaggtaagatggcagactcagggatggggtggaactgggggttgggcatagctataatttgtaaaatgctgctgctgagaagggcttctctgccttggccacacttaggaatcacctgaagatgtctgaacaaccccaacatccagatggaccacagcctgagggaggaaagcaggaagaacagagattttgccagcaaaccctccaaatgagctttgtgccacctgaaagttcaagcacaaagggaaatacagtaggcgtgacagctcttaaacaatgctgagcaatagctctggtgacggaagactcgtgctcaagtcctggttctactactaattaaaagtgcaaccataggcaagtcaggtcattgtaaatgtgacaggttattgacattgtaaatgtgaggcaggagagcttgtttatgatagggaaggaggcagaggagacctaagaatggagagcaacagggaccaagtgagagctgacagtggtggtggtggaagtagaagtgatgatggtggtggtggtggaggcgatggtgggggtggtggtgatagtagtgggggtggtggtggaggtggtgataggggtggtggcagcagaggttgtggagatgatggaggtggtggaggtgacagtggacctggtggtggtagaagttgtgggggtgatggatgtggtagaggtagtggagatgatggtgggggtggtggtgatagcggtgatagtggtggtgatggtgggggtggtggtggtggtagaggttgtggaggtgatggaggtgatggtggtgatggtgggggtagttgtggtggtggtggtggaggtgatggtggggtgctggtggtggaggttgtggaggtgatggaggtgatggtggtagcggaggtgatggtagagctggtggtggaagttgtagaggttgtgtaggtgacagaggtggtggtggtgatggtggtgaaggttgtagtgttggaagttgtaaaggttgtggaggtggtggtggtggaggttgtacaggtggtgaaggttggaagttgtagaggttgtggaggtgacagaggtggtggtggtgatggtggtggagctggtggtgaaggtggtgttggaagttgtagaggttgtggaggtgacagaggtggtggtggtgatggtggtggagctggtggtgaaggtggtgttggaagttgtagaggttgtggtggtggtggtgtggtggtggtggaggttgtataggtggtgaaggttggggaag

SEQ ID NO: 14340 - DNA, 930 bp, Artificial sequence
  DNA replication origin
ttcggtcgggtctgcggcagcgcctgcaccagccacgaggtggcagccacgccggagccgggactctgcgccgcgggctccccgcagcagctgggcggccggtccccaagtcccaggcccgagggctgagacgactctggcgccacctcgggcgcgtctgaccatcggttcttcacccgtctcccctccacccccacagccccgcgtaccttcgtgcagacccccgtggtggcgtcgcagagggtgaggatggacacgttctgcgcccggttcagccaggtcacggcgaccttggtgctggtggcccacttcaccatggtgatgtagtactccctggaaacgccaaacacagcatgagcagcttggcaggacccccgcacgacagaagccaggggaccgccgaccccagccctggacacgacacgggagccgggggccggagccagtggtgacacagccagcctgcgagcttctgaaatctggcttataaagaatctgcactggcgcgggactctgaggggccgcccagtcattacctcttgctaaataaacccaaagacactgggagttgcatgtcactgcgtgtggctgccctgggggtgaggggtgtgggggctgctccgtgggttttgaggtctcgtctctccagctgatgccttgactttcacaccgcagtaccaggcaaacgcacaactaaccacctgaccgggcagcgaggggtccggggaggcgggacagagaaagaaccggaaaagggctggcgggaggccccagagagcgacacagggtgagaagcatcccagcctgggctgttgaaggctccattctctaattcctcctccttaaagataaaatacccagggacactctctagctaattagggaaattggttcatggctctgggcttcaggcgaacttggtttgatatc

SEQ ID NO: 14341 - DNA, 1812 bp, Artificial sequence
  DNA replication origin
gcagcctccgaagggaagaccccgagggaaacgggacagcacggaactgtcaggtatgtgtgagagacagagcatgtggcagcgtgtgtgtgagtatatgggggtgtgtgtgtgtgatatgtgtgtataaacgtgtgaacatgtgcatgggtgtatgtgtataagcacatgtgtgagcatgtgtaatcctgtgtgtgcctatacatgtgagagtgtgtgcatatgtgagcatgtgtgtatgcctgtgtgagcatgtatgagtatgtgtgtaaacttgtgcaagcctgtgtatgtgtgatcatgtgtgcctgtgtgatcatgtgtgcttgtgtgtgagcatgtgtgtgtgtgagcatgtatgggtaagagcatgtgtatgagcctgtgtgagcatgtgtatgtaatcgtgtatgtatgagcatgtgtatgtaatcgtgtgtatgtatgggtgagcatgtgagcatgtgtgcgtgaacatgtgaatgtgaatgtgtgtgagcatgtgtatgtaatcgtgtgtgtgagcatgtgtcagcatgtgtatgtactcgtgtgtatgtgagcatgtgtataggtgagcatgtgggagcatgtgtatgtaatcgtgtgagcatgtgtgtgtgtatgagcaggtgtatgtaatttgtgtgagcatgtgtgtgtgagtaggcgtatgtaattgtgtgagcatgtgtgtgtgagtaggtgtatgtaatcatgtttgtgagcatgtatgtgtatgtgtgagcatgtgtatgtaatttgtgagcatgtgtgtgtgtgagcaggtgcatgtaatcgtgtatgtgggaggtgtatgtaatcgtgtgtgagcatgtgtatgggtaaacgtgtatgagcatgtgtgtgtgagcatgtgtatgggtgagcatgtgtgtgagcatgtgtatgggtgagcatgtgtgtgtgagcatgtgtatgggtgagcatgtatgggtatgtgtgagcaggtgtgtgtgagtgtatgtgtgagcgtgtgtgtgggtgagcatgtgtatgtgtgagcatgtgtatgtaatcgtgtgtgtgagcatgtgtcagcgtgtatgtactcgtgtgtatgtgtgagcgtgtgtgagcatgtgtatgtaatgtgtgtgagcatgtatgtatgtgggagcatgtgtaatcatgtgagcatgtgtgtatgggtgagcaggtgtatgtaattgtgtgagcatgtgtgcgtgagtcggtgtatgtaattgtgtgagcatgtgtgtgtgagtaggtgtatgtagtcgtgtttgtgagcatgtatgtgtgagcatgtgtatgtaatttgtgagcacgtgtgtgtgtgagcaggtgtatgtaatcgtgtgagcatgtgtatgggtaaacgtgtatgagcatgtgtgtgtgtgagcatgtttatgggtgagcatgtgtgtgtgagcaggtgtatgggtgagcatgtatgtgtatgtgtgagcaggtgtgtgtgaatgtgtgagcgtgtgtgagcatgtgtatgggtgagcatgtgtctgagcatgtgtgagagcatgtgtatgtgtgaacaagtgtatgggtgagcatgtgtgtgaatgtgagcgtgtgtgtgagcatgtgtatgggtgagcatgtgtgtgtgtgtgagcaggtgtatgtaatcgtgtgtgtgagcatgtgtgtgtatgagcgtgtgtgtgacaccatgtgtatgtgtgagcaggtgtatgggtgagcatgtgtgtgtatgtgtgagcatgtgtgtgagagcaggtgtatgggtgagcgtgtgtgaatgtgtgagcattgtgtgggtgagcatgtgtgtgtatgtgt

SEQ ID NO: 14342 - DNA, 1290 bp, Artificial sequence
  DNA replication origin
tttatcctcagaatgccaacagaagacaggtgctgtcacttcctcccttccacagcagaggagggcagagcacagaggtttcagtagcatgaccagggtctaccccaggcacaggctccaacatcgcgcccttagccactgtgagttatggcaggtggtgctgggtctccttttacttgggcctgtggacagagcagggggctcaggtgacacttcccacccaccggccttctctctctgccggcgacatgcagggccccgagccgggactctcctggggcgcccaggacagctttcctcttacgtaggcgtcccctgttcttgctgggcattccccgcctgcccctgcctgccccccactcggcccatctgttcccaggccctgatcccagcctccaagccagtcttgccagcacacacggacaggaaatgatggcacttttaaagatgcaacgcttttgttttggagtcacctattgagccaagacacggggacctgggcaacacgtggttttgtggattggtgctgggaaggggtggcctgggaaagctaaggatggaggagaggaaaagggaagctgcaggctgctgtgaggggtacccctggtcaaatggcactttggggatgaggagacttgggatccacttgtaaccccagccgcacactgcgggggatctctggggacacttctgtcacttgtattttattgcactaagagcctagaagtttgatctaagaatggcagagtcagcagccggcactgtggagccctgatttgtggtaaaaatactgaaatatggaaatcctcccacacgagtttgtagtagcgctgcatgagcccctctcttgggtgtccccgcccactaatatcacctcatcatccggcaccaggggagccaaatacctgacatgggggagcttggagggggctgttccagcccaatgtgggcagccccagcgggttgtgccccgaagctgttagtgctctgaacatcacctctactctgaggtagggtactgtcgggtgtgctgggctgcaggtgtcctgggctgagggcatatggtgtcaggtgtgctaggctgaggttgtgtgggagtcaggtgtcctgagctgcaggtgtcctgggctgaggttgcaggagtgtcaggtgtgctgggctaggttgtggacatcaggtgtcctgggctaggttgtgtgggtgtcaggtgtgctgggctgcaggtgtcctgggctgaggttgtgcagtgtcaggcatcctggcaccgcctctccacccagggctgggcct

SEQ ID NO: 14343 - DNA, 927 bp, Artificial sequence
  DNA replication origin
ccctcggcggggccggagtgagccggtcccggggaggaggggagctggcaggcccctcccgtcgccacatgcggctgctcgggggcggcgcatgcgcgcggcggaggggggggtggggccttggggccgcgagtgggagcgggagcggttctgcggcctcctcgggcttcttggccctgggcggagtgggattgggtgtcccggctgttcgcagtggccgcgagtgcggccggacctggagtagtacctgagccgctctggccgagcaaggcgcggggccccggtctacaccgcgctggacccggctatgccgtgacggaattcccgaggccgtagcgccacgcgagacgcgcactggtggcctccgcggcgagtcctggggtctccgcaaggcctcagtgcccgagctggggacgtgctggggggaggcccggccccgtcgctgcccgaggccccgctgtcccggccggaccggcctggtccctggcgtcctgtcgggtccgcgctggaggagagtcccagacagcagagcccgcggtgcagctccagccccgggaagccccgcgctcaacaggttaatactacacagcggcgattctaatggtcacgcttttatttacagctcgcctcccttccgccaagattcacagaacacggcagagtggcctcgggatcacctgcccaagacacctgcacgaccggaagttgggagaagaaattaaggccatgatgatgaacgcagcctttctcgtttatttccaatcccacaacaaaccggagtccaggaactcatgggtgattatcggactattacctagtcgtaaaactgtggagcattggtgtctaaaggaatctgagacagacccgcagtgtctcccccacatgccttaagtcacttctgccaagcagaaaatcatttttaagtaa

SEQ ID NO: 14344 - DNA, 2035 bp, Artificial sequence
  DNA replication origin
atttgggggatacaacaaacgccatttgggggtcacagtgactgagggtgctcctggattttgttggggtgatggttgagcaaggttgctattcacccttcagtaggtaggacacccccccaagggatatctacccagcaaaacgccaacagtgtgctctctcaggaagacttcctgaaaacaaagagccaggtagaatctcagcacacggcaggtcgctggttgatgttttcaagaagcagctttgggggtttcctcaaatccatccaatgagattccatctcttttatctgagcatctaggatgttcaaggagaaacggctccgctttttcctgcttctccaggaatccagcttagtgggtttacctgcctctgtccaaggtgctccgttgtgagtagcccctgcctctgggtgtgcaggtgatttggggactgagagctgaggcgctaaagttaaaatggcttaacgtgtgtgactgtgtgtgaatgtgtgtgtgtacgcgtgtgtgcgtgcgtgtgtgtgtctgtgtgtgggaatgggtgtgagtgtgtatgagtgtgtgtgggaatgggtgtgtgtgggagtgcatgtgtgtgggaatgtgtgggggaatgggtgtgtgtgggaatgggtgtgcgtacgtgtgtgtgtggaaatcggtgtgtgtgtcttgtgtgggaatgggtgtgtgtgtgggaatgggtgtgtgtgttacagtgtgtgagtgtgtgtgtgtgggaatgggtgtgagtgtgtgggaatgtgagtgtgtgtgtgggaatgggtgtgagactgtatgagtgtgtgtgggaatgtgtgtgtgggaatgtgagtgtgtgtgggaatgggtatgtgggaatgggtgtgagtgtgtgggaacgtgagtgtgtgggaatgggtgtggggggaatgtgagtgtgggcatgtgagtgtgtgagtgggaatgggtgtgagtgtgtgtgtgggaacatgagtgtgtgggaatgggtgtgaggggggaatgtgagtgtgggcatgtgagtgtgtgagtgggaatgggtgtgagtgtgggtatgagtgtgtctgtgtgtggggaatgagtgtgtctgtggggaatgggtgtgagtgtgtgtgtatgactctgtgtgtgggaatgggtgtgagtgtgtggggggaatgtgagtgtgtgggaatgggtgtgtgtgtatgagtgtgtctgtgtgtggggaatgggtgtgtgtctgtgtgtgtgggaatgggtgtgagagtgtgtgtgtgtctgtgggggaatgggtgtgtgtgtgtgtgggaatgggcctgagtgtgtctgtgtgtggggggagggaatgggtgtgtggggggaatgggtgtgtgtgtgtctgtgtgtgggggaataggtatgagtgtgtatgtgtgggggggaatgggtgtgtgtgtgtgtgtaggaatgggtgtgtgggggaatgtgagtgtgtgtgggaatgggtgtgtgtgggaatgggtgtgtgggaatgggtgtgtgtgtgggaatgggtgtgagtgtgtgtgggaattgtgtggggatgggtgtgagtgtgtgtgggggaatgtgtgtgggaatgtgtgtgtggggatgggtgtgagtgtgtgtgggggaatgtgtgtgggaatgtgtgtgtgggaatgggtgtgagtgtgtgggaatgtatgtgggaatgggtgtgtgtgggggaatgggtgtgtgtgggaatgtgtgtgtgggaatgggtgtgagtgtgtgtgggaatgtgagtgtgtgtggggaatgggtgtgtggggggaatgtgtgtgtgggaatgggtgtgtgtgtatgagtgtgtctgtgtgggaatgggtgtgagtggggaatgtgagtgtgtgtgggaatatgtgtgtgtgtatgagtgtgtctgtgtgtgggaatgggtgtgagtgtgtgagaggctctttctcaagactgtaggagtgggggcttctccatggggacactttcaaaggaggaagaaagaacaaaggaagaagggtggatttcactcctttccttggaaatgagtcat

SEQ ID NO: 14345 - DNA, 1136 bp, Artificial sequence
  DNA replication origin
ccgaacctcatgcacccccagccacagcagcctcatcaacggccccgctgctgccgcgggaatcgcccacactacccacaggctccccaccagccctgggtgcaggagacactgaggtaggtcctgtcctgggaggtgtgggagcctgctgagggctggctttggcgggagctccagcccatgggggaacagtggccagcgctgggaagtaaagatcccccacgcctaggctggccagtttccatgggggcagcacagcccacctcacgtctccagtggctcacactcggaacgtttgccagcctgctctgctgagcggtgtgagccacctgagtggccccagcacctcccagctgatgcccccacctgcagcccccaggacgcacccccactcctgcaggctcagaccccactgcagcctgggctcccagccgccgccagtgctcacacgttttctcctgcaggtgtttttcccaataaaatctgtgcatctctcatcctgtcttggtgtctgcttctcgggagacacagagtctcacacgggaaacgtgttgtcagctgtgaggggtgggtgggggtggagataattgccatgagccatgccagggcctgagaaaggaaacagacacagagaaacagagaagcagaggcagagacagaccaatggagggagagaaaaatagagagagacagagagagagaagcagagacagaccgagagagaaaaaaatacagaaagacagggacagagacaggtggcgccctgcaggaggaggtggcagctgggtggagaatcagcaggggcggcggcatggcaagcccacctctctcccagggttcgcgaccgtgatctgctgacaggttggacaggcactggcaggtcactaccaagacgttagatgctgcaaagcacaaggcactcctcataagaacgcagtagtaattagaggtcctgtgtgggaacagtgccattcattaacagtgatcaccgtttgatatcgacagggtccgaccaacgtgcccgcaggatgcagaaagggcgcgtgatgagcacaggagagtttagagtggccccgcgcctgcttcccaagctccagagacactttctgcagcagccgcactcctgacaaatggga

SEQ ID NO: 14346 - DNA, 1984 bp, Artificial sequence
  DNA replication origin
cgggacggccgcagcgcctggcgggcgcgcgggtttatatggcgggccgcggggcccgcatcacgtgagcctgcccggcctacccaccgcccgcgcgcaccgcccaggggcgtggcctgagcttgccccgccccgcccgcgagcccgtccgcacgcggtctggtgaggcggccgcaaccaatgggaggccggcggcccatatgacgtgcgcacacgccaccgccggcccgcgcgcactcgggcgggagcctcggcacggactgcggggcgcgtggcggctgcggggcacgcgggcccgagcgggactggccggctgcgagtgggcggccgcggagctggggcctgggaggggacggtcctgccgggaggaggcggaggcaggacagggtggggttgcgggcccggcgccgcccctcccggctcctggctcccctcgcctggtgtcccgcgcctggccgggaggcggcgggtctcgatcgcgcgggcctccctggaggggcgcgggctctggcggcggggaggcccctgctcagcgcaatggcgggcttgcatccttgggtgattttttcgggccccttgtggcctttgctcacgcctagagagcaaaccacccgcaccacccaggagcagataaaatcgagaccacagcctccaagggagcgcgcctccatcctgtttgcccctcgggtcgccgtctgagggcgggcccgtgcccgctcagagcctacatccgagtcgtataaagcgctgacagcagagaaagctgcggctttgctccgtgcagatgagcaggggctgagggaggacgctgtgctctcagtagccgcgcttggcccggggaccctgcaggcttagaaacgtgagtcacgcctgcagcgtggcgaggaaacgccgttgatgtggcatcctcagcctggggttgtggctttaagccagaaggtcaaaaaaagaagtcttcctgagctgagactgccctgagtcgctttaggggcgaaattccgagcatccggttgcatttcctgaggatgacacgcgtggtgggtgtggacggcctacaggggtccatcctcagcggcccctctgcagggcagtctcgctctcactctcccagctgactcctctcaagcctgttaaccattgtacacgttcccaaggactccaagcaggttggacttcagggaacattgcagtttgggtcttggccattgtttacactccaccttgcataagtgcttgaggatcacacaaccagatacgtagatcatccgtagatcatcgcagtcacatcgaagatttgtttataataggaaaaaaaaaagctacccactgtcatgcgctgggaaactagtgagctgaaggatgacccatctgtaaatggggtgctccctaatggacagggcacctttcagaagcctgtgctgtgtctcctcgaccccactgtgagctccccgtcccgcacgctgatctaaatcaagctgctaacctcatggagaggcgtccgcacgggagccccggccctgagatgcggggcagtcacccattcaattaggaaacaccagcaagtgccagaagcttctcattagcaggtcagctttcaataactggtttatccaggtgtgtgagacccgataagcagaagggaaagctcttagcgacctatccagctgctctgcactgggctcctgacatcccagaaatcagtacatctgtcttctggggtccaagaggtatttcagtttctctggctttgtttcccgtcatttgtacctggccctgcagactaccccagtatttccatcataatacccctgtgggcaggtgcatacctcatgacaatatttaatattaatagatttatgtgttgtctccagaatggaaaggggctgtctattccttgagctagttggcttgctaaagactattgacttcattcttcttttcctatctacctaataaaccagtgttcatacaacccagcctctct

SEQ ID NO: 14347 - DNA, 1528 bp, Artificial sequence
  DNA replication origin
ggctttggtcgcgcagcagccggtcctccccggaggtaggcgggcgcgggccctgttgggtctttgggacgcgggtcccgctggggccggggatgctgctcgctgtgagcgcgggtcccgtccgccgctggccccgggcgggcgcacgggggtctaaccttggggggcggcgctgccgcctggcccgggtgccggggttcgcgtcccgcggggccttcctcgctctttgtctcttctgagtgaacttgatgacccccttcttccaggaagcgcctcttggacgcgtgtgaccgatgcccagattgcacgaccacttctggagctgctcctgtgcgcacagcgcgaggcgccgaggccccccgcgagccagcgccgcggggctggcggccaaggttggggagatgatcaacgtttccgtgtccgggccctccctgctggcggcccacggtgccccggacgctgaccccgcgcccaggggccgcagtgctgcgatgagcggccccgagcccggcagcccctaccccaacacctggcatcatcgcctgttgcagaggagcctcgtgctcttctcggttggggtggtcctagccctggtgctcaacctgctgcagatccagaggaatgtcactctcttccccgaggaggtgatcgccaccatcttttcctccgcctggtgggtccctccctgctgcgggacagcagctggtgagtacccctcctggttcttctggaagtaaaaagggtgtcttttcggttgaaagtacttttcagcctataagaaacatgcatttgaaactggaactatccacagattgaaagtgtgcatctccagtcttgggatttagagaaatgaaggaggggtagagaggacctggcacccccgagggcgggttcgggccacagctctctgaagtttgaggaagcacagtgatggagatgaggcagggagataattggctgttcaagcaggtgctgtgccaagctgactgagggcccttccctcctggcgtccgggtacagccccagctgtcatcccgcgccagccgccccggattggccgcctggggaactggtgagcagcgggactgaaaggccattggtcgcggcagcaaacatgctaccctgctggataactgaaaacaaacccgtcacatgggttcaggaggcggttgccaggggagcaacttctcagcacttccttttgccgggtcgctgagtaaactgtggtctgaagccaaaccgcctacaccctgaactgttagagctctgtagattacgttcttaaggaaaagagtaacccccttacggcgtttagattttcgtacacccaagcagtagcatagatgctgtacaacgtaacactgagtcagtctgaactgtggacacggggactgctgggtgtgtgtactagactttcttggctatcattgaaccgcttttatagaaatgttgagttgatcttggctcagcagatcacttactgctcctgtagtcacacagcatttgtttatttaacgagcttgtcggg

SEQ ID NO: 14348 - DNA, 1447 bp, Artificial sequence
  DNA replication origin
aaagcaaatttcttattcgtaatcacgataataatccttaacagctattttgaaagttgggacaatttgaaaagttactttcccgatggaagtgagattagaatactttagatgataaaccaaccaagggcaagaacactggaaaaaggtaactctggattcaggcaacagacacactagacagccttgggagcccgtgtcagatggtacaatgctgtggctgctcacctggctgagggccacacacctttcaggtagcagaggtgcctgagagaccctgctcccctagtctaggcacatgcctccagtctggacacacacccggggtggtctgagcaggggtctgcttggcctaagccaatcagcagtgcccaccccgtctctgggaagggacctggggaggctcagcggcggagtgcccagtgatcctccgcatgacgcttggacccatcccacccaggacagaggatggtggcctgtggaccgtgcacccaaggccttggagagggagggctggggctggcatgggaggcatgcttagggatcctgtagggggagggactgcaaaacggggcttggtgtggttgggatggggctcagggctgtgagagtggctaggaggtgtatttagggcggggctggtaggcagggctaggaggtgtttgggggtggggccgtgcccatggccaggctgtgcacagggagcccaggtgcctggctgtggttagggtgcaggttgggagggtgtgatttgggcatgggactgggagggggtttcaggtctgggtctggtcggaggtcagaggtgggggtggaggttgggatcatgggtggggctggtgcagctggtgtggtaagggcagggtcagggccgggacagggtcagggttgggggagagaggggggcactggggtatctcccagttaactcccttcggtggtacagagtgtctttgttatcattaccagtcttcaggagtccccatcactggctcccaccacggtgagatgtctgtcctggcacatgagtcctgaagtcgcccctgacttgaggtgacctgggccaactttcagctttctgtccaggtggaggagggaggaaggaatctcataccattactctatgcagtagctcagagataatatacttaattttgtagctatataaatctgtgtgataaagactccagaaatagcaaggactcatggccgtaagaacatccttttagaaacactgaatgtgcatgctttccaccttctctgtggtgttgcaggcctggcattctggtggccagtgtgcctgctttcctggggttccctgcagtcttgtgggtgcctgctgtcttgggggcccctgctgtcttggtgcctgctgtcttggggctccctgaggtctcgagggtgcctgctgtcttgggggcccctgcagtcttggtggcgcctgctg

SEQ ID NO: 14349 - DNA, 1254 bp, Artificial sequence
  DNA replication origin
gagggagagatgaggatgtgagtgtctttgggtggagggagagatgaggatgtgggtgtctttggggagggagagatgaggatgtgagtgtctttggggagagggagagatgaggatgtgggtgtctttggggagggagagatgaggatgtgagtgtctttggggagagagagagatgaggatgtgagtgtctttgcggagagggagagatgaggatttgggcgtctttgtcgagggagagatgaggatgcgattttctttggggagagggagagatgaggatgtgggtgtctttggggggagggagagatgaggatgtgggcgtctggggggggggagagatgaggatgtgggtgtctttggggagtgagagttgaggatgtgggtgtctttggggagagggagagatgaggctgtggtttctttggggagaggagaagatggggatgtgagtgtcttggggagggagagatgaccatgtgagtgtctttggggagagggagagatgagtttttcgtgtctttggggagggagagatgaggatgtgagtgtctttggggagagggagagatgaggatgtgggtgtctttggggagggagagatcaggatgtgagtgtctttggggagggagagatgagaatgtgggtgtctttggggagggagagatgaggatgtgggtgtctttggggagggaaagatgaggctgtgagtgtctttgtggagggagagatgatgtgggtgtctctgggaggagggagagatgaggatgtaggtgtctttggggagagggagagatgaggatgtgggtgtctttggggagggagagatgaggatgtgggtgtctttggggagagggagagatgaggatgtgggtgtctttggggagggagagatgaggatgtgtgtgtctttggggagagggagagatgaggatgtggttgtctctggggggagggagagatgaggatgtgggtgtctttggggagagggagagatgaggatgtgggtgtctttggggagggagagatgaggatgtgggtgtctctggggggaggggagagatgaggatgtgaatgtctttggggagggagagatgaggatgtgggtgtctttggggagggagagatgaggatgtgggtgtctttggggagagggagagatgaggatgtgggtgtctttggggagggagagatgaggatgtgggtgtctttggggagagggagagccaccacacacagtgaatcaattcttta

SEQ ID NO: 14350 - DNA, 1351 bp, Artificial sequence
  DNA replication origin
tgaacattgcaaatgcgtcacagtttgtaaacccatttcaaatccatcactttaacgaacagacgttttacaaataaagcaataatctcgcgaaattacatgatgggtcctgatgtagtgagagtcagagattagacccaaaatcaaatgcactcccctctgtgatttttttccctgctgatgttgacccccagttggagtgcttggtcagcaggaagtattctgatgttctggaggggcgggagttgccagggtgtattagtgtcttgtggctgctaaagaaagtactataaattgggtggcttaaaacaacagaagttcttctcttagtctagaggctggaagttgaaagcatatccagggtagaattggaggcgtcagcagggccgtgctcccttgggagactccaggagagaatctgttcgctgtctcttctgcttctgggagctgctgccattgctgggcttgtggccgcatagctccagtgttcaaggcctggatcttcacatctctctctgccccatcttctcatggccttcttctctgagtggatctctgtcaaatttccctctgcctccctcttagaaagacccatgtgattgcatttaaggcccacctagatacccaccccgccacctgaagatccttcatttaatcatagtctgcaaagcccctatttaccacataaggcaatactcacaggttccagagatgaggatgtgggtgtctttgaggagagggaaagatgagaatgtgggtgtctttggggagggagagatgaggatgtgtgtgtctttggggagggagagaagaggatgtgggtgtctttggggagagggagagatgaggatgtgggtgtctttggggagggagagatgaggatgtgagtgtctttggggagagggagagatgaggatgtgggtgtctttggggagggagagatgaggatgtgagtgtctttggggagagggagagatgaggatgtgggtgtctttggggagggagagatgaggatgtgagtgtctttgggtggagggagagatgaggatgtgggtgtctttggggagggagagatgaggatgtgagtgtctttggggagagggagagatgaggatgtgggtgtctttggggagggagagatgaggatgtgagtgtctttggggagagagagagatgaggatgtgagtgtctttgcggagagggagagatgaggatttgggcgtctttgtcgagggagagatgaggatgcgattttctttggggagagggagagatgaggatgtgggtgtctttggggggagggagagatgaggatgtgggcgtctggggggggggagagatgaggatgtgg

SEQ ID NO: 14351 - DNA, 2700 bp, Artificial sequence
  DNA replication origin
gggtctgagatcttactctacttgcgggctaacaagttaggctgccatagttttgtggatgctggcaaaagacacaagactgctgcatcagagacaaggatggtgttattactcacagtcacagcagcaggcagagtactagccgtttttgtctaagttatttaaggcctaatccccacagaacgagacctgcactcactgtggattccgggacaggagaggatcctccagcttagggaaccaggatcttttctctgcaggggaaacttcatattccaaaccagggttgtctgcagacatccgtgacaagacatcctggggcagaggttattgagatctttgctttcaggatgtacagacagtcaggagacccgtggaaaattgtgtccctacaaaatataacattgttggctactatttattagtaatggcaaaaattgcaattacttttgcaccaaccacatggaagaaatcatgcccttcatgaacattcagagcaatgaggactcagagtaatgaggactgagggcaatgaggactgagggtaatgaggactgagagcaatgaggactgagatcaatgaggactgagggcaatgaggactgagggcaatgaggactgagatcaatgaggactgagagcaatgaggattgaggggaatgaggactgagatcactgaggactgagggcaatgaggactgagagcaatgaggattgagatcaatgaggactgacggtaatgagcactgagatcaatgaggactgagggtaatgagcactaaaatcaataaggactgagatcaatgaggactgagatcaatgaggactgagggcaatgaggactgaggggaatgaggactgaggggaatgaggactgagatcaatgaggactgaggtcaatgaggactgagagcaatgaggactgagatcaatgaggactgacggtaatgagcactgagatcaatgaggatgagggtaatgagcactaaaatcaataaggactgagatcaatgaggactgagatcaatgagtactgagggcaatgaggactgaggggaatgaggactgagggcaatgaggactgaggggaatgaggactgagggcaatgaggactgagatcaatgaggactgaggggaatgaggactgagatcaatgaggactgagggcaatgaggactgagggcaatgaggactgagagcaatgaggactgagatcaatgaggactgacggtaatgagcaaagagatcaatgaggactgagggtaatgagcactgagatcaatgaggactgagatcaatgaggactgagatcaatgaggactgagggcaatgaggactgaggggaatgaggtctgagggcaatgaggactgagggcaatgaggactgagatcaatgaggactgagggcaatgaggactgagatcaatgaggactgagggcaatgaggactgaggggaatgaagactgagggcaatgaggactgaggggaatgaggactgagatcattgaggactggggggaatgaggactgaggggaatgaggactgaggggaatgaggactgcgggcaatgacgactgaggggaatgaggactgaaagcaatgaggactgaggggaatgaggactgaaagcagtgaggactgaaagcaatgaggactgagatcaatgaggaccgaggggaatgaggaccgagggcaatgaggaccgagggcaatgaggactgagatcaatgaggactgagggcaatgaggactgagggcaatgagaactgagatcaatgaggactgagggcaatgaggactgagagcaatgaggactgagatcaatgaggactgaggggattgaggactgagatcaatgaggactgagggcaatgaggactgaggggaatgaggactgatggcaatgaggactgagatcaatgaggactgaggacaatgaggactgaggggaatgaggaccgagatcaatgaggactgagatcaatgaggactgagatcaatgaggaatgagatcaatgaggaccgagggcaatgaggaccaaggggaatgaggaccgaggggaatgaggactgaggggaatgaggaccgagatcaatgacgactgagatcaatgacgactgagagcaatgaggactgagagcaatgaggactgagggcaatgagcactgagatcaatgaggactgagatcaatgaggactgagatcaatgatgactgagggcaatgaggactgaggggaatgaggactgagggcaatgaggactgagatcaatgacgactgagggcaatgaggactgagattaatgaggaccgagggcaatgaggactgaggggaatgaggactgaggggaatgaggaccgagatcaatgaggactgagggcaacgaagagcgagatcaatgaggactgagggcaatgaggaccgagatcaatgaggactgagatcagtgaggaccaagggcaatgaggaccgaggggaatgaggaccgagatcaatgaggactgagatcaatgaggactgagagcaatgaggactgagatcagtgaggactgagagtaatgaggactgaggggaatgaagattggaaccacctggggagaaaggctgggtggctgtgggcgtgcagagccaggctttgcagagtgggacgcatccacaatctcgtcttctgctgacagcccagtgaagggcctctg

SEQ ID NO: 14352 - DNA, 1294 bp, Artificial sequence
  DNA replication origin
ggaagaccctggcagagcccgaggaagatcccgagaaagccccaggaaggtcccgagagagccccaggaaggccccaggaaggtcccgggagagccccagggaggtcccaggagggccccaggaagcgcccggcaaagccccagaaaagggaaagcgcagaaccagccccaggtcgggaggccccgcagcaacaggagtggtgtcaaggggaggttgcctgcaccacggccggccgtagggccccacagtgtagggtgtgggttttttcattgttttgttgttgttgttgtttatttgtttgttttttgagacagtctcgcgctgtcgcccaggttgttgtgcagtggtgcgatcttggctccctgcaacctccacctcccaggttcaagcgattctcctgcctcagcctcccgagtagctgggactacaggcacatgccatcacgcccagctattttttgtatttttagtagagacagggtttcaccatgttggccaggatggtctcagtctcttgacctcatgatccacctgcctcgacctcccaaagtgctgggatcacaggcatgagccactgcgcccagcctagggtgtggttttatgaggcacgatgcccaggtaatatccccaggtgggccgcaggtcactaaaggtgcgtttctgccattggtgaggtgggagaaaggccctgtgcctcacagtgggcagatctttctggaatgcgagctgaggccgttgaagcgcctgctgtgtgtggggcagagacaggtgacaagccttggcctgcctttgaatccctgtctttggctccaggggccactggcagtgtctgaagctgatttggttgcaggaggggctgccacaggcatctaaacgggcagaggccagggatgcaggcaggcccaccgccatgcacacgatggccccacagagaggcccccagccctgcacaggacagccccacacagttatcctgttcaaatgccactgaggcgaggctgaatatcctggtcaagagagacaaagacaggcatccacagaaatgctctgatgggttcccaggggcatggggacagggtgaggagccactcagccgtacagtatagccgtccccctggcagtgtgggcattggccctgttccctgggctccaggacagttacttgcagatttcttgttgcatttggactctgtttaccatcactccatggatattaacagggtgcctacactacaagttcagatcgcacgagggagaccaggtccccttccatctgttaggaccgcagtgggga

SEQ ID NO: 14353 - DNA, 891 bp, Artificial sequence
  DNA replication origin
tctgtgtgggggctttctatggtggtgctctctatagggatgctctctatgtgggtgctttctttagggggtgctctatgtgagtgctccctctgtgtggatgctgcctctgtgtgggtgctttcgctaaggggtgctctctctaaggggtgctgtctctatgggggtgctccctctgtgtgggggctttctctatggtggtgctctctaggggtgctctctctatggggtgctctctctataagggtgctctctctataagggtgctctctctatgggggtgctttctctaggggggtgctctatgtgagtgctgtctctatgggggtgctccctctgtgtgggtgctctctctatgcagatgctctatatgggtgctctgtgggagtgctctctatgtgggcactctctttagtgagtgctctatgtgagtgctctctctgtgggtgctccctctatgtgggtgctctctgtatgtgggtgctctctttactgagtgctgtatgtgggtgctctctctatgggagtgctctctgtgtagatgctctagtgagtgctctctttatgtgagcgccctctttatgtgagtgctctatgtatgtaggtgctctctttatgtgggtgctgtctttagtgagtgccccctcaatgtgttacttgctctatgcgatgctctcttatgtgactctgcagtccctggaaccactgaaggggcggatggttgttataatcggatgagagcagctagttaaaaaagcagattgcaaggcggctggggactgagtggacccggtggctatttctattacatttgtaatttgaccttccagttttttacgtttcagccacttacgtgtcatccctgctctcaaagcttcattttcagcaatc

SEQ ID NO: 14354 - DNA, 3483 bp, Artificial sequence
  DNA replication origin
atgacagtgtctgctgtaggtctagcccctcccctggctctttatatatgaggttgcaccaacagagttgcagacatcagcctttttgcacctcaaaatggccctttaatggggaccggctggtccttgtcccactcggccctcacagcagccctgagggcaccagttgccacttggacagctgaggaaactcagaggggtaactgcccacgttcagctggtgacgaacggcagaggctggagttgagtcccacatctgccttttcctgcctgtgcggtctgagcggctgtggagttctctgggcctcagtcttctcatctgagaaagaggataaagacagccctcctcttacaggactgtcatgaagcttagccgaggtcacgcatgttagtgtgagccacgttcctggtgctgcgatgccccaaggcggggctcgacccactgctgttccatttcattcacggtgttcatccaggtaagcctcgccccggtacacatcaggaggtgaaaggagtcagagagggatggctcctccccagactgagccgtccagcatcctcctgggtcctcgctcatgtccgtgtcccctgcacaccagcagagcaaggggcaagatgtgccaccctatacataccccagccggaagcttctcgggccacttctgctactgtcctgggccacatgttcccttagctacatggagactggggagcgaaatctttcacagagtatccggggcagcctagatggttctagaaggaaaagtggatactagaggacaagtggcagtctctggtgcagccacaaatgcatcaggtggctggactgatctaactgaataggcacagtaacttgtccacatgttcacagctgcctctgagggggtctctgcctcttggtcccaccccaaaatggagcttcctccagtccaaagcagtctcagacccaaaagtgtgagggaggctcttccctccactcctgcagtgggacctttgccggtgtggcaggagcagcaccatgacggctgtgatgaggcctggggctgtgcagacccaggagggccctggctgggctgagctgtggctgagggtccctaatgggtcctgcccaaggtcttaggtgcccagccgccttcctcatgcctccccaggctttcctcctccatttcaccttcgctgtccatcctgtggaggaagaaaccaagagacactcacagaaagggtcttaggggtaagagacaaatgcccagttcagggggagcgtatgggcttcctgcaactaccacgcaaagcaccacagaccatgtggcctcagcagaaatggatcatctcacgattctggaagccggatatccaagagcaaggcgtcgcagggccacagtctctccagggcaccagggagggggtctgtcccatcctctctggctgccagtggctccctggctggccacagcatcactccactattcctctggcagtctcctcatgcgttcctgtgtccatatttccacttgttaccaagacgccggcacactggatttggggccaccgtattccaggatgacctcatctgaacttcttacagtgccaaagaccctatttccaaataagctcatgttctaggtgctggggagttacgctgttaacatataaattttagggggaacacatttaacccatagcaaaggttctatctagggtgggggaacggggagaggccaggaggaggggagcccaagggggctgagctgtgttgcacgttctgtttcttaacagggcgggaacaacttgtatccatttcattattctttgtatgttttatttgtcttaatgaagtaaagaatggaaaatatataaacccaccacaataaagggaagaggaggaaacaacacctaatgcaataacgagcactgggttgtgtggcccaggaagccgggaggggagcccggccgaggagaccgcaggaagccgggaggggaggccggccggggagaccgcaggaagccgggaggggaggccggccggggagaccgcaggaagccgggaggggaggccggcccgggagaccgcaggaagccgggaggggaggccggccggggagaccgcaggaagccgggaggggaggccggcccgggagaccgcaggaagccgggaggggaggccggccggggagaccgcaggaagccgggaggggaggccggcccgggagaccgcaggaagccgggaggggaggccggccggggagaccgcaggaagccgggaggggaggccggcccgggagaccgcaggaagccgggaggggaggccggcccgggagaccgcaggaagccgggaggggaggccggccggggagaccgcaggaagccgggaggggaggccggccggggagaccgcaggaagccgggagcggaagtcggcccgggagaccgcaggaagccgggaggggaggccggccggggagacctcaggaagccgggaggggaggccggcccgggagaccgcaggaagccggaagccgggtctctaggaagccgagggagtgtgtgagcccagcaggccgggaaactgggacccgagacccccgagggacagcatgagagggaagaggaagagtggctggacgtctttcggggagcagttaggcgctggcatggtcttccaaccctgctccggccgacgacgagggcattggtttcgggagaaattgaaccagaaacgctctgtcctgggagcagcagtcacgggaccggggttcagggtagggcccaggctgaaagtggggattcggggaaagtctacccactgagtgaggcccagcacacgcggggtgaagaaccccaaagtcttgctccggccctgaagtggccttgagcttccgcacagcgacactgcaggtcagaagcctgtgcagcggcgtcttcaaacatttcagggaaatgccttccgggctggaaacctgctccagccgcgtactccttgaccctactggtggagctccgatgatggccgagcctgcacttgcgaggtctctgcaccctctctgagcttcctgcgggaggggggcggggccggctacgctgcatggggagcagctgggtttccaaggcaggagaaccccaggacgacgcggaggaagcctccaggacggaggtggtgaaaggagatctgcaggctgtgtgaaggacactcatgccttgccttccagagtccctccttcgcttctcagcagttttggtggctggctccagactccgtggctctcctgctctctccacctcccaggtctgtcattgcctacaaagggcaaagtgtggtgcccggtggcaggacgaggcaagaatgagcgtcgtcatctcctcccacaggcaccgagagttttggccctgttgtttttgtgcaggaagaattccccagccttctcttttgtttttcccccttactaatattattttccagctgtttacccccacgaatgaaaaaaa

SEQ ID NO: 14355 - DNA, 906 bp, Artificial sequence
  DNA replication origin
ccccgcccggccagccgccccgtccgggagggaggtggggggatcagccccccgcccggccagccgccccgtccgggaggtgaggggcgcctctgcccggccgcccctactgggaagtgaggagcccctctgcccggccagccgccccgtccgggagggaggtgggggggtcagccccccgcccggccagccgccccgtccgggaggtgaggggcgcctctgcccggccgcccctactgggaagtgaggagcccctctgcccggccagccgccccgtccgggagggaggtgggggggtcagccccccgcccggccagccgccccgtccgggaggtgaggggcgcctctgcccggccgcccctactgggaagtgaggagcccctctgcccggccagccgccccgtccgggagggaggtggcgggggtcagccccccgcccggccagccgccccgtccgggaggtgaggggcgcttctgcccggccgcccctactgggaagtgaggagcccctctgcccggccacgaccccgtctgggaggtgtgcccagcggctcattggggatgggccatgatgacaatggcggctttgtggaatagaaaggcgggaagggtggggaaaaaattgagaaatcggatggttgccgggtctgtgtggatagaagtagacatgggagacttttcattttgttctgtactaagaaaaattcttctgccttgggatcctgttgatctatgaccttacccccaaccccatgctctctgaaacatgtgctgtgtccactcagggttaaatggattaagggcggtgcaagatgtgctttgttaaacagatgcttgaaggcagcatgctcgttaagagtcatcaccactccctaatcttaagtacccagggacacaaacactgcg

SEQ ID NO: 14356 - DNA, 1482 bp, Artificial sequence
  DNA replication origin
agccgggcagaggcgcccctcacctcccggacggggcggctggccaggcggggggctgatccccccacctccctcccggacggggcggctggccgggcggggggctgaccccccacctccctcccggacggggcggctggccgggcagaggagtcctcacttcccagtaggggcggccgggtagaggcgcccctcacctcccggacggggcggctggccaggcggggggctgatccccccacctccctcccggacggggcggctggccgggcagggggctgacccccctcccccctcccggactgggtggctggccgggcggggggctgacccccccacctccctcctggacggggcgactggccgggcagaggggctcctcacttcccagtaggggcggccgggcagaggagcccctcacctcccggacggggcggctggccgggcggggggctgaccccccccacctcccccccggacggggtggctgccgggcggagacgctcctcacttcccagacggggtggctgctggacggaggggctcctcacttctcagacggggtggttgccaggcagaggtgctccccacctctcagacgatgggcggccaggcagagacgctcctcactttccagacggggtggcggccgggcagaggctgcaatctcggctctttgggaggccaaggcaggcggctgggaggtgtaggttgtagtgagccgagatcacgccgctgcactccagcctgggcaccattgagcactgagtgaacgagactccgtctgcaatcccagcacctcggaaggccgaggctggcggatcactcgcggttaggagctggagaccagcccggccaacacagcgaaaccccgtctccaccaaaaaaaaacgaaaaccagtcaggcgtggcggcgcgtgcctgcaatcacaggcactcggcaggctgaggcaggagaatcaggcagggaggttgcagtgagccgagatcgcagcagtacagtccagcttcggctcggcatcagagggagaccgtggaaggagaccgtggggagaggtagaggtagaggtagaggtagaggttagaggttagaggttagaggttagaggtagaggtagaggtagaggtagaggtagaggtagaggtagaggtagacgtagaggtatcctttaatctttctaggacaggtacagtggctcatgcctgtaatcccagcactttgggaggccgaggtgggaggatcactggaggcaggcggatcactggagccaaggagttcaagaccaaccagggcaacatagtgagaccttgtctctacaagaagtttaaaaaattagccaagcatggcggcgcatgcctgtagtcccagctacttgggaggatgaagctagaggattgcttgagcccagaaggcagaggctgcagtgagcagtgatcacaccactgcactccagcctgggcgacagagcaagctcctatctc

SEQ ID NO: 14357 - DNA, 1166 bp, Artificial sequence
  DNA replication origin
caaacataattggggtgccaaactgggcttcttaatctcgaagccaggatgggcgggtgtggccgggggtgcgcggggtcagccagcttggggtgctttccttcggggctcacaccggcagcgcggaccggccgaggccgctgggactgcaagtccgccgcctgcttttgttctgggttctgctgtaatttaacataaaacgcctgttagaatcactgctgccgaaacacgcgtttctccttgttttgccaccaactaacaggattaggcaacaagagcgagatttcaaattaaccataaaaatgacaaattgcaattcatttagctgcccacttactacattaaaaaacataaataaatgaatctgcgtattcagagggttgaacggcccgcaaggaagcgaaagcggttgaactcaggcctccgggtgggagtcagggctgtggcgctggcgagagcgggccgccgcggaattcgcaccgtcttccaagggcccggaaagaggcagcttgggtcattcgaggaaccgaggaggagggaggaagctgcgaggcccgagcatttttagcacctgaattctccctgcggagggactgtgtgggggaagaagggtggggcgcggaggcaggtctagaggggagagcgctggttccagttcgagcttgtcggaaggaaaggcgagaaaactcagcaaacgtgctttgcaaaattctggggagggggtgattctcgtgtggtgccccgtgtgtgaagaatgagacgctggcgaattttgcagtgagtttggaagagaccctggctaaattactaattccagtccatctgcaagagtacccccttgccttttttgttgtgttttgtttttagggaagcagccccttccccttgcgaagccgcgatgggcttaaaacctcgtttgtgcattgaagcttttcgagatacggatactcagaaacctacagatttgtctgagcagtggacctggcgggaggcgtgggtcagggtgggtgagcagagagggaatcctccctcctgggggaggcggatgtgggcgggagtactcgatcttcccccttggccaagcattacccagagggaaacactgaccacgctgcgcactcaccagttttattttttgtttttagttccagagttttcgttcctaa

SEQ ID NO: 14358 - DNA, 1194 bp, Artificial sequence
  DNA replication origin
ccccgcacagcctgcttggtctcctgctgtgttatcagggaatgggttcttgagcagcaattgtgcccccgtggcaaagggaagcgaacacagacttagagggtttgctttttaaacacttgaggtctcacaaggccttagtccagatgtaagcagaaaacctgggtctccatggcctcagaccatccagctcccaagcccaaacctcacctttaacatggcacagaatgttacaaaactcttcccaagatatcagtaataataggtcatgttgatgtggctcttaagatgggccaagctctagtgcaaagaactttctatgcattaatgatttaatcctttcaaaaaccctattgggtgggtaacagtgtttccctccaagttgaggaaaccgagtgttacaagctgaattgtgtgtccctaaatgctatgtggaagtcctcaccccagaacctcagggcgtggccttattcagaagcagcgtccttgctgatggaatgagttaggctgaggtcaggctggagtgggcaggggctactccaacatgactgtgtctttctgtgtccgaattggtgggttattggtctcactgacttcaagaatgaagccgcggaccctcgcggtgagtgttacagttcttaaaggcggcgtgtccggagtttgttccttctggtgggtttgtggtctcgctggctcaggagtgaagctgcagaccttcgcgtgagtgttacagctcttaaggcagagcgtctggagttgttcgttcctcccggtgggctcgtggtctcgctggcttcaggagtgaagctgcagaccttcgtggtgagtgttacagctcataaaggcagtgtggacccaaagagtgagcagcagcaagatttattgcaaagagagaaagaacaaagtttccacagcctggaaggggactggagcgggtggcaactgctggctcgggcagcctgcctttattctcttatctggccccacccacatactgctgattggtagagccgagtggtctgttttgacagggcgctgattggtgcgtttacaatccctgagatagacacaaaggttctccgagtttccaccagactcaggagcccagctggcttcacccagtggatctcgcactggggctgcaggtggagctgcctaccagtcccgcgctgtgcgcctgcactcctcagccct

SEQ ID NO: 14359 - DNA, 1201 bp, Artificial sequence
  DNA replication origin
caagcctggctggcatctatcacagtcaggcactgtgtgcggctctaggcacacaaaggccaggtctgcagggggatgccagtcagaggggaagggagacaggttgccctgaggacagcaacgtggtcagtgcgtcagtgctagggcaggcgggcggtgatctcagcgggagggacaggcatctccgaggcaggggacgggtctgccagtggtcccaggtgctgtgcttcctcccgcactcctgccttgaggtttgtggccccacctgtcacctgtccttcctcagccttttctggtcgccagaacgcctccttgcgtagtagtagttacaactactgaaccctaatagttactactactgaacactaatagttacaggaaaattgtcaggtgttaagtagaagtgtaaaattgagactgtttccctggcataaaaagaattgaacaccagagttgtggagagaaagacatcttggtcatggagaaaaagttctgtttatctcttctcggaaaactgcggaactctcggatgccaccttagagaagccacacagctcaagagatgtgctgggtctccacgcagcaggggaagcaggagcagaggcagggctggagaacaggaggaggaacgtggcaagggtgtggctggcagctggcgaggctgcagtccatgacgtggggggattcggtggcaggggtagcctgcagggggcggcagtgagcggagcgcaccctgggtggtgagtggaggcctcagctccagcctggctccggcttgccacgtgaacatggagggctggcccctcgcctcccacccttttccctcctggtgtctttggacggttcagggcttcctaacttctcgaagactcagtgtcttcttctgtgggggcagccttcacaaagtgccacagacccgggggctgaaaacagtggaaatgtatcctcccacagctctgcaggctggacggcagagacccaggggtcagcaggcctggctgcttctggagatttcgagggagggtctgtcccaggccctctcttagctgctggtgccactggtaactcttggcgtcacgtggcttatggataaattgctcccgtctccgcctccgtctccacttggtctcccccaggtgtctctgtgtctcctctggtcttagaagtgagaggtgacagagtgctggcagtcctcacagcc

SEQ ID NO: 14360 - DNA, 913 bp, Artificial sequence
  DNA replication origin
cacacgtctctggaaccgtataaagttatgcgtctgagtggctgacagcagcctccaggctaaacttttgatccgctgtgtgctgacatcttcaaaccagagcgggtctctccctctctgttcctgggttggcggtggcaggtctcctgcagtatatggcatgcaaataagcaggtctgcgctgtcactccctagctgccagacccctgcctggtgcctggaggtggctgtccctccagccacctccagcagcgaggccagagccctaggctgctccccacccctttgtttccttctgggaggtgctggtgaccgaggctcaggagggcacctgcccctaggaaggggctcccccagggatccccgcagtagagagggggccactgaggggtgggtgggcagtggctgggggctgcctgcatggactgagcttcctcccaggctcaacccccaccccccatcaaatccacctgactcgcagaggctgttagaactggggggctgtgaatctggccacctggcctggtcccatagctaaggttcagtgggagtctcagccccagctcctggcatggggtagctcaggaaaggggctggagctgacaggtgtgatgagggtgaggtgggtgaggtgggtttggggccaaggggagcctgggaaaccaggtgagaggtatgggaggctgcagtggggccaggaatcctgggtctcatccttgttcccatgccagcagcacaggctgacactttgtcacagatctactgggtccccaccacttagcccctctgtccagcctccgcagcccctgggagtaaagccctttaatctgaagactcaaaaacccatctcttcctggagccagaggcccaagtggctgccagtgagagtctgctgccagccctccctgctggg

SEQ ID NO: 14361 - DNA, 2031 bp, Artificial sequence
  DNA replication origin
tgtgagagtgtgggctgtgggagtgtggggtgtgggagtgtggggtgtgggagtgtggggtgtgggagtgtggggtgtgggagtgtgggctgtgggagtgtggggtgtggggtgtggagtgtggggtgtggagtgcggggtgtggagtgtggggtgtgggagtgtgcggtgtgggagtgtggggtgtgagagtgtggggtgtgggagtgtgggctgtgggagtgtggggtgtggggtgtggagtgtggggtgtggagtgcggggtgtggagtgcggggtgtgagagtgtggggtgtgagagtgtggggtgtgagagtgtggggtgtgggagtttgaggtgtgcgtgtgtcgggtgtgggagtatggggtgtgggatgtgagagtgtggggtgtgagagtgtggggtgtgggagtttgaggtgtgcgtgtgtcgggtgtgggagtatggggtgtgggatgtgagagtgtggggtgtgagagtgtggggtgtgggagtgtgggatgtgagaatgtgaggtgtgggagtgtggggtgtgagtgtggggtgtgtgaatgtggtgtgtgagagtgtggggtgtgggagtgtgcagtgtgtgagtgtggagtgtggggtatggggtgtgggagtgtggggtgtgagagtgtgggagtgtggggtgtggggtgtggtgtgtgggagtgtggagtgtgtgtggagtgtggggtacggggtgcgggagtgtggggtttgggagtgcaggatgtggggtgtgagagtgtggaatgtggggtgtgggagtgtggggtatgagtgtgtggggtgtgggagtgtggggtgtgtgaatgtggggtgtgagtgttgtgtttgtgggggggtgtgggaatgtggggtgtgggagtgtggggtgtgagagtgtcgggtgtgggagtgtgagagtgtgggagtgtggggtgtgagagtgtggggtgagtgtggggtgtgagaatgtggggtgtcagattgggtgtgggagtgtggggtgtgagagtgtggggtttgagagtgtgggatgtgcgagtgtggtgagtgagaatgtggggtgtgggagtgtggagtgtgtgagtgtggagtgtggagtatggggtgtgggagtgtggggtgttggagtgtggggtgtgagaatgtgggagtgtggggtgtgggagtgtgagagtgtgagtgtgggtgtgggagtaggagtgtgagagtggggcgtgggagtgtggggtgtgggagtgtggagtgtggggtgtgggagtgtggggtttgggagtgtggggtgtgggagtgtgggttgttggagtgtcaggtgtgggagtgtggggtgtgggagtgtagggtgtaggagtgtggagtgtaggagtgtgagagtggggcgtgggagtgtggggtgtggggtgtgggagtgtgtggtttggtagtgtggggtgtgggagtgtggggtgtgggagtttgaggtgtgggagtgtggtgtgtgggagtgtggtgtgtgggagtgtggtgtgtgggagtgtggggtgtgggagtgtggggtgtgggagtgtggggtgtgggagtgttggttatgggagtgtggggtggggagtgtggggtgtggggtgtgggagtgtggtgtgtgggagtgtggggtgtgggtgtgtgtggtgtgggagtgttggttatgggagtgtggggtgtgggagtgtggggtgtgggagtgtccggtgtgggagtttgaggtgtgggtgtgtcgggtgtgggagtgtcgggtgtgggtatgtgtggtgtgggagtgtgggttatgggagtgtgcggtgtgggagtgtggcaggccaccctgagctggagagagcagcgacggctccaccttccctccagggctctctgcttcttcccgccccagccaccgtctccttgcctggcccggcgcccctcgggacctgacagttgtcaaccccttagtgtagatgttcttgacctgctgtacctcctgggaataaaggagaaatcgcctaaaggaatgagtgtgtaatagtgaagttccagacacagtg

SEQ ID NO: 14362 - DNA, 1047 bp, Artificial sequence
  DNA replication origin
gaaggaagccagcacagggttgggatgcgggctctgggattgcaccagggagctgggctctttctagccccccacagtccagccatcaatcaaacagacaaacacattgacaagagagcttcatgctgccaaaagcttaaaaaaaggcaaacagggccgtgtgtcatggtcaagagtgctgggtgggggccctgtaggttgggtggtcaggaaaatcctccctgaggagcagacatttggggacggcccagaggatgggaaagactgagacctggaggaacactgaaaggcttcattccagccagagaagggcaggtacagagggctcagagggaaccagcctgggctgttgtggaaaataaaaaggccgaagggagtggggtgcagtgagggggacggagtgccagaaggtacgatgggaagtattctgggagcagggaaggggggccctgcaggccctggggtagagcttgaagtccagggtggtggatggaagtgcctggaggatttatccaagggaactgatttgcttataggaagaagatcattttggctgctgtactgaacataggtggacaggagtggaaggagggagtcagtgatgagtcctggtgagagaggatggtgggatggcagaagcagtgagaaggggtgcaggcagggagcaggagcaggagttcggtctgacgagaatgatggaggagagaagctagccagggaagagtgtttccaagatcccagtgatggtgggagagtctgtgctggggaggccccaggggggcaggtgaatggactggagccttccagagggtgagggagggggttgcccagccacagctttgagcctaagagggggctctgagggaacaggagtggagctgaggttttggaggtggttgctttacagagtgactgtgggcgcaggtggccaagtggaatagacgaacagttattattggagaaggggatgtcaaagaacgaggtggccaggtgagtcctccatgatcttctttcttggcccatttcggcattttcttcctgcccctg

SEQ ID NO: 14363 - DNA, 1174 bp, Artificial sequence
  DNA replication origin
acatctaaatctatccgttgctatatacaaaagctctttggggggctcagtaaatttctaagagcataaagcagtcctgtgaccaaaaagtctgggagcactggcttcatgttactgtgtgccagtccctttagcaggactgggggtacagccaggaagacgaggccctgccctctggaaggtatgttctagatgagagaccaataataaacgcaccaacacctttacaactgcaagtagccataagtgctgtggggaacacacctggattagggagtcattttagatcatgtgacccttctctggggaacagtctgtgcccaaagatatggagaaagaatgtaccagatgaacaaagagtcaggaccaaaggaaaagagctcccctgaggtggccatggcttggaggctcaagaactggcaaaactagacttagaacctcaggtgagggaggtggctggtggatttcattgtgccttgaaggacattgtaaggatgtgtctaattctcatgcacatggaaaccactggttttgaccaagggtaggtctgagctgaagcttactctgttgtagggagagcggtggaccacagggcacatgtgtgaggtggagagctggttaggaggccatgcaaccctgcaggtggagggggaaagggcttgggggctggtggaggacgcaggagtatgggggagctgtggaaaagacgtggaggcagagccagcaggccttgctaagggacaggaggtggctctagagagaaaatgagggatcagggatgtctcctggggggtggccagctgggtgactgggagaaactgggaaggcgcagatcagggcagcaggggtagcgggatcgggggtgctctgaagtgaacacgtgaaattgaaggtgctcgtcagccttccagtggaggcatccaggaggcagctggaactggaaggaaatggtgacagtcgtcagcaccgtagaggtggcggtggtggtggttacagctggacccctctgggctggtgggaagtgtggaggtgaaggagcagggagcagggggaggtggagaaggaaacctcaggcttacattttcaccctattcttggctgccatattttcaggaagtccctcttgaggctgggacagagggtggggacagttcagtctccctgagagagttta

SEQ ID NO: 14364 - DNA, 956 bp, Artificial sequence
  DNA replication origin
ccctcggctgggagccgagccccgcagccaagccccaggcgccgggcggggaattggggccgataggagagcaacaccttccccggggcgagcagagagccaccgtcggctcctggggctgacgttccgacccggcctgtagacaaaggccgaaacgaaggggcgcggggagcaggggtggggcgggcggggccaacgggcggacattgcgtgtctgcgctctcctctgggcgaaggaggaccggcctacaggcccaccgggcgagctcggggacggggtctgggaggctgggtctagggtctgagacttcttcagaataacccccggaaggagggggttaaatgcggcagcggcgggcctgaaaagggccaggagcgtcgtaggaactggggtgcacaggccctcgcgtgcccagcgcttcgcctttccccgccccaggcctgccaggggcgcgcgtggcgcgggcagagcctggtgggtgggttggcgcggacagaagctctgccggggagcggggaggggggggcagtcgcattgcacgtcctggttctgccccgatcgctggagaagcgcctgtgctgagcccaagctccctaggtgttggggaagcagagtgggccaggagccgactggggaccgcccttctgtcctgacttgatacttagcccaggctcgcccggggaggggggcggctgggggcaggtgggcagatctccagagctggcgtgtaaagatgcagaaactgtccctcacctggtttctctggaaagcagctgcttctgaaggagaatctgaaggatggctctacttgtgctagtaacccccacacctaaaccaggtcctctgtgcccgctcccccttccggctctccagcgccaggggagccttattctgggtgacctgccttcccaagaatcgcctttccttggcagctccctgcctgctctcttgtcct

SEQ ID NO: 14365 - DNA, 1383 bp, Artificial sequence
  DNA replication origin
gagccccgcagagctccgcggcccgagtcgcatgggtgagagacgcgaggccagggcccggccgggccgggctgggccgcccgcgctccccggccgtccgccgccctcgccgcctcggcctccgcgcgggctcggaaatttccaggccactcggcgcaacctgagacactttcactctggatttttgttcttatttttaacagagccccctcgagtgacgtcgcaggccggtctcctggacacgtgcctcgggccaatggccgcggcgccgcgcgcccacgtgacgctccggccgccgctgggtgacaggagcagcccgccgcccctcctccccttaaagcggccgcgtcccccgctccgggtgcgggagcccaggaacccggagagacccccgaccgcgtctcctgcgctcgcccgcgctttccctgtcgcttcgcggttcaggggtgtgagtcacccggcgacagccccgccaggtcaccccggggcgcgtaggtggacacgcacaggaagatcgctatttttaagatttccatattgtttaccgtggggcgaaatcccacaattccttgcacaaaatgcataaataatattaaatgagctgccgagatacaaagggacttttgtggtccgctttccttgctgatggagaggaatagtgtcactcccatttgactcggtaacccggcagcttcctgtcttaaacgcagagctggcgcgcaggacactcctcctgcagacacttattgtaagtgtgcgtgtgtgtgcgtgtgcagggaggcgcgtgcatacggccgcattccacccggggacagcgaccctcatgaaacatgcttagcgatccgaaagagcgggggaatgcagtatgcggctccatttgcgaagggagaaatccaggagcctcggaggttctaaaggaatcctttttgccaaggagaggaggggtgactgttcagctaagacttcaaaaccaagtcgcccgcccccctctaacttctctactctgattgaggagctcccagaccggtcatctcgttttctttgttttaaaatcctttaaactaattttgccggagagcagggcccatttgaaacgagaattaggaatccaacggcaagggtgggagccccagttggtttctcccctcctctctcttcatcttttctagactttccttccagctgttgtcagaatgtccaactggaagttctgtttcctcttctcttccccctcctccctcgggctccttcccatttgctcttgtctacccaccaaacacccgttgttaccccaggctcgcctgtccatcatttaaaatgcatttttatggaaatgtgtgaattcctggaaacatccgatagggcagctctgggggtgcggga

SEQ ID NO: 14366 - DNA, 1410 bp, Artificial sequence
  DNA replication origin
taaatttccctaaaataataatttttaggtttttttcttgattttctttcaaaagacaaatacttaggagtctcagaaacagaatcaaacctccccaagaaaactctctctcccctttctttcggagaaaccaaagaacagaaacattatcttgcagggatattttaaagcccatgaagataggcgacttgggctgggctgagctgggccgggccaggccgggccgggcggtgctgcccagctcccgggccgttgggggctggctcagcgaactcccgcgccgcacaaagcccggccgagtctcctcgcccggcattgtgagcctgtatgttaattaaatattaacaaaggaggaagacgagaacaatggagcaaatttcagatctagctgagaaatctgaatttcatcagaaatatgcacgcatagttctgcgggatggcggcccaagggttggctcactcctgctgtgatctgggcaaatgacccccgcaaaatagttgagggtttgggggcagcggggatccgctgccagctcggggtcaaacagtccacttctaatggcggttcccagccgcagacccgcatggaatgcagttgatgatttctacaaggacatggacttagttttttaaaatcgcagatctatgaaaaaatatatccagcatctctgcagggcccctgcgaatgctgcctctttcccatcagcagcccccaggaaaccctgagagaaggtcctttctatttggggatggcaggtgccgggagggacggctgcctcccttgtcctcgctgtgtgcaggaagggggctgagccccaccactgcgggctggcgctggcaaacaaagtggagccaaggggaaagggcgcctttattttcctccttccctgtgtgcatcctcctgagtcccaccggtcagcgcaggcccgaggggcagaaggcagagcggcaaagggcctcgccttttcttccccgagcacagccgggataaccggatggtaggacaagtctggggtgggctggggcatgcgtccccggcctggcctgagttggaagatcgtagggaaggggatgagagtgtgcacttccgggcccatcttccagccaccacgttcccaccaaaaaaaactacagtgggggagacatgggctaggggctgggaagagatgcgccaaggcggggtggaagacagagaggggagacagggagagaggaaggagagagagagacagagaaagaaagaaggtcccttctgcggtcctaagaagtctgtaccccctagcgaatcagtcctgccgctggactcctggccgctgcccgggccggcgtcagcttcacacaatgtcgcgtgagtctttgtgcgtgtgcgcgggggaggttcgagatgttttcctcccggtaagttcccgc

SEQ ID NO: 14367 - DNA, 1420 bp, Artificial sequence
  DNA replication origin
tgcattacatcctttcccctactcctaagcagcagcgtggatgcctcattggctgggaaaagcaagaaggtgtaagggccctactgaaaaccgcacctgggctgtggagggtgccactgctggggggtgcagaggctcacctgggagagtttcgcctccccatcccctctctgttctatgccaggtgctgcgttcatcacctcccaaaacaatctcaccagaaactcattaggtagatgaactttctgagaaagaggagaatggctggactctggaggacttagtgaacagtcaagctgtgatttgaacacagggctgtgtcatttcaaaattctatgctttccaccgaaccacacttctttcagtgctaagtgatgctacagaagtatttgcatgaaaaacacagaacccaaactgtcctaagcctgtgtgccacagcaaatccctgggcatctgaagagctcaacctaaagctttctttgcaggcaggctcctgtctttccaccattcatttgggtgactgggagtttctcaactttcacgagcattagaaggcatggtgaggctgaccgtggcagcctctgtgttataatggacatgacttactggggaaccttacttgcagtcacatagtaagagctttgtatgaggcactcagaacagtcagttatagagaaggaatgtggaatggtgggtggcaggggctgggtggggagatggggacgtagtgttcatgggtacagagcttcagttttacaatataaaacgagttctggaaatgcatggtggcgatgttgcacagcactgtgggtttatttaatgccactgaagtgtacacttaaaatggttaagagggcaaattttgtcatgtgtattttacaacgaaaacgttgggagaaaatatactaatagtacttgccttggcgagcgtagaattctgcaaacggctggtgattctgccatttccctgactgcctgaatcgaaataaatactagttttaagaattcgcatgttgttgttgctgttggagaataaaaccctctcagaaaaacctcgggacaaagttttggcctaaaggaaaaactcagatgcaacatcccacggccactgaatgaaactgagcgcgcgggtcagggacgtcctaggcaggctgggcggactcggccaggctgccgcggggaggggcaccgacgggaacgggcagcggctcctcgcagcgcgcttggcagcggagcctgtgattacccatccagagagggaagaaaagagaagggaagaaaggaaagttagttggagggggtagaggctggggaaaggaggggggcacacggcgacgacagagcctgccagtccccttccagacaaaggacttggcgggaggggggaaccccgaatgcgttcgctgaaaggagggaggcg

SEQ ID NO: 14368 - DNA, 1268 bp, Artificial sequence
  DNA replication origin
caagccggggctgcctaaaggcctgccacaggggctgggtttctggaatgttctttcatcccctgggagtcctgggctgctccgtccggccctccctccgtgagaaggggaagccgaggcttggatgagctgccctggccggctccgggctccaccccccgcgccctggctgttgccatggttggcctcaggcatccggctcggcctacaggaaacacgcttgtaggactcgctagggcaggagagaatggggtaacgcggaagatggatttttttttttttttgaaatgagcaaacagtctagagaaccccacagaaacaaaaggggaaaagaaggagacgatccaacaaaggccattagagcgaagagcatcagcgacatagacgcagctaccaggcgaccaggcgcaggaagggtgcggccgcagcgggtgtcgcgaccgcaggagggccagggcggggcggcagaggggctcccgggaccagggtgcaggaacccgacagggagggagagacggggtgggaaacaggtggacagacagacctccggggctgaggcggagaaacaagacccaggctggagaggggagggcgagagatggccaccgccccagcacgtcggagtgggcgctgggagttcatggaatcgtggagtaatcaaaggaactcagaaaccgccccacgaaccctagattttaccgggtttctacagaaactgaagccaaggggtccagcacacagcccagggccatcccttcggcctgaagcagtgtcctcaccacactaggtctccgtgggcagctccttccctggccccacccggcttgctttggaaatacccagatgtacttgaatactgggattaaaaaaaaacatggaaggagaaaggaaaatgctgagaggggggaagggttaatccaagagggaagagacaagcagagcaggaagcaggaaggaggaggaggctcggggcagagaggagagggacctggtgaagtggggggctgaaggcgcggggaccaccccaggcattctgggtgccatctctgtacgtgacaaatgtccacactcaagctcacagcggcctctctcaaccgcctccgcgcagcagggttatccatggctgagactccggggacaaggggtaggcaaaaagaaacacagctgagataaaagtcaggggacggagagaggaaaccagtccggaaatggcagagaggaagagtttgcttcctcctgggaaggttccctgtaaatgggttaggacg

SEQ ID NO: 14369 - DNA, 820 bp, Artificial sequence
  DNA replication origin
ggcagcacctgttcctgagcctcggacgacatctctcacgtgctgctgattacaagacaccagttagttacaattgatttaaaaaacactctcagatctcctggctgaagctcgccctctcgatgcaggaatttgtgggtggcttttagctgatcagagaacaaagggagagcaggcggcctccgtcatgttggttacggtgggcagtgtaagagccttgagcgaatcggtggtcccagcgaggaggacagggcccgctgtggcagggactgggcacctgggaagaagagtctctgaggctgggacagagcccccagtgcctccgctggccctggcctcggctgggtctgggtgcggcctctgcccttcacctctgcacgttctgtgctgcttctggatggctgctggctccttgggttgcaggcaggactgaacaaggactgcctgggcagttcgaggctggctctcttactggtgctggtttctccagcctggttttgggaccaagagggggacaggacaggggcggtggcttcaggtgtcctgtgtgggcaccaggggctggggacagggtgtggaggggaaggcagggctgggaacccacagagactgcatgaaccaagggcacatcccatgggagctgctagagggggaatgggctggggctgaggtgtgagagtggaggggctggtgtcagaggaggtgtgagtcaggggtctccacacagggcccgtcgtgtcactggtgggtgtcagttgggccttttccaagaaccttctcagagtcagtccccatgtccacttcacacatcatcagcagg

SEQ ID NO: 14370 - DNA, 1228 bp, Artificial sequence
  DNA replication origin
atggagatcatgggactgggctggggaccaaagcatggggacctggccgtggagtggggaccagggatggggtggaatcgggaaggggtggaggaggagggccgggatgggggactaggggtgagggtaggcacagggcgctgaccaggtgggctgaggctgctgggcacctggaagtgggcccaggtgcagcaccagcctctacagggctgggtgggggtggggagggaggtgggggtggtgggatggggatgagggtgtgggaacctgagacaagtgtgagaaccttagacagatgtggcgacatggggtaggggtgactgggtaccgagggaagggaagacagggcaggtttaggggcgggggtgggggcgggggcgggggcggggaccaggcagggaccagctgtgtggtgcaggtggctcactgggaaggggcccaggtgcagcaccacagggcagggcgggtatctagggcggtgcggcccgaggacctttgtatgccatttgtctgctgcacgcccagcactcgcggaggggcctgtgaggggcctggaaggaggccggtgtgcggcggcacagctggcatggggcccatgctgctgcctctggctctgctggccctgctgctggggcctgcgctggcccggagtgcccgggacccggaggtgttctgtggaggtgagtgtgtatgaaggtgggtgccaaaggggtccaggggcttccagagagcccagcaaacccttccccaagggggccaggccactgggccaccgtctttccctgttacccggctcctggctactcaaagagaagccctttgggggtccttctcagcacctccagtccaggcctggcgtccagccttgagggcagctgctttggggtcccctggattccagccttgtccccgctgtgccctggctccatgaacttgggcatttcacctctctgagctcacttggggtgggctggggtcatggctcaggctggcggccggggaaggcagcacctgttcctgagcctcggacgacatctctcacgtgctgctgattacaagacaccagttagttacaattgatttaaaaaacactctcagatctcctggctgaagctcgccctctcgatgcaggaatttgtgggtggcttttagctgatcagagaacaaagggagagcaggcggcctccgtcatgttggttacggtgggcagtgtaagagccttgagcga

SEQ ID NO: 14371 - DNA, 1098 bp, Artificial sequence
  DNA replication origin
tttgaagcagggcggggacgactgctggccataggtcgattccgggttcagtcgtaaggcgctttgcagcagtcggcaaagcgaagctttacggcagcccgtctcccgttaggagccggggaggcaaggtccagcgtacggtccgggggaaccttaactgtcgtttctgtgcctggacagtaggttggagagtggggtctgaatgagctacagtagtgaacgccgacggcttgtgttgagggcaggaaagggtgcacacagctccggcaggtgcttccgcgaggtgagatgagtgccgcgcgcgccgggctaacgtgcacgcgcactcgtgcggcgcccgcgagccctcacttcctacaacccgagaccctccggacccgcgaccccggacccccgtccccttctccgcgcccggctgggcagcgggcagcgccggaccctgatgggctctcggcccttactgcccctgcgccttgcggccctgagaacaagacgtgagcaggacggatagcgcccggcactcatgtctgagtttgcattttgagcagtgagaaaggttaagaaacgaaatcctcatacttgacataaaggaaagggtgctgggtggtcagacagctgtggacgaaagggctcaggggttttggggtgtggggcccgggaaggcgcatctgagtggtcgcagtcggggaagggggttgattaagtacacaccggctgtaaacattgattccatatcggtcaatgtggggcttaggtgaggcgttctgacccagcaatgaaactggaaaggtaggcaggggccaggattccggactttgggacgtttttctgagtctatggggtctattgaaagattttagaaacaatttacatggtaagatttgtattttagaaaggtgactgatacaacaacgtagaggaccctgcaatgtggagaggcatgaaactggaggtccagtgccgtgagttaacaatcaagacgtccatacaggagatgcattggtggatgggtgaagagatgataaaacggtacgtataataaaatgctggccgggcgcggtggctcacgcctgtaatcccaccactttgggaggctga

SEQ ID NO: 14372 - DNA, 987 bp, Artificial sequence
  DNA replication origin
aaagcgccttacgactgaacccggaatcgacctatggccagcagtcgtccccgccctgcttcaaacatttgggtttcaggagccgggcggaggtgactgccgcgtgtttgcgttgcacgcccaccgcccgaaacacggcggcggcctcagggctgctgcggcctcggcgggggcaggccccggcgcccgcccgcctcccggcctccatcatcccagggtgcaccgcggcgggcgcgggcgcgcggccatgttgcggtagtttgttgttttcttcctgcggaggcgaagggccagctgtggaccgcgaagcgcccggcttcgcctctgcctcctgcagccccctcccttctctgtcctccgtcacccgtacccgggcccggaccaggcacgtcggcccaccagctggcttggtgggggaggctgaaggccgggccccgcgagtgccatggcggccgccctgggagcgagcggaggagcaggcgccggaggtacgtgaggcagccggactctgggggccaggaccgcgccgcggtgggcgggggtgtaggccggggggcctccccgcttaggagaggacgaggctctccccggctccgactctctttgtgttcggcctattccgttttctccctcgccttccctcgctattgtcattctccctttctcgctcctcctctccgctgtgcagatcgtacttacctgtgaacttctgtgtgtcctctactttgcaaggctgcctaagtgtcaggcccatctctggcgttggcgggcattaagtgccgaagccggcctggtgtcctatgggtaggagagcgccccccccaccccccgagacagtgtcacttagggagagcggggcaggtcgctgtagggtgggtgtttaagattgtggggccatcctgacagatttagattgatttgaagcccattacaaaaacataacgaaaagattcacctgtgtgaaggaatgtgcgacagtaggccagt

SEQ ID NO: 14373 - DNA, 838 bp, Artificial sequence
  DNA replication origin
cacatttattgagctactactctatttttggcatttgagttatattgacgaacaaaccagacaaagctttcttcaaccatgatattactttctatcagacagtcttattattgtttattagcagtaaacataagtattttatgtggcatgttagaagatgaaaatgcagtgagaaattgagcaggatgcggggaagggatgggttgtatcttaaatggggtgatcagggtgaacttcactgagcaggaaagagttgagggatatctgtaagttagcaatgtggctgttcagggaagaagattgcaggcagagtgatcagcaagtataagggggcttcctccaggagagaccctgccttgtgtgtttgagtagccaaaaggagaccagcgtgacttttgtggagtgatcaaagcagagaagaaatgcagaacctgggtaccgtggggccgtggggccatccagccattctcaggactttggcagggagtgaaatgggcagggattagaggggtttgagcagaggaatgacgtgaccttgtgtatgttttagaagattcctcttgctgccgtgttgagaggagactgtcgggtggcaagggtggaagctggtgtctagctaggaggtgacagatgatcctggtgcaaaccagtgtggtagcagggagagtgcagagagctcagagctggatgaagtaggaagatggggccgatgggatttgctgatggattggatgagtgtgagagggagagaggaggtaagagtgatgcccaggtgaccagagcatttagagggctggtctggttgccatcacctgaggtggggagatcaaaagttctg

SEQ ID NO: 14374 - DNA, 869 bp, Artificial sequence
  DNA replication origin
ctgtgtgtggggagaccaaggactgggacctagggcacttgacacaggagggggaggggcaggaggagaacccgtcagggaggccaaggactgggaccccggcactcgacgtgggaatgggggcaggaggagagcctggcaaaggagccgagagggaggaaggaggatgacggtcgatggggaaggaagcaggtggccacgggctggcagggctgctgccaatgggtcagtgggtgtggcctgcacttggggcggggctggtgaggaggaggcacaggcctggctgagatggggcacggacttgaggccactgtattgacagactttgactgtgttttgctaaaacagaagttggatgataattgatgggagccaagtgggcttgagagaaagttttttattctaagttttttattcattgcacttacagaaaagagctagttaagaaggaaaaacatcattgatgcagatgagaggaaaaacttgtcttgtccaggaccacgtgccagaggtgggcttgctgagggggaggagcagggagtcctccacagctggggcagatggatgggcaggtggaggagtcttgtgtcagttcttccttggtggcctcagtttcctcggtgggtagcagggagctagagtggggaggtaggagggcgtgttgaaggtctgaggagaggcgctttggagcatccgttcgtgctttcgaagagtggatgtgcgcagggatggatggggctgctgagcccttgaggggtgtggatttgaggtgagggcagtcagcatggttgtgtgtctctgtccagctgcgctcatctgcgcacactaggtgtggaataggcaggcagttgggtttatgagggtcatag

SEQ ID NO: 14375 - DNA, 1098 bp, Artificial sequence
  DNA replication origin
tggctcacgcctgtcatccctgcactttgggatgccgaggcgggcggatcacaaggtcaggagatcgagaccatgctggcgaacatggtgaaaccccgtctctactaaaaatacaaaaacattagccaggcgtggtggcaggcgcctgtagtccagctactcgggcagctgaggcaggagaatgctgtgaacccgggaggcggagctggcagtgagctgaggttacgccactgcactccagcctgggcaacggagccagactccatcacaaaaacaaaacaaaacaaaacaaaacaaaacaaaacaaaccgatgaacaaatgcggcagcaccagtctctgggcgggttaaacacgcacaagcccaggcgtctgggcacagccagcaccgggaagcaaaggccgcccagcgggtgtgagagccctgacctggacccagtcctgcaggctccggcacagcttctcctcatggggtctggcccagccggtggcatctctggaccccgcatccacttacagagggattctgccaggagcagactcagggaggggctggagggacttcctcggggtcatgggaggggaggctggccggcacccattatatcccttggctgccgcaaggcaagcaggacaggccccagaaaggcctgttggaacaggagaggctgcgtttaggcctgcgcggctgcatgaaacagggagacacttgcctttccctcccccagggatgccgaggagcaagaggccacatgggaaggcacctggcacagccgaaggggggcagatgaatgcggcaggcggaagccctggtcctgctcagttttctcttgtcctgaaaggacgctggtgaccacgtggggacccacacaacctgggtgggatgctgggcagggttacggacgtggccggtgtggcaagcagggagaaggacgggctcctccccagggctgggctgctcgtggggggtgtgggagcgtgttggtgctcagggggttcactgtgttctcttcccggtgcaaacgtggcctcaggaagacggggttcacccagcgttgctctgcctcagccctttccctggctgtgactcagccccaacg

SEQ ID NO: 14376 - DNA, 1174 bp, Artificial sequence
  DNA replication origin
agagagagagaggccacagggagagagagggagagagagagtggggccacagagagacggagagcagggccaagaagagagggaaggattatggaaagagggagggattacggagagagggggcattacggaggagggattatggagagggggattacagagagagggagggattatagagagagggagggattacagagagagggagggattaccgagaggggggattacggagagggggattactgatagagggggaattacggagagagggagggattatagagagagggagggattaccgagagggggattacggagagggggattacggagagagggggaattacggagagagggggcattacggagagagggagggattatggagagggggattacggagagggggagggattatagagagagggagggattacagagagagggagggattaccgagagggggagggattatggagagaggggattatgggagaggggggattatggagaggggggattacggagagagggagggattatggagagagggtgggattatggagagagggagagagagccgcccatcttcttccgtggctcagtcatggtggagcctatctgtgaagaaacttttgattcaagctggccctattccaggggctaaggaagatcttaaagaattccaactctcttccctgaaatttcacaggatctcgtgtgtgggtgggggaagacagattcttgacatgaaacactaagcgggtgggttctgtctttccttccagttgttctgcctctccgctcatcctatcactgatgaaagtaacagtggttctgagcccgccttcgcctttgacctccggatggtgctggcgggtctgctcagatcacagacaaggaaacctaactttgagaaggtcagtggttttccacactgcgcagctaaggggaaggagccaggaaatgttcttctttggcgctcacggtctgcatggttccttgcaccgtcccgacgaagcgagagtgggggacgctgcccagaggctgtcattcttcccaaacaccctcccttttgggggcccattccggcttccacctttgcgctcagtctttctcgcaaaggacaatgcccacctcttctttccaggtctttacattctacgtgaca

SEQ ID NO: 14377 - DNA, 1151 bp, Artificial sequence
  DNA replication origin
agggagccgtggacttggggcccggggctggagggagctggggtcccagggctggagggagccgtggacttggggcctggggccggggggagccgggtcgggggctggggggagccggggtcccggggctggagggagccttggagttggggcccggggctggagagagcggtggctggagggagccgtccccgcgctgccctggtggagtccgcgcgccctctggtggtcgcctcggggaaacgccgcggggccgtagccggcggtccgacagcccaggtgagcccttaaggattcaagcgtcagagtcccttcaaaccgagggcgggtgactacaggccacctccacccacgggagcgtcaaggaggggcggcgaggtgagcaccagggggtcacgcgccttcctctccagaggggtcagttcagcctcggggggctggggccggcccggagaggccgccctgagtccgggacccgcaggaggcctcagccaaaaacagaggcaggggcgtgggagagtgaggggatggtgccggccgtcagcacaagagaggaaagaaactgaaaaatctggaaatcaggaaaagtattggctgagggcagagggcaaaggccacctctgacatctgaccctgaaagcgaccgagtcccgagcgtccagagctgtcccgagggttccacgggaaacctcgtcctgtcaccacgactccctctgtgcagatggaagagcgggtctcggagggggcgcaaggtctcgcggggagcagggagcggcacagacttggccggggccacccacccactgcagcagccccttccctccagcccatcttctctagctccagaagcaggtctcaggctgaataaacaggtgtgctaggcggtgaaggccagggagcgcggaggaggggatgggacagccaggccgaggggcgccgagccctggacagaggtgcatggatagaaacagtgttcgctctgaaacagggactggtggtgtcctctcgtagtcaaatcctgggtggaaagcgttctaggacatatgagaacccaggtgaagagatggagcgtttctgctgaccctaaggaacactcttctggaatccaggttggtgaaacacaaaggctgccccatcactagcaagtgctt

SEQ ID NO: 14378 - DNA, 837 bp, Artificial sequence
  DNA replication origin
agggcaccattctcatcaaccgggtgctggcctcgtgctacgcggtcatcgaggagcacagctgggcgcaccgggccttcgcgcccttccgcctggcgcacgcgctcctggctgcactggcgcccgcgcgcacggaccgcggcggggacagcggcggcggggaccgcgggggcggcggcggcagagtagccctaaccgctccaggtgctgccgacgctccgggtgcgggggccaccgcgggcatccactggtactcgcagctgctctaccaaataggcacctggctcctggacagcgaggccctgcacccgctgggcatggcggtcaagtccagctgaagccggggggccgggggaggggcgcgggagggggcggggcggggcagcaacagcaacgcaaagcaaaaagacactcggaaaaggcgcacgaaccagactgagttataataagaataagaataataaagtaggacagtccaaagtagactctaaggaaacaaggaccccgggaagttttgttgttgtgcttagttgatatatattttttgaatttttttggttattgttttattttggttattttttcctcctctcctggctatttatttgtttggtatgaatagatgttttaaataatatgaaccggaccttcaagagccttaaatagtttgtttcttggataatttattatgatcatgtgaactgtactcacgggggaaagattattttgtgaggccaagcaacctgctcagagtctatttttctacatgtccctcgtcccggctgtcagaaagcaaacctctgtccccgccatccctcccttccatctcctgcttct

SEQ ID NO: 14379 - DNA, 913 bp, Artificial sequence
  DNA replication origin
acccggttgatgagaatggtgccctgggccgtgagcggcgcgtaggcgcccgcggcctcctcgcttagggtcacgctgtgcacagcggcgggcaggagccggcggtccccgtcacgctcggccaccacgtacacgcgctggcccgggcgcacgcggctggcgaacagcgcccgaggccccagtgcgcccccggaaggcggccccgagcccgaggacgcctcgggctccccggtggccgagtcgttgtgcggcgccacaaagagcaggtgcgcggcggtgagcagcaggcgctcgcgcggctcccgcgtctcgatcacgtagaagaccttcttggcgccgtcgtcgcggtccaggaaagtgaggaagtcgctgtagagcagccggccctggtcgtccgccgccagcacgcggtccccggggctcaggtccttcaccagcttggtgccgccctgctccaggtgcaccgtggccgagcccgggaagcagcctcccgatttggccgccaccgagttctctgcgggtgaggagaagggaaagaagagaggacagggcattgagttccgagagggaggcgcgtctcggggaggagggcgcacgcttggtgcccgcgctcctaggccaggggtgcgcaaggcgcggggcggggcgattgattccaggcgggtcccgcacacacctccctcccccaaccccactgccccagggacaggattccgacacattccttaacgactctctaagtctgggctggcggtcacagaggttggctggcgtttcctgcagaggccggtgacactctttccttccgccttcctccaaccccacccccagctccgcacacacccggcctcgccgcgaatccatccagagggtgtttgctctgcacttggattcctcaggaagcctccttgag

SEQ ID NO: 14380 - DNA, 2050 bp, Artificial sequence
  DNA replication origin
ggcgacaaccagactccaagcagagcatccttccagactggaggaggttagaggtcagccccgccctctgcagaagtcaccttgaaattgcccctcggcctccacttggcgcagcttcttgggggatgccaccatcgtcatctgtgccagttccccctctttaaatcccatgtcccaccagcagcagcagggtaaacatccaggaagcaagtcagtgcccccacaaacacacacagtggattcaactgctttctgtcgcatccttatctgagggtgaccccagaattccaggggaacccccacaatctgaatcccaggtaaccccgtctgcatctgcctagtcagtgtttcctgcctcctcccaggcaacttcctgggaaactccccaggcggaggactccgagacctcaggccttcctgtctcccctccccctcctctcaaacccctccccctccctccacctcttcagtttgctcttcaaacttgctggacgccattctatgctggggccaagaacacaagagcggaggaagggaacaggttaaagaaaacaagaaacacaatcagaccacagaaaagccaggcagaaaagggttcgacgggcaaaaagaatgtggctgtccagataaagaatgtctgtcccggccccggcctgtgctgcaagtggcaactcacctagccgcctgccacccaggctcccgcccaccgcgcagccccgccagcggcttctcgcctcccctctgcctcggatagggttagggcctgaggtaaataaatgcaaggccttcaattctccaagcagtgcgcagtgcatttttctttatttctgggaacttgcgcccaggtctctgtcaggcctgctgtgagggattctacgcggggagaaggtggaggctgcgcaggtggagaaaggggccccagaaggggggctagaagtggagggcaacgtgggggcggggcgggtatcccagagggtgcccctggagggtcctgtagttgatgtcttaaacatgcaggtcacttgtttcagagaaactttatttgcttcttaggcctcgctaggagcatcggctgtttcaggacctggagaaaggcccccagctctaccctgagaggacgtgctcctccacgctcctccgcaaatgctgtccctcttccccagcccagggcccggctcttcggtgtgtctgggccattccaacccccgtctccccacctctccgcatggccctcgcgccttgagactgggcagggcaggctgatggaggggccgggaggggtggcggttgcccaggctaacgtgtccgtcggtgggggtccccttgtcttcgcagaggtgtaaggacaagttgaacgctttggccatctcggtgatgaaccagtggccaggagtgaaactgcgggtgaccgagggctgggacgaagatggccaccactcagaggagtctctgcactacgagggccgcgcagtggacatcaccacgtctgaccgcgaccgcagcaagtacggcatgctggcccgcctggcggtggaggccggcttcgactgggtgtactacgagtccaaggcacatatccactgctcggtgaaagcaggtaagctggccctggccccccggatccgacccaaggaaggccattggcgcacctcggcttgattcaagagaaaaagaaacctggggggaggctgagggccaggagcagggtcgctgggcgatgactgcgtttccgcggtggaacctgccctgtgaggtgccggcccctcgaaatcacccctacctttgaggccacagagcccaaggttctccatgccccgagatggggtcctgtggcttcctgcccgcttctggagcccccactgcagggggtgggaaagcgtgactgggggaggggcgctaggcccttccaggcgagggaagacagccctgcgcggttagccaggtctgggcgagctccttcctctcgtttagggcttaagaaccaaccgcccccacccgctatcccaagcgcaggggtgtctatcctgccccggagcccgcgtcctggctc

SEQ ID NO: 14381 - DNA, 1290 bp, Artificial sequence
  DNA replication origin
gcaagttcccagaaataaagaaaaatgcactgcgcactgcttggagaattgaaggccttgcatttatttacctcaggccctaaccctatccgaggcagaggggaggcgagaagccgctggcggggctgcgcggtgggcgggagcctgggtggcaggcggctaggtgagttgccacttgcagcacaggccggggccgggacagacattctttatctggacagccacattctttttgcccgtcgaacccttttctgcctggcttttctgtggtctgattgtgtttcttgttttctttaacctgttcccttcctccgctcttgtgttcttggccccagcatagaatggcgtccagcaagtttgaagagcaaactgaagaggtggagggagggggaggggtttgagaggagggggaggggagacaggaaggcctgaggtctcggagtcctccgcctggggagtttcccaggaagttgcctgggaggaggcaggaaacactgactaggcagatgcagacggggttacctgggattcagattgtgggggttcccctggaattctggggtcaccctcagataaggatgcgacagaaagcagttgaatccactgtgtgtgtttgtgggggcactgacttgcttcctggatgtttaccctgctgctgctggtgggacatgggatttaaagagggggaactggcacagatgacgatggtggcatcccccaagaagctgcgccaagtggaggccgaggggcaatttcaaggtgacttctgcagagggcggggctgacctctaacctcctccagtctggaaggatgctctgcttggagtctggttgtcgccatggagggacagcttctatccagggccctaactgtagcgtgggttggggggactctttcgagagggtggggcgaggacgctggccccactgctgcggcgctttaaggggacgtgacaaattgcgcaacaggaaaagtcctgtgtatctggcagcaataaaacccagtaatatggttgtagagttcaacatgcaacaactgggggtggggtagggctgggggccgccctggtaacaggtcagtgcctgcatgtttgtgggcctgccagcagttaaaaaaaaaagtcggaagggcagagtttgagtgaggtcatcttgaggattgaacgcgttttacatgaaaatcaatcagtaaaccagggtcagtgtagagctatgatgtgaggcccgttgcgcgcaggcgcacaccaccaacacgcacagggacccccatgcaagccccccaccccaccg

SEQ ID NO: 14382 - DNA, 1343 bp, Artificial sequence
  DNA replication origin
caccttcccagggcttgggccttgcagccctgctgcaaagctgcaagcgcacagagccgcgcagcgaggcagacgcctgcagccccacttactcccgggttatcgatcccccgcggctagggtttcagtgcgcgaggggctgggctggagccgccgggctctgctgctccacgcgcgggagcgcaggcaccgcaggagctaacagcagcgccgggctcgctgtagtgtccccggcggcgggggcgcggagatgggggcgcccgcgcaggggccggggcgcatcgcgggctccgccggcctgccctgggacgcgcccccatccccagtccgccgcctgcctggcctctaggcctccgcgtcccagccggagcccccagcccgggggcctccccccgacccccgtccgccctgccgggggacgcagggcccagcggccccgcgcccggccactctcgccgccgcgcgcacaggcagcatttgaacttctgaccttctgtcaacttccctcagacgaacgaaacgaaaacaaatacttttttccttgggcagtggctattcccgttcccaacacaaaaggagggggaaggacggcccaagtgggggttgggtgaggagagccaggccgggattatcaggcagaccccacaaaggtcccctaaaaccgaggggggtaggggctggcagtctgtgaggtatccccggttgatccctcccctaccttccttctcccgattccaggagttaagggtgggggaggaagggatggggaaggcggaggctcgggtgctgagggcaggggcggggtgcaggaggcggcaggggagccccaggccggcgggaggtttggggagcctgctcggccgccctcattttaaataaccacctaggctctgccccaggtgcgtgaccctcttcttctgtctccctccctgtctctgggtctctaatgtgactgccgcccaagtccctcaaccatggcgagatcgtccccagtggaactttcggagcagttccggaacgcaggagctgccggttaatattaacccgggagaggaaagcgcagacagacacgctctccccgcgcgggcctaggtgccaggcgagggtgctggcggccagggggctcctaaggggcaggaggccagagggccggatctgaagcctggagtggggtcccgagccgctacactaaatagatttaatgtgcgctctggggccgccaggaaagacgctcaggtatggggttggggaggggctgttccaccaagcttgggggaaaggacagtggagagaggtgcgtttaggggctggggctgtcttgaagctgggacgcccccgccccc

SEQ ID NO: 14383 - DNA, 1428 bp, Artificial sequence
  DNA replication origin
aggtgatttcacccgctccttccccacccacctgcccgccccccatctcttcctcttcctggaggagaatggaggtcaagggtccagctggagaagtttagggtgtggtgggggtgaggacggtaacagacgtggttcattatggccctgatttgatgagtcttgctacaatggccttccccatcctacctctgccctggcttgtaacttggggagaccttcactttgggggcgtcggccctttccaagtcaggagtggaaatggaaggagaggctgggaatccccctcccacaaacatgaagtggtctcctggtactgtacgaacgaacgaacgtagccttgggcattggagctcagagcccccacgtttcccgttgcctctgtggttttctttcccaccactacccccaccctgcacctccccaccaaagaattctcaactggaaaagccaggaggcggttctgacaaaaggcaggggctccaggggagactccgcccgtccctgggtggctggctgtatcgcagagctggctttgcgattgcgtgtccgcaattgtgcccatcagagtgtgaatgtattgatatttctttaaggatgctctttcgttcttccaagcccgaggtaccttaggggagggacttagaacttattggcattgcatcactttagttttcaacctgcttgcataagaattaagagcgaataaatattagtgtggggggaggggaagctaagcaaaatatgaattcctctctctctccccacctcctttgagatttctgagctgccaatctcccagccaattctagactttctgaaactccatgcacgtataactgaagccagaaatgggtttccttgcaaatataggtcaacatcctttttattgccctattaaaatattcaagtcctacctttagggctaggtgcgtacagcggctgatggagtggcgctggtggggcgcaagtgcagggggagggtactgacggcagagagagaggagctacctccgtgccgccctgcttcccgacccgattcccaggcttgcttgaggccgagaaaggcgaggggcaggcaaggtagcctgctccagctgtcggaagggagaggaatgggaaatggtcctgatttccttgctctccctcatctgctcccgaccaccttaaatctggaccgcgagtgtggacgcgcgcgccagtgccagacagcagcgcgatccacaattaactctgcacgggccatggggtgcccgttgcgtgcagctggctggagggagttctccggctagcccgaggcgcccatcctctcgtcaccctcactccccgcggaggaggggccttgccagggtccctcggaacccgagaggagggaggcactgcggagagagcggcgggggcgtggatacccgaggtcccagagccaga

SEQ ID NO: 14384 - DNA, 996 bp, Artificial sequence
  DNA replication origin
ggaagagaaagagcgaggcagccagcgagggagagagcgagcgggcgagccggagcgaggaagggaaagcgcaagagagagcgcacacgcacacacccgccgcgcgcactcgcgcacggacccgcacggggacagctcggaagtcatcagttccatgggcgagatgctgctgctggcgagatgtctgctgctagtcctcgtctcctcgctgctggtatgctcgggactggcgtgcggaccgggcagggggttcgggaagaggaggcaccccaaaaagctgacccctttagcctacaagcagtttatccccaatgtggccgagaagaccctaggcgccagcggaaggtatgaagggaagatctccagaaactccgagcgatttaaggaactcacccccaattacaaccccgacatcatatttaaggatgaagaaaacaccggagcggacaggctgatgactcaggtaggaacccagcgccggggcgtggaatgtgtggctttccagggggttacgagaagccgaacacttccagacttaactctgtttgctcttcgggcagataggaaggtgatttcacccgctccttccccacccacctgcccgccccccatctcttcctcttcctggaggagaatggaggtcaagggtccagctggagaagtttagggtgtggtgggggtgaggacggtaacagacgtggttcattatggccctgatttgatgagtcttgctacaatggccttccccatcctacctctgccctggcttgtaacttggggagaccttcactttgggggcgtcggccctttccaagtcaggagtggaaatggaaggagaggctgggaatccccctcccacaaacatgaagtggtctcctggtactgtacgaacgaacgaacgtagccttgggcattggagctcagagcccccacgtttcccgttgcctctgtggttttctttcccaccactacccccaccctgcacctccccaccaa

SEQ ID NO: 14385 - DNA, 816 bp, Artificial sequence
  DNA replication origin
aaagccgggagtaactgctgttaccacaagacatgcgctcctccctcccgcccacctttatcttaggaaagatttttttttttttaactcgaatccttcaggtgaaaataaagcaacagcagcaacagaaaaaaaaaacgtagtcttcttcagggttaacatcagaagacaagcttgtgcggctttggccaatcagatgcgcccctggcagctataatatagtgctaaaggcagcctctctcacaagctctccaggcttgctaccatttaaaatcagactctttttgtcttttgattgctgtctcgcgacccaactccgatgtgttccgttatcagcggccggcagcctgccattccagcccctgtctgggtggggagcggtggagagtcccccgcagccgcggcgggcaaggttatataggaagagaaagagcgaggcagccagcgagggagagagcgagcgggcgagccggagcgaggaagggaaagcgcaagagagagcgcacacgcacacacccgccgcgcgcactcgcgcacggacccgcacggggacagctcggaagtcatcagttccatgggcgagatgctgctgctggcgagatgtctgctgctagtcctcgtctcctcgctgctggtatgctcgggactggcgtgcggaccgggcagggggttcgggaagaggaggcaccccaaaaagctgacccctttagcctacaagcagtttatccccaatgtggccgagaagaccctaggcgccagcggaaggtatgaagggaagatctccagaaactccgagcgatttaaggaactcacccc

SEQ ID NO: 14386 - DNA, 1577 bp, Artificial sequence
  DNA replication origin
tgtctgtaacaggctccactcctctggccccagaatcttaactccagctgtcgcctggggcctgccagtggaccataaagaacacctgtggggttactgctctcaagacttaaagacaagcagggaggagatggtggctctcacacactgtgacagggagccacctgccgcttaccgaaagccaacctgagcaccgtgtccacacacccagctccagggattgggtgtagcaacagtgcttgctttccatcatccctcaagagggagttggtgctgtctgtttcctcatctgccttttgtctaatctgttgggcaccttggtgtctccacagctcccgtctgaggtcactctggggtggatccagtagcagtgatgccctggggatggtggtgcacagagtgacttagccctggggtgcacataaccctgtggcagcttggccccaggggcagggggcaaggaaacctaggaccagggggcggggtggaggtaacttggaactgggggtggggggtggaggtaacttaggctcaggggtgggacgtggatgtaacttgggcccaggggtgggaggtggaggtaacttggacccattggtaggaggtggaggtaacttggacccaagagttgggggtagaggtaacttgggctcagggctgggggtgtcacagcagcccaggctctggggaagggtggggcaggtgcagcagcaactcaggccccaggcggggggcatgacagtggccccttctttcagggaagcgcagcagtgtggactctgagcatctctcttcattgtgcagagcctcactgactaacacagaggtgcctgtggtggaggctgtgggttctgcaggggtgatggagaccaccaggatcctgctcaccttttccctgcagggagaaatctctctgagaggatccctcctcggctccaagctgctccccatgggggaatggggtggcagagcagagtggcatctctgttttctgctctccacaaggtttctgcggcttctctgctgtcttggagctatcccagcgtggtttccatggtgtgtagtgtctttgtgttgttttgttgttttgtgggtggggcggggggaagcactgagatctcctagtccaccatcttgctgatgtcaccttgggaatggttttatactttaccaagggacagtccacagggtggattttaataacaagggccccaacttgtattcaaactaatgcttggttgatttcaaggtgccttgtgtatgactttgcaggaagctgatatcttgctaagggaggcacattgtagctgtggggctcccctttagtacttgcttccaaagtgtattactatacctctgatgtgtcttccacaggccccagttgagtaagtgtgcctgtatcacttgttactttaagggtctcaccccagcctctacgatgttctcaggaagccaatagaacacgcctggattaacatctgcttcctcaaggctccaaagcactagaataacaggcaggtgtttaaagcaaagtccctggcctcgagtagcctacagcctggtaggaaacagaaaca

SEQ ID NO: 14387 - DNA, 2730 bp, Artificial sequence
  DNA replication origin
cgtctgccttccactgccttctgagaggtggaggaggaggagcagccttgggaagcctaaacttctacagacccttaagacacagccaaggggtgaggagggccttggtgccaaggcagacactgcagagtgcacagggcaagacccgagagactccagctggtctgagaggggtgctggccatgaggacacccctcagaaaggacagattccaagacggagctcttgatgcattccaagagcagcctctctagacgagagttgcccagggccccgagacctgagtggcattctgtggcctgggacatggctgggctcttccaaatgatttccccaagagaggggcgctggccatggactctcctccagcgggctttgttggagccccccaaaaggggatcataagcaaagaggtctaaaaaccatctgtggcttctaaatagagcgttttggattgctgaagcctttcctctcccataaagctttctccagagagaccagaagacagtagcatttagccctgcttcaccagaaggggcatagctattagggaggtggtaggagtgatggaggtgatggtggtggtggaggtggtgaatgtggtgagatggtagaaatggtggtggaggtggtgtgggaagtgatggaggtggaggaggtagtggggatgggggaggcaatggaggtaatggtgatggaggtggtgaaggtggtgatggaggtgaagaagatggtggtagtgctggggtggaattgctggaggtggtggaggtggtgcaggtggtgaaggtggtgatggaggtgaagaagatggtggtagtactggggtggagttgctggaggtggtggaggtggtgcaggcggtagaggtggtggaggtggtgatagtggtggaggtggtgatggtggtgaaagtggtaaaggtggtggtggtgtaggtggtggtggcggtggttgtggtggttgtggtggtgaggtggtgatggtggtgaaagtggtaaaggtggtggtggtgtaggtggtgatcgtggtggaagtggtggagatgatggaggcagtggaggtgatggaggtgggttggtagtggatgtgatgatgttgttggtgatgatagaggtgatggtgaaggggatgggggtagggggtagagatgggagaggtgatgaatgtggtggtggaggaggtggtggaggtgctgggtggtggtggaggtgatagaggtggttatggtggtcgaggtggtgaaggtagtggtagtgaaggtggtgaaggttgtggtgatggaggtggtgaaggtggtggaggtgatggaggtggaggtggaggtggtggctgttgtggggatggggtgatggaagtgacagaggtggttgtgatggttgcggtggtgaaggtagtggtggtgaaggtagtggtggtgaaggtggtgaagctggtagtgaaggtggtggaggtggaggtagtggctgttgtggtgggggtgatggaggtgatggaggtggttgtggtaatagaggtggtgaaggtggtggtggaggtggtggtggtggagatggagatggtggctgttgtggtggagttgatggaggtaacagaggtggttgtggtggtggaggtggtgaaggtggtggtggaggtcgtgcaggtggtggctgttgtggtggagttgatggaggtgatagaggtggttgtggttgtgaaggtggtggtggaggtggtggagatggagatggtggctgttgtggtggagttgatggaggtgatagaggtggttgtgctggtggttgtggttgtgaaggtggtggtggtggaggtggagatggaggtggtggctcttatggtggtggaggtgacggaggtgatagaggtggttgtgctggtggtgaaggtggtgatggaggtggtggaggtggaggtggtggtggctgttgtgatgatgggggtgatgaggtgatagaggtggttgtggtggtggaagtggtggtggtgaagatggtggtggaggtggtgcaggtggtggctgttgtggtggagttgatggaggcgatagaggtggttgtggttgtgaaggtggtggaggtggaggtggtgactgttatggtggtggaggtgatggaggtgatagagggggttgtggtgtggaagtggtgaagatggtggtggaagtggaggtggagatgatgatggtgaaggtggtggtggaggtggtggaggtggaggtggtgactgttatggtggtggaggtgatggaggtgatagagggggttgtggtgtggaagtggtgaagatggtggtggaagtggaggtggagatgatgatggtgaaggtggtggtggaggtggtggtgatggaggtggtaagagtggtggtggaggtggtagaggtggaggtggtggctgttgtggtggagttgatggagatgatagaggtggctgtggtgatggaggtagtgaaggtgctggaggtggaggtggtggctattgtggtggtgggggtgatggaggtgctggagatggtggatatagtggtgatggagagggcaagggaggtgagcatccaggagagcttgaaggaacctcagggatcccttatcccaccccacctgcctagggctgcatgaataatgagagagaaaatccatgctggattccagagcacctgagtcccctgtggcgttttgcaggaatatgagcccctgcagctgcttctccagagcacctgagtcccccg

SEQ ID NO: 14388 - DNA, 1335 bp, Artificial sequence
  DNA replication origin
caaaaaaaaaaaaaaaaaaaaacccagctgggcatggtggtatgtgtctgtaatcccagctacttgagaggctgatgcaggagaattgcttgaacccaggaggcggaagttgcagtgagcagagatcccactgctgtactccagcctgggcaacagagcaagagtctgtcttgaaaaggaaagaaagaaagaaaggaagaaagaaagaaagaaagaagagagagagagagagagggagggagggagggagagaaggaaggaaggaaggaaggaaagaaggaaggaaagaaagagaaggaaggaaggaaggaaagagaaagaagaaacaaagaaagagaaagaaagaaagagggagtgagggaggggaaaaaggaatgaaggaaggaaagagggaaagaaagaaagaaagaaagaaagaaagaaagaaagaaagaaagaaagaaagaaagaaagaaagaaagaaaaaatttgcccagagtatagaataactagaatagagaattttaggaaagacttagtccttatgaaggatcaagggagagatcggacccatcaagttctacacaacggacagttctgcctcctcccgccgccaagtggcacccagcacggagatacccaaaaagcgcccgtttcctcgtcctgctcagcatcctgcctacagccccaggatgcgcctccaccttcaacacaacatttacagctgacaggggctttgcaggaaacgatacaatctggacgaaccttttcaggaagatcaaagcggcccatgttagcagaagagcgttttgatcggaaccacgagtttggaatcgcgctggcgatagtgttcttgccgtgcgccagctaatgctgacagacagagggcggtttatccacggtagccgggtagaggggacatgcaagggcgttagggaaagacttccttggagtcctggtgtcactaaggatacggcgaaccgcgtcatcttagcccagtgccttggacccttgaacttctgtctctgcatcctatgaggaggttaaaaaagataatccacctgtcagggttgtgaggatgaaacacagcagcgtgcggggaaagcttgtgaaaatgtcctcaggacgtccccggtgaagggcttcaccctaacacctagtgcagcggcagagttgagtggatcacagctgccgaaacgcacagggaaaggtccctgcggaggctcctgggtggcccaaagggatgagagcgcagaagggaacccggggacacgccttctgaatgaagcagagtaaaagttgttgacaccagcatcggaacccagggcaccgttctcacacccctaacaaccgcgg

SEQ ID NO: 14389 - DNA, 1201 bp, Artificial sequence
  DNA replication origin
aggaatggccaggtgggctggtccaggtagtgaggggctctgcctcttgtgctggggagtttggcccttgtccattgctcactgagagcatccgcacaggagagtgatttacttagaaaatggctttttggaagactttacccagaaaaggacttttgtgcttccatcagctctgaacctccaatcacagggaagcaggcactaatcaagtctttcagaagggaggtgctacacggagctagggaggagttgaacctagaggaacagctgaagagctgctggccctggaggagcagctggggaggagctggccctggaggagcagctggggaggagctggccctggagaagcagctggggaggagctggccctggaggagcaactggggagaagctggtccctggaggagcagctggggaggagctgtccctggaggagcagctggggaggagctgccctggaggagcagctggggaggagctgtccctggaggagcagctggggaggagctgtccctggaggagcagctggggaggagctgtccctggaggagcagctggggaggagctgtccctggaggagcagctggggaggagctgtccctggaggagcagctggggaggagctgccctggaggagcagctggggagaagctggtccctggaggagcagctggggagaagatgtccctggaggagcagctggggagaagatgtccctggaggagcagctggggaagggctggtcctggaggagcagctggggagaagccgcccctggaggagctgacctcggaggagggcatgggctgaggtagggaagaggagagttggggagatgatgggagcaatgttgggactgagctcaggtggaagctctggagctggggaaaagggtggactcctggaaggcctgctagctacagccattctctgagaagccccctcacagtgagttgagtgagaagaaagcactttttcagttacaaagtgaggagaatggttacacatccatgttctttgagctgaaagaggatttggaaatgacctatggacaggaacggagcaggagaggcacctgtcatgtgtcacgtgctccactgtagggttccattcattttcctacaaggccatggacccctgctggagggcaagagggctgggcatcgctgccaggcttgcccagggctggtgttgcatt

SEQ ID NO: 14390 - DNA, 1017 bp, Artificial sequence
  DNA replication origin
taaaataatatatccaggaaccaagatgagggattctgccacggagtacagagctcttcctgtccgactcctgctggagttatgcgaagccccaggctcagcttcatttctctttctgctcattgctggccctagtaattggtatgttcgagaaactggaatctgtccattcatttgctcatttgacaggtaccaggttcctgccatgtgctgggctctgtttccagggtcgtgggggaaggagggaggaacatggcctcttgcctttaatggctctcccaggtcagtatgagcacacaggggggtgttgagtagcatggactggcagtacaataggaatcagaagggaaactgaggtctgaggctgtggagctgtggggcaagggtgggggagaagaaggggcattctgagcaatctgggggtgaggcttctgggtggggtctttggggtggggagggcacctgccctggctccactgtgtcctgaaaaccactgagagcaatttaaggctgtttgcagggcttgtggatctatcaccatttggttcactctgcagaacatttgagcccaacctaaccaccctatgtatactttgatctgaagtgtcctcagaggcaagtttcagaacacggctaggctggggaggacctgaccctggagaaatagctggggaggatctgaccttgaagaagcagctggggaggagctgtccctggaggagcagctggggaggagctggccctggaggagcagctggggaggagctggccctggaggaactgaccttggaggagggcatgggctgagtaaggcaagaggagagtcggggagatgatgggagtggtgttgggcctgagctcagggggaagcactggagctggggagaagggtgggctcccattttggggctggtcttatcatcgtctccatcgtctctagtaaaatcagtaaccctcctctctgcaccacctactgtgtgctacaacctctgccggccctagaaaccccagggccgg

SEQ ID NO: 14391 - DNA, 1730 bp, Artificial sequence
  DNA replication origin
ctcccagaaattctatccttattctcatggctgcaaattaaaatgtgaattttctggaagaggagaggctgtggcgggccttgtggggctgctgggaagctggtgtggctgtggacaggtgactgggggggcccgtgtcctcgtccaagggaaggaaggggcttgagccgaatgtccttcccgtctcaggtgcctcgatgccagggagtacgtgctgccggtcacttctgtcctctggggactcctagtagctacagcaagtctgacacaaggagggaagaaggaccaagtccactgtgaggggctggctgccccgagggaggtggtgctgggggtggggtggggtggggatgggggaggcaatgacgggggtggcgggaggaggcaatgcaggggttggggtgggggttgtgggggaggcgatgctgggggtggggttggggtgggggcaggtgatgccgggggtggggtgggggtgggggtggagggaggcaatgctgagggtgcggtggggattggtggggaggcgatgccaggggggcgttgggagtgggaacgggctgtgtttcaagtgtcttctgttctgtggttttcctggggggtccctggttcctccatccagacacacacacacacacacacacacacacacacacacagcttaaaggaagggctctcagaagaggggaaggggcagggagagcacagaccccaggggagacattcatacttcctttcatctaacgcccctctcaaataaaaacaaattagattccatttcctggcactaactttcggaaatcaggtgttgcactgctgacctcttttcgtctgaggaaggggagggtcctcaggaagcaaatcataagggatagtagcctgagggtgcactggccccgaatcagctgacctggtggtttgtcgggaggagctgtgagtggatctagaacgaatggggagaaggtacagggagcagatggcggtcggacgagcagaggtgcccagcgatggagaacgcggctttgtaatgtggccaacgtttcaggctctggaggaattccagcaggggctgcccatccagggagcctgtgggaagcctgagtgtgggggagcaggcaggtctgcactctgatatcctaatgattccacggcttcttggttcaaccaggtcttcaccatgggcaacgctgcgggccagagggaaacaaacaacccacagagatttcttggttcaaccaggtcttcaccgtgggcaacgctgcgggccagagggaaacaacccacaaagatgagcccgaagggagactggggagggcacaaaaaaaaatcagaaaaagaattgaacaatcatagatgctgagaaaagtgtgttgcagagttctgttattcaaaacaaaacaagaacaacgtaactggatcttcttgctggagcctggaatgcaggggaacaaaagtgacctcaccgctgttgtcaacactggtccagcctgggcctctctgttttaggagaccattgtgaagaatcaggagggcctagcaaacgacccctagacagggctgggagaggttcacttcagagtttggaacttccttctggtagaagagccaggtaaagaatgacatgtattatcataaaacacgcacagtgcaaacgtagatgagtatgatctggctgtccccatcttcacagaaggatgatcaagatcaagaatttaccctgcagcagaaaa

SEQ ID NO: 14392 - DNA, 914 bp, Artificial sequence
  DNA replication origin
gtgggacactcccagcggggggcagtgggtgcggtgaaacatcctgggggggggcggggggaatgggggacagtgtgtggggtggaacgttcccagtagtgggggcagagcagtgggtggtgtgggacgctcccagcgtgggtaggggggcagtgggtggggtgggacgttcccagctgtgggggtggttgggggcagtggggcagtgggtgaagcaggacgctcccagcagggggcagtgtgtggggtgggatgctggggggggtgggcagtgggcggggtgggatgtttctagaggggggcagtgggtggggcgggacattcctggggggacagtgggtggggtgggaggctcctggggggatagtgggtggggtgggaggctcctgggggtgggtagtaggcagggcgggacattcctggggggacagtgggcggggtgggaggctcaggtgggggaggcagtgggtggggtgggaggctcctggcggggttagtgggcagggtgggaggctcctggggggggtagtgggcggggcaggatattcccagtggtgggcggtgggtggggtgggacatttccagcgggaggcagtgtgtggggtgggatgttcccggcgggaggtcactggtctgggtgggatgctcccagcggtcttgccagggactccatccatgtttcttgatagaaagaaaagaaaaggaactgagatggtctaagtgactttgcactttcacctctttctatttcacggggtcacaggtcaggcgtccgcagcttgtcccgggggtaggtggagggctcaacctgtccctgctcctggggagggaacccttgttgggaacgtggggccccagctcccctcctgcagcccattgtgcctctcaggcttccggcaacctggtcctccttg

SEQ ID NO: 14393 - DNA, 1287 bp, Artificial sequence
  DNA replication origin
atgtggaccatttcaccaaggtcggcctccacttcagccccaatttccaaacccatgtcgggggcgacttagttaacaccaacaaggggacgtggggctatacagtgagactgtggattctgatgtgccagggttgagtgaactccccaacacacacacacacacatgtccatgcgtgccaggctgctgaagaggggaggtctgccctcaccggctcagcaccactcctgcccgggcaccaggctgccaggccagaccaaaggaggcatcacagtcagggagcttgcaggcatttctcactagagcagaaagtgacaatcatcctgaatccttctattgaagatttcaatagaactgatcaagatcaccaccgcatctgtgcaacgcagaggccttcaagagagcacgtggcactctcactgtgtggtgtgtgtgtgtgtggggggggtgtgtgcatgcatggtgcttcggtgtggtgcatgtggtatgtggggtgtatgtgggatatgtggtgtttgaggtagtgtgtgtgtgtttcatgtacggtgtgtgtgtgttgtgtgtttttgttttgtgtgtgttgtgtgtggtgtgttttatgtgttgagggctatgcattatgtgtgttgtgtctgcacggtatgtgcctgcatgcatggtgtgtgttgtgtgtgtgcatgataagtgcctggtgtgtgtgtgtgcatggtctgtattgtgtgtgtagtgtgtgttgtatgtgctgtgtgtgtgcctggtgtgtgttgtgtgcctggtgtgtgttttgtgtgcatagtgtgtgttgtgtgccttgtgtgtgtgtgcatggtctgtgtgtgcacagtgtgtgcacagtgtgtgtacatggtgtgttgtgtgtttgtgtgcacggtctgtgctgtgtgcctggtgtaggttgtgtatgctgtgtgtgtgtgccgtgtgtgtgtgcatggtctgagttatgtgcctggtgtatattgtgtgtactgtgcgtgtgccgtgtgtgtgtatgcatggtctgtgttgcgtgcctggtgtgtgttgtgtgccttgcgtgtgtgtgctgtgtgtgtgcatggtctgagtcatgtgcctggcgtgtgttgtgtgccgtgtgtgtgcatgagccatgttgtgtgcatgaggtgtgttgtgtgtgtgcccagtgtgttgtgtgcatggtctgtgtgaggtgaggtgccgtgtgtgtgcgctgtgtgagccaggtgtgtgacaggcacacctggtgaggatgggcaggtggtcggcttccaggttgggccc

SEQ ID NO: 14394 - DNA, 1418 bp, Artificial sequence
  DNA replication origin
caagctgaccagggctgcaaggagctctgctgtgagctccagggaggcctgcaggctcctcaggggagctggtgaaggctggctgtcgagatggtctgttggctgcagtgacctggttcttattattggctcttggggtttttccttctgtgagcccacttgtcatggtcgacgtagaattaggatgggatggcctactcccttcacagctatgggctttgattcagttcgagagaaagagtgaacaggtgccaagtggtcgattgggtaaaatcaactaaagactgagacaggagagagcacgaggccgctgttccccgctcgctggcaaacaaggaaggcggctcctttgcaggactccggggaggtgccagtctaagccagtcagacccgctgcggcccaggcagaggccccaaggggacagctgctgtcctcccagggcgaatgcgggtgattaagaggtgtgtgtgtgtgagagagagtgggactgtgtgtgagagagtgggactgtgtgtgagtgggaccgtgtgtgtgaaagtgtgactgtgtgagacagtgtgagtgagcgtgactgagagtgtgactgtgagagaatgagtgtgtgtgtgagagtgagtgtgacggtgtgtgtgactgacagtgtgtgtgactgtgtatgagtgtgactatgagtgtgactgtgagtgtgactgtgtgaaaatgaatgtgactttgtgagagtgtgacagaatgagtgtgactgtgtgagtgtgtatgagtgtgagtgagtgtgactatgtgagtgactgtgactgtgttactgtgtgagtgtgtgactgtgggtgaatgagtgtggctgtgtgagggtaaatgtgtgtgagtgaatgtgtgtgtgactgtgactgtgagtgtgactatgcgggaatgagtgtgactgtgtgtaagagtgagtgtgattgtgagtgagactgtgtgtgactgtgttagtgtgtgactgtgaatgtgtgcatgagaatatttcatgtgagagcttgtgtgagtgtgaatgtgtgcatgagtgtgaaaatgtgtttgtgaatgtgtataaatgtgactgagtgtgaacatatgaatgactatgtgtgaatgtgtgtatgtgagtgtgactgggtgtgtgactgtgaatgtgtgtgtgagagcatgagtatgaatgtgtgtatgaccatgtgactgtatgtgactgtgtgtgagtgactatgtgtgagtgtgaatgtgtgtgaccgtgagtgtgagtgtgaccgtgtgtggtatgaatgtgagttttgtgtgtgtggggtgtcactgtgtgttttgcacatatgagtgtgtttggtatgcgagtgtatctgtgtgagcatgtgtgtgattgtgtatgagtgtgtgattgtgagtttgagtgtgaatgtgtgtgtgtcggcat

SEQ ID NO: 14395 - DNA, 1152 bp, Artificial sequence
  DNA replication origin
tttggatggggtctcatttctctctctgcggccagtgggttcgggtaatcactctctccctggtcccttagggctggggtttgtgatggcctcccactgtgtgactccgggtgccttagtcccctgctgaattccaggccctgctgtgcctctgcagggtctgtgtaccctctgctctgtggctcctccgagcacacagtctcatcatcactgtcatgaattgtcgtagaaaagtcctaaatcccagagtttgcaatggtcttttttgcaccagttagaaaacacaccacctttggaagcaattaacctcttgtggttcaggtaaattggatctgatgtaatgcaggagtgcacagcggtggtttctgttgtttgcttgctgttttatatttatttatttatttatttattaggtgtattcaggagtccatgcagcaggaagtggagccatcatcacagggtacgaagggaggacaagtgcagtgtcgtgagcatgtacagagggaagttgacagcggggagaggctttgctgaggaagtggcgtttggaagaacgagaatgaggtaagtgaggggggtgaagagcaatgggggcagtttgtgcaaaagccggaggtgcaaggatgctgccgagctggcggaaggaggccagagggactgctcacggccttgggggatgggaggtgaggtcgatgggggcttatgatgaagcaggagaatgggtctggaatcgctttggagggtcacggagagccatgggagggttttgggtgcaggagtgacccagtcagatcagtggcagatcagacactctggctgtcgtgtgggaatgggctgcagagagtgtggtccatcctacacaaccaggacctactgccgggggggcaggtgagaagcggcggtgtctcggatgggggtgggagaagggccgaggcaaatgtgtggagtgtggaaaaagcacaggcacaggggaaagcccgatgggacgttggtagcagcttgcgtttgattttggggatgaaatggaaagtgtgtcaaggagtgtgccctggtttttggtgtgtgtagctggtggcgctgagacagggaccctcaaggaggccggggtgcaggggaatcgccgcctgggtgtagagccttcaggacccgtgg

SEQ ID NO: 14396 - DNA, 1636 bp, Artificial sequence
  DNA replication origin
gaacagagtaacaacaatattaaggggctggtttcaaggattgatttaggaagaaagattaaggacgctaagtgtgtacagctttcctaatcacggactaagtgaagacaagacaaacatcatcagatatttaaagagtagaagcagtgaggatagaaggggattatttcgacgagattctcaatttatgcaacatggtgtaaactgtcataaaaagctccaggatgaggacttggctcattcagatgaagtgggaaatggagttcagctggaaatagtttacggcgctacacttactctcacagagaagtctctctctcaagacattaaggctgaaagctgaagttgatcttcatttagagaatgggaggctacatttacattaaaataaaccagcatcttggcagtccataaactggcatggatgggattcaggcaaggacaccaattgcccatcccagtctcaccatttcccagtgagccaccatggaagagtgtaaagccatgggctactcatgcctaccaaggagaaagagatctcacagtgtctgacttcttaactcatccccctcctccatgctctgttgaccagtattttagctctaccatggtcctacccactcacatcaggtattactattactaataataaacatgcttttttgatttcttgtttgccattgcctttggttgtttctcatgaattttgttaagttttgttgctgtggtggttgtggtagtggggttggaggtggtagaggtgatggtagtgacgatgctgatggaagtgatggtggtagtggtggtggtggtgatgacaatgatggtggtagtagtgatgataatggtggtagtggtgatggtggaggtgatagtgattatgataatggtggtggtgattgtaatggtagtggtggtggaggtgatagttatggtagtggtggcagcagtgatagcaatgatgatggtgatggaggtcatagtgatgatgatgatggtggtagtggtggtggaggtgatagttatggtggtggtgatggtgatggtggtgatgacaatgatggtggtagtggtggtgacaatgatgataatggtggcagtggtggaggtgatagtgagcatgatggtggtggaggtggtagtgattatgacaatggtggtcgtgattgtaatggtggtagtgtgacagtgatgatagtggtgatagtggtggtgacactgatcatcatggtggtggtggtgatgggaacggtggtagtggtggtggtggaggtgacggtaattatggtagtggggtgtagatgttgtggtggtgctggtggtgatagcaatgatgatggtggtggtagaggtgatagagatgatggtggtggtggtggtggtggtggtgacagtgaccacgatggtggtggtggtgatggtaatggtggtaatgatggtgatggaggtgatagtgatgatgataatggtggtagtggtggtggaggtaatagttacggtggtcgtggtagcaatgatgatggtggtggtggaagtgacagtgatgatgatggtcgtggggtaatggtaatgatggtggtggtgatgatgatagtggtggtggaggtagtagtgacagaggtagtggtggtggtac

SEQ ID NO: 14397 - DNA, 1745 bp, Artificial sequence
  DNA replication origin
ttttttttttttttttgcattccattttgttgacatttctgttggacatgaccttaggttgactatcatttcagtcactcacgacactgagcgtctaaagtccacagtccttttttaaaccgtttctactcattcacttgccttacaactccacagcccgccccagggctctccaaccaaaacccttcctggccccctccatcctaacaaagcctgagtcgaacacgaaaggaagatggtcgctgaagcgaaggggagtcatttgtgtccgttccataaatcaagactgtcgcctttcgaaaaggggaggtgtcgcagtctgacagcctgatctgtttctaggacggcgtgtttccaggaaattctgagcacatatatatgcagggagcagtcatcgttttcctcctgtccagccttctgcctcctgctcctcctctagctgcctcccttgtttccaggctggaggttcaatccctcttcaccatccctgctgagggaggctgtgtagcaggctgtgtacgggaggcatgtgagagaggctatgtatgggaggttcatgagggagactgtgtgagggaggctgggtgaaggaggctgtcatggaggctgtgtgagggaggctgtctgggaggcatatgagggaggctgtgtgggaggctgtttgggaggctttgtggtaggctgtgtgagggaagctgcatcagggaggctatgttggggaggctgtgtcggggaggctgtgagggaagctgtgtgagggagactatgtgaaggaggctgtcatgaaggttgtgtgagggaggctgtgtgagggaggcatgtgagggaggctgtgtgggaggctttctggtaggctgtgtgagggaagctgcatcagggaggctgtgctggggaggctgtgagggaggctgtgtgagggagactatgtgaaggaggctgtcatgtaggttgtgtgagggaggctgtgtgaggcaggctgtttcaggggggctgtcagggaggctgtgtgagggaggctgtgtgggaggctgtgaaggaggctgtgtgagggacgcatgtgagggaagcccgtgagggaggctgtgtgaggtaggctatgagggaggctgtgtgagggaggctgtgtgagggaggctgtgaaggaggctgtgtgaggtaggctatgtgaaggaggcatgtgagagaggctgtgtaccagaggcccatgagggaggccatgtgggagactttgtgagggaagcccgtgagggaggctgtgtgaaggaggctgtgtgagggaggctgtgtgagggaggctgtgtgaaggaggctgtgtgagggaggctgtgtgagggaggctgtgtgggaggctgtgtgaaggaggctatgtgaaggaggcatgtgagagaggctgtgtaccagaggcccatgagggaggccatgtgggagactttgtgagggaagcccgtgagggaggctgtgtgaaggaggctatgcgagggaggctgtgtgagggaggctgtgtgaaggaggctgtgtgagggaggctgtgtgagggaggctgtgtgaaggaggctgtgtgagggaggcatgtgagagaggctgtgtaccagaggcccatgagggaggccatgtgggagactttgtgaggaaggcccgtgaggaaggctgtgtgagggaggctgtgtgagggaggcatgtgaggggggcgtgtaagggaagctgtgtattgcaggcccatgagggaggctgtgtgggagactgta

SEQ ID NO: 14398 - DNA, 1404 bp, Artificial sequence
  DNA replication origin
tgacacacacaaagtgcctaaaacagcgctggacccttcgcttctgtgctgaaggggcacggagcgctgagggggccgaggacatacccgcgctggccgccacgcagtgtgtgtaccctagagacgtgtgacgccccaggaccggagttcacagcctgggctcagggggtctgaacaccaaggtcaccagtaactggggagcagatgcatctgtgcatcttcctcacaggaggctccacagcctttgcaaatgggcactgactccaaaagcaattcaactcagcaaaggctgtgagtcccacaacgcgtcagacactgctaagcccagagggcgtgatgacaatggtgaatgagaccaaaacagacaagcaattgagtcctcatgatcacagctgggttagggaagcccggggaggtggtgggggggcgggggggagtggggacaaacacaagggcagctgccctacggagaaagaaaagacccaggaagacctggaggaggcggcgtttaccttgggatctgaaggatgccaagaatctgctcccctgcttgctagaggaagaagggtccagtctgagaacaacacacatgaagacccagaggtgagagccgcccagagactgagaaatggaagatagttccatgacaggaaacggccaaacacaaaagtggagggttccgtggaggcagagcccaagagctgtgagcattcggtgtgccagggagattctgaagggttttaaggaaagaaaagacacagcccggttttttggagggggatctctgtgcctgcagggtgaggaagggttacgaggggccagctgggcagccaccatgtgagaggggataggccaaggcaatggggatgagagggacttgtgacaagttcagaggcgagtccatggggtggtggtgtgtctgtgagtggtggggggaggggcggcaggcgagaaagcaagtgtgattcctgaatttctgcgggaaagccagagggatgaggtgtcatgcctgggtgaaaatgacttgtagaagttgaagtgccttgaaaacattcaagtgcaggtgaccagaggcaggtggggagagagctccgctagacatacagattttggagacttggcgtatgttaacatcagggtggtggggtgagctcacaaacaaggaagtgcataaagagaaaagggaagaaggtctggaacaaaaccctgaacaatcagaatgttccaggtaggacccaaaacaaagaccccacaaaggacccttggacaaggacagccagaggatgggggaggaaatcagaggcgtgtcatcgacgcacaggaagagcatttcacaagcatctctaccatgcaacactggacaaacattttgaaaaacaggtaacatgacctgaaaagaggtcc

SEQ ID NO: 14399 - DNA, 1572 bp, Artificial sequence
  DNA replication origin
agcctccctcctcgccgccgtccccagtcgccccgcgcgaggtttttccaggtcccccgcctgggccgagccgcagttcctgggtcccccacccccagcttctcctccgtggcaggtgcggggcggacttttctccgcaaggtggtcccgggactccgcgctgggagctgagtgggtgggggccacgcgtcctctccctgcccgcctcgttcgggggcggatctgggggcctcggaggtcacggcccagattgccttttcgtggggtgagacgggagaccccggggctgggacaggagaggcgcggcctcccggagatttcgctgcgggacttcgctcgggcgcgggtgggcgcggggagaagcggccgcgaggcctcagaggcgctgggaaggtggaacccacgggacctgcggatgccgcacctggggctgagcggacaggaggcttcgaggggagccctggaaggtgggcctggagccaagctgcagggtaccgtgggctgggtgatgaggtgacaggtgaggggagtggggcagtgcccaggtgttgggggctgggcggtcccctgctgagggggggggctggacggtgccaaggttagtggggggaggtgcacagatgtagggggccagggcggtgcccaggtgaggggggcttggatggtgcccaggtgtggggtgccgggtggtcccttgctgaggggtgccagggcagtgcccagatgaaggggggtggggtggtggccaggtgatggggggtggggtgatgcccaggtgtggggtcaggtggtcccctggtgaaggggacaggacagtgcccaggtgccagcagtggagtggtgcccaggtgtgggaggccgggtggtcccctggtggggggggcagggcggtgcccaggtgccagcaatggagtggtgcgcaggtgtgggaggtagggtggtgcccaggcggggcgtggggtggtgtgcaggtgtggggggggtgggggccgtgtccaggtgctagcagtggggtgtccaggtgtgggcaaggagtggtatgcaggtgcccaggtgctgagcccaggtgcgacttggctgccggagccgagagatgagggtgctgtgtgaggagaggcaaattgatttctgcaagagaaagtcttcttccatgcagatgaatgagatataattaattatgtagattataattatctagttatagagataagaataatttttattctttagttaagggctcccagttaaaaccagctgaaaacaatgacagttaaattctatattatgagatgttggctacttattaaattcattataaaaatatatacatacatatttgcagtccaattgcatttgatagagcacaggcctgagcagcacccagcactggcgagtgtgcacgagacgcttgttctgcacttttgtacctttccatttctaatggcccaactggccaaatgtagcagggcggtcatcaacctcatacaacagcagaagtgctggaaattttaactatttaattttaggcttagacttagctataaatgctttctgatgagaagttctgtcttt

SEQ ID NO: 14400 - DNA, 1060 bp, Artificial sequence
  DNA replication origin
ctgtccacaccacactgcgcatgctcgccggcccccgccccgcgcacggcgtcagcgtctagacgcaggtgcgttcccgtcgaggctcgcgcagcgggcgtttttggggatcgcctggcgggggtgttcgggagccgcgggctgaagcacgggggcgtgcaggcgcccaggcctcgtgtagtgagggccgagccccgcgccggcttcgctgtagtccgcagcccccggcggctttgtgggcgcagccacgctcctcagccgcccgcccacctgggcctgggccccggttgtttccctgcggtggctgtggtcgttcccgttccagggtctcgagcgcaccgccccttcgctgcgctgttagtcgagggcagttttctgggggatcccccgatccccccgcgccgctcaggcgtcttggctcgcggaagcgcaggcgccgactgcctggcgtcgtccgtgactcctggcccttctctgtggatccctttgcttctcgttgcgggttgtgtttcctgcttcgtgggcctggccgtttgcgtttggatgcaggcccgggtgagccctgcgtggcccgctggccttttcctgctccctaggtgactgagccgcgtgtgtgacacatcggagtgaattgaggcaacgcgttcctttccaggcttgcagcgggcggtgtcgttcacgctcctgagcagagccttccggtgctttactcgacgccacaaatagtgcagggttcctcccaggggctgtcgcgagctagaactcttccccgcccctgtgagctcgggctgttcttcctcctccgcgtggctcactccagcctcggatgtttcctcgctgcacagacctgctcgggaagactcgagaaggccaccccaggactccagctctccccggaagggcttcccctcggattgcgtcttggcccctggaaccctccctctgtatcctctgctgttcctctcttggcctccatttgggttgtggcctggatactctggctcgctgcttcccttctcttaaggatcacagccctgcactgcctgtcgtccggtgcctg

SEQ ID NO: 14401 - DNA, 1323 bp, Artificial sequence
  DNA replication origin
ccgcgagccaagacgcctgagcggcgcggggggatcgggggatcccccagaaaactgccctcgactaacagcgcagcgaaggggcggtgcgctcgagaccctggaacgggaacgaccacagccaccgcagggaaacaaccggggcccaggcccaggtgggcgggcggctgaggagcgtggctgcgcccacaaagccgccgggggctgcggactacagcgaagccggcgcggggctcggccctcactacacgaggcctgggcgcctgcacgcccccgtgcttcagcccgcggctcccgaacacccccgccaggcgatccccaaaaacgcccgctgcgcgagcctcgacgggaacgcacctgcgtctagacgctgacgccgtgcgcggggcgggggccggcgagcatgcgcagtgtggtgtggacagggcgtggttggcaagcatgcgcaatgtgggccgggcggggctggcgagcatgcgcagtatggggcggggcggggcagggctggtgagcaagcccgcggggagcgagcgcggaggcgggcgttgctacggcaacggtgggcggccagggagttgcctgagggaaaaggggcagacgtccctgggttccggtgttcgcggaggagtcgaggcacggagaggcttcgggggagggacggaaagaagggtggcccgccaggcgggcggggtccatggattcggggtgagggccgtccgcggcctcgctttcgcctcctccgagccgggccggcgatggccgcagctgtgaggcgaggtcgggtcccgtagcggcgcgcagcctccttgggggactcggggtcctggttagtttccacagctccttctatctgaggggtacgaatttacggctgcctaaagccttagaacagtgatcccacgtcggtaattttagaacccggtaggaccggctgccatcaggggccccaggtgcagggtggtgtcagctttgagaggaattggagcctcgtcaccgcgcgcttcctgcatgagtggaacctcagaaaacggtcagcggggttcagaaggcaggagataacaccaagaccctacgtaggattgcatctttacgtcgtaggcttggtctcgtgtatttttattgagcgtgtttaattagctgaggttactcgctttggcaccccagtgatcgtttttgccaccaagctctgcctcttgagcgtttaatactgggatttacaaagcaacgggttcctgttaatcttagctttcaatactgggcaagggttacgtttctaaccctaccagtgccgcaggctcattatatattgaaggactcacctgg

SEQ ID NO: 14402 - DNA, 947 bp, Artificial sequence
  DNA replication origin
ggggacggagggcccgggcgggcacgcgggactgtcagggctgcctcggtccccacgcaccgtggactcccgcacttggctgtggaagtgctgctcccgcgccgacacctcgtcctgcccttccatcctccttcatgcccgccgccgcgccgcccgcgtccgcgtgctccgccacaccatcgtccgcccgccgcaggggctcggacagccgcgccggggaccggagccggcacgggcccgcgagccgtgttggaacaggtaccgcgaccacgacaccggccgtcgcctcagcagcctcagacgagcagctctgactaagggagggcgggcgccgcgcagtcgggggcggggcgggggcggggcagggaggggagggggcggtgcaggcatacgtcagacgaaaggcgccgatgcgtcagaaaagcgcgcctcgcggtcttccgagctgctgggccgggaggcgctgagggggcggggccttgaggtcgcggggcggggctccgcccacgctctcaggggctaccccagttaaggaggcgctgtcctggcgtcggatggggacggggaacgcggcgagggcgctgcgacctctgcccacctggcccggccgcagtctcggagttcctgttcctcacaggagctaattatttatgacagctgcatggttcccctcccccagttactcagtgcttggcactcggcaccccttactcagcactcagtaccgcactcggcctcaggggacctgggcagagggaagcagggagtctcccgcggaaactcttgctctgccaaagtaggttgaaaggtcggaaatcggtggtttggggccgggctttgggcggaaacccagcttctctgggtctgagaagggtcttgggctgccccacctggaaaacgcagataaccgagctcgctagacccttgccaagtccttccggtagctc

SEQ ID NO: 14403 - DNA, 1053 bp, Artificial sequence
  DNA replication origin
cgtcacccatttgcgcctcgtcacccagtcgcgcctcgtcacccagcacgtgcctcgtcacccagcatgcgccctgtcacccaatcgcgcctcgtcacccattcgcgcctcgtcacccaatgacacctcgtcacccagcgcacacctcttcacccagcgtgctcctcgtcacccaatcgcgcctcgtcacccagtcgcgccttgtcacccagtcgcgcctcgtcacccaatcgcgcctcgtcacccattcgcacctcgtcacccagtcgcgcctcgtcacccaatcgcgcctcgtcacccattcgcgcctcgtcacccaacgacacctcgtcacccagcgcacacctcttcacccagcgtgtgcctcgtcacccaatcgcgcctcgtcacccattcgcgcctcgtcacccggtcgcgcctcgtcacccggtcgcgcctcgtcacccggtcgcgcctcatcacccagtcgcatgggaaagagtcctatttccacagtcctgggtaaaggggctcggagtggggaaatgggaggctctgccacctggctggacaggagaggaatgcaaacatgaaccagcgcattgatgatgctgaggtcggtttgtggggtgcaggtggcacacactagggtctgaagggcagcaagagtgccgggcatgaggagacctgcgtgagacatgcggctggcgaggtggccagggccgggcgtgaaagctctgccgatccgggagtgttttgtgtttgttctgggagcagcaggaagcatggccatgttttgggtggggcgtgggtgagggtgagagagggacagtaacggcattgcattttccgcaggccaccctgcagcctgcaggaccttgcaatccggatgggtggacagaaggctgttgtatcccagaacgtcccccagcctggaaaaaaagtagccacttggggctctgattagaacagctctttaaaaataatagccctgtaatcccagcactttgggaggctgagacgagaggatgacttgagcccaggagttggagaccagtttcggcaacactggca

SEQ ID NO: 14404 - DNA, 1800 bp, Artificial sequence
  DNA replication origin
ttttttccaggctgggggacgttctgggatacaacagccttctgtccacccatccggattgcaaggtcctgcaggctgcagggtggcctgcggaaaatgcaatgccgttactgtccctctctcaccctcacccacgccccacccaaaacatggccatgcttcctgctgctcccagaacaaacacaaaacactcccggatcggcagagctttcacgcccggccctggccacctcgccagccgcatgtctcacgcaggtctcctcatgcccggcactcttgctgcccttcagaccctagtgtgtgccacctgcaccccacaaaccgacctcagcatcatcaatgcgctggttcatgtttgcattcctctcctgtccagccaggtggcagagcctcccatttccccactccgagcccctttacccaggactgtggaaataggactctttcccatgcgactgggtgatgaggcgcgaccgggtgacgaggcgcgaccgggtgacgaggcgcgaccgggtgacgaggcgcgaatgggtgacgaggcgcgattgggtgacgaggcacacgctgggtgaagaggtgtgcgctgggtgacgaggtgtcgttgggtgacgaggcgcgaatgggtgacgaggcgcgattgggtgacgaggcgcgactgggtgacgaggtgcgaatgggtgacgaggcgcgattgggtgacgaggcgcgactgggtgacaaggcgcgactgggtgacgaggcgcgattgggtgacgaggagcacgctgggtgaagaggtgtgcgctgggtgacgaggtgtcattgggtgacgaggcgcgaatgggtgacgaggcgcgattgggtgacagggcgcatgctgggtgacgaggcacgtgctgggtgacgaggcgcgactgggtgacgaggcgcaaatgggtgacgaggcgcgattgggtgacgaggagcacgctgggtgaagaggtgtgcgctgggtgaagaggtgtgcgctgggtgacgaggtgtcgttgggtgacgaggcgcgactgggtgatgaggcgcgactgggtgatgaggcgcgaatgggtgacgaggtgcgactgggtgacgaggcgcgactgggtgacgaggcgcatgctgggtgacgaggcgcgtgctgggtgatgaggcacgactgggtgacgaggtgtcgttgggtgacgaggcgcgactgggtgacgaatgggtgacgaggcgtgaccaggtgacgaggcgcaaatgggtgacgaggcgcgattgggtgacgaggtgcatgctgggtgacgaggcgcgtgctgggtgacgaggtgtcgggtgacgaggcgcaactgggtgatgaggcgcgaatgggtgacgaggcgcacgctgggtgaagaggtgtgcgctgggtgacgaggtgtcgttgggtgacgaggcgcgactgggtgaggcgcgaatgggtgacgaggcgcaattgggtgacgaggcgcgaccgggtgacgaggcgcgaatgggtgacgaggcgcaactgggtgacgaggcgcgattgggtgacgaggcgcgattgggtgacgaggcgcgaatgggtgacgaggcgcgactgggtgacgaggcgcgattgggtgacgaggcgcgaatgggtgacgaggcgcgattgggtgacgaggcgcgcgctgggtgaagaggcacgactgggtgacaaggtgcgctggcatctgcagggtcacagatgcaggggtctttcaagtggggagcagccaaaaatgctcacattaggcctccctcatgttaggatcttcggttgaaaaatctcccacataggccggg

SEQ ID NO: 14405 - DNA, 1100 bp, Artificial sequence
  DNA replication origin
tcccccacaaagtattagaagtcctggcttcagagcaaagaaacctccaccccaggagatcagaaccagcgcagatggcccagcggccaccggccaggcctcagagaacgatcacagacagaaaactcacgcaggtcagcggcctcagggagttcaccaccaaccactgagccgttctgtgcgccagaccccggctgagcactcggcgcaagtaatcgattttcactcatggggttcctgtggagcgggatggcagcgaggctgcgggctccttttccccagtgagtcgcggaggaggactgaaggaggggcctgggttccgggagcaccagcggtgcaaccccgggggaggccctggtctacggcgcggggagctcagccagtgcggcaggcgtgaggctgggcgggaggagagctctcccgctccgctgactcacctggcggccttgacacacagaaacaggccccagctgaaggtgcggcgggccggcaccctcctctcaggctgggagctacgggaatcctggctccccccaggctcctctccatgaaccgagtggcaaagcctgcgggatgagcagtgtggggaggtgtttgtggagcccgtcacccttcagcctctgaaagactcaccgtcagaccaaggagctgagaccccaggagaacgcaccctcgcggagcctgagtccgcagacgtctcagtacaaccgcccccaaatgaagacctcagagggcagccgacagcttgggaacagtgagggaaggagcaagcagccctcaggcccagcacagcagccactcagggagcacggggagggccggtgtaagttccaagctgaaacgagcatttttataacagccccgtggcgtcggcaccaccgcatcccattccacagatagacccaggctggagaggtgagcaaggccacgtggctggaaatggggagatcagggtttcaccccaagcctgagagcccagggccgcgctgctgactactctgtgtgcatctggcagctgaaccttcctgttcccatcaccgtgaggccgtaagtcttgctcacaactacttcccacctacctagctcaggttcctggcagg

SEQ ID NO: 14406 - DNA, 1222 bp, Artificial sequence
  DNA replication origin
accggggttgtgtttaatttgtagactaaactgagatgaggtctgaactggtggaaagatgaatagaatatttatgatgttaaatcttcctctctaaggacagtatataccttccattcattcagacagtctgtgttctcttcatataggttgtgcatacgtttcttgcagaatttattcttaagtgtcttatcactctgtttttgtcaatgggatcattacatcttctaacatgtatgaagagtgtgtgctcatccaaaaatctgggcctctgttattagagaacatgaaaagaacagatattggggacaatcagctttccctgtcccaaccttctcctttccaacttttatctgtctcgtttttctccgaattgcctcgctaactcctgcagcacaagtgtcctggtgccctgggctccctgtcttggaggaggaggagggggaggggcgtgtcctggaaaaggcgggggatggggggaccctgactcagaggggcatttctgatgcctgagaggatgtgggacttcccatggacaatgcgggaggaggtgagggcttctgaatgagcctggcacatggcacagtgagcttgcctggctggagtggaggatgggcatcgggcagaaggaaagccaagctgggcagcaagagcatgtatcccacctgcagtggacagaagctgtgcagatggcttcccaagcctcgtccttcatcctcacggcagccaccatgtgaggtgcagaccacgtcttcattgtgcagggaaaggctctgaagcacagatgggcacaattccgcctgaaggcgggccctggtgtctgcccatctatggtctgcggtggtccaggctgagtctccagggagctgggggtgtttggagcagggaagggacccagaaggaaagggggggtgctgtggagtgaccaggaagaatgtgggctttttctgtttcctgggagctctggtgaggtttgtaggtgatgagctccccctcttttccgtccaggagctgcaggatctgccaagagaggctggggaggtcctgagacccttccctgtcagagaagaagaggcagagggtggcaagggcgtaagcatggctttctcacccattcccaggggacaggaggcatcgggagagtgtcctgcgtgggggaactgtcagaggggaggatgacatcgtgccccctgcacctccagcccccaataatgtgaggatg

SEQ ID NO: 14407 - DNA, 1231 bp, Artificial sequence
  DNA replication origin
ggctcccagggacgcgtggtccgcatgaagcgcagaggcgggcgcgggccgcgccgcggtcctgctggcggtggggagaaggccctgaagaggctgaagctagcggtggaggagttcgtgcacgcgacttcggaaggcgaggctcccgggggttgcgaggggcgcggcgccccggtgagctttcgcccgggagggagaaaaagccgtaaggaactgaggaaggagaagcggcacctgcggaaagcacgccggctgcagaggacggcgggccccgaacagggtcccggcctgggaggccgaagcggagccgaagaagccagcggtcaccggcaggacacggaggagcgcgcccgcccagcccctagtcgggacccctcgcctcccaggaagccgcggccgtcccgggtcaaggccaaggccacggccgccaccgcaaagaccagaccctccgcagccgccaccgccgctgcccggaaacgggcgcttttagcggcgaacgaggaggaggaccgagagatccgaaagctggagcgttgcctcggtttgaacaagcgcaaaaagaaggacggcagcagctccgtgccgctgagctttgcacgcgacggtcttgactatattctgggagccctggagtctgggaaaaatagcggcttgtacgacagcagtggtgaggaggaggaagatgccggacagacactccccgaaagtgacttagagagtgactcccaggacgaaagtgaggaggaggaggagggagacgtagaaaaggaaaagaaggcgcaggaagcagaagcgcagagcgaggacgacgacgaggatacagaagaggaacagggggaagaaaaggaaaagggagcgcaggagaaaaggagggggaagagagtccgttttgcagaagatgaagaaaagagtgaaaattcctcggaggacggtgacataacggataaggtatcgtgtgaacactctctaggccctctgggatttccttcaaaataacgggacagggaatggggcgtgaggcagaaatgacacagacttggtgtcttgataatggtttcagctgaatgtgagtaaatcgagtacgttactctattcggtcttctttcatgtttttaaattttcataatgtaaagtttaggagaaaagcaatatagagacatttttatcccggggacttaagggccatttccacagtgcagcatcttcattctgtgtttaccagcccaggtct

SEQ ID NO: 14408 - DNA, 1206 bp, Artificial sequence
  DNA replication origin
tgatttctgttttttctgtctcatcctgttttctggctttaatatgtgaatggaccttattcctttaccagaaaaatattttgtgaatttaaaaactgatttatttaacattcatccgttaaaaaatgcttaccgaggaggccacaggacatggggctctagggtcagcctgggttggactttgggctctgccacttgacagcagcataacctgggtcttctgagcctcagtttccccctctgtaaaacagggactgatcacagctcccacattgtgtgccgttcagatgatgagatgtgtggaaccgcgtgttcctgggaagccgtttggggaagaacccgaaaagggttagtttgagagcctggagggggcatcacaagagaaaaaggcagagttcaggtctctggtcccttgttaattactgcagggaattgagggttttatcctagaggcatctgaagggttccagcaggtgaatgacaggttggagttttccttctgatggtcactttgactccaaggcagaaagaggcatgaggtggtcgaagtcaggaggagttttgcaggagctggggagtaggtggtggcaaatgttgggatcgtggcagtgggtgtggacatgggcgtcagaagtgaccagacctcatgtggattgggatgaagggaaggagggctcagggtcacccatcaggggcacaggggaccgtgcaggaggagatgaggatttaggacaggcacctccatttttgaaagactgggttagctgtgaacagagtgggctgaagggatatggggctgctctcgtagagggggtcctgggagccatggaaatgggtggacttgcctggcagcaggtgggctgtgaagaggaccttcaggttaaggagcactgacgtctagctgcaggcaggagggagagctggcaggtgagaaggaaatgaggatggtcccaggagccagggaacactagtgtccccaggaagaattcacgcccgtgtgggatgctgaggaccagcaagaggaggaagggatttgcattttgggctgaattgtgacggcggtcctgactggcttatcctggtccccggagaagccagtctgaagaggagggggctggagaagggaatgggagcagcgggctcaatggtggtttcaaatggagaagagacagaaagtacattagtgggctggggagctggctgggg

SEQ ID NO: 14409 - DNA, 897 bp, Artificial sequence
  DNA replication origin
ccgttcctgtcgtgtccagcttgagacacacctggcgcgtcgtaaagtgatttacgaagtgaaagtgtgaaaccagggccaccagctggaggcccggccggctttaggagttttattaggtgccctattatggaaaataaactttaatcccaccataaaaaccaaatctgaaaaacatacttgcccttgtggtcgggagcgccgcggcatccctggtggaggtcacacctccgacgggattagttttaaggagggagacagcgctccgcaagactttgataccggggggctggggggcgcccccttcgccgccgcgccccacgcgggtcccagcgcccctccgcgccgcactcccctcccccggacggttccgcccggcagccccctccaagcctggggcgcactcagcgctgccctccgctggcgggggcgggggcggggtgggggagggaagggggaggccgcgggtcagttgacccggaaacctgagaggtgctgaggaacaggcccgggcgcccctccggagcagctcagcaaggaggggctggggtcggaggcgaggagagggagagcagagggaagaggaaaaggaaggaagaaaaaacaacaaaattatttttacaatcattgtgaccattcacgtgttagtaccggagggttaactatgtgcattatgcaacagacgctagaactttctcatcttcccaaactgaaactctgtccccaagaaacaccgactccccagtaccccactccgaaccactagcaacccccattctactctcttagagtttgactcatctaaactgatatttcacacgatcttgcggcatttgtctttttgttcatttgcttgcttatttattactatttttttttagagatgaggtctcacac

SEQ ID NO: 14410 - DNA, 1515 bp, Artificial sequence
  DNA replication origin
aatgagttgccagagaggatattaatctccccgcgccctgaggcagaggagtggctgcgctcgccccgcggtaatcacccaaatgaaacgccaggcccttctgaactcattttatccgctgggaggaggggaggggaggagggaggagaagggcacacgcaggtgctgctgagaaagtgacaaacagaaggaaggaggaaggcccgggagaagggataggagcggcgtccccgtcgcccgtctcctccggggccaggagaggccactgggtcatcgatgggggaagggggccgggagtcgcgccgggctgggtgggccgcgggcctgcgctcctgggcggacgagagcgcgggctgagcccgcatgtgtgcagcacatggcgctgggcctggctgcggtgattgatggcgcgcgctgcagaggctgattaacccggagccgctgcagccgcggtgtggagcgctgctgcagtccgccgctgtcctcgcggacttgtttgcacagagccaagaagaccgatcctggccagccaaggaaggttctgctaacagagagggccggggtcgaggagagagagaagcaccgcgcaattcggtgcgttccgggaaatgtgcctcagtagcgcctgaggtcacagggaccccacatgctactaacgcctagtcgttttaagcttattttctgaaacgtccaaatagcgtatttccacttctggagtgccaacgaagcaacagctagcaaggaaataggaaaataaatagagtccacagctccgcttccgagggacacgtgtcccgggacaggtgtgcaccaggcagccgggcatgcgctgacacctggccacaggtatttttgccaacacttcacattgcgactccccagtagcaggcgcggaggtggtcctgacacccacttgagactccgattttcaccctcagctgccaaccgccgagtagacaccctccccatcatttctacaagcaaattgtaatgccgcgggcataatcccccaaaactcgtgcacgctgatccagtacaaaaccaatttattttacattccatcgtgggcgatgggagaagctaaataataatttagcatgcatacgtagacgtttctttttatatataaatacaatatacaaaaataaagacagtacagttttgagatttccagcagtttgaacgctcgtgacataatccccccgaccccagagacgtaagcataaacccttttttctttttccaaatactctgcagaatggcggctccagaggcggtttcaagtttcataagtcaggtaacactgtgggtttccgccttctcggacgcggggaaaggggagacaggaggcttccccttgcgcggggtgggtcggttcttctcacacgcactcgcgcctcccccaacaccaaccaaaattaattttaaaagaaccagagttcaagtttcagccccctgggtctccctctcgctgtttcttgaagagcaggtgaggcgcccttgcttaaaagggaa

SEQ ID NO: 14411 - DNA, 1356 bp, Artificial sequence
  DNA replication origin
ttttctttttccaaatactctgcagaatggcggctccagaggcggtttcaagtttcataagtcaggtaacactgtgggtttccgccttctcggacgcggggaaaggggagacaggaggcttccccttgcgcggggtgggtcggttcttctcacacgcactcgcgcctcccccaacaccaaccaaaattaattttaaaagaaccagagttcaagtttcagccccctgggtctccctctcgctgtttcttgaagagcaggtgaggcgcccttgcttaaaagggaagcgcccaggaccggagccgcggccgaatccctccagccccggcctgggcgaggggtccatggggcggcggtcgagcctgctctcggggccgggccgggtgggtgcgggcgccggggcctccgggagaagccgccggccggggcgctccgtgcgcgccgcacctgctgggccgcggggctcctactggggcgcgggctggtggctgggccgcgggggcggcgagtcgtcctccgaggagcagtcggaggaggcggcgtggacgctggcgccgttgctgtaggggaaatggtcctcgtcgtcctcgtcctcgtcctcctcggggtcactgtccctcaagtcccgcaggcggcgtccgctgcccttgtctccgggcgctggcggccccagcagctcctcggctcccggctcctccgcgccgcccttccccgcgcccccgccgccgcccttctgtttctccgcttcctgcgccgcctgctctttggcctttttgctgcgtttccatttcatccgccggttctggaaccaaatcttcacctgcgggcacaagcgggcgtgagaaaccggccaccgccaccccagggcttcctgtccccggagtcccccggccgcgtgcgcctgggccccattgggtcggccctggaatggcctcagggtgagacgacttagaagcagaatggggagggggctcgtagcttcctcctccccgcaaccccccactcagcagcaaaccccagagctgggctggagctccgtgggagctaggactatgtccccaacgacccaggccggggacttttctacccgcgccctccgtctgcggaggaagggtcagggcagctggctacgtcgcggtaaatctcaggatgttccctcctctctttctggaacaaaatttctcgaatgcggcctggggatcaccttcttcagaatgaaaggaggggtggttaagtgctgattcttgggccccacccgaagctactgaatcggcgctctgggcaccttagatgaacccgtgcgcccgccgtctgaaccgtcgaggcgcagcgctagatgcctcagaccgcccgtgggtc

SEQ ID NO: 14412 - DNA, 1303 bp, Artificial sequence
  DNA replication origin
aaggaatgcggactcaggaccaccaagtggaaatggatagtttggagttaatgagaccaatttttttttttttttttgtctaggagacgtctgagtgtccctgttaaacagggcccatcgcaggaggcttcctctccacaggagccggctttggtagcagtggattgacccagaggcaagaggagaactgaggccagtcgggggccaggaagggaggttccgggaagcccaggagttgaaggctgcagtgagcgagactgcacccctgcactgtaccctgggtgacacagcaagaccccatctctcaataaataaaaaataataaaataataaaataaaggagcagtgagtgatgagaaccaaatctctccccctctcctcactgcgccttcctagagattcaggctcagatccaaacaggtctgggaagagctggtcctgctgttccaggtctccctgcactgcctccttaagacagaaaaggaggaggaggaggagaaaaagaggaaggaaggaagggagagagggaaagagggagggaggaaggaaagaaggaaagaaggaaggaaggaaggaaggaagggaggaagggaagggagagaggacaggtggaacaggaccaaacccagggtccaagtctgtgtattcaccagggaccctcccaccttccaaatgttttccttggcatgccccctcctcagggtgcgggcggcaggggcaaggcctgaggagactagaagccttttcaggacaattctcattacgcaaattacaggcagaggcgcaggcaggatccggttctctgtgtgttcaaggaggcctgcccggctttatttacataatttcgcacggttacatcacagagaattttatgacctcaaaacgagacttcccttgatttcccaggagcctgacaagtgttggacaataaaagaaagaaagcaaaggaaagaaaggaggccagccccaggcctggatgagctcaggtcccccgggatgggcagtttgctttagaggatggcccacgccccctgctttagtcaaacaaggccccgaattcccaacttgacaatacattagaactttaattaaaccactggctccggagggaccatttgggaaatgccatccaacaggcagagacaaccaattaaagaaaccaaacaggttttccccggaccagcgaggaggacttctcagaacacattccgccgtctttggcacggttatgcctgcccttttggattgccaggtgcagatacctcttctgaacttaagactggttgtgtttaaaatttggcca

SEQ ID NO: 14413 - DNA, 1703 bp, Artificial sequence
  DNA replication origin
ccacgcgcatccgggcgcagcggccgctgccgccgccgccgccgccgccgccgccgctgggggcctggcgctggggctgcaccctgggggcgcgcagggcggcgcgggcctcccggcgcaggcggcgctctacggccacccggtctacggctactccgcggcggcggcggcggctgcgctggcgggccagcacccggcgctctcctactcgtacccgcaggtgcaaggcgcgcaccccgcgcaccccgccgaccccatcaagctgggcgccggcaccttccagctggaccagtggctgcgcgcgtccaccgcgggcatgatcctgcctaagatgcccgacttcaactgtgagtaccctgcggcccccgtggatgcgcgtggcgggagggcctcgcgcatcctccaccggcaccgcctgcccctctctgcgcttggctcccagcgagcgggggaagagctgcgaagccgcctcggctctgcccggggcctgcgaggactcgcccggacccccaggcatgagacgggcagcgaattattaaaatggccatgcgcaggccttgccttctcttcctctcttaacgggaaggggcagttggaggtgtgagactgagatctaatgattaacccgaaggctgcaggagaaggaagtcgccgggggaaggcgagccgagagcgccctgaattaggcaggcccgggaatgggggtcagggcttatcaccggggaaaggaacttgggccaggtcccccactggggcgttagagagacccgcggcccctccagggagagggagtgcttcaggagcagcaaacaagagaaatgggcttcggaggcccggggaggcaaggccaaggcccagggaacccccggctcttaccagggcgctgccctcctctggaagggcgttggatccggggtgcgatggccgaggcaggtggcctggcttgaaccagctatggggggactctcaacagtaggtgcctgccctggaatcctgggcgcccaacaaggtaacgaatgcccctccaaggtggggccgagggagcccctgttctccccaccccagagccgctgggcttcgggcagcttcctctccatccgggcgggacacctcgccagaggcctgggcccctcaggctttcctggcacacgcggactctccgggctggggctccggggctctggctctctggggctctggctctccccgctcgccccatcggggtcagctacttatgagtcgggccgagcagatgtatatggctcaacgctttcagccgccgaacacccaaacaaagagaccccattgtttctgtctgagtggatttgtttagactggggagatgcaggcagagcaggggaaaagcaaaaaagaaaacagaaataaacactccagaattcagattcctttgctggaagctgtggttgtgactaaacagagaaaatctaggaccccagaggctggagaagtcacaagagggtgagaagaatccctgcagaaggctgtttgcccacagccgccccaggctttcctagctcagctccaagaaggccccagtggtcacccatccctcacctgggagagtcagccctactgactggctggaagagggaaagctgcccctcacctcagacacgtctgcgtctgcgaatcccctgccagcctgggcttaaacccagggtgccgacccagggcccatccct

SEQ ID NO: 14414 - DNA, 886 bp, Artificial sequence
  DNA replication origin
tccgcgcacttgaagctcagcgcggcttccgattggcgcgcgcagcgggggcccggggagggccgcgggctccgccattggccgaggggcgcacctgtcaccgtcccggccgcccgccgccccgcccccgcgccgcgaggtcctaagcagcccgggctgttgcgcggcgctggcgggcggggacaccaacggggagtggatactccgaggctcaacctggggcctctgcccgccctcccctgggtgcggagccggacggcgggcactggcaacccccgggcccctggagagccccgcggcggcccaagacccgctcccgagacacgtgggcccctccggacttggttggtccctggagccagctgcgcgcgtcctctccggcctccttgtcggcgctggagtgggtccacgtctgccttgcggagcgcggtggttccacgctcctgagcgcccacgctgcgcagacctggccgctctgcgaggcgacggcagcgcactgaagaccgtggtgtttcccaagccctccctgctctcgggcctccagggcgcagcaggggagggttttgtccccgtggccaaagctctgcaggtcgaaccttatctgctatgggaaggccccgcattttcaggtgtgtgtgcgggggtgtgggggtgtaaacgcgcatgtgagtgtgagtttggcctccacgaatcctctctgggagcccctgccccagtcaaggcggagacggtagatctgggcgctctggcctgcagaacccaagtcggcttgcagacgtcgcccacgtgcctgctcagtggagcgggtcctcggtgacaaggctcttcctcgctgccgagggatgcccatgggcttgcgggagtcaaggcccacacacctcggccc

SEQ ID NO: 14415 - DNA, 1197 bp, Artificial sequence
  DNA replication origin
acgctgcgcagacctggccgctctgcgaggcgacggcagcgcactgaagaccgtggtgtttcccaagccctccctgctctcgggcctccagggcgcagcaggggagggttttgtccccgtggccaaagctctgcaggtcgaaccttatctgctatgggaaggccccgcattttcaggtgtgtgtgcgggggtgtgggggtgtaaacgcgcatgtgagtgtgagtttggcctccacgaatcctctctgggagcccctgccccagtcaaggcggagacggtagatctgggcgctctggcctgcagaacccaagtcggcttgcagacgtcgcccacgtgcctgctcagtggagcgggtcctcggtgacaaggctcttcctcgctgccgagggatgcccatgggcttgcgggagtcaaggcccacacacctcggccctgaaaaacccgtggggcccggcatccttcggaagccctgccgctgcgacccccggccagtccccgggcaggagcggggaaaggctatgtctctcgtgctgccggggcctcctgggaagtggagaggaaagggcttcccgtgagtgagcgaggcacggagtgagcatccaggtctcacccctcccccacacgcacacttcaaatatttacagtaaaaccacttccaagggcgtttttgaagctgaaagaatccacacaggggtcgggaagtcaagcggcatcaacaccaggctttgtcaatagcgccattagacccagttatcttccccagcaagcgtgagaactgggagggagttccaggttccagggcttgctatgcaggtgagaggtgaataaaggaccggaaggggctgtggagaggggagagagccaaagagaaactcagtgccaggtaaacttcaaaattagcacgccaggttgctacaagagggatttttaaaaaggcaaatatagagaccttgccacttctcctcaaaaggcttttgacctaggcgagagttgatgacagtgactctgttgccatgagtggtatcgttttcattataacacagggtagttcccagatgcacaggactggttggaaggttaggaggatggcaatggatgagtaactgcaacttggagtaaatgtgatctggctttgcagagccgaccactggtaaaaagaaatcccaggcattcacatggagtttgtcgtgcctttag

SEQ ID NO: 14416 - DNA, 1387 bp, Artificial sequence
  DNA replication origin
ggtcaggcccgctgagccgggagccgggagggtagagaggggctttcctagggacagacggtcccggggcacccaggcctccgcggccgagcgggctgaggcctaagcagggaggccgtcgccttcaggcacaggtaagcgcagcccgcgcaccgcttgggacgcacctggccacctgcgctgccacccaagcttggggtatgcgggtgcccgagcagaaccccgaactcgcaccgggctccgaggttggagcaactcctaacactgggctcggagctaggggcttgctggaggggcgcttgccgcgccggccctcggggctcacagccgggcacgccggactgcggcgagcgcgtgggcgagcgtgtcaggagcgtgcgccctgggtgcgcgcgtgcgagagcgcacgtgtagggtggcttccagtcctcccttcccgcctgagaagcgtccacgcggagttccaggccgggcgctggggaaggaggtcccggggacgctgctgaaaagagagcggccagcccaggcgcggggccaagcctattgccaaaaacatattaccctgcgacattctgtaaatgagataatgatccataaacccggatgatagatgtggcgtgcctgcgatgtcttctctaaatgagctgctcgcatcgactgctaataatggtgagtttatggaagcgatttcagcgcaaactgcgagagggtcttcttactctaatcagcctgcctgagctaatggacgagggggtcaggctgagagttattgacacgcccgtgcccttaacctgtttcccaataaagctgattagtttttgtcaattcatcagctaaccactcttgctggaactgcatcaaagccttatttgctcaggggaaatcaacaagtcacagatcagctccattaaggggcccggcccggcaaggacagtcctggagccgagggacgccccgacggacctcgggcctcccccgaggttcgcagaggggctgacagcgtggccccccttaactccgagcaccacgacccggatgcacataactgtgtccggaaacttctctttctctgcaggtggagcagcgcctgtgcggctccgcgctatggctccaaggctccggccctggcgtctgggctcggtcggggacagtttccacgcgaggcggagcctagctggaggtcacagggcggtggagagcgagggcatgagggagggagctgggaaccgcgcagtgtccgcggccacgaatctctcctacgcgtccccatgaggcgacctaaggggaagagtgcaggaccctaggacccccccaccccgggcagcgcgggcctgagcttgggggacaggcagaaggggatcaaacccgcacccagcgcagactccta

SEQ ID NO: 14417 - DNA, 1170 bp, Artificial sequence
  DNA replication origin
cgccccgcgttttcctagcgggggatggcggctccccgtgtccgcatcgctgccgggccctgccaccccaaccccggccgcagtggctggaagccgtggccttttccgggctccgagagccggcggggcggttttcctccgggtttcctcccgccggggtcttgggagcccctcagcctcgccctccctgcagggagaaacctgtctactgcgtgaatttctaagcagctgatccttcaggcccaagactcctagagtggaaagggttccccggaatagtaagcgcgccgtcaccttgggtttcttcttcccagagcaaggagacccccgttttcctcatgacccgcgtcctaaaaggtggggaggtgagattcactgggaatcgtgaacctgcccccggcttctcccggggcagcctcccccggtcaggggaggagggagcccttcccttcaaccccgaaaggttccttcctggtccctagctttgctctttgcaggcagggatggggctggcacgccttgcggagaattttaccgttttaaatatggacctagaggccaggtcggaaaggggaaagaagctgcgccttgccgagggtcctgtggccggagcagggcctgactcctgactcccatccagcgccccttctagaaattgtccctctggggagaatgcctgctgttacacaatggcttttttttgaggggagaggaggatttcaggtcaactgaagctagcagccattccttcagggccgctggctaagatggaaggggagagaaggacgctgtggtctagcaggagaaggtcagagactcccagaaatctctaacactgcaaccgcaggctggccattcccagcaggatctcaacagctgaccatcttcctgtgtgcacccgagtccatctgggggggtaaattcaacatttgctcatcttctcttactgaatgttagcttctattgtctacgtacgggttaaaggggaaaaggagtccttggcaattaaagagcactggatggctgaaatctgcagaaatcggcccagcctccccccagcagcccctggtccaccctgggaaaatgactagctttctttccatctctccactccatctgaacgtgatcggagctatagctaagaggccagcccaagggtgacctgccaga

SEQ ID NO: 14418 - DNA, 732 bp, Artificial sequence
  DNA replication origin
ttaaaagatactaagaaaaagcattcacaaaatacagatatgggaaatacaggccccggttgtgttttcactagcgagcaaatcaatctcactgctcagtagagctgaagcgttgtaaaagtgaggaccttttcttattggcaacgtatgggtgggtgtttgccccgctagattctttagtcggttctctctgcagggggtcatgagtttaaaaaccccttattgccaagagctttgaagatgaaatctctgtagcattcaaagccctcctctacaaggacacctggtctgcaaaccgggggttttctcggggttcacaggccagtgttcagatcccccgcctctggagctcgggcgctgtgcacgggagtcagggccaagcctcaggtcagcacaaccgcgtcctaactgtccggccggggtaagatcgcgcctgcgaggacgggaagccgccgcgggcctgggaggaggaagcccgagcgcccagccgggccacacgcgcgggcaagagccgggagctgaaaacacaaggacgcctggagtccccgcagacaggcagagcgcgcccgggaagccacgcgaggaagggagggcaggggatagcttcggatttaggggagccctctgctctctgcacctcgtgggttcgcttcccgtccctgcccccaagcttgcctgacaaggactctctgacttcggtgtccccaacctcagcgtgggctgggcctctcc

SEQ ID NO: 14419 - DNA, 949 bp, Artificial sequence
  DNA replication origin
tatatatgtaggggtgggtgtgtgggtgtgtatctgtgcaggggtgggtgtgtggtgtgtatatatgtaggtgtggctgtgtggtgtgtatatacataggggtgggcgtgtgggtgtgtatatatgtaggggtgggcgtgtggtgtgtatatatgtaggggtgggtgtgtggtatgtatctatataggggagtgtgtggtgtgcatctatgtagaagtgggtatgtgtgtgtgtatatacgtaggggtggacgtgtggctgtgtatatatgtaggggtgggtgtgtggcctgtatctatataggggtgggtgtgtggtgtatatatatgtaggggtgggtgtgtggtgtgtatttagtccattctcacattgctataaagaactacctgaggctgggcgcagtggctcacacctataatcccagcactttgggaggctgaggtgggcagatcacctgaggtcaggagtttgagaccagcctgaccaacatggtgaaaccccatctccactaaaaatacaaaatgagtcaggcatggcagtgcatgcctgtaatcccagctactagggaggctgaggcaggagaatggcttgaacctgggaggcagaggttgcagtaagctgaggtcatgccattgcactcaagcctgggcaactagagcaaaactccatctcaaggggaaaaaaaaaaagaaaaaaagaactacttgagactgggtaatttataaagaaacgaagtttaattgactcacagttctgcaggctgtacaggacgggaggagaggcctcaggaaacttacaatcatgctggaaggtgaaggggaacaatgcacatcttacatggccagagaaggaggaagagaagaaagggggagtaagggagaggtgatacatactttttttttttttggatggacttttggctctgttgcccaggctggagtgcaatggc

SEQ ID NO: 14420 - DNA, 871 bp, Artificial sequence
  DNA replication origin
gacagtgtcttattcacctcatttttattttcaaaatgttcagatttccaggaaatttaaaaaatagtacaaggattatccatatatcctgccccccaattcactgctagttaacattatggcacatttgctttcttctacctagtcacgtgtagctaaatgtgtgtagtcctggggtgcaaatgtatagacacaggtgtaggggaatgtggaccaggggatgcttgtatatatgtgggtgtgggtgtgtgagcgtgtatatatgtaggggtgggcatgtgggcgtgtgtataggtagatgtgcacatgtgggtgtgtatatacgtaggtgtgggagtgtggtgtgtatctatattggggtcagtgtgtgggtgtgtatctatataggggtgggcgtgtggtgtgtatatatgtaggggtgggtgtgtgggtgtgtatctgtgcaggggtgggtgtgtggtgtgtatatatgtaggggtgggtgtgtgggtgtgtatctgtgcaggggtgggtgtgtggtgtgtatatatgtaggtgtggctgtgtggtgtgtatatacataggggtgggcgtgtgggtgtgtatatatgtaggggtgggcgtgtggtgtgtatatatgtaggggtgggtgtgtggtatgtatctatataggggagtgtgtggtgtgcatctatgtagaagtgggtatgtgtgtgtgtatatacgtaggggtggacgtgtggctgtgtatatatgtaggggtgggtgtgtggcctgtatctatataggggtgggtgtgtggtgtatatatatgtaggggtgggtgtgtggtgtgtatttagtccattctcacattgctataaagaactacctgaggctgggcgcagtggct

SEQ ID NO: 14421 - DNA, 839 bp, Artificial sequence
  DNA replication origin
agcgaggacgcggcggccgggaggcgacccgagcccgcccccgggctgtaccctcccagccctgccctggggcgggaggggcggcaatactggaggggcggccctgcctcgcctgcccctcatccacgccggccacagctcgggccgctgcaggggcgcccagcgggcagcaaacccggcgcttgcacctggaactgccgcctcgggagggaagatggcggtcagccgtcagtgcgtgcgcggccctgcagacgtgcgcggccctgcagacgtgcgcggccctgcagacgtgcgcggccctgcagacgtgcgcggccctgcagacgtgcgcggccctgcagacgtgcgcggccctgcagacgtgcgcgcctccgccattgacggcacggcgctcttcccggcggttccgctagcgtgcgcggccccgcaaggcgcgctggagcctggggaggacggcggtgacgcgggctgggcacgcggcggagtgggcggggcctggtgcgtgctgggggagcgcggcgaggggcgcgggaggtgttgggtgcggggcagggtgcgggaaaggtggagtgcgaggcacgggccgggatggggtgcagggcagggtgcggggtgcagggtggggtgcaggggccggcacccggagcgggctgggagcggccaatctggtgccagactcgagtgaggcgggaaaggagcagctaggcccagcccgtctgtttacatcccacctgttctatgtctatgacacgcacagacggacgtaaatatttaccatgtacacagacatgcgcagatttgcctcatacatagcacacatatgcatctatagatacagc

SEQ ID NO: 14422 - DNA, 1413 bp, Artificial sequence
  DNA replication origin
ccggctgcttccgcggcggcgctgcccgcacatgggctaggctgccaggatgttcagcttcgaaggcgacttcaagacgcggcccaaggtgtcccttggcggcgcgagcaggaaggtgagggccgggctggcggggcgccctcggctcggggcctgcgcggccggggctcggggctgggactcggggctggactcggggctggactcggggccgagacttggggctggattcggggcctccctggcggggactcggggcttcctcgccggatctcggggccgctccggccgggactcggggttggactcggagccgagacttggggccaggactctggctggggcttaggactggactcggggcctccctggctggaactcgaggccgcgcccgtgggggccttgcctgtccactgcgcttcgggacccgggcgcgctggccgtggctcccttccatgcaggaggccggtgaaccctggcacgctttgtgccacccaaggtgaacttaccctttctgggtgtttcctttcagaaatgcgctttccatgctcgctcccgcatggcatcagggagtggctgcttttcgaatgccacctgaagggcgttttcggttgtagaaggtgaacggcacgcatttgctgatgtcgataatctctaaagtagaggcagaacgtctcatgaatagccacgtgtttgaatccaagacgagggcaattatttgccaccagcctcctggaaactgtggagagactccggacttacatctgttgtgatcgacattaagttgttcgcatggtaattgtttaggataagggtaggcaaaccatgacgcctctgttctagtctagaatttctagctgtctgtccctgaagacgggcatcagttggttcactggaaccgctaagtcgttgaacactgtgtggtcttgttcccgcccctcccttcccaccccttcccatcatttctgaaatgttctttaaaatgcttcacctagtttttcttgtctatcagtatattctgtatatcacaaccaccaggtaggcacataacgcagagtgggtgctggcaggccaaggaggaactgctgttattaagattgtgctgtggggctgtgtttggtggtttctgaggttagaagggaacctgggtaaagagttgggagagaagtgtgctgataatttttcagctttgaggttcgtgtgatggtgattgcttggaagtcacttgtgctccagaactaagtactgtgcagttaagggtggtcgtggtagcacttagggtcttccacgttaatgaaaatgttttatgagatcaaaggatttctacagttaggagagacttcagagaatctcagggccaaatcgccttgcttacaagttcggaaggtgagctgcagaacatttgaaggagtg

SEQ ID NO: 14423 - DNA, 1913 bp, Artificial sequence
  DNA replication origin
ccccgaggactctcgggaccgcggctctggagggcccggagggctgcgggctggagcgggcggggaggagccttggctgcgggagccccggtcctccctccgcggacccgttttctaggagagcggccgccaggcccccagggtggccgagtccgaagcgtcctttgcgcggttccaagtctctggaacgtggcggggccgggcgtggctctccttccttcctgggagcggcgcggggccgcctctcggctcgacccctggccccggggccgtcccaggccctcccgaatcacctcctggactccgagccctgggccccgggtctcctgcaggcctcgggcgtccgccggcccagcgcgggaaatgcaaatcccgaccccgcacccacaaccgctcccgcggccctggagtccccagaggctctcctgggacttccgcctcccacgccccctcccgcgtccccgggccgcgcccctcaggcctgtccgtccagcccgtcccggaagcccgggccccgcagggatttgcgcgttctcactgtttactgggcgagcggacgaatacggaaatgaagtgggcctcgtgctgggttcggtgtgggcacgggtgacccaggtatacagccagcgcatactgtccgtgtgtccgaggggtcaggccctgggaggatctgagcccagggtcccacggaggaaactcgcccacagcagccagccccgtggctcagcctcactcccagcacgtggggaggctgaggcaggaggtggctcaaggccagttcaacaccagtctgggcaacacagccagaccccgtctctacaaaaaaagaaaagagaacagcccaggtcagctgctgctggaccagcggggctccgtggcatcaccgaggaagcagagggcaggctcacaggcgaggggggtggggcgatgcagacccagccaaggcctattgcaccccaggagcgggaccaggggaggagggtccccgagcccctgaggggctttgctccagcgatgctgacattgaactttggcctccagaactgggacacagtgtgtttctgtgttgtcggcctccagagcccagccttggctgctagcatctctcaaacacgtgtcgaagaaccagaccctccttccgctctacagatctcctgagctcaatgggtcctcctgccttggcctcccaaagtgttgagattacaggcgtgagccactgtgcccagctgcaatctccattctaaaggaacaggagcttccacccacacgagggttccctgcttcccctggagggggggcgggcatctgagttggatgggagctgacagcgtcaagatgggcccaggctgcccatctgggggtggcctggctgtggggctagggtggtggccctggtgtggtgcccacctgtgggcctgtctgtctgggacagagcctctgacatccctgcagatcccttgcactgtctgagggtgcgcccccaccctaggctctgcccttccctgaatgagactccaggcacccacctgagggtaagcagcttccccaggtgacctaagccagtgacagccctcattcaagggtcccctaaggcaagtgttttgtccttgtctcctgtccccaaaggctcctgcacactggaagcccatggcagctcaaggggtgacctggggagggggacaccatcgcccctcaccctttcaggagtaaatcaagtccccatccccctgtgaaaagcaattccaggcccctagaaacctccttgaaaagaagtcacttcggctcagtatggtggctcacacctgtcatcccaacactttgggaggccaaggcgggcagatcacttgaggtcaggagttcaagaccagcctgggcaacatggtgaaaccccgtctctacaaaaaatgcaaaaa

SEQ ID NO: 14424 - DNA, 1441 bp, Artificial sequence
  DNA replication origin
ccccacgccggctgctccgggccccccgccccgcccccactcctgccctgacctgggagcggccgccgccgtccagtcccacccgacaaggacttcagagcgctgaccgcagggggcacagggtaccagaaggttccgccctgcatgcttccagcttggctgagaaaggagctgccggccatggaggctgtcgggaaagcgccctgacgatgagagatgcacgagggtcctcgggggtgtcctcaggaaggagctgagcaggtcctcagctcgccccacctccccgacaggtgcacacccggcgggggctgaggtgggccctcctctgtctccgtggcctccttggtaccatgagcacagggcctggtcatggacaccttcagccaggagtgtcccttccagaaagggggagccgcccgggaaggtgttccggcgtgctcagtccttcagtgacagcactgtgaccactccaggtgcctggcacaggcagaggtggtggccgccagagctgggggacgctcccagggtgtaaggccaaggccttggtcaggaggacgtgatgcttggtgtcactggggcgaagctccggaccccggagggaggagctgctccccctgatgggaggatgggagctgggggtccagctctgcaggttttagcgtagccctgtccctcaaggctgcccaggccaggcaggggtttctctgcagtctcagctgggtgaggcccggccgggcaggcaggagggaggaaggcacagtctcctgaggcggagttggggactgacggggagaggcagtgctccagagaggctctgcacggggtcaccctgctggcgatcagctgcagaggagccctgcccgtggacccgggatttgtggggggcacttctgccgggcggggggtcggtgtccaggtgctgcagggcacagggtgagtgcccattgtgcccttggtgggtgccgactccgcactcagctctgtgctgatgaagagaacccgctcttgtcccgaaggacttaggcctgacccccgagaaaaggccggcacacaaaaacaccaggggtcaggtgctcaggcctctaatcccagtacgttaggagaccaaggccggaggatggcctggggcctcaagttcaagaccagccggacagcacagcaagaccctgtctccacaaaaataaaaaaattgggccaggagtggtggctcactttgggaggtcgtggcaggcagatcatgaggtcaggagttcaagaccagcctggctgacgtggtgaaaccccatctctactaaaaatgtaaaaaattagccgggcgtggtggtgtgcacctgtattcccagctactcaggaggctgaggcaggagaaccacttgaacccaggaggtggaggtttcagtgagccgagattgcaccacagcactccagcctgggccacaga

SEQ ID NO: 14425 - DNA, 1252 bp, Artificial sequence
  DNA replication origin
gggctcaagcacagtgtgggcctgtgtgtgggaaggcaggagccaggtggaggcctaaggggaagggagtgagtcaggcggggcagtcaggcttgcctggtgcgtcaggaggcaggcccaggacaagcgtgtgtgtgtgtttgggggtgggggggggtgcacactctgcagctcagcttttcaagccagggctgcctctgtccccgacgctgcctcatctggggccgcatctgacccttccgtggctgcaaacagcaccaccagcccctcctggagtcatctgccttccccagggctttggtgcccagggcaccatgcaaatgtgttctgggaaggaacagcacagactgtgctcacctgggccgggaggcagggcctcaaggctgcatggagactcggggcaggggagaggactgggggcgctgggaggattgcgggggctgggggggggctggggccacccccaggtggctggaagtgagcacagtggcccaaggcccctccaggtgaaggaagagggaaaggtcctggggaccgtccatgcacctgtgagtggggccaaggctttgcccctaggacacggcgatccctgcacggcccagtgcagcgagtgggtgacccgtgcagctccggttgcttcccagttactcttggccacgcacacagcctgagagcaggagctctgcgctggtttcacagccctggagcctgggggaagaaccagtcgcctgcatggggatggggaggcgcaggggtgccgggggcccttccagggggtgcggttctgccattcaaggtccagaaaaatgacagaggaagaagagttagaacagattctgaatcgttccgcctcagcaggaaggaaaccccgtccctgctccaccactggcgcaccttgaggacctaatgccgggcacagagggacaggcgctgcaggaccccgtgtatgcggctcctagagttctcagacccctggagacaggaagaagagtgggggtgccgggggacaggagtcagcgtttcatggggacagagattcagcttgggaagatggaaagttctgcggacgatggaggtgatggctgcacatcagtgcgaacgtgctccatgccaccgaactgtgcgcttgaagacggctgagatggtgcattttatgttatgttagatgaactttaccacaattttttaaaaaatcaagaagtgaaaatttagaccatgatccccaagtgaaagcagatgaaaatcggaggag

SEQ ID NO: 14426 - DNA, 1854 bp, Artificial sequence
  DNA replication origin
ccagtgcctctgcgttttaggaagcagggttggtgtctgtgtaattagttaagaagaggttgtattggattagggtgggccccaaatcgtgttcttagaagaagaaggaaatggctgggtgcggtggctcacacctgtaatcccagcactttgggagccggaggcgggcagatcatgaggtcaggagtttgagaccagcctaaccaacatgacaaaaccccatctctactaaaaatacgaaaattagccaggcgtggtggcgggcacctgtaatcccagctactcaggaggctgaggcaagagaatcacttgaacccgggaggtggaggttgcagtgagctgagattgtaccactgcactccagcctgggcaacagagtgagactccgtctcaaaaaaaaaaaaaaaaaaaaaaaaaaaaaaagaagaagaagagggaattgagacacagggacagggaggaggctctgtgacaacaggcagagaggggacggctgcgtccacaagcggggagggccgagggtttccagcgccccccagaggccagaggcgcccacagaacaggcttcctccaggaggaggcacttctgctgacgctaatttcactcccagcctccaagactgtgagaggaggaacctctgttgtttggagccacgtgcagtgattttacagccgcctgggaaacgcatacagtggtcctgtgctcttagcctttcattgaaagagtccacatgcggttgctagaaagcacacggagccctttgcccaggcccctccacggtggcgtcgtgcggaatcaccgcatggcgttcccgccagcacggccacagagacacagccacgcctcttgtcaggcctcctggtgtttcttgtacttgtgtgtgctgcgtatgtgtctctatgtatgtgtggtgtggtgtgtgtatgtggtgtgatgtggtgtggtatggtgtggtgtgtggcatatgtgtgtggtgtgtgtggtgtgtggcatgctgggtagtgtgtggtatgtggtgtataatgctgcgtggtgtgtggtgtgtgtgtgttctgtggtgtatggtgtgtgtgggtgtgatatgtgtgtggtgtgtgtggtgtgtagtgtgtggtgtattgtgttgtgtggtgtgtgttgtgtggtggtgtgtggtgttgcctggtgtgtgtgtgctgtgtaatgtgtgttgtgttgtgtgtggcgtgttgtgtttgtgtgctggctggtgtgtgatgtgtggtgtgctgtgtgtgtggtgtgtgtggagtggtgtgttgtgtgtggtgtgtgtgatatgatgtgtgtatgctatgtgtggtgtgtcatgtgttgtgtatgtttgtgtgtgctgggtggcatgtggtgtgtgtgtgctgtgtggcgtgtcatgggtagtgtgtgatatgctgggtggtgtgtggtgtgtgcatggtatgtggtgtgtgtgtggtgtgtggtgtgcggtgtgcgttgtctggtgtgtggtgtgtgtggtgtgtggtgtggtgtgtgtggtgtgtggtgtgttgtgtgtgtggtgtggtgtgtgtggtgtgtgtggtgtgtggtgtgtgtggtgtggtgtatggtgtgtgtggtgtgttgtgtggtgtgtgcggtgtgttgtgtggtgtgtgtggtgtgtggtgtgtgatgtgtgtggtgtgtgtggtttgtattgtgcggtgtgtgtggtgtgttgtgctgtgtgtatggtgtgtggtgtgtgtgttgtgcggtgtgtgtggtgtgtggtgtgtggtgtgtgcagaggcttctagttctctacgactccaccacccatgggtgctcacaagctccctctacaggagcggctccgccccgccctg

SEQ ID NO: 14427 - DNA, 1204 bp, Artificial sequence
  DNA replication origin
gcgcagtttccactgcccataccgcgggcccaacctcgggggcgcccgccccaccttcgcgaaggttctcggctcttccgccgccccgaagagcccaggagactgggggcgagggggcggggaagcccagggcgagggggcggagctcggggccgggtctacggtaccggggagcccagacgcgcggaaggcacagagaaggccgagaagattccaaatggcacttattgttgggccagaaggagcccattctggaaaccgcgaagtcgtcgcgcccttcatcttcctcttgaccggcggcccccggagcgcgtctgccgcctctcgctccgcggtcctgcggtggagctgggtggcatctccgcacagcgggacgaaagctggggcgcgggcgcgggcgcgggcggagaagtccccgaaggagaagaagaacaaaccaagcggcggccagcgaaggcgggcgaaggcgccggcccccgcttgtcaatttagggaagcccggataccctaagttccccggcgaacgggagcgcgtggagacttcgccagggaatagtgactgaaggaaacggaagcaaactgtggcagaaaatacagatgaagctttttaggttaaatcgtggcagtagtttttctgaaaacgcggcgcattttgatagctggactttaggtcatccccaggcttcctagcctttcccgcgtcctcaggggttctggttctaaccctggagaccaacaccacatgcgtgtagatggtgaccagcaggagcagggagtctcagacccagtgcagtcagacaggctcccattcccagtagcgaaagggtcccgcagacccaaagcctaaggagccaacaagcagttcgtccatggagcctggcctggatctcccactgtcttcctctccagcattcagccagatgtttgctactgtgttgtcttagtcctggcccaccttatcctttcctttaagaaataaaaatctcaactgggtgcggtggctcacgcctgtaatcccaacactttgggaggccaaggcgggcggatcacctgaggttgggagttcgagaccagcctgacacatggagaaaccccgtctctactaaaaatgcaaaaaaaattagccaggtgtggtggtgcatgcctgtaatcccatctactgcagaggctgaggcagaataatcgcttgaacccaggaggagga

SEQ ID NO: 14428 - DNA, 1372 bp, Artificial sequence
  DNA replication origin
caccaccagcgcagcagtcctggagctgtgaggagattcgggccgtcaccctgcctcccctgcgtcccgccaccggccgcttctgtcctcggtgagggtctgttccgagggtcgggggaggtcgcctagggccccgcgcgcgcccggcagacggcggacctcacccggcgcctggcaacagcgcggggggtgaccggggtcgccggccggggaaaggactggacggggcgggggccgtggccggggttgcggggcgaagggtgggcggggtcctctgggtcaggtctggggccggggccggggctggggtctggggccgcccggccgcgtcctccccgcccggcgtccttgccggaacgcggcccagcctccgcggcggcggttgggggtggggcccggcctgggagcggccggctggggctcggctggggctcggcggggccggcagcgtgggaggcgtggagcgccttctttttctaaggctcccgcactcgcgtctgaaaccagaaacgggagtggcttgcggagcaggaatgccgcagccgtgccgccaagttcggagggagaagaagcaggtgggggaccgcaaagccctgtttctagaactccggacggattgttcagaagtttgtggaagagcaggctgcctttctcactcagaatgtttgtctgctttgctttgcgttaaagaatctgcaccgtagttgatgcaactgaagtttatataagaagtttacattaactcttacctaaggaaggtcagtgacacacgcagtgtaaactgcaaatcatatattggctcgagaaaggttttggcactagcgaattttttaaaggatgggtttgctagtcagacgtaaacttctgtgctaacttctcacgtaaacggggcaggaaacagcgcaagtagaacgatcgtgccaccaccgaaggggtgccgcctgcgagctcggaggcttcagcctgtttgggaagagtaggctgagcggcgctctttgtagttttcaacgtttttattgagttgcgaattttagtaaggatttgtcgctacaatttaagccaaattattgatttagtagaaaagttagagtgaagaccgaagaaaggaaacagacgttaaccattaaagcttgattgctgctgcttcgtgtttaaccgcacttttccaaatagtgttgcgtatcagaacgattcatgatttctgaaaggaattatatgcagccgccttactcctccgccagtccacccgtcccgcgttctctctgggtttactccagacttcctttttttttttttcctgagacggagtctgttctgttgcccaggccagagtgcagtggcgcgatctccactcactgcaacttccagctcc

SEQ ID NO: 14429 - DNA, 1232 bp, Artificial sequence
  DNA replication origin
gccagcttccctccctctgctctggatgggggccggccgccgccgctcactcacggctctctctctcccgctgtgcctgcaggtgtggccgacgacgatgccctcgctgaggagcgcatgcggagaggccagaacgccctgccagcccagcctgccggcctccgcccgccgaagccgccccggcctgcctcgctgctgagacacgcgcctcactgtctctctgaggaggagggcgagcaggaccgacctcgggcacccgggccctgggaccccctcgcgtccgcagcaggtgtgcaaagggaggcagccgtggagcaggcgcagagtgagacttctctgggtgccagaggacagcgaggacacaaaccgcgcctgggctgctgtgttctgacctgagcgggcgtgggcggtcgggcggggcgggaggaggtagcctcgctctgctcctctcccgctcgcggcgccccacgccacggtggctccgggccccccaccgttaaaacggggtccgcgtgtcctgtacgcagcgtgttgctccgcaaaggatgacagagctgccacggcagtgcgaggtgctgcttttaccgtagacgtgccttttcgtagctttcagcgtagagcttgaggcctgtggcttaggccgggtggtctcgtgctggtggggtctgcgtttgcccctgcccctccgtcagcttcaccttctcgtgccttcttctgcgctgggtgcagaacaaaagaccccctcaagtcaagcctccttgtgaagcgtagtctgcccgcccaccccccgtggggttcttggccgccctgccctcctcccacctgttagggagccggatagtctctgaagtgagtgccccggagaagttctgggtcaccctgaggacgtgctgtgcatgtaggcttggccctgactgcgtcctaaagcccagggtccatgtagtgtgaatcgtgcgtcagttggaagtatttgtgcctcttctggttcttatcaccgcacgcggtgaggtgaccccagccgctcatgtcgtgcaggaagacatggatggttgatccctgggtttgggggaccgaagcggatgtcgtgaggttacttctgtggacttgggccgaacagcactgtctaagcaggacatgaaaagaagggggaagcgtctctccttttcccttcatggaactttccattgaaaaattagccccttccagtccttctcggatgaagcacagttgcc

SEQ ID NO: 14430 - DNA, 1116 bp, Artificial sequence
  DNA replication origin
cggatgaagcacagttgccggttacgcttccgaggaggacggaaggtgcacccccagccgtgagagcctcaggatgtgccgcctgtgggtgggcacggcagcccctccagccggccgcccacctgccgtgctgcgctcacctttgctgtgtgagtctgtgctgtgtcactgagtgacagacagaggcagttgcaggctgcatgcacccagaaagaactccccctgcactaagcgggcatgggggaggctccccagggtccctgcactgagcggggtgggggaggctccccacggttccctgcactgagcggggtgggggagactccccacggttccctgcactgagcgggcgtggggaaggttcccaggatccctgcactgagcggggtgggggagactccccacggttccctgcactgagcgggcgtggggaaggttcccaggatccctgcactgagcgggcgtggggaaggttcccaggatccctgcactgagcgggcgtaggggaggctccccaggatccctgcactgagcgggcgttggggaggctccccagggtctgttgtgcgctcctggtactggagggtctgatggccgtagggagggtgcactgtttgtcgatgggtctttgcaaggtgcaggatagagcagggttgtagctgtagtgtccctgaaccactggggttaggaggccaccggaagcctggcctgctaggggccttgtgatttcgcaggccccgagaacgtggtgtgcaggtgcgggccgcctgggggagccatgtttaaagtgcggtgaggctcctggaacggcacccaccgcaggcccgaggccacacctgtatgtcagaactgggcgggtcttctcctcccaggccttcagcgcctgtggctatggctgtgggcgggactgatacgggcaggcaggcgctgttctccccacgtattctcggcttccccgccatacaccgtttctgagtggggagaactggttgactgctgaatcccaacacaaatccttagagcaaagaggccagtgatggcttttgtttctgcccggatcctctttgtggatcttccgttttgcggcttttcctctcatttgtttcctttttttaa

SEQ ID NO: 14431 - DNA, 995 bp, Artificial sequence
  DNA replication origin
ccagagtctgctggggagacctgaactatttctactgtcctgggcctcagggcaggacgcaatgtggggacgcttccctctctgcccatggggtccacccggggagcccagcctgcgtttcaggctcccccaagtcccaacgtgggcctggttcatgtctcatcaagagagcctgtgggcgatcttacctccagtccacagagggaaacaccttggaccctgcgggcgaggctgtgcccccggggacccctctggagggacctggattgccggggcctgaagtggccacagctggggcggggggccagtttccctgggtgctctctgcacctgggagggacatcccaggacatcccccagtctcactgggaaatctgcccacagggatgacaataccctgattgtgaggcatgcgggtatctcgcagagtcttccagagctcatggagtaattctggggtgctgatcaaggtctagcttgtgtgagagccgggggccacaaggaggggcacggcgcaccccataacaacagcggaagtatggctgttggtgttgggacagggagttctgtttgctgtcagggcccagagacgtccaaaccctttgggaagggctcacagctcccagggtcgcctcaggctcacggaaccacaggcccagtttccagatgaccaacataagctgcccttccttgggctttttctgggttcgctgccattggccacataaaggaagggccagtggttcatttgaggacactgagcagggtgagcttctgagcgtctgcgctcatggatcctgcagcccaggctatttggcacgctgtggctggagcttaaattgtggctgactgagccccgttctcagcttagttaaaacttcacgcagctgccagctcaacaggctgcttatgtgattattacagtgaattagacagggcaaggggaggaccacatgctagagatgctcagcttggaccttcccaggatggatgtg

SEQ ID NO: 14432 - DNA, 1198 bp, Artificial sequence
  DNA replication origin
ccacatccactcaccgacacccactcaggaagctctctgacccttctctccatcctgggaaggtccaagctgagcgtgttcagcatgtagtcctcccctccactggcctgtggggggttgacaagggtgggttggaagtgattgattctgcctttcccctctgcagggcaggatgacaatgtataaagctctctgtccccagcgtgccagcaatggacacacagatgaatgaatgggagggacaggcagatgggcagacagatggacagatggaaggatggacgaatggatgaacaaatggatagacagatggacagacagatggacagatggaaggatggacgaatggatgaacaaacggatagacagatggacagatggatgggtaggtggatggatgggtggatgggtgggagggtggatggatgagtggatggatggatgggtgggtgggtgggtggatggatggatgggtggatgggtgggtcggtggatggatgggtggatggatgggtgggtggatggatagatgagtggatggatggatgaatggatggatgggtggacaggtgggtgggtggatggatgagtgggtgggtgggtggatggatgggtgggtggatggatggatggatggatggatggatggatgggtgggtgggtgggtgggtggatggatggatgggtgggtgggtggatggatgggtggatggatgtgtggatgggtggatggatggatgggtgcgtgggtgggtggatggatgggtggatgggtgggtcagcggatagatgggtgggtggatggatagatgaatggatggatggatggatggatggatggatgggtggacaagtgggtgggtggatgaaagggtggatggatggacagatggatgaacagacagatggacaggcagatggatggattaactgatgggcagacagagggacagatggatggatgggtggatggatggatggatggatggatggatggatggatggacaggtgaatgaacaaataaccaaacattgtatttacacaccgcccttaggccaggtctgtttgtgtgtaaccaggccaaacaggaatatgattttctgggggagtcccatgaggggttcatgacaacatgagcatgttgagtcagcctcctctacccagtacaagctcccccagctacccagcaggtccacc

SEQ ID NO: 14433 - DNA, 1284 bp, Artificial sequence
  DNA replication origin
agattttattgctctctattagcccagaagaacgcaaattaccatttgtcaaatgttatttgagtaaaaactatagaaatgtttttggcatgggagtgtagggggaaaaaagtgaccttgaacttttggtagagcctgattttatcatttaaaattgtgtgcttgcgaagcttttgatatgtcatttagaaggttgtgagactggatgttaactgttcaacaagaaaaactccccactctgccttaaactaattattttattccaccgatgggaccgtgtaagcactcaggcccctcacccttcaactcgattttagccttgattaacctgaacataattaaaataagactaacgccactaggtggccatgggggtgtgggggtgcatgtgtgggtgggtgacttcgtgtgtgtgtatgtctatgtatgcgtgtgtgagtgtgcacgtgtgggtgggtgactgcatgtgtgcatgcgagtgtgcatgtgaacgtgcatgtgtgtgtatatgtgggtggatgaccgtgtgtgcatgcatgagtgtatgcgtgtgcaggcatgtgtgagtatgtgtgggtgggtgactgcatgtgtgtgtgcatgcgtgtgtatgcatgtcagtgtgcacatgtgggtgggtgactgagtgtgcatgtgaatgtgcatgtgtgtgtatatatgggtggatgaccgtgtgtgtgtgcatgcatgcatgagtgtgcgtgtgtgcaggcatgtgtgtgtgcatgtgtgggtgggggactgcatgtgtgcatgggtgtgtgcacatgtgggtgggtgactgcaggtgcgggtgcgtgtgagtgcatgtgattgtgtgcatgtgcgcacatgtggatggatgactgcatgtgggtgtgcatgcatgagcatgcatgtgtgcatgcatgtgtgtgcatgtgtgagtgtgcatgtatgtgtgtgtgcaggcatgtgtgagggtacatgtgtgggtgggtgacttcgtgtctgtgcatgtgtgtgcctatgtgggtggatgactgcgtgtgtgtgtgtgtgcatgtgagtgtgcatgtgtgtgcatgcgtgtgtgcgtgcctcgggtgggagtggagtgggtcactcgcgcacagtcctgttttcttttatagacgcgccctcctgtggccgctgaaaatattgccctgtaaaatgccatctctgccctgcatcctgtgtttctgtcgctgtttttctgcgtgaagcatttggagtctcacatgaataaataaacgttcccacaaagctacacagacatatgca

SEQ ID NO: 14434 - DNA, 1398 bp, Artificial sequence
  DNA replication origin
aacagggcggcccttgtggggcctgggttggactcaacccttctttttggagacaaaattcaaccccaaacactagaccggtgggattcctacaacaaccccatccgggaaaggccatgccctgcccagggccgagagccagctcagactggcctccagcaagggctggacacatggctctcacatcacctctagtccaaaacacgtgctcctttccctccagccattccctggaatcaccccccaccgccccccacagctgtgactcagctgtgaagccagcatggctcaggaggggaggggaaagatgaggaggggaggggaaagatgaggaggggaggggaaagatgaggaggggaggggaggaaaggagaggggagaggaggggaaggatggggaggggagaagagaggagaggaggggaggaaagagaggggagaggaggggaaggatggggaggggagaagagaggagaggaggggaggggaaggtggggccagactgtgtggtgggcaaaggaggactcgggacacaatgagagaaagggctccatggccaccttcctagacagaggctttctcaggaaactgtaaagttaaataagactcagtcaggctggacaactgggtgggggtaacgtgctaggggctgcctggggccagagttgcttcctgatcctgtcccaggaagagcctgtggtcctggacatgcatgcatgtgcacacagcatatgcatgtctgtgtgtgggtgtgcacagtgagctgtggggccgtgaccatgaggcactggcttggttcacgtgcacactccggacaccgtcccctcttctgtgctagtgcagcccctcaggcagaagccaccaccccatcgtcgtccagaacatttttggaacttcatgttttaggcaacgtcttagaaaacccagcctcattgttgattagattaaagattttctgggggaggaggcagcagactctcactgtgttgcccagactggagtgcagtggcatgatctcagctcactgcagcctccacctcccgggctcaggcaattttttcacctcagcctcccaagcagctgggattacaggcatgcaccaccacccccggctaatttttgtattttttgtagcgacaagattttgccatgttgcccaagctagacttgaactcctgaactcaagtgatccacccacctcggtctcccaaaggttggaattacaggcatgagccacttcacccagtcaggttaaagctatttaagttaactctcttgtgccatcaaacatgtgagtgttacttgctcgactcttcaaaattagatccttttctggacacacattccttttgccttctgtagaaattccttccatgctgaaaaagatgtgttttcaacc

SEQ ID NO: 14435 - DNA, 1116 bp, Artificial sequence
  DNA replication origin
acgtagcgtctgtggtgggctgttccacgcgggcgcctgacgtagcgtctgtggtgggctgttcggggcgggcgcctgatgtagcgtctgtggtgggctcttccgggcggcgcctggcgtagcgtctggggtgggctgttccacgcgggcgcctgacgtagcgtctgtggtgggctcttctgggcggcgcctggcatagcgtctggggtgggctcttccgggcggcgcctggcgtagcgtctggggtgggctgttccacgcgggcgtctgacgtagcatctgtggtgggctattccacgcgggcgcctggcttacagtctgtggtgggctgttcggggcggcgcctggcgtagcgtctgtggtgggctcttccgggcggcgcctggcatagcgtctgtggtgggctcttccggtcggcgcctgacgtagcgtctgtggtgggctcttccgggcggcgcctggcgtagcgtctgtggtgggctcttccggtcggcgcctgacgtagcgtctgtggtgggctctttcgggcggcgcctggcgtagcgtctgtggtgggctcttctggtcggcgcctgacgtagcgtctgtcgtgggctgttcggggcgggtgcctgatgtagcgtctgtggtggactttccgggtggtgactgatgtagtcgcagggtcctcaaagccgacggaaggaggcacagggagggggagtcccagacgccggtgagagattcggccaccgctgctggctcgggaggcaggaggagccccaagctggggaaagggcagctttgagaagttgaaaagggctggaaacagattctccccgaagcttctggaaggacccagccccgagacactgtgacttcagcctggggagccctgggccagacctccgacccctagagctgtagagcagggtggtccccaacatttttggcatcaacgaccagtttggtggaaaatttttccacggatggagttggcagagggatggttccgggatgaaacggctccacctcagatcatcaggcattggattttcataaggaggtggaacctgggtcccttgcattcgcaattcacaatggggttctctcccctgtgagactccagtgctgcag

SEQ ID NO: 14436 - DNA, 979 bp, Artificial sequence
  DNA replication origin
gtgtgactaagggcttctttccgggctcagccccccgacttccctccaacacctttccccttagaccctcgcagacgctcccctggcctgcccttgccctgtgctgtctgtcttggtcggcatcctagtgaccacattatttcatgacttttaattgaacagtgtaagttaaaactgaagaaggatctcacccacttaaccctgtcttaaactatctgcagcagcctatttaaatgaccacagagaagtcaacactgtctgcactcagctgttcttacttgcctcccacttttcagcaagctgtgtcctgcgcaccctgacagcacatgggagggtacgggggtctgggcagcccaggtcactctacagtgggttccgtcaggagagttatgatgtgcagaggccaccgaggtgagggacaaacgcacgggcagcggctctgcgagccacggagggccagggtccgggcagcgatggggctgcaggggctccgaggagggcagaggctgcagggaggcagcactctgggctgtccagggtgggaagtgatgtcgccacggggtcctcaacccgaaagaaggaggcacacggagggagagtcctagttggagtgaggctgcggttcctcgggaacacatgtgcctgtgatcctgggaatcaagcgtccaccagacagagacagcgagtcagccctgccgggtcacaggtccagcaagaaggccttgggcccttgaagacagcggaggggggtccggcgtgcagctggcaccttcccgcagacatgctgagccccacagcccatgtgcggatggcgtgttacacagtctagccccgggtcggggtgggggggcggtggttgagactggggtcttgggactggacacacctgagcgtgtgtgagcttcctgagcctgctgaaatgaacgcccacaagctcgggggctgaagacagcaggagtctgtccccaacagcaggggt

SEQ ID NO: 14437 - DNA, 1527 bp, Artificial sequence
  DNA replication origin
gtgctcatctgcattacagatcaggcctctcagagaaaatcggacatccataattcattacatgtttcctgcaggggctggagacagccctgatcctagcaacagtcatggcaacggtaggaagccaatcccaggccatcccctcccgctcagccagtggggagggaagggagggacagggatagggtggctctggttctacacatgtgcaccaggcttcccatgaactgtgacatggatggggtggggaagaggatgggaggatggggtgagtggggacggatggggatgtggtgggggtgaggatggggtgagtgtggacagatgggggtgaggatggggtgagtgtggacagatgggggtgaggatggggtggggatggatgggggtgaggatggggtgagtgtggacagatgggggtgaggatggggtgagtgtggacagatgggggtgaggatggggtggggacggatgggggtgaggatggggtggggacggatggggatgaagatggggtgaggtggggacagatggggtgaggatggggtggggacggatggggtgaggatggggtggggacacatgaggtgaggtggggatagatgggatgaggatgcggtgaatggggatggatggagatgaggatggggggaggatggatggggatgaagatggggtgaggtggggacagatggggtgaggatggggtgggggcggatggggacgggaatggggattgtgagggggatgggatgagggtgaggggtgaggatggggatgggggcgaggtgggaaaaaaagaacatgggctcaggcttgaagaggtgaattcgaactgtggtaaaatattagccaaagtgagaggccagtcccagtatttatcacgagcagcgggcggtcactggcctggcatgcgcaaatgaactaagtgccaggttactacattcaaattatcatctctcaccagcaagtactttttttaacaaaagtagcataacttggaacaatgtccgcctgccgcacatcagagcaaggtctgtatcggcactcaagggaccgttgtgtgaaaaaaagcagctgattttaacccccacggctcgtcttccacaccacaacctggctgtgggcgtctgctggggggtgttctcaacatgcctcagctatctgatgccctcaccacatcgagaatctgcctcattctcaccatctcatcctgaccaggtttgcgagcagcgtgaggacaatgtgctctcactccacgctgctgccacagaggacaccctgtcagagccacgtaaaccccactagaagtcacaatgctcagctgagaggccccaagtcttgcttttgaaaccctgcgttcatttggtctctgatgaagcctgctcagtaactgtctcatctctaacttcctcttgacagctggagctgaacctgcaccacacggtctatgccagttctacagaaagcaaaaagggtcttgtttcagacaccaccaccatgagtgaggtgtgcacccaccaccac

SEQ ID NO: 14438 - DNA, 2002 bp, Artificial sequence
  DNA replication origin
ggccagcgccggacacacccaacacaggccaacaccggacacacggacacacccaacccaggccagcgccggacacacggacacacccaacccaggccagcgccggacacacggacacacccaacccaggccagcgccggacacacggacacacccaacccaggccagcgccggacacacggacacacccaacccaggccagcgccggacacatggacacacccaacccaggccagcgccggacacacggacacacccaacccaggccagcgccggacacacggacacacccaacgcaggccagtgccggacacacggacacacccaatccaggccagcgctggacacacggacacacccaacccaggccagcgccaggggcaggtgtgtccggggagtggcgccagcaccaggtgtgggtctgtgcagggagcagacccagtgccgggcacagatctgtccagggagtggagccagggccagtgtccccaggagagctgcgcgtgcatccacgggcacagacggcactcagccaggtcttgctgagggcgtgtgcctgcagcagagtcgccttgggaatcagagtgtgcaagtgactggcagatgacagtgtgaagagagtgacctgggccgagagaagccggcgtgggggacctgggctgggcgctgggggccactgtggtggccggcaggtgggcctggagagggaagcagaggcggccagcactagaggggcctgggcgcccactcaggagtcccgggttcaccctggagtcaacacacaggggccttccagagttgaccccaccccgggtgactgctgggctatgaactgcactggcacacaaggtggaattaggcgccgccggccccttgcccaggaaacatttcgactttgcgcttcccctttgcctggacacagcttcaacctgagcccctcccatccgcagaccctacaccctggaaggagctgacagctcggggggacactgcggactggccagcagccccttgcccttcccccaggacagcaagtcctttccagacaagcagagaccagcgccgacacccggcctcattcttgcaccctggggaccgggagaagtgtagacacaaaccctccgatgccggcatgtccttggtcgggggtggaggggggacaggcaggcgggggccgggtctgcaccccctactcagcacgttagctccgtgccttgtggctccatcagcagcagcgagaacctctcaggtcggtgacccttcgtggggaccccaaaagctgccatgcttggtgcagggcgtcaggggatggtaggaacctggacagcatcagagatttcacctcagagggtctctccctgtgaactgccaaccaggctgaggtgtgtgagtggccaggccgagggtcctgcccctgctgcatttgcccctctccttcgatcagaaatgccaacaggcggtgaagctcctgaaaggtggcagctgatgctgcagcgtctgcggtgacgtttctgggacatcggcagcccctcctttgttaaaaaaaaaaaaaaaccactaccctagaaagcccccaggcttcgctgaggtcacaggaaagacacagtcactcttcctggaatccaagcaccaaagcccgtgttcttatggagctgcgccaagctgccagctcagtggcggcccctgggtcatttctctccctgcccaccggggttacctctgcagagcctgaactcggggtgagtgaggccggactgcaggaggaccccaaatcaaggcccaggggtccctgcactgagtggtttgactcaggcatcgtccccatcgtccaagtccccaggtcaccccatccagccaccccccaaccggtgtccgaaaagcctctcacccatggcagcccctccccactccagcaccaaaaccctcacgggcgtctcctgagggccaccagcagggctgccagatccagtccagaagcccagctgacggtgcacttccagcc

SEQ ID NO: 14439 - DNA, 1107 bp, Artificial sequence
  DNA replication origin
gtgcagttcatagcccagcagtcacccggggtggggtcaactctggaaggcccctgtgtgttgactccagggtgaacccgggactcctgagtgggcgcccaggcccctctagtgctggccgcctctgcttccctctccaggcccacctgccggccaccacagtggcccccagcgcccagcccaggtcccccacgccggcttctctcggcccaggtcactctcttcacactgtcatctgccagtcacttgcacactctgattcccaaggcgactctgctgcaggcacacgccctcagcaagacctggctgagtgccgtctgtgcccgtggatgcacgcgcagctctcctggggacactggccctggctccactccctggacagatctgtgcccggcactgggtctgctccctgcacagacccacacctggtgctggcgccactccccggacacacctgcccctggcgctggcctgggttgggtgtgtccgtgtgtccagcgctggcctggattgggtgtgtccgtgtgtccggcactggcctgcgttgggtgtgtccgtgtgtccggcgctggcctgggttgggtgtgtccgtgtgtccggcgctggcctgggttgggtgtgtccatgtgtccggcgctggcctgggttgggtgtgtccgtgtgtccggcgctggcctgggttgggtgtgtccgtgtgtccggcgctggcctgggttgggtgtgtccgtgtgtccggcgctggcctgggttgggtgtgtccgtgtgtccggcgctggcctgggttgggtgtgtccgtgtgtccggtgttggcctgtgttgggtgtgtccggcgctggcctgcattgggtgtgtctgtgtgtccggcgctggcctgggttgggtgtgtccgtgtgcccggtgctggcctgcgttgggtgtgtctgtgtgtctggcgctccagcggggagtctgtggggggcatgttgctgaggtgctgggagctgggcctgacacttctgtgttttattgaatctcccaacatccaacatcccatttccatttaacagatgaggaaatgaaaacacagagaggagaaggcactcgcctgaggtaccctgccagacgctg

SEQ ID NO: 14440 - DNA, 1706 bp, Artificial sequence
  DNA replication origin
cgctggcctgggttgggtgtgtccgtgtgtccggcgctggcctgggttgggtgtgtccgtgtgtccggcgctggcctgggttgggtgtgtccgtgtgtccggcgctggcctgggttgggtgtgtccgtgtgtccggtgttggcctgtgttgggtgtgtccggcgctggcctgcattgggtgtgtctgtgtgtccggcgctggcctgggttgggtgtgtccgtgtgcccggtgctggcctgcgttgggtgtgtctgtgtgtctggcgctccagcggggagtctgtggggggcatgttgctgaggtgctgggagctgggcctgacacttctgtgttttattgaatctcccaacatccaacatcccatttccatttaacagatgaggaaatgaaaacacagagaggagaaggcactcgcctgaggtaccctgccagacgctggggacgggctcacacgcagcggcccaaagcctgctgcctctcggagcagcgggggtctgggacggatattgaggcacagggccttggacgtgcccgtggagctgctcagccagtggggagttagccagcgttttacaggcaaagctgcggagctgtgctggtgcctgtgtgtgagtatttacatgcagtttgttacttggggaaatcatgtactcttctcactgcttctggctgtgcagaacacaaactcagatctggaatcttctcactgcttctggctgtgcagaacacaaactcagatctggaagcaaagggcagatgccgtgcagagcgtcagaaagcactgcaaacctcagaccagagggaagccgggtttttaaaccatcttcctgcaagccttttcaggaggaccaaaattagaccaggtggttgaaggagggtgggtacagctgatgctccaattcagtcagcttttaacgtggctccttcaagcaactgctgccaacccgctgtgctcacccatcctggttgggaaggaacctgctgttctcaacaagccgagtgtccctgcccccagcccccgcatggctgaggctgcccgtgtgtcagtggtgcagggttgttgagggtgcagcacagagtgtggtgatgatgccgcctccatccccattgctccagggccaggacttggatccagagtgggaggagcttcagctgggagggtggctgagcagccagggagtgcatccgtccctggactggggagaccccactgctgaggggcaacaggagtgcattctattgcagacaaactgcaggtccactctgacttctgtcttttcaagcctggctctctctctaccacttctgaggtcctggccttgccttgccgcgatggctgctgtctgcacctcaaagctcatgctattgcttggccctcttctcaatttcctgttttgtttctgccttctgtggtatctcccatgctacttgctttatacattaaaaaaccctcaaaaacaacaactccaggcatttcctgccaagcaagcattttgggcagaacttttccacttccaggatgggctgggttgctgttgactgtctgagaagcagcagagagattagacatgtctttctcaagagcaaacaggcctaatacatttctctcacagccaaaattgccctgtgtttgtgctactggagttcactctttgaggctctgagtggctacaaccttctgtgtctccaccagcaaggacgtgca

SEQ ID NO: 14441 - DNA, 2121 bp, Artificial sequence
  DNA replication origin
ggggagctgggtctgcacccaggtccagcccaagcactcccgggagaaccaccgcccgctgctgcctggggaggacgcctgtccccagattgtcctgccccagctcagggagggagccaagagcatcgtgagtgagcgtcttgtccactgtgtgctctgctgggatctgggcactgagacacagtatttgatgtgggacccaggaaatgctgagcccccgagagtacagtgaggcaaagcgtggccagtgctgactctgggaggtcagtgggcaccatgagctgtccggcattcccataatcctgctgcctgtgtcaagaggggcttccagaaaagacccagtgcctagcctcagggtccctccagggccgccttattcctaacatgatgtccatgagccacccaataagcaaaactggaagaggcacctgccccattccagatccttcagctgtgagactacatgctgtgtagacagctccctacgtggagcactcatgtgtagaccactctgggtgtgtaatgtgaatgcgtgtgtaagtgtgtgtggggtgtgtggtatatagtgtgtgctgtgtgtgtggtgtgtgtcgtgtgtgtgtggtgttggtatgtgttatgatatgtgttgtttgtagtgtgtgtgtttgtggtatgtgagtggtgtgtgtggtatgtggtgtgcttgtgtgcctattgtgtgttgtgtgtcgtgttgtgtgtggtgtgtgtcgtgtggtgtatgtgttgtgtgtagtgtgtgtggtgtgtgtcctgtgtgtgtcgtgtagtgtatgtgtggtgtgactggtgtgtgtgttgtgtgtgatgatgtgtggtgtgtgtgtggtttgtgttgtgtgtcgtgtggtgtgtgttgtgtgcaatgtcatgtggtgtgttgtgtgcagtgtgcatggtgtgtgttgtgtatatgtggtgtgcctgttgtgtcgtgtgttgtgtgtgtgttgtgtgtgtcgtgtgtcctgtgtgttgggtcatgtgttgtgtgtggcgcatctgtgtgtgtgtgtggtgtgtctgttgtgtgtgtagtgtgttgtcatgtgttgtgtcacatgtgttgtgtggtgtgtcatgtgttgtgtcgtgtgtgttgtgtgttatatgtgtcgtgtggtgtgtgttgtgtgttgtgtatgatgtgtcctatggtgtctgttgtgtgtagtgtgtgatgtgtattgtgtggtgtatgtgtggtgtgcctgttgtgtatgtgtggtgtgcctgttgtattgtgtcgtgtgttgtgttgtgtgtgtgttgtgtgttgtgtcatgtatgtgatgtgtgttatgtgcgtcgtgtgtcgtgtcatgtgtggtgtgtcatctgttgtgtgctgtgtgtgtcatgtgtgttgtgtgttgtgttgtgtgtggtgtgatgtgtgtcatctggtgtgttatgtgtaggaagttatgtgtgtcttgtggtgtatgtgtggtgtgcctgttatgtgtattgtgtgttgtgtgtcgtgtgtgatgtgtcgtgtgctgtgtgtgatgtgtgtcatatgtgtggtgtgtgtcgtgtggtgtgtggtgtgtgtggtgtgtgtggtgtgtgtgtggtgtcgtgtgtgtggtgtgtggtgtggtgtgtgtggtgtgtgtggtgtgtgtcgtgtggtgtgtgtgaggtgtgtggtgtgtgtggtatgtgtggtgtgtggtgtgtgtggtgtgtgtcatgtggtgtgtgtggtatgtgtggtgtgtggtgtgtgtcgtgtgtgtggtgtgtgtgtggtgtgtgtggtgtgtgtggtgtgtagtctgtgtggtgtgtgtgtggtgtgtgtcatgtgtgtggtgtgtgtggtgtgtgtgtggtgtgtgtggtgtgtgtggtgtgtgtcgtgtggtgtgtgtgtggtgtgtgtgtgtggtgtgtgtgtcatgtggtgtgtgtggtgtgtggtgtgtgtgtgtggtgtgtgtggtgtgtgtgtcatgtggtgtgtgtgtggtgtgtgtggtgtgtgtggtgtgtgtttgtcgtgtgttgtgtgtgtgtggtgtgtgtgttgtgtgtgtgttgtgtgtgtggtgtgggtttcattcattggatggatattgagcctctctc

SEQ ID NO: 14442 - DNA, 1682 bp, Artificial sequence
  DNA replication origin
gaggcggagagaggcggagagagacggagagaggtggagagagacggagagaggtggagagagatggagagctacggaaatgaacagtttcaatggcacgggaggccttgggagaagtgggctgcgggcctggagctgatgtgtgagcgtggactgcgctacgcgtgacagaatccgtgtctgtcactccggtgctgtgctgggttgggaagataggagcatgtctgggcaacgccctgcttctgggacggaggacaacaccgggtacgtctgaggaggaggctgaggtcaggctttaggacaaggggctggtgcagaagaaaatggggaagaaactaaaatgcagatgtgagacggcaggttggggagagtgacgcacgggcagcacgtggacatgcgaggggcctcccgtccagtgaggagggggcggggcctcccgtccagtgaggagggcatggggcttcttgggtgtgggacacactcatcactggctctacttctggaactgacagatgtaaaagaggaaacaccattgtgggcaggaaagtgttaaggtccttggtgaaatgggaaactcttgagacgtgtggagggaaggaagggaagaacccatcatctaccacagaggcatggacgggagagaggggtgatttcagccttgtctggcatcccttgtgtctgctgagggtgtgtgcacacgggaatgtgtgcgggtgtgtgtgcgtgcatgcagctgtgtgtggatgtgcatcgtgtgtgggtgtgtaggtgtgtgtgggtgtgtgcagcagtgcaggtgtgcatgggtgtgtacaggtgggtgtgtggatgtgtgtgggggtgtgcacagctgtgcaggtgtgtgggtgtgcagggtccatgactgtgtgtgggtgtgcactgtgtgtacacctgtggaggtgtgtgggtgtgtgcagtgtgcatgggtgtgtgtgtgggtgtgcaccccgtgggtgggtgtgtaggtgtgtgtggggtgtatgcatgggtgtgtgcaggtgtgtgggtgtgtgcagtgtgtggctgagtggtgtttgtgggtgtctgtgggtgtgtgtgcaatgtgtgggtgtgcgcagtgtccgtggctgtgtgtaggtgtgcactgtgtgcaggtgtgtgcgtgtgagcagtgtgcacggctgtatgtgggtgtgtaccacatgcgtgggtgtgtaggtgtgtgtggggggtgtgcctgggtgtgtgcatggggatgcgcagtgtgtggctgagtgtgggtgtgcactgcgtgagtgggtgtgtaggtgtgtgtggatgtatgcatgggtgtgtgcaggtgtgtgggtgtgcagtgtccctggctgcgtgtgggtgtgcgcagtgtgcaggtgtgtgggtgtacacagtgtgtgtggctgagtgtgccgcctctctggcggctcgtgtggtgtcaaagcccgcactgccgttcagcccctgggtgcctggacttctcttctaagatgatggagtttgtggtcggggactgagttgccaaatgctcaggtgggcgctggtgaaacattttctattcgacccaaattccagggaggaaacagctctcctgaggggcatcttttttaccacaacgatgatgttttgctgtcagggcctgcggtcatcctggtcatggtctccgggtgctcaccctcgacggc

SEQ ID NO: 14443 - DNA, 1543 bp, Artificial sequence
  DNA replication origin
gccaatagacatcttacgtttttaattacacaagactggttgtaatacattttgtgtattagaacccggtttccaaacccagcagcgtatggccaaagacaaatagcgtgctctaaacgtgggtgtgaggccccagcacatggagcctccctcatcctgcacctcggcccatcccctccccacgtggtccaggtcagcatctcgctgaggtcagcagttggggtgtgtgaggagttacgagacccagtgttagatggagcctgtacatttccccgtttctgagctattattcacacggccagccgctttgcacgatgacttcccttctaaatgagagggcaggtttccctgtacatagaaatatgtaaaaatacatagaattatttttatcgggaagctatttagttatgttattgttttttacacgtggtaattaaacagcaaacgtcttgccatttcttctggatgatttctaaagagccaatcaagcagaatgtggtgcgtggtggccgtggggtacacggtggctgtggggtgtgtggtcagtgaccacagggtgtgcagtggccatagagtgcatggttcctgtagggtatgtggtggctgtggagtgtgtggtggtcatggggtgtgtgccagctgtgggttgggtgctggctgtggggtgtgtggtggccgtgggttgtgtggtggctgtggggtgcgtggtggctgtgggttgtgtggtggctgtggggtgcgtggtgcccatggggtgcatgctggctgtggggtgtgtggtggctgtggggtgcgtggtgcccatggggtgcgtgctggctgtggggtgtgtggtggctgtgggatgcgtgctggctgtggggtgcgtggtggctgtggggtgcgtgctggctgtggggtgcatggtggctgtgggttgtgtggtggctgtgggttgtgtggtggctgtggggtgtgtggtggctgtggggtgtgtggtggctgtggggtgtgtggtgcccgtggggtgtgtgatggctgtggggtgtgtggggtgcgtggtggctgtgggatgcgtggtggctgtgggttgtgtggtggctgtggggtgtgtgatggctgtggggtgcgtggggtgtgtggtggctgtggggtgtgtggggtgtgtgatagtggggtgtgtggggtgcatgctggctgtgggctgcacagtgtctgtggggtacatggtggccagcggccttcctttgggtgagccccagctggggtctgtgtttagcttgagcctctataccaacttgagatgcttgaaagatgctgtgaattgcagcttatttatccttctgcctacagttgtggtatttttcacatttaaattgcagcacagttctgggttcaatgtgtccagaagccacagctcctaccaaaggtacagtcacgggtgcaacagacaatatgggcatttctgagttgttttggctcaagcacgaatgtttgtgcagtgacactgagactaacctggcgctctccatgcagggacttgactttcataagacaagcttgt

SEQ ID NO: 14444 - DNA, 1033 bp, Artificial sequence
  DNA replication origin
acatgtgatgtaggatgtgagtgttgtgtggtgtgtgcatgcctgtgtgtgtgtgtgcatatgtatgacctatgtaagtggggtgtgtgtgttgtgtggtgtgtgcatgcctgtgtatatatgtgtgcatgcatgtgagtatatatgagtgtgggtgtgcatgttgtgtgagcatgtgcatgcctgtgtgtatatctgtgtgtgtgtgtgtatgtatgatacatgagtgtggggtgtgcatcttgtgtggatgtgtgcatgcctgtatatatgtgtgtgcatgcatgtgcatatgtatgacattgtgtgtgcatgtgtgtgcatatgacatgagcgtagggtgtgcatgtcatgtgggcatgtgcattcctgtgtatatgtgtgtgcatgcatatgtatgacatgtgagcatggatatgtatgttgtgtgagtgtgtgcatggctgtgtgtatatttgtgtgtgcatatgtatgacatgagtgtgggatgtgcatgttgtgggcgtgtgcatgtgtgtgtgcatgtgcatatgtatgagtgtggggtgtgagtgtagtgtgggcatgtgcacacatgtgtatatgtgtgtgggcatgtgtgtatgtgacatgtgagtgtggggtgtgcatgtttgtgtgaatgtgtgtgtgtgcatgtgcatatgtatgatgtgtggggtgtgtgtgtttggatgtgtgcatgaatgtgtatgtgtgtgcatgtacatatgtatgacgtgagggtggatgcgagtgttgtgtggtgtgtgcatgcctgtgtgtgtatgtgtgtgcatctgtgtatgtatgacatgagtgtgggtgtgagtgttgtgtgatgtgtgcatgcctgtgtgtgtgtgcatgtgcgtatgtatgatgtgagtgtgggtgagtgttgtgtggtgtgtgcatgcctgtgtgtgtgcacatgtgcatatgtatgacgtgagtgtgagtgtgggtgtgtgtgttgtttgggtgtgtgcatgcctctgtgtgtgtgcatgtgcatatgtatgatgtgagtgtg

SEQ ID NO: 14445 - DNA, 1368 bp, Artificial sequence
  DNA replication origin
cctgggagggctgaggctactggccatgagctcttgtcttagaaaagctgtgaccaggttgagggacgctggggtttcctggaaccacctgatacctgctgtccgagatgtgtctcaaaattatcttgcatttcaccttgctttaaaatttgtctctacttatttcatacagagatgcatcatttcaatttcaagaatatatgctccttgattatcactctaaaatagcccataagatgtaaacactgatcaaatgaattgcctccaacaattgcaactatccataataaacagtaagaaaaatggttcacgccttctattcactagccacaggaatctgggcacgctatgagcctctgagtctcacggaccacagagactacaggtcagcatgtgagagcttcatgtaggacccagcacctgctgaacggaggttggatgtgggcatcatcgtggtcgttgagtgtggacaccgagagccttcacacaggatggagggtggatgtggcacctgctgaacggaggttggatgtgggcatcatcgtggtcgttgagtgtggacgccgagaggcttcacacaggacggagggtggatgtggcacctgctgaaccaagggtggatgtgggcatcatcgtggtcgttgagcatggacgccaagagccttcacacaggacagagggtggatgtggcacctgctgaaccgagggtggatgtgggcatcatcgtggtcgttgagcatggatgccgagaggcttcacacatgacggagggtggacgtggcacctactgaaccgagggtggatgtgggcatcattgtggtcgttgagcgtggatgccgagagccttcacacaggacggagggtggatgtggcacctgctgaatggagggtggatgtgggcatcatcgtggtcgttgagtgtggatgccaagaggcttcacgcaggacggagggtggatgtggcacctgctgaatggagggtggatgtgggcatcatcgtggtcattgagtgtggatgccgagaggcttcacgcaggacggagggtggatgtggcacctgctgaatggagggtggatgtgggcatcatcgtggtcgttgagtgtggatgccgagaggcttcacgcaggatggagggtggatgtggcacctgctgaactgagagtggatgtgggcatcatcgtggtcgttgagcatggacaccgagagccttcacacaggacggagggtggatgtggcacctactgaaccgagggtggatgtgggcatcatcatggttgttgcgcgtggacaccgagagccttcacacaggatggtgggtggatgtggcacctgctgaacagagggtggatgtgggcatcatcgtggtc

SEQ ID NO: 14446 - DNA, 1324 bp, Artificial sequence
  DNA replication origin
ctcaatcgacagaacgtgtcacctcaggcccaggagagcagggtccggggcgcgtcctcagaagccggcagggcgggctcctcgctgagccgcagggcgagcccggcttgggcctcttcccgcgggaggaggccgccgcgttccttccccggttctccagccgaccccgccgcctccgtctcccacacgcagggaccctctcccgacaccggcctgcctggaacgtgccagaatcgtctccctaacccggcggccgtggatgagcaaacctgcacccgcggcagcctgaactgccgtttgtcgcgtagtcctcgagtctcggagcgcaggggtcccgagggcaccccgggccgccgtcctgcggcccccccacagtgtgccgggactcggggtctctcaccacgagcagacctcggcgctgctatccggactcctcgagccccttacaggccacatggccaggggcgaccctcccgtcacaactgtgactctgtgagctcacagggctggcctccacattcttgctggtggaagaccacaagcaacgggatgccttggaaagcatcgttctgcagcaggactgctcaaccggccaatcagaacacagggaaccatgaaagaggtgggaggaggaaaaaggaggacggagaggagggggaagacaggggaggaagggggaggacaggggagggccagggtggagctcagggccaaggcagggtttgaagtctgtggcccgtggcaaggtcgcagagcaggctggtcatgttcctacagcatcgtggagacctgtacactccgggttcttgggaaacgggggttctggaagggggcaggtgagcttctcgtgggcttgcagagttccctacagacttccacatggagagtctgtgattgtttggaatgggaaagtggtcactaaaagaacagctttattaggtaccattcatatcaggaaaaaaagtcagggacagctgtttcaaaattaaaaagacgaaagagacacaaaacccaaaatgcaatgatgaatcttgactgcatcctggtggaaaaaacaaaacagacaacagataacagaccgtgttgtagagaaagcggcgggagtccctgggagtgtgtgatagcaatggcgctgtgggctgagctgtgccctgatgcccctgtgtgacgaccccaacccccaggactgcggagtgtggccatgtttggagacagggcctctagagaggccagtaagtgaaggtgaggtcctgagggggggcctagtgcagtgggtctgctgtccttaaacaaaggggacccttagttacagacagcacctgca

SEQ ID NO: 14447 - DNA, 2074 bp, Artificial sequence
  DNA replication origin
ccggaccacccgccagaaatcaaacccgaggtgttcacacccgggagcagacagctcgtggagttcactcggcagacctgtcatcgactttggcagaacctcctcccttgatggactgtggttttgttactttagatctgacttttctgaggctgttttgacatttgtcccttttagaaaaggagcagagaccaggagttcatatttgtgatgagatttggtattagggccaaacccatcagccaaagacattcatctgacaggtcagccaagaggagagccgcttagcgagctctcattgtgttctgatatttccacatttcaaggtgcttgagtaacaatttgatgatatctcaagctctattggtacctggaaatactgtatttctcagagaattgtgtttggcattcacatatgtaatggcagctctgacagcaagcaccacttctgctggaatgcctaaaccgcaaggacagactcagcctccacctggcggaaaccctgcaaagcctgactccagacaccctgttggggggtcatcgagggccacacaccgtgacggggtcctgtttcggaacgcgtctcaccaccgcccacaactgcagggccgaaacgagaaacacactcaggccaagtatgagtccggctgacttagactctgtgcgtacagattgtaaactcagggaaactggatcttcctcatcaaccaatgctgttttgaaaatgaatgttactgagatatttccctgactccacgatgccagcaggtgctggtgggagtcagggtgggtgtggggagcggcgggcacagtgtggagttggggagggtgtggggagcggcgggcatggtgtggaattggggtgggtgtggggagtggtgggcatcgtgcggagtcggggtgggagtgggaagcggcaggcgtcgtgtggagttggggtgggtgtggggagaggtgggcatcgtgcggagtcggggtgggtgtggggagtggcgggcagtgtggagttggggtgggtgtggggagcggcgggcatggtgtggagtcggggtgggtgtggggagcggcgggcatcgtgtggagttggggtgggtgtggggagaggcgggcgtcgtgtggagtcggggtgggtgtggggagcggcgggcatggtgtggagtcggggtgggtgtggggagcagcgggcatcgtgtgcagttggggtgggtgtggggagagacgggcgtcatgtggagttggggtgggtgtggggatcagcgggcatcgtgtggagtcggggtgggtgtggggagtggcgggcgtcgtgtgcagttggggtgggtgtggggagcagcgggcatcgtgtggagtccagcaaccaagtgggccagacgtgggccttggaccctggcgtctcctctcactcagcagttctgattttccttcctctgagctcactttacaagtgcattcccgtgccctctcagccatgcggggtctcctggtgggcatgtccctggtacaggagcagagaggcacagactcacgccacaggtgagctccaggtagacctcttcccaggactcacacaggtagccttttaggctcggaagctacagccaatctcggggcactgaccgccaccctccctggcacacacaggctgtagaaagcacatgcaggttggtgccgcaggaacgcatcagagtcgccgaccttccgactcatcacagctacaaggcagccaattccgtggtgatccagcagcccagccctctgtgcgcaaagcctcgtttccgccagacacccaaccggccacctcagtgcccctcacctgaggatggcaggatggtcagataagccacagagattcccagcgacatgttcctgacatgcagccactcctggggcacgttggacaaaacgtggcatctgaaccccacgatccgatgaaataaacagcagaggttggtgatgtctggaggccaagctagatgtgaggagccccagcaggtgggagaggccggctgcaccgtctggggggcaggctcagcaccaagagcggagactttctgtgacaaaggacacatgtggc

SEQ ID NO: 14448 - DNA, 2109 bp, Artificial sequence
  DNA replication origin
gcggcagcagcggggtcccggcgtgttctgagcacctgaggctgcgtggccgtgtcctgcctgcaggcgggtcccatacggccgggcaggtgctcgggatgcccaccgcgtgtgtggttgagctttgcctggggaaggagggtcgaagaccctgcagtgatccctcagaagctgtcttggggtgtaatgttgagagtttcctttaaatacgggaacttctgctttggtgtctactcagcagcacaggcctttctccctcccctgtgccttctgtctcccgcacggctccatttgccttctcttgcatgggctcttggacattgctttggaaagagaaagaaacgtcagaatgaggttcttcttttttctgcagactctttgattgtggtaccagtttctgtatctcagtccacagtgcaaaccgcccccggcctcccctgtggcttatattctgatagaatgagaagccacccaacgaaggctactgtggcgttatcccagaatattccacgttgatgacagaggaggatccagtggatgctttcttgaatctataggagtgagtgtttgtggcgtgtgcagtgtgtgtgtgtctgtgatgtgtgtatgtgtgtgtggtgtgtgtgtctgtgacgtgtgtgtggtgtgtgtgtgtctgttacatatgtgtgtggtgtgtgtgtgtggtgtgtctgcgatgtgtgtggtgtgtgtgtgtctgtgatgtgtgtggtgtgtgtgtgtggtgtgtgtgtatatgtgtgatgtgtgtggtgtgtgtggtgtatgtgtgtgtatatgtgtgatgtgtgtggtgtgtgtggcgtttgtgtgtgtatatgtgtgatgtgtgtggtgtgtgtggtgtatgtgtgtgtatatgtgtgatgtgtgtggtgtgtgtgtggggtgtatgtgtgtgtatatgtgtgatgtgtgtggtgtgtgtgtggggtgtatgtgtgtgtatatgtgtgatgtgtgtggtgtgtgtgtgtatatgtgtgatgtgtgtggtgtgtgtgtggtgtatgtgtgtgtatatgtgtgatgtgtgtggtgtgtgtgtggtgtgtgtgtatatgtgtgatgtgtgtggtttgtgtggtgtatgtgtgtgtatatgtgatgtgtgtggtgtgtgtggtgtatgtgtgtgtatatgtgtgatgtgtgtggtgtgtgtgtgtggcgtatgtgtgtgtatatgtgtgatgtgtgtggtgtgtgtgtggcgtttgtgtgtgtatatgtgtgatgtgtgtggtgtgtgtggtgtatgtgtgtgtatatgtgtgatgtgtgtggtgtgtgtgtgtatatgtgtgatgtgtgtggtgtgtgtgtggtgtatgtgtgtgtatatgtgtgatgtgtgtggtgtgtgtgtgtggcgtatgtgtgtgtatatgtgtgatgtgtgtggtgtgtgtgtggcatatgtgtgtgtatatgtgatgtgtgtggtgtgtgtgtgtggcgtatgtgtgtgtatatgtgtgatgtgtgtggtgtgtgtgtgtggcgtatgtgtgtgtatatgtgtgacgtgtgtggtgtgtgtggtgtatgtgtgtgtatatgtgtgatgtgtgtggtgtgtgtgtggcgtatgtgtgtgtatatgtgtgatgtgtgtggtgtgtgtggtgtatgtgtgtgtatatgtgtgatgtgtgtggtgtgtgtgtgtggcgtgtgtgtgtgtatatgtgtgatgtgtgtggtgtgtgtggtgtatgtgtgtatatatgtgtgatgtgtgtgtgtgtgtggtgtgtgtgtgtatatgtgtgtgtgtatgtgtgtttgtattctcagattctgagagcaaggcctctcttttcctgcacaagcctgaagtcttctcgggtcaccgtgctgggcgcgtgctttggggtgcgttgaccgtcatgttgcgctggcctgccctggggtaaactctcgcctgcctgaaccttggatcttagcaggagaaggggttgtgccacgtgggtgccgtggccctcgtcctgctgggtgtccccaatgccactaaccccctgctcttcctccccctgtcctgcaggagctgtgccgccagcgtatggccacgcggccaccagaccg

SEQ ID NO: 14449 - DNA, 1088 bp, Artificial sequence
  DNA replication origin
ggtgcacgcctataattccagctactcgggaggctgaggcagcagaatcgcttgaacccgggaggcggaggctgcagtgagctgagattacaccactgcactccagcctgggcgacagagcgagactctgtctcataataatagtaataataaattctgtaacttcttcagaaatatctttacatttgccaagccgtcaagagtttggctctggcttagagaacggccctaacttctattcactaatacgtctctcttactcatgaatgcttgaggctttctctgtagctgcctccatgctaagcactgaatatacaggaaaccatctattttaatcttcacagtaactataggattatctccatttataaagtgaaaaaataggcttagagacctttagaggttttcccaagttcacatgaaaagtttgtggttgtttgctattggtgactttgggagaaaaataaatacaataaaaacggaagtttgtggtgcagcagggacctcagtcctgtggggcctcttggtggcttcaccctccatggcactcaggaaataacagagctcagacctcactgtagctctcccatgggtggcaaatcacaggatgggcatggaactagcttgattttttatttttatgtgagtaaatctccagcgtttcaaatcctcttccccagagggtcacattctcggaccctctgggttccctgagctgtagctgttctcatgctttggttggacgttatttttctggagaaattgtgtgaagagatagaagttacttcagaaacatttctcagtgtgcttttcccccacgtcaagcaaaattcatgtgcacaattgagaaataaatgagatgtatactcaggttggttactggtatcatctaccttattaaaatcatccctcattgggtggatcacctcaggtcaggagttcgagaccagcctggccaatatggtgaaaccctgtctctactaaaaatagaaaaattagccgggcgtggtggcaggcgcctgtaatcccagctaatcaggggagtgaggcaggagaatcgtttgaacccaggaggtggaggctgcagt

SEQ ID NO: 14450 - DNA, 1695 bp, Artificial sequence
  DNA replication origin
ggcccgggggaggtggcgcgtggccggcgccttaggtttcgtgaacgggctgtgcccggggaggggcggggaggggcgcgcaggagacccggtgggcggaccccggcggactctggggctgggtcgcgcggctctagagtgacttctttctggaagaggctgtgtgggccggagggaggggggcggaggggaggggaggggaggagaccggggagggggcgcggaccggatctccacgcgaagggcgacccggcggcgagacccagcggtggctgcggggtccggaccaaacggggttcgggccgctcccctggttcccgcccctcctccctctcccggctccctgctcactcccctcccccaccccgcgcctcctctccctctcccccctttccctctccctccccctttccttccctccctctccaaagcctccctccctctccgcggcggctccaccgcctcccgccgctggagaacctcgcggtcctcctccgagccgcgcatccaggcaggaaaatccgggcgtcttttctcatttaacccgcgtttccattaactcagtcccggcaccagctaatccgctgcaccgaaggcaaaaggaggctaattaatgaccagcttttccagtcaagaccggcgataattgctttggtggcctttatgattacaagataaaaacgggcccggcctgacataagaggcactgtgtacgctgggagacgggaggaaatgaagagttgggaggctgaatacggagcagaaaattactaatagaagagagataatgaataggccggccaggcattcatggggaaaaatccattttgttaccacgcgaaattaggtggtggaaaggggtttgctaattgttctcatcttgtagcagccaggaccaaggccgggcgtgctcccccattcactccccgagtcattgtgcagggcgcgcggtctgcggggcggccttcccattttcctgtggcgtccttaattgttgctaatataccttctaatgaagttaatgaggggagagccgtgcaactatttgcacgtggagacaagtgaaatgcaccgaaagggctttctcatattttcaccagccctacccccgccctccaagaagcagtgagaatctgaagggttttcctcgctgagaagtgaagttccaaaggctctgcagctcctttcaaggaaaaatacgtaggtgcataggtggcaagtgttgtggtctgcaccaggccactcctggagagtgactggagtcaggtgggattcgaccagcgctcgcctttcaagacaggtggatccaaatcccctgacctgggagggagaatgttctgtgaagatgcacagagccagtcccacgttcctttgttgctgaagatgtgctggacttggtggctacttgaagctgcagaaggctccgggcctgcccaccctcctccaccgccaagcctggcctccccccagcacccccgacaatcattgtgcaagctctggacaaactgctgtgcccggttagaagaagggatggatactttacttaaggcagcaaattagctgccaaatacgttacataaatttgaaaaacagccaccactgaaggaaaaagtgatgcctctgactgtcctcttgagcacgctgcaatctgcgatgtgctattttcaaatgatttctgcttctcctttgacgggg

SEQ ID NO: 14451 - DNA, 1023 bp, Artificial sequence
  DNA replication origin
ggccggaggaggaggcctggtctgcgggcggcaggagggacccggggccagccgaggctgttcccagggaggcagacacctgctgtcgccgggaccctcgacacgctccgcacgcgcgggagcggaaccgggcctgctttggaggcctcccttggcgcgcttggatttactcaaaggtcaaagaaaaatgtcaaggagagcgattgcctggagagctcctggctctcctcccgggtccccgctgggtcccaggagtccccggaggggaagcaaggagccccagtgccctggagtcctgtctccaccaacctcgcccggctccctgctgcctaggcccgcgctgtcccagcagaggaggggtgggagccgccccaggcccacctccccgcgccggtccacaaggaggcccctcctgcaacctgggagaggccgggggaggcccggagggcgaccgcgcggggccgcgggacctggacagccggggagtcgtgaccgcgggcagcgccggggctgagggcgaggagggtcttactgcagggaagggcgggacgctggacagagggaccgactggggtccaccggcctgacacagaagtcgctggatcccagggcccggctgggaaacccgcttcctacccgcccgcgggcgccgcagaagaaaccgaagaaagaggtcttccctccacgcccaggacggtttcaagtgtcccacccagcgctgagcaggagggtgatgcggagggaaaaactgttggctgcaagtcaggtcttaggaatcccggaagaaacgaagatttaaagaatttttttctaagtgattgagttccaataactttacaatgacttgactccctttttgtggagttaaaaaaaatcttcaaactcctgctagccatggcctttaagagaaagaaatgagtttaaaagtgagtttgaggcacagtcttgacccaggtgtggctttggtggtcctcagcgccatctcccccatgggcaccgaccccccaaggctgcaccacggcg

SEQ ID NO: 14452 - DNA, 1568 bp, Artificial sequence
  DNA replication origin
ccgggtgcgcgccgggccggatataaggcggggcgcggcggccgcgctggttggtgctacgcgcgcggccggcggccctaccgggaccgtccggagcccgccctgagcccgcccgcgccgcgccccggcccagcgtgcctagcccgggggccgggccggggcggagcacgcggagctgggccgagcggccgcgcagagctccggcgcctgcgggctccgagcccgtgccgccgcgcagccgctgctgctggagcagcgacgcgcggcacctttgtctcctccggccgccctagaagtttgtggtcagaagcggatgaccccgctagtctgtggctccagcgcagggaagcagctggctgtgatgatggcgctgccgctacccgcagctgctgcgccccgaggccgctcggcccggcgcacgcccccacctcctcccgcgcgggcgctgggcgccggcccagctgcaggtaaccaggggtgccgggcggggcgcgggcgctcgtagtgcggttgggtgggccctggaagaggcgagagaggctgggatgggggcggagggagcaggaagggcccacgagagcatcaccaggcgcgtaggtggtggggcgaggaagagagctttcgaaggctggagggcgcgcatgggggctctaacgggcaactagggcgtcggagagctcagttcagggggtctctgcctcgccgcaggactcctgtcaaaggcttgggccggcaggggagagctgcgcctgggatcatccccaagtgggtctagggtgggcctgtgaggaggagcgggcaaagggcagctccttctgagcgcacagatttggagggttggcagctgtcctggcccagcgccccgcagagaccgccccaaggagtctaggacctccgggacttctccccagcgctcttctctcggcctttcgcgttgctccccactccctgcagttccgaccattgcagggtgctgggggtgggggggtgcaggcacggagatgggaggcgtgtgggaaaggaggagggaaggggcgagcagccaggatggagaggcgccagtgtgggcgcattttcctctcagcccattttggggcgctcttcaccctcctcaccagggtccgggagcgcgcctccgagccatgggagtatcccagcgggcggcgaattgcagggaaccgagggggcctgcagggagaggcgttccagaggcaggtggggacgcctctgagaggccatctctcctcccccaaagagaactgcgctttctcagcgcctcccccaccccaggtgaggcggccgcgtgctcgccagagagaaacttgtgactggacccgaagctgttggaacgagggacttcatttccttccttcgtaactacctgtgcagttccgaacactggcctgctccgtggttttagagaagcgttgctccagggaatcgggcgaacccccaagttagagttaaaatctcagcacaattgccttttagggccggagagagtctcccgccctttttggtcctcagtgcgctgagctgggcgctgcgggctggacggctgggagagg

SEQ ID NO: 14453 - DNA, 1573 bp, Artificial sequence
  DNA replication origin
cgctcaggcctgcgggaaccatggcccgatgcgaggccacttctttgccctggagctttatgaagcgctctggccttgccctataaatacaaaaataaatgcggaactcagcctgggcctgcagtcagaggaaacggggtccttcggccacttttagacaggggcctgcagcggacggcaccgtactcatatctgtggacaacccccgcctctgagccctgccccctggggctcgcccccaggttttacagaactaggtttgtgagagaaaagcgccaggcaaggccctctgcaccgagcaggtctaggggcagcgccagagtgcaagggaggggaggggagactgtggaagcgccgcctgggcctggcctggggaggtggggggtgtggaggagttggccccggaggggccgggagcgggcgccgcgggcagccgggtgtgcggcgggaggggcgtcgagtggcgcgggccgccgtctccagctgtcccgggcgcagggaacaatggccaggcggtgggagaggggggcctaggagggggccgctggggtttccagaaaaggagaaactaaagagccctccgcagactgtcatctgcgtgtgacaagatctgcgcccccctcttcctttcttctccttgttcctgcagctgtgggcctcggagagcgcattgtacacacagatgttgggtttcagctctccggctctcgccagctccgcgggggcgccgcgcaccggggtgccccaacctgtggctgtggcccggggtccagggcctggggagagagagcatgggcgggaggcgcgggggggaggtgctcagtggtcctagtcgccccgagaccctagctcttctcgcccgctgcgggcctgactgcgccaggggccgggggttatgtgggcaggctcgaacgactgggagcgtggcctgtgattctgctccactcctttcgcccgcagagcggtggtctaggccagaccattgacctgggtagggggaagggcaaggacgcagctcgcacgcctgggttttcaccgccgtctcccttcggcgttttgggctggcggccgacattggcctggaccaaatggtggcaaagtctcaccagttccgcgtctcgcaagacactttctacgcgcatcgggacctaaacactcgggaggaccctggtaaagtgagcagaggggctctcgtctactcgccctgaatcattggcctgcttccatttggaaagggagcaaaaaggcccgaacggcaacactggaaaaggtaactgggaagaacgatatgccgtgcaattttctcttgccaagagtggcgacgcaccccacccacccctcccaggacaaaggtcacagcagagccgcgcgccttgacttttctggccgaggtctctctcccctcggtgctaccctgaacttgcccagtatgaacgatgaaagggagaaacactgaaaagaaagaaaaggcgaaggccctggcttcggcgttgtaccaatgactgacaaagctgatgtccattcatagtctcgggcgggagagggtgtttggagagccgcggccccttagcca

SEQ ID NO: 14454 - DNA, 1221 bp, Artificial sequence
  DNA replication origin
ggtcggggcagcgagggcaggatgccccaatgccccagcggccgatcccggggcctgcgcgcgttccccgagcctaccccgtcgccagcgcggcgcagccagaccctagggcgctcccagcaccgcggaggtcgggcctccagtcctggaggggtttgctctgtcgccaccctagggttctgcgatcccctcccagcccccgcggggagtcccgggaacaccacgggcacacacacatcagacacgcgcgcacacacagacgcgcgcgctggccgttgctatggagaggccggttaccagccaggctgagggcagcaggtcccctcctccgagccccctcccctccccgtcccttctctccgctgtcttcccctcttcccgccccggctcccgagtcctcctcccgccgtctccggccccccgccccccagcgccacctcccctcccctcctctgtctctgcccagggccgggcctggggtcgccctggagcctggctggggacgccgaggcaccggaggagggtggcggggagggacaggaaccgctaccactcgactctttgcccgagaaggtccctgggagggcatcccgggcgctgggggaacccgagtaccgcttctctctgacctgcccgccgccgcgccgcccccgagccagggtgcgggggtttttgcgggccttgccctgggcaggggggacgagagggccaaggtgatgtaccccgtccccgcctactggaggggttcactcatgggcagaggacgccagtgacgccgcagtttctcgcctctcgcgcccccgccgagccgcaccgggcctcctgcagcccgctcaggcctgcgggaaccatggcccgatgcgaggccacttctttgccctggagctttatgaagcgctctggccttgccctataaatacaaaaataaatgcggaactcagcctgggcctgcagtcagaggaaacggggtccttcggccacttttagacaggggcctgcagcggacggcaccgtactcatatctgtggacaacccccgcctctgagccctgccccctggggctcgcccccaggttttacagaactaggtttgtgagagaaaagcgccaggcaaggccctctgcaccgagcaggtctaggggcagcgccagagtgcaagggaggggaggggagactgtggaagcgccgcctgggcctggcctggggaggtggggggtgtgga

SEQ ID NO: 14455 - DNA, 954 bp, Artificial sequence
  DNA replication origin
gtgggcgggtcttcccagcgacccggagcacaggggcgggcgacggcgcccccaccatggccctgcccggcccgagcgcccggcgcacctgaggtctgggccggggagcagctggggaaccgcgcgtcgcctcggggagctcccggccaggccggctccgggcagaggccagaggggccctggcgcaccctccccgcccgcggcgacctcgcaccaccttccccgccagcccgcggctctcctcgccctggatcgccggagcctcatccaggctggggtctccagcaggcggccgggagctctccgaggtggccaggagtggccggtagccgtctccctcggccaggccgtgtccagcccctcagtctccacggcggcgcagaccgcacgcggccaccctgggcctcggacagggctagggggacgcagaccctgccgtctgggggtcctggggcggccacggggccggcgaccccagagcaaggcggagcctagtacaggccagagagctggttttgctttcttcacagacatgacctgacagtgaatacacaaataaatacaattcttttcgttagtcccttcttccgttgtctcagtgtttcacttccaacatcaaagcaccgcattcctgatttgatcttaatttaatgacctgtctttctagtgctttgaggaaagatgggtgggaggtggcaccaattcagttcaatttgggtcactttaaaaatcgtgagagggcctgaaaggttccatgcgggttcaccagcagaacagcacacttcctcgtccacgccttggtgcacctgcggcaatatattctgggtggcagacggttatttatgtctgagagcctccaactcactccccttcctcccaccacccctcctctaaggtgcggcctgacctcagtggggctgcagaactggcctcgccaaagctgaaggcggaccc

SEQ ID NO: 14456 - DNA, 1148 bp, Artificial sequence
  DNA replication origin
ccggcgcgtggggctctcgcgtgtaacccggctgccccggaacctccggcgcgtggggctctcgcgtgtaacccggctgccccggaacctccggcgcgtggggctctcgcgtgtaacccggctgccccggaacctccggcgcgtggggctctcgcgtgtaacccggctgccccggaacctccggcgcgtggggctctcgcgtgtaacccggctgccccggaacccctcctgcacatgggcgggctgagggccaggcgcaagggcacctgtgcccaggcggcaggcagtaggcaccagtccatggtgggcgtacagatggcagggctgaaagggaccctaaagatcctccggaagagatgtccccccaggggacatctgggagctgtgcacggtcctgagcggcttggggtcccaggcctgtggccctcactgcacagggttcttctgcagcgggaccccgcagccatgtcactctctgccctgggaaacatcctgtgccacggggcgggggggtgggggcggttaggcagcttgggtgatttttttattgtttgtagagatggggtctcactgtgttggccacctggtctgaaactctaggcccaagtaatcctcccgcctcggcctcccaaagtgctgagattacagacatgagccaccacacctggccaagagtgagttttaatgagcacacagtcactgtcttctcacatcagaagtccgtgtgctgagaaatgaggattctctttattctggacgttccagaaagcctcgtccaaggggatcgaatggacgcaggagggagagagctcagattttagctctttgttaggttcgtataacccaagtgccctgtgggttccccttgtgtggatgcttcctgaaactgtgtcctcacggccgaccctgtgtctcaggcgagcacccttctgtgggtggtggggacacacccatgcgtccgacccccacagagccacctgggcctctgtatgcctcacgctcctctctccagcatccacggtttgcccccagctgagggctaagtgagggaaactccttcaggctcacgttgtaaggaaccactgctcccccaaaacatccctgccagagccttgtctgctcactgatgaggattctgtctctgggct

SEQ ID NO: 14457 - DNA, 1671 bp, Artificial sequence
  DNA replication origin
tggccaagctggctgcatccctgggaccctggtctccgtcactgggacgcagcagttctgccgggttaacctcagggggcatatgtgtctctcccatggccgtcattttctaccgactttgttatttcagcattcatttagtgcatatattccttttaagaggtgtctaaatccttcgtgggccacaacagggtagacatcaggggctgtagcctccagtgtctggggggccatgcaggccacatgagtggggggaggggctgcgtggtggaaggggggccgggcagctgggggcaccatgagtggggggaggggctgcgtggtggaaggggggccgggcaggccacatgagtggggggaggggctgcgtggtggaaggggggccgggcagctgggggcaccatgagtggggggaggggctgcgtcgtggaaggggggctgggtggctgggggcggccagtcctaccccaaggggagagcacacaggtactgctggctgggaatgcgggtctggggttgctcagatctttgattaagaaaatagaaatcaggcatttgtattatttatgtaaaatttctcaattttgaaaaccctcattgagctcttagagtacaaactgtgtcccctcaagaggatatgttgagtcttaaccccaggacctcagcatgttatgtaacttggaaaaaggaccttcacagatgtaatcaagtgaccacgaagtctctggggtaggccatgaatccagtaggactggtgtcctgatcaaaaacggaaatttgaggctgggcagggtggctcacgcctgtaatcccagcactttgggaggctgaggcgggcggatcacctgaggtcaggagtttaagaccagcctgaccaacatagtgaaaccccgtctctacttaaaatgtaaaaattagccaggcgtggtggtgggcacctgtaatctcagctacttgggaggctgaggcaggagaattgcttgaacggaggaggtggaggttgcggctacccaagattgcgccattgcactccagcctgggctgtgagagtgaaactccatctcaaaaaaaaaaaaaaaaaaaaaaagggaaattcagacacagacagacgtgcacagggagcgggtcacacacagaggcagggactggagtggggcagccacaagccgagggacactgggagctgtcaggtgctggcagaggctggaggaggagggagcacagcttcagacatgctctcagacttctggctcccagcactgtgggagaataaacgcctgttgtttgaaggcccctaggttcatggtacttggtgagggcggcctcgggcagctcacacatgggccacacagaacgtggctgtgggcgggattgttctgggtgagccatgcgcatcccctgctatcagcaacacagtggactcacactggctctaaaacccctgaggtcgtttccatctgatggtcgcacttgggcagggctcttctggtgccagcgggagaccttactcagaccctcatctccatccacccctcctcctcctagcactgcatggtccaaaagtttactcaacccaatgacgcatctttaattctattattgacaacatcgtggaatataacagaattgaggaatagccccacggcacgtttctagagaacccctttgcac

SEQ ID NO: 14458 - DNA, 715 bp, Artificial sequence
  DNA replication origin
gacctgatggctaatatccttacccgtttgattatagaagttttatgttcgtaattcctgttttatttgtgaattacaagagaaaatgaacagtttcaggctgctatttgtaagcaagcgtctgcaaataaatgtgtttcaggtgggggtagcctaaatgtcacgtaaaccagcgcaattcagacgggggaagcctaaattccacccacaccagcacaattcagacgagggaagcctaaattccagatacaccagcgcgattcagatgggggaagcctaaattccacccacaccagcacacttcagacgggggaagcctaaattccagatacaccagcacaattcagacgggggaagcctaaattccagatacaccagcgcgattcagacgggggaagcctaaattctacataaatcaacaggtctcaggtctctaaattccacataaattaaatcaaatttggatagattgattcccagacgttctgctctgagcgttgtgtgcagcgtggaagtctttctggcctgctgtgtatgagcgggaattggatggtggtggattcgctttggggcatggcttcattgctggcttacgtctctcacacttgctcagggtccgtgttccttccagagcttgcctttcatcagactccatctgagcaccaatttgactgcacatccctgagtaggaaaaagcctcacgtttaacatctgc

SEQ ID NO: 14459 - DNA, 2971 bp, Artificial sequence
  DNA replication origin
acggaagagtgtgctgggagcatggggtggaagagtaactgtgctgggcgcatgggacggaaaagagtaactgtgctgggtgcatggggtggaaaagagtaactgtgctgggcgcctgggacgggaaagggtaactgtgctgggcgcatgggacgggaaagggtaactgtgctgggtgcatgggacggaaaagggtaactgtgctgggcgcatgggacgggaaagggtaactgtgctgggcgcatgggacggaaaagggtaactgtgctgggcgcatgggacgggaaagggtaactgtgctgggcgcatgggacgggaaagggtaactgtgctgggcgcctgggacggaaaagggtaactgtgctgggcgcatgggacggaaaagagtaactgtgctgggcgcatgggacggaagagtaactgtgctgggcgcgtgggacggaaaagagtaactgtgctgggcgcgtgggacgggaaagggtaactgtgctgggcgcctgggacgggaaagggtaactgtgctgggcgcatgggacgggaaagggtaactgtgctgggcgcatgggacgggaaagggtaactgtgctgggcgcatgggacgggaaagggtaactgtgctgggcgcatgggacgggaaagggtaactgtgctgggcgcatgggacgggaaagggtaactgtgctgggcgcatgggacggcaaagagtaactgtgctgggcgcatgggacggcaaagagtaactgtgctgggcgcatgggacggaaaagagtaactgtgctgggcgcatggggcggaaaagagtaactgtgctgggcgcatgggacggaaaagagtaactgtgctgggcgcatggggtggaagggtaactgtgctgggcgcatgggacggaaaagagtaactgtgctgggcgcatgggacggaaaagagtaactgtgctgggcgcgtgggacgggaaagggtaactgtgctgggcgcatgggacggaagagtaactgtgctgggcgcgtgggacggaaaagagtaactgtgctgggcgcgtgggacgggaaagggtaactgtgctgggcgcatgggacgggaaagggtaactgtgctgggcgcctgggacgggaaagagtaactgtgctgggcgcctgggacgggaaagagtaactgtgctgggcgcatgggacggaagagtaactgtgctgggcgcgtgggacggaaaagggtaactgtgctgggcgcgtgggacgggaaagggtaactgtgctgggcgcctgggacgggaaagggtaactgtgctgggcgcatgggacgggaaagggtaactgtgctgggcgcatgggacgggaaagggtaactgtgctgggcgcatgggacgggaaagagtaactgtgctgggcgcatgggacggaaaagagtaactgtgctgggcgcgtgggacgggaaagggtaactgtgctgggcgcgtgggacggaagagtaactgtgctgggcgcgtgggacggaaaagagtaactgtgctgggcgcgtgggacgggaaagggtaactgtgctgggcgcgtgggacgggaaagggtaactgtgctgggcgcgtgggacgggaaagggtaactgtgctgggcgcgtgggacgggaaagggtaactgtgctgggcgcgtgggacgggaaagggtaactgtgctgggcgcgtgggacgggaaagggtaactgtgctgggcgcgtgggacgggaaagggtaactgtgctgggcgcatgggacgggaaagggtaactgtgctgggcgcatgggacggaaaagggtaactgtgctgggcgcatggggcggaaaagggtaactgtgctgggcgcatggggcggaaaagggtaactgtgctgggcgcgtggggtggaaaagggtaactgtgctgggcgtgtgggacgggaaagggtaactgtgctgggcgcgtgggacgggaaagggtaactgtgctgggcgcgtgggacgggaaagggtaactgtgctgggcgcgtgggacgggaaagggtaactgtgctgggcgcgtgggacgggaaagagtaactgtgctgggcgcgtggggcggaaaagggtaactgtgctgggcgcatgggacgggaaagggtaactgtgctgggcgcatggggcggaaaagagtaactgtgctgggcgcgtgggacgggaaagggtaactgtgctgggcgcatggggtggaaaagagtaactgtgctgggccatggggcggaaaagggtaactgtgctgggccatgggacgggaaagggtaactgtgctgggcgcatgggacgggaaagggtaactgtgctgggcgcatgggacgggaaagggtaactgtgctgggcgcatgggacgggaaagagtaactgtgctgggcgcatggggcggaaaagagtaactgtgctgggcgcatggggcggaaaagggtaactgtgctgggcgcatggggcggaaaagggtaactgtgctgggcgcatggggtggaaaagagtaactgtgctgggcgcgtgggacgggaaagggtaactgtgctgggcgcgtgggacgggaaagggtaactgtgctgggcgcgtgggacgggaaagggtaactgtgctgggcgcgtgggacgggaaagggtaactgtgctgggcgcgtgggacgggaaagggtaactgtgctgggcgcatggggtggaaaagagtaactgtgctgggcgcatgggacgggaaagggtaactgtgctgggcgcatgggacgggaaagggtaactgtgctgggcgcatgggacgggaaagggtaactgtgctgggcgcgtgggaaggaagagtaacacaggccctgtccccagggagacctctggacttacttatttgttctgtccatgggttttgtactgaatgtctgccatatgccagatacggttctagtcaccgcagagttcacattatgagcaggcagttgtcacacgatgcaactaggctgtaacagggctt

SEQ ID NO: 14460 - DNA, 3770 bp, Artificial sequence
  DNA replication origin
agatcatgggattccctacaacccacagtcctcacggggccctgagcaaggagatcacgggactccccgcaccccacagtccacacggagccctgagtgtggagatcacgggactccctacaccctacagtactcacggggccctgagcaaggagatcacgggactccctgcaccccacagtccacacggggccctgagtgtgatcacgggactccctacaccccacagtcctcacggggccaagggcgtggagatcacgggcctccatacaccccacagtcctcacggtgccaacagcatagagatcacgggcctctatacaccccacagtcttcacggggccctgagtatggagatcacgggactgccctgcacccacagtcctcagcagtttctagagcagaagatgcccattaaaggcagatctcttccgttcagctgcctggtctgctgagcagttgagggggatggtgaggcagtgtgggaatccgcatgtgttgaggcctgcatccctgagctgcgggcagttgaggtgattctgaggcctgtgtccctgagctgtgggctgttgaggtgattctgaggcctgcgtccctgagctctgggctgtccgggtgattctgaggcctgcgtctctcagctgtgggctgttgaggcgattctgaggcctgtgtccctgagctgtgggctgttgaggtgattctgaggcctgcgtccctgagctgtggggtgtccgggtgattctgaggcctgcatctctgagctgtgggctgttgaggcgattctgaggcctgtgtccctgagctgtgggctgttgaggtgattctgaggcctgcgtccctgagctgtggggtgtgcgggtgattctgaggcctgcgtccctgagctgtgggctgttgaggtgattctgaggcctgcgtctctgagctgtggggtgtccgggtgattctgaggcctgcgtctctgagctgtggggtgtccgggtgattctgaggcctgcgtccctgagctgtggggtgtccgggtgattctgaggcctgcgtccctgagctgtgggctgttgaggtgattctgaggcctgcgtccctgagctttgggctgtccgggtgattctgaggcctgcgtccctgagctgtggggtgtccgcgtgattctgaggcctgcgtccctgagctgtggggtgtgcgggtgattctgaggcctgcgtccctgagctgtgggctgttgaggtgattctgaggcctgcgtctctgagctgtggggtgtccgggtgattctgaggcctgcgtctctgagctgtggggtgtgcgggtgattctgaggcctgcgtccctgagctgtgggctgttgaggtgattctgaggcctgcgtctctcagctgtgggctgttgaggtgattctgaggcctgcatctctgagctctgggctgtccgggtgattctgaggcctgcgtccctgagctgtgggctgttgaggtgattctgaggcctgcgtccctgagctttgggctgtccgggtgattctgaggcctgcgtccctgagctgtggggtgtccgggtgattctgaggcctgcgtccctgaggtgtggggtgtccgggcgattgtgaggcctgtgtccctgagctgcaggctgttgaggtgattctgaggcctgcgtctctgagctgtggggtgtccgggtgattctgaggcctgcgtccctgagctctgggctgtccgggtgattctgaggcctgcgtctctcagctgtgggctgttgaggtgattctgaggcctgcgtccctgagctgtctggtgtctgggtgattctgacccctgcgtctctgagctgtagggtgtctgggagattctgaggcctgcgtccctgagctgtgagctgttgaggtaattctgaggcctgcgtccctgaggtaggagctgcccgggtgattctgaggcctgcgtccctgagctgtggggtgtctgggggattctgaggcctgcatctctgagcagaggggtgtccgggcaattctgaggcctgcgtccctgagctgtgagctgcctgggtgattttgaggcctgcgtccctgagctgcggggtttctcggtaattctgaggcctgtgtccctgagctgtggggtgtctgggtgattctgaggcctgcgtccctgagctgcggagtgtctgggtgattcttaggtctgcgtctctgagctgtggggtgtccgggtgattctgaggcctgcgtccctgagctctggggtgtctgggtgattctgaggtctgcgtccctgagctgtgggctgttgacgtgattctgatgcctgcgtccctgagctgtgggctgttcaggtgattgtgaggcctgcgtctatgagctgtgggctgttgaggtgattctgaggcctgcgtccctgagctgtgggctgtccgggtgattctgaggcctgcgtccctgagctgtgggctgttgaggtgattctgaggcctgcgtccctgagctgtgggctgttgaggtgattctgaggcctgtgtccctgagctgtgggctgtccgggtgattctgaggcctgcgtccctgagctgtgggctgttgaggtgattctgaggcctgcgtccctgagctgtgggctgttgaggtgattctgaggcctgtgtccctgagctctgggctgtccgggtgattctgaggcctgcgtccctgagctgtgggctgttgaggtgattctgaggcctgcgtccctgagctgtgggctgtccgggtgattctgaggcctgcgtccctgagctgtgggctgttgaggtgattctgaggcctgcgtccctgagctgtgggctgttgaggtgattctgaggcctgtgtccctgagctctgggctgtccgggtgattctgaggcctgcgtccctgagctgtgggctgttgaggtgattctgaggcgtgcgtccctgagctgtgaactgcccgggtgattctgaggcctgcgtccctgaggtgcggggtgtctgggtgattctgaggcctgcgtccctgagctacaggctgttgaggtgattctgtggcctgtgtccctgagctgtggggtgtccgggtgattctgaggcctgcgtccctgagctacaggctgttgaggtgattctgtggcctgtgtccctgagctgtgggttgtctgggtgattctgaggcctgcgtccctgagctgcgggctgttgaggtgattctgaggcctgtgtccctgagctgcggggtgtctgggtgattctgaagcctgcggctgtgagctgtggggtgtctgagtgattctgcggcctgtgtctctgagctgtggggtgtccgggtgattctgaggcctgcgtccctgagctgcggggtgtcagggtgattctgaggcctgtgtccctgagctgtgagctgcccgggtgattctgaggcctgcgtccctgagctgcggggtgtgtgggtgattctgaggcctgcgtccctcagctgtggggtgcctgggtgattttgaggcctgcgtccctgagctgtgggctgttgaggtgattctgaggcctgtgtccctgcgctgtggggtgtctgggtgattctgaggcctgcatctctgagctgtggggtgtccgggtgattctgaggcctgtgtccccgagctgtgggctgttcacgtgattctgaggcctgtgtccctgagctgtagactgttcgggtgactctgaggcctgcttctctgtgctgtgggctccccaggggattctgagggctcttttgcttgtggcccttctgctt

SEQ ID NO: 14461 - DNA, 1569 bp, Artificial sequence
  DNA replication origin
ggatgatggatggatggatgaaggaaggatggatgggtggatggatgtaagaagaatggatgatggatgtgtgggtgaatggatggaaggatggatggatggaggaaggatggatggttggatggatggatgggtgtgtgggtggatggatggatggatggatggatggattggtggacagatgggggatggtggatggatggaagaagagtggatgatggataagtagatggatgatggatggatgaatggaagaagaatggatgatggatgggtgggcggatagatggatggatggatggaggaaggatgaatggttggttggatggatgggtggatgaaggaaggatggatggttggatggatggatgggtgtgtgggtggatgaaagaaggatggatggatgggtgaagggtggatggatggaggaagaatggatgatggatggatgggtgggtggatggatggatggatggagtaatgatggatggatggatggatgagtggatgagtggatggatggaggaagaatggatgatggatgggtgagtgaatggatggaggaaggatggatggatgagtgggagtttgggtggatgaaagaaggatggatggatgggtgaagggtgaatggatgaagaatggatgatggatgggtggatgggtatgtgggtggatgaaagaaggatggatggatgggtgaagggtggacggatggaggaagaatggatgatggatgggtaggtgggtggatggatggagcaatgatggatggatggatgagtggatgggtggatggaggaaaaatggatgatggatgatggatgggtgggtgaatggatggaggaaggatggatggatgggtgggtgtgtgggtggatgaaagaaggatggatggatgggtgaagggtggacagatggaggaagaatggatgatggatgggttgtacggatgagggatggtggatagatggaagaagagtggatgatggatgggtgaaaggatgatggatgggtggatggatgatggagggatggatgaaggaaagatggatggatggttggatgggtggatgaatggaggaagaatggatgatgaatgacaggtgggtgggtggatgaaagaaggatggatggatgggtgaaggatggatgcatggaggaatgatggatggatggttggatggataaaagaaggatggatggatggatgaaggatggatggggagtgagtggatggatgggggaaggatgggtggttggatggatggaggtatggatgcatggatgatggaggaaggatggagggatggatgagtgcatgatggatggatggatggaagaatgatggatggttggatggatgaaagtggatgggtagatggatgggtgggtgggtggatggatggatatggatggatggatatggatggatcaatggatggatggatgggtagatggatgggtggatgaaggatggaaggatggatgagtgcttgatggatggatggatgaatggcaggatggatcatttcccagctgtaggacagacaatcggctcctgtcccc

SEQ ID NO: 14462 - DNA, 1133 bp, Artificial sequence
  DNA replication origin
ggaggaaaagagggaaagccacagcaccagaggaggggagtggagaggtagggaggaggaggagagggaagaggaggagagggaagaggaggagagggaggaggagaaggagaagatggaggaggaggagagggaagaggaagaggagaggaaggacgaggagaagagcgaggaggagggggagaaggaggaggagatggaggaggagagggaggaggaggagagggaggaggaggagagggaggaggaagagagggaggagagggaggaggaagtggaggaggaaagggaggaggagagggaggaagaggaggaggaaaggtaggaggagagggaggagagagcatgaggagagggaggaggagagggaggcggaggagagggaggcaggaggagggaggagcagaggagggaggaagagaggaggaaaagagggaaagccacagcaccagaggaggggagtggagaggtagggaggaggagagaggaggagagggagaagaagagggaggaggagagggagaaggagagagaggaggagagggagaaggagagagaggagagggagaaggagagggaggaggagagggagaaggagagggaggaggagagggagaaggagagggaggaggaggagagtgaggaagaggagagacagaggagggaggaagaggaggaggaggaggagatggaggaggaggagagtgaggaagaagagagaggagggaggaagaggagaaggaggaggaggagatggaggaggaggagagggaggaagaggagagggagaaggaggacagggaggaggtgaagaggaagaggagggaggaggagagggagaggagggaggaagatgagaaggaggaggaggagatggaggaggagagggaggaagtgaaggagagggagaaggaggacagggaggaggtgaaaaaggagaggagggaggaggagagggaggaggtgaaaaaggagaggagagaggaggtggagaggagggaggaagagaagagggaggaagaggaggaggagagggaggaggtgacgccccctccgcctcactccttgcccacctccgagtacacagctggctgcggctatccccccgggcccagcccacctatgcacacctc

SEQ ID NO: 14463 - DNA, 1934 bp, Artificial sequence
  DNA replication origin
agaaagcaccctctcattgcaatgtgtttggaaacatgaattcatgtggcagcggtaacatttagaagagaaacagccacatttaaaaacgcgtaagactcacagaacctcagcctgctgtggtttcatcatcaggtgggtggcacattccagcggctttggccttgcctgcccagtgcccagagctcagtgcccactgtgggaagtgcagggagcagctctggcacatcccacagtgctgtctgcaccaccgcacacagagtgccagtgtcagctgtaggtcccatggcctgaggaagccactgagcctgggacagcttgaggggcaggaggcggacacaggtgcggcgggggacgcgggggtggctgcccgggaggcggacgcgggtgcggcgggggacgcgggggtggctgcccgggaggcggacgcgggtgcggcgggggacgcgggggtggctgcccgggaggcggacgcgggtgcggcgggggacgcgggggtggctgcccgggactggctcttctggaagcaattcgtgggaaacccacttggatgccacttatgacccccgcgtgccagtggatgcccacaacccctctggggtgtcggggatcaggtgagcaagggggctcatccgtggcctccaggccccaccttgatggaaactgcgacaggagggggtctggcctctgctgggagtgacatctgaagatgccatagaaagtctggcgcagcagccggtgggcctggggggcgcgtggactcccagctgttgctgtgcctgggtcaccccagtgggcagggcgggcagggggcttccccacagtctagggggccaggagagcccctgggcctcacgtcctgcttctctccttgtccttcatgtcttgtaggcgaccccacagagagagaggcagaggagagtggccgtgacctggaggacaaggacatgcatttcacactgaccggggcctccctgggacaccctgaacacctgctctgtgggagacggggtggtgtttgagctggtgccatctgggtcccctggggtggtggctgggtgagcccagccccatctttccctcggacttcatttgtgctcatggctgggggaggcacctgggggccccgtccaagctgccaagggctggggtgggctgttcccctcttggcatctccctcacacctctgcacccccagtggataaaagctgctggcaacatcgacgtccccaagacactgacaggcctggaggtctggacaatggggagccagcaccgggtcccctgggaaccacgcagccggggcctggaggccgacacaagccagacccagcctctctgccattcgcaaatcccagtgttcaaacagagttctgccaaagaagagaagaaccagtaaaaagcagggaagaggctgggcgcggtggctcatgcctgtaatcccagcactttgggaggctgaggcgggcggatcacgaggtcaggagatcgagatcatcccggctaacatggtgaaactccgtctctactaaaagtacaaaaaagtagccaggtgtggtagcatgagcctgtagtcccagctactggggaggctgaggcaggagattcacttgaacctgggaggcggaggttgcagtgagctgagattgcaccactgcactccagcctgggaaacagaatgagactccatctcaaaaaaaaaaaaaaaaaagaaagtacaggaagctttcagcctccttggcaagacactgctgtctggagaccctgggagaagtgtgccatcaaccaacgtgaccagaacccatcctggtttagggaggagctctccacaggcctccacggggctggagcagtccccaagctccaaagagtcccccacgacctcttagtcgtcacccctaggaagggcctagaaggcagatttcccaccatga

SEQ ID NO: 14464 - DNA, 1453 bp, Artificial sequence
  DNA replication origin
atttgagctaaattgctagaattagagagcgtcacaaaaattctaggaggtcagcaactttaggtaatgcccacacctgatgggggaaatcactgtcttccggcgggctggtcctctttggtgacagatgaagtcagatgcttccgggatgaatttggttcacctttgaaggacactttgaaagcaacacaacaaaactggctgggccttgtactctccgctccctcgagaagctccccgcccggtgccgctggcttctactgtttctaagctgcctgttgggcacgttccctcctggtggtcccggggcagccagacccaccctgggacatccaggccccctgggcacagacatcttgtacaaggtcagagagactgggtttcgggcttcatgagcctcagaaattcagctctcaggaggctcgtgggaggcctccagggtcaggtctctgccggagagaaaaggggcggcctgggcttctcttcaaaagtgttacctgacaacaagggaattcagccacacaccaggtggctccgtggtcccctgaggtccccagcctttgacagtgtgtgtgtatgtggtgtgtggtgtgaaatgtgggtgtgatatgtgtgtgtggtatgtgtgcatgtatgtgtgtgggggtatgtgtgtgtggtgtgtgtggtatggtgtgtgtgtctgtggggtacatgtgtggtgtgtgtggggtatatgtgtggtgtgtgtgtatatggtatgtgtgtggtgtgtgtgtgatgtgtgtagtatgtggtatgtttgtgtgtgtagtatatgtggtgtgatgtgtatgtggtgtgtgtagtatgtgtgcaggtatgtgtgtggtatgtgtggtgctgtgtgtgtggtatgttgtgtgtgtatggtatgtggtgtgtgtgtggtggtgacatgtgcgtatggtggtgtgtgtgtggtgggggtgtgtgtggtgtttgtgtggtgtgaatgtgtgtgtggtgggggtgtgtgtggtgtttgtgtggtgtgaatgtgtggtgtgtgtgtgtggtgtgtgtggtggtgacatgtgtgtatggtggtgtgtgtgtggtgtgtgtgtggtgggggtgtgtgtggtgtgaatgtggtgtgtgtggtgtgtgtatggtggtgtgtgtgtgtggtgcgtggggtggtgacgtgtgtgtatggtggtgtgtgtgtgtgtctgtggtgggggtgtgtgtgtggtgtttgtgtggtgtgaatgtgtgtggtgtgtgtatggtggtgtgtgtgtgtggtgcgggggtggcaggatgtcattaacttggttctaaaggtggtttgggttcaggtcctggagtacatgctcaggaactgtcaagcaatctgggggcacaggaaggagaccgggcgctcctgcaggtattaaatcgtgttttgcgtgaagatcagcgttcagaccagtagtacaaaacagat

SEQ ID NO: 14465 - DNA, 858 bp, Artificial sequence
  DNA replication origin
gccttctggacatagggtctctgtggatggagttagtaaagatgaggcccttatccagtacggccggcatccttctaagaagagacagcacagacacgccccgaggacggagacggaacggagtgaggcgtctacctgccaaggagcccccggcattgccaggagccacagagagtcgcccgagagcttcctgagcacgtggccctgacaacacctggatctccagcttccggcccgcggtcccgtcagacaattcatttctgtggtttgaagccacccagtttgtggcactttgaccccaggatcctcacaggaaaccgtctcactggcccagtcctgctgggccctgcccatgggatggacttgctgtccttgaacaggaggcaggttcggggaacaggactgtaatgggtcatggaaaataccaggctgatggcagagggtgcgtggggaggagatcagggaaccgccaggccggagctggaagccggggccaccgtccaactcacgagggctcggcagagaggacaggggagcttcccctgctggctgaagtgggtggaggcgaacctggcccacaacaccctgagcttctgcggagccatgtgagggccacgtggagaacactgcagttccaccttcatcagataaagccaaccgttgttgtttaagcaaaggctgcggacagtgagcacagaacttcacaacacatcatggtcgcagcgcaccatcccccgtgatcccaaagcagcgatctagacgtgtggggtccacaggcgggcgccctggcactgggggctctgcaacttgacgaggctatgccaggctgggctagaggtgccgtgctgggcacaggct

SEQ ID NO: 14466 - DNA, 925 bp, Artificial sequence
  DNA replication origin
gagcttctgcggagccatgtgagggccacgtggagaacactgcagttccaccttcatcagataaagccaaccgttgttgtttaagcaaaggctgcggacagtgagcacagaacttcacaacacatcatggtcgcagcgcaccatcccccgtgatcccaaagcagcgatctagacgtgtggggtccacaggcgggcgccctggcactgggggctctgcaacttgacgaggctatgccaggctgggctagaggtgccgtgctgggcacaggctctccacgggatggcgggactgctgggcacaggctctccacggggacggcggggctgctgggcacaggctctccacggggacagcggggctgctgggcacagggtctccatggggacggcgggactgctgggagctgggttctccacggggacggggacggcgggactgctgggggctgggctctccatggggacagggacggggacggcgggactgctgggggctgggctctccatggggacggggacgggaacggcgggactgctgggggctgggctcttcacggggacggcgggacttctgggggctggctctccacggggacggcgggactgctggaggctggctctccacggggacggcgggactgctgggcacaggctctccacaaggacggcaggactgctgggcacaggctttccacggggacggcgggactgctggggtctgtgctcctcaccccagggctcacgcttttccatgagaccctccccagccacatcgggggctctgaagactgagcactgagggtcagcagcaggtaggagatgtctttgaagtttcatctgttatcttaaaaactcgtggatttttggggcggggcgctgtggctcatgcctgtaatcctagcactttgggaggccaaggcaggcg

SEQ ID NO: 14467 - DNA, 949 bp, Artificial sequence
  DNA replication origin
cagccagagcttctgagccagggctgggcccaagaacgtgcatttgcgttgttccccaggtgatgctgctggtgaccccggggaccccgccgtgagagccccgacacaagtcgcggtttgtggtgctttggaggagtttgctccttagagtgagggggattgttctgccccaatggcctcttcagagctgcgagactgtgcccacgcgaggcagtggtcgccacacccacactgccgtgctgcgcaggtgaggcctggtgcacggagcccctgggggacacggcgaagggccttctcctgccatctgctcaggaacccctccctgggcttggcctccatcttgacaggcaggcgaggaagcccctgctgacgccatttacaactgcaaacctcccatttcctcccaggtccttaaagctccacatcataaaacggatgtgcgcgtgaaggaaacgtgggtgtccacagagagctcccccggagaaggccacgtccacggtgccgcctgacagcaatggcttcctcagcgtttgacgggcagggagaagggtggggaggccacaaggacaggagaactggcgctcgacatggggcaggacgggagcaggatgggaacaggaggggacaggagggggcaggacagggacagaggagagacacggggcaggacggggcaggacggggacaggcgggggcaggacagagggaggacagggacggaggagagacggggggcaggagggggcaggagggggcagggagccacgtcttctccaatcccatatggggccatctgccaccctctgcccaaaatgtacgattcaccatggcaaggaggcgagaagcggggagatccctctaaacccaaatgaacacagagtgatggggccccagcaccccatccacaggctcattccattatttgaaaatgtttctaaaaactgagctt

SEQ ID NO: 14468 - DNA, 1037 bp, Artificial sequence
  DNA replication origin
ctgcattttgctggtgcgctgggggtctgtgtgtcttattcggagaagacgttgctgctcccccaaacgaagaatcatgtcacaggaaaccatgacaaaccccccttttgactgtgcctcccagcaggagaacagggagctgagaagacaatgaggagcaggctgtggggaaaggagaggtcactgaggtcacatgagtatcaggcagatggtgccactgccggagccaccccagagccaccatcacggcaccgtttcatcccatccagtcctccccacgtcctcaggtggccaaagaccacattacaccacatctgtcctcagggaaaagaggagagaatgcatctgagaggacctgtcgaccagggacacacccgacctgcacaaagcagcatctggagctacggccggggccatcaatggggtgagggggccaaggagagccctggctgccctgcagagggtgtgtccgtgtggcctgtgtgcatgcacgtgtgtgtctatgtgtaatgtgtgagagacgtgtgtgatgtgtgcatgtgtacatgtctgtgtatgtgtgcatgtttggtgtgtgtgtgtagcgtatgtgtgtggtgcgtgtgtgtggtgagtgcacatgatgtttgtgtggtgtgtgtagtgagatgtgtgtatgtatcatgtgtgatgtgtatgtatggtgtatatgtgtgttatgtgcatggtgtgtgcctgtttgtacatgtgtgatatatgtgttgtgcgtggggcatgtgtgcggtgtgtgtatatatgtatatgtttgtgtctgtggatgtgtggcatgtgtggtgtgtgtggtgtgtgcatatgtggtatgtgtgttgtgtgtacagtgtgggtgtgtgtagtgtgtgtatatgtgtatgtgcatgtgtggtgtgtgtggtaggtgtgtggtgtgtgtgcattcatgtgaaagtgtgtgcacatgtgtgtttgcatgcatgtgtatgtgtgtgcccgtgcatgtgtggtgtatggtatgtgtgtggtagatgccggcagtgtgttgg

SEQ ID NO: 14469 - DNA, 1338 bp, Artificial sequence
  DNA replication origin
agtggcattggcacaaggatgctgggtgtgtcatctgcacctagatcctgccatgcctgccttggggtcacacaagctgtccagtatgcctggcctcatcctcctctcctccagcatgggagactccaccaggctgcagggtgcactcttgcctcccctccagcgtgggagactccaccaggctgcggggtgcactcctgctgccctgtggcagttactgtttccttcatcctcggctccaaagggcaaaaagtgagccccagcctgacactttccctctgggtgaggctgtcaaatcctctcctttctgatttcacctttcctggcatgtagagaataaggaataactccaagatcattctcatgggttttgaaacctcagatgcaaaagaagaaatgctctgaggttcctcagcctccagatgccacttcccagatcactcccccttggcttggcctcaggtgaaggtgtgtgtatgtgtgtgtgcatgtgtgtgtgcacgtgtgtaggggtctgctgtgtgcatgtgtaagaatgcgtgtgtgggggagtctgctgtgagtgcatgtatgagtgtgtgtgcgtgtgtgtgcacgtgtgtgggtctgctgtgtgcatgtgtaagaatgcgtgtgttggatctgctgtgagtgcgtgtatgagtgtgggtgtttgtgtgcatgtgtgtggggatctgctgtgtgcaggtgtgtggagtgcatgtgtgagtgtggatgtgttgtgtgtttgaatatgcatatatatgggtctgctgtgtgcatgtatgtttgagtgcatatgtgactgtgttgtgtgtgtgaacgtgtgtgggtctgctgtgtgtgacatgggtgtggtgtgtgcacgtgtgtgtgtctgctgcatgtgtggattgcatgtgtgaatgtgttggtgtgtgactgtgtgggtctgctgtgttcatatatatgtgagtgcataagtgtgggtgttctatatgtgtgtgcgtgtgtgggggtctgctgtgtgcatgtatgtggagtgcatgtgtgagtgtggatgtgttgtgtgtgtgcatatacattgtggatctgctgtatgtgtgtggtggtgcatgtgtgactgtgggtgtgtgtgtgcatgtgtgtgtggagtgcctctgtgtgtgtgggtgtgttgtgcgtgtgaacgtgtttgggtctgctgtgttcatgtatgtgtgagtgcctgggctagtgcaggtgtgttgtgtgtgtgcacataagcatgtgtctgttgtgtgcgtgtgtgtgactgcatgtgtgggtgtggggggggtcatgcagtgtgatcgcatgtgtgagtgtgttttgcgtgtt

SEQ ID NO: 14470 - DNA, 2011 bp, Artificial sequence
  DNA replication origin
ctcgtagtggatggcacgggagaaagctcctctccgccgtggctactccagttcctctcgtagtggatggcacgggagaaagctcctctccgccgtggctactccagttcctctcgtagtggatggcacgggagaaagctcctctccgccgtggctactccagttcctctcgtagtggatggcacgggagaaagctcctctccgccgtggctactccagttcctctcgtagtggatggcacgggagaaagctcctctccactgtggctactccagttcctctcgtagtggatggcatgggagaaagctcctctccaccgtggctactccagttcctctcgtagtggatggcacgggagaaagctcctctccgccgtggctactccagttcctctcgtcttccctggggtggctacagtgttcttgtcttcgtgaagttgcctctgattccatcctctaaaagccaatgacttatatttggcacaagacagattaacacgtaattgttctttactgaattggtatctgactgtgtgagttgactgaagcatgtatagtcgtatgtgtatctgagtgtgtttgaatgtatgtgcatgactgtgagtgcatgttcatcactgtcagtgtgtcactgtgtccatatgtgtggctgcatgtgagtgtatgactgtgtgtgtctgtgtggctgtgtgggagtgtgtatgtggtggagtgtgtgtggcgtgtgtttgtgtttgtgagagagactgtgtgtgtgtctggctgtgtgtgtggttgtgtgactgtgtgggagtgtatgtgaatgtgcatgtgtggctgtgtctatgtgtctgtctgtgtgtgtgactttgtattactctgtgtgtctgtgtgtgtgtgagagattgtgtgtgtgactgtgtgagcatgtggctatgtggagtgcaagggcctgtgtgggaatgtgtctgtgtatgactgtgtggctatgtgtagtgtgtgtgactgtgtagctgtgtggaatgtgtatgtgcaactgtgtgggagtgcatgtctgtgtgactgtgtgactgtgtggctgtgtgaagtgtgtgtggctgtgtgcgtgactatgtaaccatgtgtggctgtgtggccatatgtgactgtgtgaccaggtgtgactgtgtggccacgtgtgactgtgtgactgtgtgtgactgtgtgaccgtgtggagtgtgtgtgactgtgtaaccatgtgtgactgtgtggccatatgtgactgtgtgactgtgtgtgactgcgtgtgactgtgtggccacgtgtgactgtgtgaccacatttgactgtgtggccgtgtgtgactgtgtgtgactgtgtgactgtgtgtgactgtgtgaccacatggagtgtgtgtgactgtgtaactatgtgtgattgtgtggccatatgtgactgtgtgaccgcgtgactgtgtgactgtgactgtgtggccgtcactgttaccacatgtgactgtgtggccctgtgtgactgtgtgaccgtgtgtgactgtgaccgcgtgtgactgtgtggccacgtgtgactgtgtgactgtgtgtgactgtgtaaccgcgtgtgactgtgtggccgcgtgtgactgtgtgaccgtgtgactgtgtgactgtgtggccacgtgtgactgtgtgaccgcgtgtgacgtgtggccgcgtgtgactgtgtggccgcgtgtgactgtgtgaccgcgtgtgactgtgtgaccgtgtgtgactgtgtgactgtgtgtgactgtgtgaccgcgtgtgactgtgtgaccgcgtgtgactgtgtggccacgtgtgactgtgtgactgtgtgactgtgtggagtgtgtgtgactgtgtaaccatgtccaggcagggtgtgggagtggagagggtacgggacgggagctgcagacaacatccgagccggctgaagcccacagagcaggccccgtgttggggggaagttggaatttagggagtggtgctggattctggacagtggatgacccgatgctgacgctggcacc

SEQ ID NO: 14471 - DNA, 932 bp, Artificial sequence
  DNA replication origin
tctgcccacgtctctccagctgtgcaatcggcacacccacgtccacgtggctcctcatggggccaaagagcagccgtggccaggaaagcagtcagagaggcccagggttgaacccaaggtcactgcccttgtggttgagcaaaatgaagacagttcctcttcttaaatccggctctgtgcctatgaagacggaagcagcagcattccgcttgcaggtttttgaaaaaacaaatggggcaagagaggccaggaccacgcctgactcaggcgatcggacgggcagggaggctgcaaggcatggcatgagcaggtggagctgtcaggactgccccagcccctggctcaaagatgcccgaccccaggaccctgcctcgctggatggtgaaggccaacttcccctctgttggagctggcctgggcgttgtgggaagggctgggaggaggcccaggacaatgcagaacagacaggacgtttcacagagcaggctgccatgtccctcggggccttgggggctgctgaggccctgagaaaggtatgcatcggggaggctggctgtgctgttgcagggatgtgtgtggggctggatcggggaggatggctgtgccgttgtaggggtgtgtgtggggctggatcggggaggatggctgcaccattgcaggggtgtgtgtggggctggatcagggaggctggctttgctgttgcaggggtgtgtgtggggctggatcggggaggatggctgtgccgttgcagggatgtgtgtggggccggatcggggaggatggctgcacggttgcaggggtgtgtgcggggccggatcggggaggatggctgcaccattgcaggggtgtgtgtggggccggatcggggaggatggctgcaccattgcaggcgtgtgtgcggggcttgctgactctcgtgctctgcggacgcc

SEQ ID NO: 14472 - DNA, 1043 bp, Artificial sequence
  DNA replication origin
tgccatgtccctcggggccttgggggctgctgaggccctgagaaaggtatgcatcggggaggctggctgtgctgttgcagggatgtgtgtggggctggatcggggaggatggctgtgccgttgtaggggtgtgtgtggggctggatcggggaggatggctgcaccattgcaggggtgtgtgtggggctggatcagggaggctggctttgctgttgcaggggtgtgtgtggggctggatcggggaggatggctgtgccgttgcagggatgtgtgtggggccggatcggggaggatggctgcacggttgcaggggtgtgtgcggggccggatcggggaggatggctgcaccattgcaggggtgtgtgtggggccggatcggggaggatggctgcaccattgcaggcgtgtgtgcggggcttgctgactctcgtgctctgcggacgcccagggagcggccccaacccacgcgccggcttctcgagctcggcctcttaagtgacagactcaaacacctgagcaacaagtttcctggggtcacctaataacgattattttaacaacagtttccaaacaacaaacaaacccatggagcacgaaacctctggggaccttttgaagctaaacgctgagtggtgccgcttcttggggagctcaaggccagcagggtccctcctacagcgaccctggacagtggtttggggattcacttgatacaagtaattctctaattaggataatctggatgcggcctgctgtgatgtagtgatggggcttccctggaaggggggatgtcaggaatagccctcactgcatagagcacatcccggcgggagcgttagagctgagggatgcctgtggctgagccgagggagagccggagccaggaaagccactgattgggcccaggggggcggcgatacaaagtcacttttagaggatgaggaaaagatgaaatgaacatctaaaaactaacgccctctatgatttaatgaactttcctctctctaaaagtactctggtgattatttcagggacagccaccc

SEQ ID NO: 14473 - DNA, 2698 bp, Artificial sequence
  DNA replication origin
gagaacaaagatgaaaattcattactacctccaaatactgccaactccgccatttcttttaaaactgcagtcttgggaagctccaagagtgttcgataataaccaagacgtggatcctgtgtgtgaaaagtggcccagctcctggagaggcgcgaaggctgtgggtggactgtggggtgggctgcttctctggggtcacgtggacatccctagagagagtcttggcttgggcaccaccctcaggtgtgtgtcctcaggtggcctgactgcagtgacctctgaaatccagggtatgcagagatcgcaggctgtgggccctgccaccacaggctggggcctcagggaattgggtctgggtcgttgcaagtctcgaggctcccccagtgggctgctgctccatagcaggctgtccccactctgctccacaggaatcacgaagccgcatgctgtctctggggtctgtgctgcagagctgggggctctccctgcaggagtgtgtacagtggctggggctctccctgcaggagtgtgggtggtggccggggctctccctgcaggagtgtgtacagtggctggggggctctccctgcaggagtgtgggtggtggctgggaggctctccctgcaggagtgtgtacagtggctggggctctccctgcaggagtgtgtacagtagctggggctctccctgcaggagtgtgggtggtggctgggggactctccctgcaggagtgtgggtggtggctggggggctctccctgcaggagtgtgggtggtggccggggctctccctacaggagtgtgggtggtgacggggctctccctgcaggagtgtgggtggtggctgggaggctctccctgcaggagtgtgggtggtgacggggctctccctgcaggagtgtgggtggtggctggggggctctccctgcaggagtgtgggtggtggctgggaggctctccctgcaggagtgtgggtggtggctggggggctctccctgcaggagtgtgggtggtagctggggggctctccctgcaggagtgtgggtggtagctggggggctctccctgcaggagtgtgggtggtggctgggaggctctccctgcaggagtgtgggtggtgacggggctctccctgcaggagtgtgggtggtagctggggggctctccctgcaggagtgtgggtggtggccggggctctccctgcaggagtgtgtacagtggctggggggctctccctgcaggagtgtgggtggtggctgggaggctctccctgcaggagtgtgtacagtggctggggctctccctgcaggagtgtgtacagtagctggggctctccctgcaggagtgtgggtggtggctgggggactctccctgcaggagtgtgggtggtggccggggctctccctacaggagtgtgggtggtgacggggctctccctgcaggagtgtgggtggtggctgggaggctctccctgcaggagtgtgggtggtggctgggaggctctccctgcaggagtgtgggtggtgacggggctctccctgcaggagtgtgggtggtggctgggaggctctccctgcaggagtgtgggtggtgacggggttctccctgcaggagtgtgggtggtagctggggggctctccctgcaggagtgtgggtggtagctggggggctctccctgcaggagtgtgggtggtgacggggctctccctgcaggagtgtgggtggtagctggggggctctccctgcaggagtgtgggtggtggctgggaggctctccctgcaggagtgtgggtggtgacggggctctccctgcaggagtgtgggtggtagctggggggctctccctgcaggagtgtgggtggtagctggggggctctccctgcaggagtgtgggtggtagctggggggctctccctgcaggagtgtgggtggtggctgggaggctctccctgcaggagtgtgggtggtgacggggctctccctgcaggagtgtgggtggtagctggggggctctccctgcaggagtgtgggtggtggccggggctctccctgcaggagtgtgtacagtggctggggggctctccctgcaggagtgtgggtggtggctgggaggctctccctgcaggagtgtgtacagtggctggggctctccctgcaggagtgtgtacagtagctggggctctccctgcaggagtgtgggtggtggctgggggactctccctgcaggagtgtgggtggtggccggggctctccctacaggagtgtgggtggtgacggggctctccctgcaggagtgtgggtggtggctgggaggctctccctgcaggagtgtgggtggtggctgggaggctctccctgcaggagtgtgggtggtgacggggctctccctgcaggagtgtgggtggtggctgggaggctctccctgcaggagtgtgggtggtgacggggttctccctgcaggagtgtgggtggtagctggggggctgactcagagaaccagcaaaggccgtgtttcttttcaggccccccgacaaagggctcccttccctcacaaggctttctcatacccgccgtctttgagtacgtgtctgttcctgatctgagccactggggccaggcctgctgtgtgggcacacgtgctcctggcagacactcctgctttgtgattccacccccaacctcgggatggaggtcaggac

SEQ ID NO: 14474 - DNA, 1659 bp, Artificial sequence
  DNA replication origin
ggccgtgtatccagggcgtcaggggcggggtggtggccgtgtatccagggcgtcaggggcggggtggtggccgtgtatccagggcgtcagggacggggtggtggccgtgtatccagggcgtcaggggcggggtggtggccgtgtatccagggcgtcaggggcggggtggtggccgtgtatccaggtggccgtgtatccagggcgtcagggacggggtggtggccgtgtatccagggcgtcggggacggggtggtggccgtgtatccagggcgtcgggggcggggtggtggccgtgtatccagggcgtcgggggcggggtggtggccgtgtatccagggcgtcgggggcggggtggtggccgtgtatccagggcgtcgggggggggcggtggtggccatgtatccagggcgtcgggggcggggtagtggccgtgtatccagggcctcaggggcggggtggtggccgtgcatctcggggcacaggcactgcttctgaggagaccccagggtgtgtgtggcaagcactggggcgagcctgggactcgggccagacagcctcggtgcagaccctgagctgggcactcatgctgggtgcctgggagaatgcacaccagcctcagctccacctctatggacgtgtttcctgcagacctcatggttgtcatggcaagggctgagaggcacatgcgctgtttagtaggtcatgagcactgtgtgtatgtgtgtgtgtgtgtacacgagggatatgggtgtgatcgtgcatgttcgtgtgtgtacatatggtcgtgtgtgtgctcatgcatatgtatgtatgtgtgtacatgtggacgtgtgtgtgctcatgtgtatgtgtgtgcttatatatgtatataactctgcatatgcatgtgtgtgtatgtgtatttggatatgcacgtgtgtttgtgtgaatatgcaatgttgtttcctgctcactgactcttaattgatgaaacaaatgcccagcaggccaggatgggatttgagccccggctcatggtggggcctagaaagtgacgactactttccctttgcagaacccgggcctcactcaagtggtgtttgtgtagaaggaaaagaaaccacaaaggtgcatttgactcccattttctcgcatctgctgagagcgtattcatgcacaaaagggaaaggtccttgttctaaagcaggagagtacacgtggctgtcagaggttgcgcggcagcggggaaggaggccggggagcatctgtcagttgccgcaatgcaggggcgaggtcacagaacagagggtgtgctggctgctggggagggtgtggggctctggggccttgaccctgttaaccgtccaccctgccctcccgtctgctcctctgacagcagcttctggaggccgggcactgtggccaggctggcacaagtaacatcaggacctggggctgcagccccaggagggcccattcacctggctgtgacccacaggcaaataccgcacaaaacccgtggcccgtcttgcacacagaggccactggaaacacagataaggctgtgtgaactcatctctccactgtgaagacaacactgggaagacagcagatcctcctggcactcgctgagggtctccactgccctccagatgccgagctcccgccttccttccccca

SEQ ID NO: 14475 - DNA, 1349 bp, Artificial sequence
  DNA replication origin
cctcgatgggaagcagttgtaggtgcaccactgggctgtcggagccatcgggaaaggaacccttcctgtgcctggccttaggataactgtgtctggacccacagcccacaccccactcgtgaactgtttcgggccctttctaaggtgcatgtgggcctcttgcccaggatgcgggctgggttcctagaggactcaggtgatcctacctgcggcagtgagttaatctccagggctcaggaggcctgctgtccagaggaagtctgggcagcttgggctggcgcaggcacggtgcccccagtcctgctcttgtggactctgggggcatgctgggcctgggcacacctccaccacgcctgcggccctttgctcacggactgtggattggatctgagcagtctagggaccagctcctcgggcccatgcagaaaggaagagaaggagtctccctggactggattctgggagggaccctcactctttctgcctgaatgaacattagtgcgtggacttttccagtctttccatctgttctgttttgaagtttattcatgttgatttacgtgaatctagttcactctttttgcctctggtgtcacccttcagtctgggcggggtggtggccgtgtatccagggcgtcagggacagggtggtggccgtgtatccagggcgtcagggacagggtggtggccgtgtatccagagcgtcaggggcggggtggtggccgtgtatccaggtggccgtgtatccagggcgtcagggacagggtggtggccctgtatccagagcgtcaggggcggggtggtggccgtgtatccaggtggccgtgtatccagggcgtcagggacagggtggtggccgtgtatccagggcgtcaggggcggggtggtggccgtgtatccagggtgtcagggacagggtggtggccgtgtatccagggcgtcagggacggggtggtggccgtgtatccagggcgtcagggacggggtggtggccgtgtatccagggcgtcagggacggggtggtggccgtgtatccagggcgtcaggggcggggtggtggccgtgtatccagggcgtcaggggcggggtggtggccgtgtatccagggcgtcagggacggggtggtggccgtgtatccagggcgtcaggggcggggtggtggccgtgtatccagggcgtcaggggcggggtggtggccgtgtatccaggtggccgtgtatccagggcgtcagggacggggtggtggccgtgtatccagggcgtcggggacggggtggtggccgtgtatccagggcgtcgggggcggggtggtggccgtgtatccagggcgtcgggggcggggtggtggc

SEQ ID NO: 14476 - DNA, 1597 bp, Artificial sequence
  DNA replication origin
tggcttcctctgtcaagttctagtgcagacagaaaagtgtcccaggaagaggacaagcaccacctgggaaatgagtgctcccagcaaggggaggtggcctgcggacatgggtggcccttgaaggggagctgtggagaggcagcagcagacagggcccacacagaaagcacccgtcacccctctaccccgccaggaagctgaggaaactctcaggagccctgacagggcggggaggggacactccaaggaggggcatgtggactgagggcctcagggactctgcaccctccttctacctcctgcaagatggagcctgccccagttggacaggcggcctgggcgcaagagcgcctctcagtgcttagttataccgggaaaccaaggaggccaccaagtgtcaggacacagttacatgggcattgggtaggggaaacagctgtgaggacatagcgtgggaaggcactgggtatccatgtgtgcggaggcactggatatgcgtgtgtggggaggacactggatatgcgtgtgtggggaggacactggatatgcgtgtgtggggaggacactgggtatgtgtgtgtgggaaagacactgggtatgtgtgtggggggaggacactgggtatgtgtgtggggggaggacactgggtatgtgtgtggggggaggacactgggtatgggtgtgtggggaggacactgggtatgcgtgtgtggggaggacactgggtatgtgtgtgtggggaggacactggatatgtgtgtgtggggaggacactgggtatgtgtgtatgcggaggacactgggtatgggtgtgtggggaggcgctgggtatgtgtgtgtggggaggcgctgtgtatgtgtgtgtggggaggacactgggtgtgtgtggggaggcgctgggtatgtgtgtgtggagaagcgctgtgtatgtgtgtgtggggaggacactgggtgtgtgtggggaggcgctgggtatgtgtgtgtggggaggacactgggtatgtgtgtgtggggaggacactgggtatgtgtgtgtggggaagcgctgggtatgtgtgtgggaaagtgctgggtatgcaggtatgggaaggacgctgggtatttgtgtgtggggaggtgctgggtatgcgtggccacatcctgtgttctggagctgagtgcacatgtgtagacatgggtgtgtgtgcatttttgtgggtgtgtgggtgtgtaggtatttaggggtctgtgtgtgtgtgtgtatgtgtgcatatgtgtgggaaggcatatgtgtatgtatgtgtatatgtgtgttagggaaatgttaaccctaagacattactagtttataataggaaaaaatccctccaaaaataatactgtacctcaagcctttgtattacaaaaaaaaataaaaggaggagggtgaagttgtgccagtgagtcccggttgctcttcaggggccctggggtggtgtcggccaatagagacaaatgccattggcaaacacctagggtgcctcctacatcacagctgccgatgaacgcgaccttgagtccaatttagaggaagcttttggactctcacatcttacaagttctctcagaggtcacgcct

SEQ ID NO: 14477 - DNA, 1341 bp, Artificial sequence
  DNA replication origin
gagcaggagcttggaggagcagctcccaggaggaagagaagctcacgtggtcagaggtaggtttgtcagaatggagcgaaagcggtgggttcagcagtatctgaaggaagagatcacagctcctgaggctctggacagtggatctaaaaagcctgaggtgtcagagttcacggggttccttgggtaaggtgactgagctgagcttgcgaaggtaacagtgcgtttgatggtaatgctgggtcacaccaaggatagaagcctggggggaccactgaaccctacatctcatgctacggcttgtccctagtgccggctcagcctaaagaaccaggctgcagtgactggggtgtaacactccagcaatctcagaccgtccgtgagcccaagaaaaaccagggtctgtctctccagaaacattcactcacaccccccaagacagcgtgcgtttcagggagcctgtggcatctcaccccagaagcccaagagcacatgggaagctctgccaagggtgggaggcagggggcggtggtgcctgtgtgggctcttgcccactcagtgcatgtggtgggctctggcagtactggggggagtgggtatggtggagagcaggtactggggggagcaaatactgggtggagcaggtattggggaagcgggtactgggtgaagcgggtactgggggagtgggtacttggggaagcgagtactgggggagcaggtactgggggagcaggcactgggggagtgggtatggtggggagtgggtactggggggagtaggtaatggagcagttactgggggagcgggtactgggggaagtgggtactgggggagtgggtactggggagtgggtatgggggttgggtactgggggaagcatgtactgggagagtgggtaatggagtgggcactgggggaccatgtactgggagcaggtactgggggagcgggtactgggggaagcgggtactggggggagtgggtactgacgagtgggtactggcagcagcaggtaatggggggagcgggtactggaggaagtgggtactgggggagtgggtactgggggaagtgggtactggggggagtgggcatcttttgtcatttcctgcactgtcactctattttattctaatatgcattagttgacagatggttttctcctaaatgcaaaagtgcctcagtcctaagaaaagcctgtttactggtaaatattcctaatttgcgtctgaaagggaaatctgcatgaaattgcattaaaatatttgcatcagcccagcccaggcagctctgcattcagcccatctgaggaccccagataagcctttggttggtgggag

SEQ ID NO: 14478 - DNA, 747 bp, Artificial sequence
  DNA replication origin
acacacattagcaaatgtggggacctgaggggagcagccaccatctgggacatggcggcccccgtcacccattgaccgtggttgctgtgggaaacgctcacagtaacgaaagtcatcagacatccgtgaagattctgcgtggcatggtgctgcgcgtaggccagtacatgacaaaggtttaaaatcactgctggcctttagatgagggcctgtgtttggggattcaagagaaggggcattggatgttggggggtgggggggcgcaggatgggctggtggggcagagagcacggccacacgttcctgacggggcccctggagcaggagcttggaggagcagctcccaggaggaagagaagctcacgtggtcagaggtaggtttgtcagaatggagcgaaagcggtgggttcagcagtatctgaaggaagagatcacagctcctgaggctctggacagtggatctaaaaagcctgaggtgtcagagttcacggggttccttgggtaaggtgactgagctgagcttgcgaaggtaacagtgcgtttgatggtaatgctgggtcacaccaaggatagaagcctggggggaccactgaaccctacatctcatgctacggcttgtccctagtgccggctcagcctaaagaaccaggctgcagtgactggggtgtaacactccagcaatctcagaccgtccgtgagcccaagaaaaaccagggtctgtctctccagaaacattcactcacaccc

SEQ ID NO: 14479 - DNA, 1389 bp, Artificial sequence
  DNA replication origin
cgacccagagcccacactcagccatgctgcccccgggactaactgcctggcttgggtggtccttagtagagcgggcggcatcaggcctctctgctcttggtcgcctggagatcccacagccagcaggatgcacccagcctccctgagaaagatagaactggtctggttcctttccctgggtttagggggctggggccaaagagaaaaatggtaggccctgaacactcttcttgtgatggtgggatggacctgctattcaggaaagcctcaactggctcccccaggtccactgtacccaaaggaactggctgcctgaacacatttggtaaaagagattgcgaagccacccaggacactccccgtgtctcagcgtcactaccaggctctcacaagctgatcaatctgagaccacctgagtttgaagcaccagggctgggagtgcaagttccgactatgaagagagggcagcacagagggcgggataggggtggggtggggaggggggcagagggtggaagatgagagggtgggagatagggatgggagagagagcggggcagatggcagggcacagggatagagggcaggagaaagggcagggcagagggtgggagagagggcagtgcagaggataggatgggggggtgggacagggggcaggagggagggcagcacagaaggccaggcagagggctgggacagaaggcagcacacaaggcaggacaggctgcagatgatgctcagaatgcagccaccccacgtccagaacgtcagggcaggaggggacatggagatggtttaacctcacatgcccactttagaggcaggagagtggggtcccggggtgccaggtgtcttgctgaaggttgtgaaataaggatcagtgaaacggtgagaccattccttccacccttgtgtttccctggcatatgtgtcagccagctggtcaacacatgctgcgttagcaaatgctgaaggcagggtcgtccctggcatgaccccctccccataacccacagcccctcttccccagtacgccgtggcagcctgccatccgctctctgctcctctgactaccttcagcaaccctgccttacggtggggatgctggacaggcattcaggagacacaaatgtcaactcctctgtgggttcctgcagcaccgggagaccctggcgcgactcctgagggcttcagtcctcggtttgttccttttaggaggaagccaccggatcgtttcccatgcttaagctcagacgcccacccagcacagcctccgccgcagcctggcagcccaacagaggctggtcatagtttttgccctggaattcccctccttttaccacatttgccacctctggtcccatcttcctttcagggtccaggcag

SEQ ID NO: 14480 - DNA, 1857 bp, Artificial sequence
  DNA replication origin
gcctctgggagggctattgggagggagaccttggcagcagctggccacatgctgaccccactccatgcagagcccagcatagggagtgtggctggctctgggagacctgcactttcaggatggtcctagccctgataaaaattacagagatcttttatacacatgcatggacgtatgtccctgcacagatggccaggagcccctctctgctaactcttacacagtggcttgctgtggctgctctggtttcaagtacccagagacctgggtctactgaagaatcgcttgcagtgtcatgggggagggagttagatttgcagtgtcacggaggggggagggggttatatttgcagtgtcatggtggggaggatgttagatttgcagtgtcatgggggagggtgttagatttgcagtgtcatgattgagagggtgttagatttgcagtgtcacaggggagggtgtcagatttgcagtgtcgtggtggggagggtgttagatttgcagtgtcacaggggagagtgttagatttgcagtgtcgtggtggggagggtgttagatttgcagtgtcatggtggggagggtgttagatttgcagtgtcatgggggagagtgttagatttgcagtgtcgtggtggggagggtgttagatttgcagtgtcgtggtggggagggtgttagatttgcagtgtcacgggggagggtgttagatttgcagtgtcacgggggagggtgttagatttgcagtgtcacgggggagagtgttagatttgcagtgtcgtggtggggagggtgttagatttgcagtgtcacgggggagagtgttagatttgcagtgtcacgggggagagtgttagatttgcagtgtcgtggtggggagggtgttagatttgcagtgtcacgggggggtgttagatttgcagtgtcatgggggggcgttagatttgcagtgttgtgggggagagtgttagatttgcagtgtcactgtggggagggcattagatttgcagtgtcatgggggagggtgtttgatttgcagtgtcatggtggggagggtgtcagatttgcagtgtcatggggcagggcgttagatttgcagtgtcacgggggggcgttagatttgcagtgtcttcggggagagtgttagatttgcagtgtcacggtggggagggtgttagatttgcagtgtcacaggtgagggtgatagatttgcagtgtcactggggagggtgttagatttgcagtgtcacaggggagggcgttagatttgcagtgtcacaggggagggtatgagatttgcagtgtcaagggggagggtgttagatttgcagtgtcacaggagagggcattagatttgcagtgtcacaggggagggcattagatttctgtaacagtgagaatttctaggcttcttcatttcttaatttcagtatttcaatgtcacagagtcaactgtttataactttgcctcttgatggcacaaaaaagagtttgctttgaaagtaaggagcacagaccttataaaatttaataataacactaggaaggggagagaaaagaatctgcactgaggcttcagaaaggagccggggctgagttataaccaagttctgaacaccaccatcgctgacagaccactagatgggaactctgaggatgatgcccagaaggaaatgtgcagagaacatgtccctcaggacctggactggaactcttgacaggggctcatggtcataccaacgggggcctctctgctctcaactgcccatgcagcgacgccttcctccactcaggtcctccctgctctctgctgcccatgcggcgacaccttccaggacctgggtactccctgctcttccc

SEQ ID NO: 14481 - DNA, 1115 bp, Artificial sequence
  DNA replication origin
ggagcctgtcctgggctcggagtgtctgtaattgaagtgatagcagcttttgatacttactggaaatgtcaaatgaagcccagtgctcccttagaaacattggtttaaaacccttacaacgtggagaaaagtggcagaggaagaacaagattgtctgaatggatttagttaaaaacacataaaaagatgaactaccagaaaaataatagggagtcaaaacagatacaaaaacactaaaaggggatggtgtagtgatcaacttgacccttagacacctgcggcctctgtgaacttccatcttcctgaaaggagacaggagcttgacccagggaggctgagccgggccttccatggaatggcacttcctcagcagaggaggcgggggcttcggtgtcctagaggggccttggcgtcagggtagggagcgcttggcctctgggagctttggcatctggggaggacttcagtatcctgggggtggggggcttccttggcatcttgggagggggtttcagcatttgtggaggactcagtctggggatcctccatgttgagggagtctgggcatctggggtgggtgtcttggtgtccagggcctcctcggaaccaacaggtccaggagcagggatggggcggaggtgggggctgaagctggtgctgtgctgagccagcagatgcttcctgtggagacattgttggatttcaagggcaggaagtgattctgttggctgtcactgaatttaaagggtgtagcctttgtctaagtcggccattcagaaaggaccgtctggggcatgggagggggcatgggaagtccctgagaccctctgggggtccgcagagtaagacattttcctagcaaagccccaaagttctttgcctgtttatcctctggtgagattctgcatcgcttccccaggctgtgagatgtgcgaggatgcggcttcgaggctagtggaatgtgtgttgtgtgttcttgggtctcgagaactcctcctttgaattttggagcagtgaatagtggtagctacagttatgaatgcaaaggcttcctggggccaaatttttaagcctgaagatgctgggagcaccaggcccggccctcctgctgtgca

SEQ ID NO: 14482 - DNA, 1412 bp, Artificial sequence
  DNA replication origin
ctgggcgcccactcactcctgctgcacctgccacaactgccggctgatcctgctgctctgatgccccctcacgtctccagcctgcgccccgcactgcgttcgctgcccatcttcctcccaagctcacagtctagctccaggtgcctgctctccttgttctgtgtctgtttctgcacaccctgcggggaggccaggctcacccaagaaaagagtcaaggctgcaccatgaagcctctcgggctgggcagggagtccaggccctgggagccccccagagccccccacagaatgtgcagctagcctcgccagacgcgggcgatggggccgaaccccgcaggacaacttaggaggagtgaagagtggaagagtgcccggtgcagggatgggtgggaggaacctggggtagtgtgcacgcctgagacagggtgggggacacgaagggagacaggcgagggtgggacaggcaagggtgggtagtgtgcatccctgagacggggtgggggacacggggggagacaggcgagggtgggtagtgtgcatgcctgagacggggtgggggacacagggagacaggcgagggtggggagggagacgctgactccgtggtggaacgtgggtaggtgataggctggctccctgagcagcccctcccctgtggtgcagagctgtgggtctaggggtgagggagccatcatctcatctcacgccatggagacacaggtgtggcttctgttcctgtatctctagtaaatgtttccttctgagaaactgggtctgtcagcctctttctcaggcctcttggttccctcagacttgggggtaggtgtgcacaggcctgcctgccaggggacaggaaccccaggggaaataaaggtgatgctcaaacccagaccaccgaatgctctgaacacacttgcttgctttcaggtggaaacattcacagtgtccctgggtacagcagacttcatatcacagagacttccctctccaggacgtgaagatgtccatcaccgagacgtcagcacggcaggtgggagaaagccatgcacacagtgaaggggacggcctccattggcccacagggtgagctatccagttccaggagccacctgaccacagggtgagctgtccagtgccaggaaccacctgaccacagggtgagccgtccagtgccaggaaccaccggacccacggggtgagccctctggctcgagaagtcctcagcgacatctgggggtcctgtgcatgcaccatgttgactgtacccgtgtgcagcttgcacagagtccccagcagctctggggagggctccgtgttcaatatgtgatgagctttcgggaaggacaggagagccgggtgtgagaagcctccttcctagggcctgtgtctctggagtgcacgaggcagatgga

SEQ ID NO: 14483 - DNA, 1019 bp, Artificial sequence
  DNA replication origin
ctgacactgccctgcttggacactctctggacaggagacacctcacccctcacagacatctcattttttcagagctgcatcatcagagcagttgggggacaggagggccaagtctgaggactcagacccggggcagctggtggaagctggggttaagagtggaatacatggccaaaggatccctcctgagggtgagggcgaccgagaaaggaatgagggcataagagcggtgctggagaaatgtaagcaaatccgcatttcgaagcagaaatcgctggtttaaatattctctcctttccctcaccatggaatgcacaaacgcttgaagatgcatgtgtgttagagtctcttccacagaactctctggaaaggccgttccaagagcttcaggtgttcaggttcgtatctgaggctgcaacaggcagagccacttccagtttcctgactaaaaagtgaaagttccagaagcattcctagatctgtggtgtgtgtggtgcacgtgtgctgtgtggtgtgtgtagtctctgtatgtgtgtccatgtgggtggtgcctgtgtactgtgtgtgctgtgtggtgtgtgtggtacatgtgtgctgtgtggtgtgtgtagtctctgcatgtgtgtccatgtgggtggtgcctgtgtactgtgtgtgctgtgtggtgtgtgtaatctctgcatgtgtgtctatgtgggtggtacccgtgtactgtgtgtgtgctgtgtggtgtgtgtggtgcacgtgtgctgtgtggtgtgtgtagtctctgcatgtgtgtctatgtgggtggtgcctgtgtactgtgtgtgctgtgtggtgtgtgtgtggtgcacgtgtgctgtgtggtgtgtgtagtctctgcatgtgtgtctatgtgggtggtgcctgtgtactgtgtgtggtgtgtgtgtgtggtgcacgtgtgctgtgtggtgtgtgtagtctctgcatgtgtgtctatgtgggtggtgcctgtgtactgtgtgtggtgtgtgtgtgtggtgtgggttgtggtg

SEQ ID NO: 14484 - DNA, 1060 bp, Artificial sequence
  DNA replication origin
aaagatagctgtcatgccaggaatcgttatagatttcgtcaaatttcagaggtatatgtaattatgaaaagccataaacacagtagtttccatgaaaaactatgagtaggtatggaaaataaaacagatgcaagggtaggaaccacagctaatagtccatgaatctaataattagttaactgattaacgaaatgcatattcattaagcacacctgtagagagcctattgcgtacaggtgccgttccagcaccggggactccctggtgtgacccacaggtagggtggctgtgccccatgaagcttgcatggaactcaccatctgtggtggcactgatccaaattcaatgaacaaggtgatttctgatcagggctctgagctctgcgtcaagtgggaggggttaatgtgctctggagtgacaggggtgggaggggtttatcagagatctgggagccaggaaaggtctcctgaggggatactcaagctgatgcctgaatgccaagagccacctgggcaaatgtgggattgtgcctggcaggtggagggcccagagcgtgcaaggccccaggtgggatgacgtgagtgtgttcatggagtagtgtacaaggccccaggtgggatgacgtgagaaggccccaggtgggatgacgtgagtgtgttcatggagtagtgtacaaggccccaggtgggatgaattgagcatgttcagggagcagagagaatgctgctctgtccagtacctgtgagcaggggaggtgggggcgggaggaagtgagaggtaggatctggtaccatctcgagaggctgcagcagggacacttgaagatctagtgacacctaagagctccctgttgctgctgctgggggagcaggaagggggatcaccctgacaagactggtggcagctgggacaagagtcgtggctgaggaggagggaaggaggtcagcttcccgatgtgtctgtgggccggcaggactcaccgccgcaggcagcaggctcaggcacctttggtaactaggcccacaacagatcctgaactccctgtacgtcgcatgcacat

SEQ ID NO: 14485 - DNA, 1623 bp, Artificial sequence
  DNA replication origin
ggccgacagtgaggggcaggaggccagtggctgaggcagggcctagtgcagaagtcaggggcagacgtgagtattgggctcgccacgtcctgtgactagggagcttctgcaggtctttagaagcggttggtgggataagagcccatgtcggggatgagctgcatgtggggagagctggagtcagggagaaaagtgaacagcctcaccgcgtggtcagctcgtggctgctgagcacagcccggtgtcagagagcaggactgagagtcagcttcatggagggcgcggcgggaacagcgccagcccccagcacccagcaaccatcactcaccactcacagggcccctggcattcacaccctggcctaggtttgggaaccttccagccagaaccggtgccgctggcttgggtggagcctggcgtgggatggggtggagcctggcgtggggggggtggagcctggcgtggagcctggcgtgggatggggtggagcctggcgtgggggggtggagcctggcgtggggggtggagcctggcgtgggattgggtggagcctggcgtgggatggggtggagcctggcgtgggatggggtggagcctggcgtgggatggggtggagcctggcgtggggggtggagcctggcgtggggaggtggagcctggcgtggggcggtggtttcaggtgaagaggactcaggcagggacgctggtttacacaaggtcattgttacctggacaactccctgagaatgatgagaaaatatgagccagaataaagaaggctgctgggttcccggctgtctccatggctaatgaaatgccattttccttcttggtgcttggctgtgcaagtgcaccctgtcaggcagattctccatctcacgggccccctgcgagtcaggaagagatgctcgcggcgctgggtgagccggctcctcctcagggattccagggaggctgcagggcttactgtgccgcagtttcagcaacagccccagaacatccgtgtgtccaggcaccaggacactagcgctgttggctcacacagccagacccacagcttttgagctgatgaactgcattacgtccagacaatttccacttaacagttgtccgtaacgctcctccctgggccagcagccacatgagaacaactcagcacagggattccagggactgggtcggcagcacggtctcaagcctacactcacaagctcacgtgtgcacacacacacgctactcctccggggcatgcaggcagcgtccctgagaatccctgcctcagactcactcccagggctggtggacacatgtgggcgggggcgggggaggccacagccctgaaagtcatgggttcaggtttcagctgtgtcagaagcacctggaagctggggtgggatgtgatcagcaccctcttcgtctctgtgactcggggttttgggggagaccccgcactctgcattcccctcctcatctctatgactcggggtttaggggggaacccagtactctgcattcccctcctcatctctatgactcggggtttaggggggaccctgcactgcattctcctcctcgtctctgtgactcggggtttgggggggaccctgcactctgcattcccct

SEQ ID NO: 14486 - DNA, 1197 bp, Artificial sequence
  DNA replication origin
tgtgcagtgagtagaaaacacacttgctgtatctacacagagaagtttaaaagaacagaagaaggacagaggcttcaggaccacagtgatggatctgaggggggcctgaatcttaaaccctatccgtatagtctccaagcagggatcatatatggtataactacattttcatctctaatcactggggcggcatgtcagtatcttctctttctttcccattttgagtgacatagtgtgatatgtctaatgacaactagaacaaattctggtaatgaggtcaccttgggccaggatgactgtctgacggctgttttccatagaaattacttgtgaaggcacaccacacacacagaatggcttcctccaagtgtaggtgtcaacaggcaaatatgctaaactcgcaagatggaagtggcttgcccggtctctctagtttagaccgataaattggtctacattgagagagctgctgcttttttctaaaaaaagagtgattggttgtgattatttagtttcctccaggtgcacgctttttatgtggaatgcactggatggcttaaatgcaagtagggcccaaacatctgatgtcactttgttaaagggagtgttgagtgagcacagtcgacgctcccagaattgtggagaggatggctgcaggagaaagctgtcagtcaaggcccatgaaccaagaggagtgctagagaccaccacctgcaggtgggatttggaaaaggggaaagaagtgtgggcgctcagccaggggagtagcaccgggtggggagcagcacggggtggggaagccaggaggcctctacacagagagcctgggcctgaggccgacagtgaggggcaggaggccagtggctgaggcagggcctagtgcagaagtcaggggcagacgtgagtattgggctcgccacgtcctgtgactagggagcttctgcaggtctttagaagcggttggtgggataagagcccatgtcggggatgagctgcatgtggggagagctggagtcagggagaaaagtgaacagcctcaccgcgtggtcagctcgtggctgctgagcacagcccggtgtcagagagcaggactgagagtcagcttcatggagggcgcggcgggaacagcgccagcccccagcacccagcaaccatcactcaccactcacagggcccctggcattcacaccctggcct

SEQ ID NO: 14487 - DNA, 1340 bp, Artificial sequence
  DNA replication origin
gctgtctgctcaacaggcatgaggagcagtcccacagtgcaatgaggccggcacgggggcccagggagggctcggccccaggtcccctgacgtggggtgtctgccctccccaggaggacggggttgggggcacatctgatggggcctgggtcatgcctgccagttctgcacagagctgcctcctgagtgcccacgtgccctgcggggctgcctggcggctccatttgctctgtgtctgtggagcaactgcgcccctgggcccgcctggcctgggctcccactgaggtcacagcacctgggtcattcagctccaaggatggggcaggccccacagggcaggaccccctccagcagttcctgcctgtcctgggaaggccacggagacagacccttgacttcaggacagggggctgctctttccataaatccccctggctggcgcctggagcccaggttcctcccacacagccagtcattcctgccatccacactggccctgcaagggctggaagggccacaggtgggcctcactcaagagggaaggaccagggaggagaagggagccacattagcctggctgggtgggcaaagccacgtcagcagccagaatgtccctgcagataaacgtggggggaggcatgacagaaagccgggtttctacagaaagaggaggccagggaggggcagagcctggggggaggagtgcagggaggggcaggcagagaccagtgggtcatagggaccctgtggagcccccagaccagcccctgcacagaggagaggaatgtggggccggaggaatggagtgcaggggagatgagtgcacgggagaggagtgcaggggagtggagtgcagggctgggggagagtagtgcaggggagagtagtgcagggcagggggagaggagtgtggggctgggggagaggagtgcaggggagaggagtgcagggaggtggggagaggagtgtggggctgggggagaggagtgcaggggagaggagtgcagaggagaggagtgcagggtggggggagaggagtgcagggtggggggagaggagtgcagggtggggggagaggagtgcaggggagaggagtacagggcgagggggagaggagtgtggggctgggggagaggaatgcagggcccgggaaaaggactgcagggccaagggagaggcccagggcccgggctgcagcctggcttcagcttttacccggcagcctcagagctctacttttaattaagtgccttaccaaataattaatttgtactcctctgtggaataggaaaagagccatgaaataattaaagaattaaaacactagctcagagccagga

SEQ ID NO: 14488 - DNA, 1492 bp, Artificial sequence
  DNA replication origin
ctttcacgtgttgggtgattccagctgagaaccctctggcctgaaaccaagcatggccctggggcttttaaacccttctcttacgggccttggcaattgtttttgaagtgatcactttaaccttttgttttaatcctctggttattcccctgactggggaatgcaacctgagaagcatcctttggcaaaagagaagttttattagtgaggcaagcagttaattaaaaaaataaaaactaggttgggcaaggtgactcatgcctgtaatcccagcacttcgggaggccaaggcgggtggatcatttgaggtcaggagttcaagaccagcctggccaacatggtgaagccccatccctactaaaaatacagaaattagccgggcatggtggcactcacctgtaatcccagcttctcgcgaggctgaggcatcagaatcacttgaacctgggaggtggaggttgcagtgagctgagatcctgccattgcactccagcctgggtgacacagtgagactctgactcaaaaaataataatgaaaaataaaaaaaaaaagtaaaaataaaaaccagaggccaaagttcatcaggtaaacatctgagatcaagtgtggtatgtcggagctgcgaaccccagtctgcaccccacctttgagtggctgagatttaataaagtgcagtgaagtctcagacccacacccccaccttgatgtttccagttacggaactcgttatcaggtgggccagggactcgcggagaacagctgcagacagcacctcttccccctggtctcgtcgtgtggacgagtctcccgatgacaggtttcctggaggcctcatctccggtgggtgccagcaagtccagccagggagcaggtcccagaactcaggttcccaggccaagctttcccctgcctgtgttggtggaaaacgcagggtaagtgggcaagagtgagagaacacaaaagccttcagccgggtctttattgggctgctttatctttgtgtagctccgtggcacgtgaaaacgagagcgtctgaggttggtgagaaattcgggcagcacacggtgctcagtcaccatgaaactaatttcacattgggagctgagttgtgaaaacggttttgctgtttatttaaaggagatgagagtggacaagccgactagaaccccctgatggcttgagcgagggagaaggagggtttgtgttcaggcaactaaatctgccttctcttcttttaggctggaaataaaagccggtcagtgcaggggtgtgaggggctggctgtgggttctctggcatgaggctcacgtttacaggaggtcctcttggtgggcatagtgtaggggccagggcggacccctacggccgctcggaggaacagccaggatcggacccgggaccgccccacactgtcagcactgtaggggtcactgttgctgcagctcacagtcccctggcccccggatgcctcgcaccccgcacaaagatgac

SEQ ID NO: 14489 - DNA, 1083 bp, Artificial sequence
  DNA replication origin
gggaacctgagttctgggacctgctccctggctggacttgctggcacccaccggagatgaggcctccaggaaacctgtcatcgggagactcgtccacacgacgagaccagggggaagaggtgctgtctgcagctgttctccgcgagtccctggcccacctgataacgagttccgtaactggaaacatcaaggtgggggtgtgggtctgagacttcactgcactttattaaatctcagccactcaaaggtggggtgcagactggggttcgcagctccgacataccacacttgatctcagatgtttacctgatgaactttggcctctggtttttatttttactttttttttttatttttcattattattttttgagtcagagtctcactgtgtcacccaggctggagtgcaatggcaggatctcagctcactgcaacctccacctcccaggttcaagtgattctgatgcctcagcctcgcgagaagctgggattacaggtgagtgccaccatgcccggctaatttctgtatttttagtagggatggggcttcaccatgttggccaggctggtcttgaactcctgacctcaaatgatccacccgccttggcctcccgaagtgctgggattacaggcatgagtcaccttgcccaacctagtttttatttttttaattaactgcttgcctcactaataaaacttctcttttgccaaaggatgcttctcaggttgcattccccagtcaggggaataaccagaggattaaaacaaaaggttaaagtgatcacttcaaaaacaattgccaaggcccgtaagagaagggtttaaaagccccagggccatgcttggtttcaggccagagggttctcagctggaatcacccaacacgtgaaagccgtggagaggccgggatgaaagcacctggtcaccactaacgccctgcacacctttccttcttcctcctcctctttatttcttaacaggaagctgcctgacatttcggctttgaggtctactgggaagcatgactgaagttggggtgcagggtgggggctggtgtccggccgcaggtggggagcagggtgg

SEQ ID NO: 14490 - DNA, 1854 bp, Artificial sequence
  DNA replication origin
aattaactgcttgcctcactaataaaacttctcttttgccaaaggatgcttctcaggttgcattccccagtcaggggaataaccagaggattaaaacaaaaggttaaagtgatcacttcaaaaacaattgccaaggcccgtaagagaagggtttaaaagccccagggccatgcttggtttcaggccagagggttctcagctggaatcacccaacacgtgaaagccgtggagaggccgggatgaaagcacctggtcaccactaacgccctgcacacctttccttcttcctcctcctctttatttcttaacaggaagctgcctgacatttcggctttgaggtctactgggaagcatgactgaagttggggtgcagggtgggggctggtgtccggccgcaggtggggagcagggtggggctggggtcgggccgcaggtggggagcagggtgggggctggtgtccggccgcaggtggggtgcagggtgggggctggggtttggccgcaggtggggtgcagggtgggggctggggtttggccgcaggtggggagcagggtggggctggtgtctggccgcaggtggggtgcagggtgggggctggggtttggccgcaggtggggtgcagggtgggggctggggtttggccgcaggtggggagcagggtggggctggtgtctggccgcaagtggggtgcagggtgggggctggggtttggccgcaggtggggtgcagggtgggggctggggtttggccgcaggtggggagcagggtggggctggtgtctggccacaggtggggtgcagggtggggggtggggtttggccgcaggtggggtgcatggtgggggctggggtttgaccgcaggtggggagcagggtggggctggtgtctggccgcaggtggggtgcagggtgggggctggggtttggccgcaggtggggtgcaaggtggggctggggtttggccgcaggtctggtgcaacgtggggctggggtcgggccgcaggcggggtgaagggtgggggctgggatctggccgtaggtggggtacagggtggggctgaggttcggccacaggtagagagcagagggccttctcccacaggcctgctcttggctgtgcatgtcacagaggggaccacactccacactcacagcaacccagaggtagagttcacgtgcaaagaatgggaagctggagccttaaataatttgcctaagttcaggcagcagcaaaagccagagccagaatctggaagcaggtacagctgattccaaacctacctcctatacccatgacccctcaggaccacagggcctgagtccacggctggggacgtgcacagcagggggacctgaggaccgggagggcggcacttcagcctcacgggcgctcccaccatgcagacagacgcaggcagtgtagtagatggtaaaacggccgaaaaccatcagcagcctcaggaccgccctgtcatgatgccaactcccaatccgtgctgagagcccggcactgcctcagggagattagcaaacacttttcatctgtttatacacaaacagcaggcatgggcccgctggccttccaggaacatgagtctgcgtgactggctgttgtgccctcacccggaaccgtgccaggcaccgaggaggtgctcagtaaactatggggttgcatcgtatttgaggtcatccggaggcacccgctgctgcactgggactcctggagatcctcctccagccggaagctggccaagctgtctccaggtcctgggatcacgttgtttcagtggagacgatggccgccagcttcagattcagaaatggcacttagtgcctcttcccttggagtcacct

SEQ ID NO: 14491 - DNA, 1482 bp, Artificial sequence
  DNA replication origin
ccatcagcagcctcaggaccgccctgtcatgatgccaactcccaatccgtgctgagagcccggcactgcctcagggagattagcaaacacttttcatctgtttatacacaaacagcaggcatgggcccgctggccttccaggaacatgagtctgcgtgactggctgttgtgccctcacccggaaccgtgccaggcaccgaggaggtgctcagtaaactatggggttgcatcgtatttgaggtcatccggaggcacccgctgctgcactgggactcctggagatcctcctccagccggaagctggccaagctgtctccaggtcctgggatcacgttgtttcagtggagacgatggccgccagcttcagattcagaaatggcacttagtgcctcttcccttggagtcacctcgggtgacatggggtggcccccatggccagcactgaccagctctgccccccaccgaggcgggagccacatctcaccaccaaatgcccttttatgggaactgaggtgcaaagcgggggcttgaggcaagcagcccccgcgggaaacacggcgtggtcatcaggcgagtgctgccttagagacccgccccctgcagaggctgtgctctggatggtcactcactcacccctttattaagagttggttctacggaggatgagagaggcagggacgtgttttgggagaaggtcatatgaaaaattagtgccacagagtttcggcccctaaaaagcttccagtttcacggtgaggggaaatgttgtaaactaaaacctctggtggggagagtcacttttgttgcccgaatccccagtacagtggacggcgcctcgtgagccggatggcaacctggccagcatgcagtgaaggaacaacggggccaaatgccgcaggtgtggatgagggagaaaacaaaagctcccactgcgcccctccctccctggagcttagggttcatctgaggggtgaagaggaggatgtgaaggacaccacgggggtcagggagcctgggaaatgtccaggaatcctggggccggggcctgctccctggaagcagatctgaggacgtttcgggcaggtcagctgcagcgagagaaatggacttgccggggaggaactcccggctgcctcaaagctcagcaggtccacggagcaggagccacacaaggctcttcaacaagccccgtgaggtggggagctggcctggaccaccctggcgtggacacggctgggctggatctcatctgtggaactcctggcaggagatggagtgccctggtcctggccggggtttggcagcacaagtgggggtctgctacaggccgcttggatccaggggaggaggaaagagcacaggagagggcaggagatgtttggcttctgtcatgagctgacctgtgtcccccaaaatccacaggggaagccctgaaccctcatgtgactgtacttggggacagggcctctaaagaggtaaagg

SEQ ID NO: 14492 - DNA, 1338 bp, Artificial sequence
  DNA replication origin
aaaccccatggacaccccagctccatcatgcggtcatgacattttggaccaggagggcctcctgtgtggtcctctggcgggaagcctgctagtctccctagggctgccctaacaagcctcacagcctgagcggctcaaacaacagaaatgtactccgtcacagttctgggggctgaagtctgaggtccgggcttcggtttctcctgagactgcgcaggctggcgggcggccgtctcctcctgtgtcctcacgtggcttcttctccagtgtctcttctttcaaggacaccagtcctgctggagccaggcccaccccacgacctcacataacctcaatcgcctcctgaaagacactttctccaaatacagtcgccttatgcggccccgggtgttggcgcttcccaggtgaacttggggaacacacgtcagcccatcccaggtggagctgcggcagtgcggggtgtggctggtgctgggggtgggcaggaagggtaagcaggggacgagggatcagaggcaggaggtgtcctggccctaacatttcctttgcttctcgtaaacctcacctgagcccacccaacaccaaggccacatcaaggagagaggacaaggggagagtgatcacagggtgtgacagtgatggaggggacccagacgcagggactacggagggcagtggggcctcacagggcacctcccacagggagcagagagcggacgatggccggtggtgatgagatgtggccctgctgtggaggaagcgccaggtgcatctgatgaaggcatgaagacacagaaggggacaggaaggggctagaaagaaaagtatcacagtcagcctggtccctatgctgtgtgcacgtgcatgtgtgtgtatgtatctgggtgtgtgcattgcatgtgtgtgagggtgtgtgtggctgtgctatgtgtgagggtgtgctgtgtgtggctgtgtgtgggtgggtgtgctgtatgtgtgtgggtatatacatgtgggggtgtgtgggtgtgtgtgtgctgcatgtgtgtggatgcatgcatgtgcacgtgtgtgtatgtatctggttgtgtgcattgcacgtgtgtgagggtgtgtgtggctgtgctgtgtgtgggggtgtgggtgtgtaggtgggtgtgctttgtgtatatgtggggtatgtacttgtgcacgtgtgagtgtgtgtgctgtgtgtgggggtgtgggtgtgtgtggaggtgtgctgtgtgtgggtgtgctgtgtgtgggtgtgggtgtgctgtgtgtgggggtgtgctgtgtgtgtgggtgtgtacatgtacacatgtgtgagtgtgtgtgggtgtgctgtgtgtg

SEQ ID NO: 14493 - DNA, 1087 bp, Artificial sequence
  DNA replication origin
gattcaacgtggagtagaaatgaggcacagactggcactctgcagtgctcatgaagaaaggtcagctgaccgcctagaccccctgggtatctggagctgaattgtttccctctgctctatctgagcctctcatttcagcaacccacttttatctgagggatttgcaagatacaagggaagaaaaagagagacaaatgagagagcaaaaagggaaaagatgatattcaggagaagttcttattctcttaaaaattaggaaatgaaagtaagcttttgcactaaaaatacttgataaaaacaatcaaatcttttttgaaacaagaggaaagacagatggagataggtaggggatggatggatgaatgaacaggtgaatgggtgggtagatggatggatgtgtggtggatggatgtgtgggtatatggacgggtggatggatgaatgtgtggagggatggttggttgggtgagtagatgaatgggtgaagagatggctggctggctggccggatgggtggatggatggatgaatggagggacagagggagaaatggatgggtaaatagatggatggatgatgaatgatggatgatggatatggataggtgggtggatggatgagggatgggtggaaggaggaatgaacgggtgaatgggtgaaaagatggctggcttcctgaatggatgggtaggtggatggatagatgggtagttggaaagatgcgtggatggagggatggatgactggatgaacaagtgaattgtttgatggatgggtagatggatggagggatggatgaatagatgagcaggtggattgtttgatgaatgggtggatggatggacgaacaaacaggtaaagtgatggatgtatgggtgtgtgggtagatggatgctgaatgatggatgagggatggatgggtggatggatgctggttgatgaatgcatagatgagtgaatagatgggtggatggagggatggatggatggacaggtgaatgggtgaatagatgggtggctggctggatggatgcatagacaaatgacggatggggtagatggatggatgaataggtgagttggtgga

SEQ ID NO: 14494 - DNA, 2598 bp, Artificial sequence
  DNA replication origin
taggcaaaggtaatgaatgcaatgtctctagcaggctgcctggtgtgcagtggacactctgtcaaccatttctgggtgacacctgctgtggggataatgagacctccagaaagttatggtcaaaacctaacccctgctacctgtggatttggccttatttggaaataggatctttgcagatgtcaataagaggaggtcagactccatgagggtgggtcccaatccaacatgactgtgtccttagcagaagaggggatcacctcgtgaaggtacagacacagagagcggccatgcgcagacagagacggagaggtgccgccacagccgtgggagctggggagaaagcaggttacacacacacggcgagacagtgagacctgtgatggcggccgctgggggctgcatgggagatgggggagtttctaccctgcactgatgtgtcaccgtgtgcagatggagcgtggctgcagtgatgtgtcactgtgtgcagatggagtgtggctgcagtgatgtgtcaccgtgtgcagatggagtgtggctgcagtgatgtgtcaccgtgtgcagatggagtgtggctgcagtgatgtgtcaccatgtgcagatggagtgtggctgcagtgatgtgtcaccgtgtgcagatggagtgtggctgcagtgatgtgtcaccgtgggcagatggagtgtggctgcagtgatgtgtcaccgtgtgcagatggagtgtggctgcagtgatgtgtcaccgtgtgcagatggagtgtggctgcagtgatgtctcaccgtgtgcagatggagtgtggctgcagtgatgtgtcaccgtgtgcagatggagtgtggctgcagtgatgtctcaccgtgtgcagatggagtgtggctgcagtgatgtctcaccgtgggcagatggagtgtggctgcagtgatgtctcaccgtgtgcagatggagtgtggctgcagtgatgtctcaccgtgggcagatggagtgtggctgcagtgatgcgtcaccgtgggcagatggagtgtggctgcagtgatgcgtcaccgtgggcagatggagtgtggctgcagtgatgcgtcaccgtgtgcagatggagtgtggctgcagtgatgcgtcaccgtgggcagatggagtgtggctgcagtgatgtgtcaccgtgtgcagatggagtgtggctgcagtgatgtgtcaccgtgggcagatggagtgtggctgcagtgatgtgtcactgcagatggagtgtggctgcagtgatgtgtcactgtgtgcagatggagtgtggctgcagtgatgtgtcactgtgtgcagatggagtgtggctgcagtgatgtctcaccgtgggcagatggagtgtggctgcagtgatgtgtcaccgtgggcagatggagtgtggctgcagtgatgcgtcaccgtgtgcagatggagtgtggctgcagtgatgcgtcactgtgtgcagatggagtgtggctgcagtgatgtgtcactgtgtgcagatggagtgtggctgcagtggtgtctcactgtgggcagatggagtgtggctgcagtgatgtctcactgtgggcagatggagtgtggctgcagtgatgtgtcaccgtgtgcagatggagtgtggctgcagtgatgtctcaccgtgggcagatggagtgtggctgcagtggtgtctcactgtgggcagatggagtgtggctgcagtgatgtgtcaccgtgggcagatggagtgtggctgcagtggtgtctcactgtgggcagatggagtgtggctgcagtgatgtctcactgtgggcagatggagtgtggctgcagtgatgtgtcaccgtgtgcagatggagtgtggctgcagtgatgtctcactgtgggcagatggagtgtggctgcagtggtgtctcactgtgggcagatggagtgtggctgcagtgatgtctcaccgtgtgcagatggagtgtggctgcagtgatgcgtcactgtgtgcagatggagtgtggctgcagtgatgtctcaccgtgggcagatggagtgtggctgtagtgatgtctcaccgtgggcagatggagcgtggctgcagtgatgtgtcaccgtgggcagatggagtgtggctgcagtgatgtctcaccgtgggcagatggagcgtggctgcagtgatgtgtcaccgtgggcagatggagtgtggctgcagtgatgtctcaccgtgggcagatggagtgtggctgcagtgatgtctcaccgtgtgcagatggagtgtggctgcagtgatgtctcaccgtgtgcagatggagtgtggctgcagtgatgcgtcactgtgtgcagatggagtgtggctgcagtgatgtctcaccgtgggcagatggagtgtggctgcagtgatgtctcaccgtgggcagatggagtgtggctgcagtgatgtgtcaccgtgggcagatggagcgtggctgtagtgatgtctcaccgtgggcagatggagtgtggctgcagtgatgtctcaccgtgggcagatggggcgtggctgcagtgatgtgtcaccgtgggcagatggagtgtggctgcagtgatgtctcaccgtgggcagatggagtgtggctacagtgatgtctcaccgtgggcagatg

SEQ ID NO: 14495 - DNA, 2566 bp, Artificial sequence
  DNA replication origin
aagagagtacttcatgaggatttgccatggcatctttcccactccaggcattcgtgggatgcccaggcacgcaaggccaatggacatcttgagtgagcaatggcaaccaacaacttataaactgctcagactttacattttgctctcacatcaaattattcccacttcatttgatctgaatgcagcctcgcggagtgtaactattggccctagctgacagagaaggcaccctgaggtttgaaaacagtcaatgagtcgtccaaagtcacaaaacaagcaaatagctgggagggtgctgtgaactcaagttctaaactccaagctcttgtttttccttcttccattttgccaacctcaggtgccatgaagtggcacagaacatccaggcagggctggagaggctgatacctgacctagattggtgcctaatccatggggcactgcactatggccaacacagcagacatccaaaagcagggactgacctagagtaaggaggctccattgccctcagcttcagtaggtaagcagccaactgctgtagaggtgctcatggtgatggaggtgctcatggtggaggtgctcgtggtggtggaggtgctcctggtggtggaggtgctcgtggtgtggaggtgcccgtggtggtggaggtgcccctggtggtggaggtgcccgtggtggtggaggtgctcgtggtggtggacgtgctcgtggtggtggtgctcgtggtggtggaggtgcccgtggtggtggaggtgcccgtggtggtggaggtgctcctggtggtggaggtgcccgtggtggtggaggtgctcctggtggtggaggtgctcctggtggtggaggtgcccatggtggtggtggaggtgcccgtggtggtggaggtgcctgtggtggaggtgctcctggtggtggaggtgcccctggtggtggaggtgcccatggtggtggaggtgctcctggtggtggaggtgcccgtggtggcggaggtgcccctggtggcggaggtgcctgtggtgtggaggtgcccgtggtggtggaggtgcccgtggtggtggaggtgctcatggtggaggtgcccgtggtggtggaggtgcccgtggtggtgaaggtgcccgtggtggtggaggtgcccatggtggtatggaggtgcccgtggtggtggtggtgcccatggtggtggaggtgcccatggtagtggaggtgcccatggtgctggaggtgctcctggtggtggaggtgcccgtggtggtggaggtgctcacggtggaggtgcccgtggtggtggaggtgctcatggtggtggaggtgctcgtggtggaggtgctcttagtatggaggtgctcatggtggtggaggtgctcgtggtggtggaggtgcccgtggtggtggaggtgctcgtggtggtggaggtgcccgtggtggtggaggtgctcgtggtggtggaggtgctcgtggtggaggtgctcttagtatggaggtgctcatggtggtggaggtgctcgtggtggtggaggtgcccgtggtggtggaggtgctcgtagtatggaggtgcccgtggtggtggaggtgcccgtggtggtggaggtgctcgtggtggaggtgcccatggtagtggaggtgcccatggtggtggaggtgctcgtggtggtggaggtgctcatggtggtggaggtgctcgtggtggaggtgctcgtggtggagttgctcctggtggtggaggtgctcgtggtggtggaggtgctcgtggttgaggtgctcgtggtggtggaggttctcatggtgcaggtgctcctggtggagatgctcgtggtggtggagatgctcgtgatgatggaggtgctcctggtggtggaggtgctcctggtggaggtgctcctggtggaggtgctcctggtggaggtgctcgtggtggaggtgctcgtggtggtggagatgctcgtggtgatggaggtgctcgtggtggtggaggtgctcctggtggaggtgcttgtggtggaggtgctcctggtggtggaggtgctcgtggtggtggaggtgctcatggtggaggtgctcgtggtgatggaggtgcttgtggtggtggaggtgctcctggtggaggtgctcgtcgtatggaggtgcccgtggtggaggtgctcgtggtggtggaggtgctcgtcatatggaggtgctcatggtggaggtgctcctggtggaggtgcttgtggtggaggtgctcctggtggtggaggtgctcctggtggaggtgctcgtcgtatggaggtgcccgtggtggaggtgctcgtggtggtggaggtgctcgtcgtatggaggtgctcatggtggaggtgctcgtggtggtggaggttcccgtggtggtggaggtgctcgtggtggtggaggtgctcgtagtatggaggtgctcatggtggtggaggtgctcatgtaggatctaaatgccattcagttgaaccttttggttctgctgaccagcgtgcatttaacccactcatcctcacccaaggactcttgtccaataatgcaaatacgtagaatgctgtcctggccgataagtccgaggcct

SEQ ID NO: 14496 - DNA, 2567 bp, Artificial sequence
  DNA replication origin
caaacaattggatctcaagccttgtaagctccagtgctcccatcctctctacagtataaaattgaaaaatgtgaagaagataataaggttattgatgtgtgtgaaagcgcttcaacacagatgctaggcagtcgatgatcctgttcattcgcagattctgtatttgcaaattaatttgtaacccccaaatcaatgcttatgccaaagtcattcctgcacacacacagagccataaagttcaggttgcctgacatgcctgtgctcaggtgggagaggacagctccgccttctcgtttcagctcatactgtaaaacaaggctcctctttatggtctattgagtgccacattttccacattttttgtgcttttcgttggtggttttgttgtttaaatggccccagcacagtgctgagtgctgactggtgttcctagtgttgtaactggctcaagtccagctgtttgccactcagaggccgaaaacatgagagtgaggtgtgggcagaggaaagcagttattaatcaaacgctggcagctggggaatggccaggctcatgcctttaacagaccattccccctttgtggctgagtgaggggtttaaggaggaaaaggcatggagctgtgtggagtggtgcaggcggacgccaggctgtgtgtctgttctgatggttatctcatcgtgcagaggcctggtttctatcattgtggcttcagcctgggagcggtgggctacctgttcctaactccccctcagcagaggattctgcagctcagtctctctgcctgttctgtttgaaaattggcccctggaatttctaagcaggtctgtaattagataggtgagcactgtgtaaggagcgcctggtggagaagggagccacgaagaatttcacagtatgcttcaaagccaaagcaggaatgggaaggaagtgctctgtgtgtgaggccgggacacgtggttacaatgtgcctgacggagaaaacacccatgtggatgggcgtcgtgtgtgtggatgggcgtcgtgtatgtggatgggcgtcatgggtgtggatgggcatgtgtggatgggcgtcgtgggtgtggatgggcgtcgtaggtgtggatgggcgtcgtgggtgtggatgggcgtcatgggtgtggatgggcatcgtgggtgtggatgggcatgtgtggatgggcgtcgtgggtgtggatgggcgtcatgggtgtggatgggcatgtgtggatgggtgtcgtgggtgtggatgggcgtcgtgggtgtggatgggtatctgtgtggatgggtgtcatgggtgtggatgggcgtcgtgggtgtggatgggtatctgtgtggatgggcgtcgagggtgtggatgggcgtcgtgggtgtggatgggtatctggatgggcgtcgagggtgtggatgggcgtggtgggtgtggatgggcgtcatgggtgtggatgggcatctgtgtggatgggcgtcatgggtgtggatgggcgtcgtgggtgtggatgggtgtcggagtgtatgggcatccgtgtggatgggcgtcgtgggtgtggatgggcgtcatgggtgtggatgggcgtcgtgggtgtggatgggcatgtgtggatgggcgtcgtgggtgtggatgggcgtcatgggtgtggatgggcatgtgtgaatgggcgtcgtgggtgtggatgggcgtcgtgggtgtggatgggtatctgtgtggatgggtgtcatgggtgtggatgggtgtcgtgggtgtggatgggtatctgtgtggatgggcgtcaagggtgtggatgggcgtcgtgggtgtggatgggtatctggatgggcgtcgagggtgtggatgggtgtggtgggtgtggatgggcgtcatgggtgtggatgggtgtggtgggtgtggatgggcatctgtgtggatgggcgtcatgggtgtggatgggtgtcgtgggtgtggatgggcgtcgtgggtgtggatgggtgtcggagtgtatgggcatccgtgtggatgggcgtcgtgggtgtggatgggcgtcgtgggtgtggatgggcgtcgagggtgtggatgggcgtggtgggtgtggatgggcatcgaggatgtggatgggcatcatgggtgtggatgggcatcaaggatgtggatgggcatcgtgggtgtggatgggcattgtaggagtgtatgggcatccgtgtggatgggcatcgtgggtgtggatgagtgtcggagtgtatgggcatctgtgtggatgggcatcgtgggtgtggatgagtgtcgtgggtgtggatgggcgtggtgggtgtggatgggcgtcgtgggtgtggatgggcgtcgaggatgtggatgagtgtcgtgggtgtggatgggcgtcctgggtgttttctccccgagagctgtaatattaggtgcagtacttgctcctaagagactctgcagggctctaggcatctttgttttactttttatttcctgattagtacagaaattccccttttgatgctggcaatatgcacatgggatttattcaattttccccaaatgtctaaagagacagaaagctgaacaagatggcagagacaaccaaggct

SEQ ID NO: 14497 - DNA, 884 bp, Artificial sequence
  DNA replication origin
gaggaaggggaggcagccgggatgtgttggggggaggaaggggaggcagccgggatgttgggggaggaaggggaggcagccgggatgtggggggaggaaggggaggcagccgggatgtgttggggggaggaaggggaggcagccgggatgttgggggaggaaggggaggcagccgggatgtggggggaggaaggggaggcagccgggatgtgttggggggaggaaggggaggcagccgggatgttgggggaggaaggggaggcagccgggatgtggggggaggaaggggaggcagccgggatgtggggggaggaaggggaggcagccgggatgtggtgggaggaaggggaggcagccgggatgtggggggaggaaggggaggcatccgggatgtggggggaggaaggggaggcacccgggatgtgttggggggaggaaggggaggcagccgggttgtggggggaggaaggagaggcctccgggatgtggggggaggaaggggaggcagccgggatgttgggggaggaaggggaggcagccgggatgtgttggggggaggaaggggaggcagccgggatgtgttgggggaggaaggggaggcagccgggatgcggaacccaggaatgaggccagagaagaagtgggtcttcaaggctgagaagcccggctcccctcaaggacccaggaacgctgcaccccgcactgtcaccttctaccatcttctccggccctccccgcggccccgttccccgtcccccactgcttccttgctttctcgctttctccccagctcctcggtggtcacgctttgcttcatgtctcccactcctctcccataaggagcgtcccgcgttcacgagataaacgtccttcttcttccagtc

SEQ ID NO: 14498 - DNA, 1779 bp, Artificial sequence
  DNA replication origin
tgatggtggtattttgatggggattggattgaatttgtagattgcttttggcagtacggtcattttcacaatattgattctacccatccatgagcatgggatgtgtttccatttgtttgcgtcatctgtgatttctttcagcagtatacagacaacccaaagagtgagaaaaaatcttcatgatctatatatccgacaaaagactaatatccagactctacaaagaactcacattagcaagaaacaaacagtcccatcaaacaatgggctaaagacatgaatagacaattcttgaaagaagatatacaaatggccaacaaacatatgaaaaaatgcccaacatcactaatgatcagggaaatgcaaatcgaaaccacaatgttataccaccttactcctgcaagattggatataatcaaaaaatcaaaaaacagtagatgctggtgtggatgtggtgaacagggaacacttctacactgctggtgggagtgcaaactagcacagccactatggaaaacagtgtggagattccttaaagaactaaaagaactaccatttgattcagcaatcccactgctgggtatctacctggaggacaagaagtcattatacgagaaagatatttgcacacacgtttatagcagcacaatttgcaattgcaaaaatatggaaccaacccaaatgcccatcaatcaatgagtagataaagaaatcgtggcacacacacacacacacacacacacacacacacaccccatggaatactattcagccataaaaaggaatgaaataatggcattcacagcaagctggatggaactggagactattattctaaatgaagtaactcaggaatggaaaaccaaacatcatatgttctcactcataagtgggagctgagctatgaggatgtgaaggcttaagaatgacataaggactttggagactcagggaaaagggtggcaggagggtgcaccaaaatctcacacatcaccattagagaacttactcatgtaactcaacactgcctgttcccaaaacctatggaaaataaaaataaataaagaaggaataagtttatttcatgaacacaatgatccttatgagggaggagtggggagaggaagtgaagcatgaccactgatgggatggggggaggaagaggaggcagccgggatgtgttggggggaggaaggggaggcagccgggatgtgttggggggaggaaggggaggcagccgggatgtggtgggaggaaggggaggcagccggtgatgtggggggaggaaggggaggcagccgggatgtgttggggggaggaaggggaggcagccggggatggggggaggaaggggaggcagccgggatgttgggggaggaaggggaggcagccgggatgtgttggggggaggaaggggaggcagccgggatgtgttggggggaggaaggggaggcagccgggatgttgggggaggaaggggaggcagccgggatgtggggggaggaaggggaggcagccgggatgtgttggggggaggaaggggaggcagccgggatgttgggggaggaaggggaggcagccgggatgtggggggaggaaggggaggcagccgggatgtgttggggggaggaaggggaggcagccgggatgttgggggaggaaggggaggcagccgggatgtggggggaggaaggggaggcagccgggatgtggggggaggaaggggaggcagccgggatgtggtgggaggaaggggaggcagccgggatgtggggggag

SEQ ID NO: 14499 - DNA, 1076 bp, Artificial sequence
  DNA replication origin
atggagctgggatggagtttgacggagctgagcacagttgggatggagctaggatgaggatggagctcggatgcagttcagtgaaactgagtggaattgggatagagttgggatggagctgagggtggagttgggatggagtttgatggagctgagtggagttgggatggagctgagggtggagttgggatggagtttgatggagctgagtggagttgggatggagctgagggtgaagctagggtggagtttgatggagctgactggagttgagataaagctgaggatggagctgggatggagtatgatgacacttagtagggttgggaaggagctgaggatggagctgggatggagtttgatagagctgagtggagttgggaaggagctgagagtggagctgggatggagtttgatggagctgggatggagtttgatggagctgagtggagttctgatggagtttggataagggtggagctgggatggagtttgatggagctgtgtggacttgggatggagctgagggtggagctgggatggagtttgatggagctgagtagagttgggaaggagctgagggtggagctgggatggagtttgatggagctgtgtggagttgggatggagctgagggtggagctgggatggagtttgatggagctgagtggagttgggaaggagctgaggatggagctgggatggagtttgatggagctgagtggagttgggatagtgctgaggatggagctgcggttggtgctggttggagctgggatggattttgggatggagctgggatggttgtgatcatgggtggttgttggctcttcctcaagctctcctccactactgacaaggcctccatcagtcctgttctctctcttttctcccttctgttctcctctctgtccctgcctaggtgagccctatagtcttcatctcctttttcatcttgtgaggggccctgctgctgatcttggtgtcttactatttcctcatctatgacttttttatccatccacaaatccctgattttcacagcggtatctttgctcttaagttgtcttgattct

SEQ ID NO: 14500 - DNA, 1535 bp, Artificial sequence
  DNA replication origin
aaattagaggggtttgcctacttcatctttagtgattactcaaggattaatcttctgtgaacctgtgacctgggacactagtgaaaatcatgtaacaggcactctatcaccttcggggagcagggcacagatagtgtgacagggttatatccccaagggcagactccacaggtaggcgtttgtgtggagaggctcatttcatcagcccctggagacatcctctttatcagtgttttggatattcccaaagtggcacacttctgagcagtgataaacagtgagtcagaaaaggtggaaatagcttcttccagatgatacacggaggtgtgtgtgtggaggcagggagggagctaagaaagaagctggagccaaggatggaggtgatggtggagctttggaggaaactgcgctggagctgggagggagcagaggtggaggttgggatggaactcaagagagagggagatgagctgagatgaagctcagaaaggagctggagatgccacttgtaaggaataaggataaaaatgagatagagcagaaatggagctggggggaagctagagggagctgcggggaagctaggtggatggggctgggatggactgggatagagctaagatagatcagggaaggaactggaaatggagatgggatgaagctcagaaaaaaagctgagatgaatctgaggacagagcaggatggagctagaatggagcagtgatgatctaggatagagctgaatggagttggaatggagatggaaggagctgggaataaaacagaagagagatggggatggaattcagtggagctggatgaaggaggggatggaactggatggagctgggatggagcagtgatagagctgggtatacagtagtatggagatgagatggagtagtgatggagccgggtatagagtagtatggagatgggatgaagctgggtggagctgcaatggagctggatggggctgcatggcgtaagatggagctaggatggaaattgatggagataaggataaagcagggcatgcatctggatggaactggatggagatacaatggagatggatagagctgggatggatttgtggatggagatgaggtggagctgggatggaggtggatggagctccatggtctgggatagagttgatgaatctggatggaagtctatggagcttggttcagcttgggatggagtagggatggataggaatggagctggatggaagttcatggagctggggattattgaagccttggatgtacctggggtagagctgggatggaatctgctgtagctgagtggagatgggatggagctgggatgagggtgaagctagggtggagtttgatggagctcagtggagttgggatggagctgggatggagtttgacggagctgagcacagttgggatggagctaggatgaggatggagctcggatgcagttcagtgaaactgagtggaattgggatagagttgggatggagctgagggtggagttgggatggagtttgatggagc

SEQ ID NO: 14501 - DNA, 1736 bp, Artificial sequence
  DNA replication origin
tggagggcactaggggacatgcatgagaagcaccccagccagcctgggatcagaagtttctagaagtagaaatctgaaggacacatggaggcgtcccagagagagatgtgacatgcaactccacactgctcactgtggcccacaccgttcctagggtacagacatatgcaatgagcaggttcaaggaaatgtccatggacaggaaagatgtggagggacagggggctccatacatgccagggctgctggggtttccctgaaatggggtggtccggtgggcaggccaggtaggactgctcagcagggacagagaggccatttagggacccagtatgtagagtgagaggaccctacagggtgaacacagtgagatggtctgactagagctgagagagagcagccctgaggccacctggggaaggtaaaggagggagcaggtgcaaggcgggtgtggtggcaatgggagcacagagatccaggtgagggggggctatttgtggggctatagtgggtgagtgggctgtagagatccaggtgagaggtggcaggtgcatggggctttaattggcaggctcatgcagacatccaggtgagcaaagggtcacgtactcagggctgcagtgggcaggtggtttgcagagatccaggtaagagtgggaccaggcacagggtgaatgcagtaggaaggggctatgctgagatgcagatgttttttggggggcaggtgtgtgggcctgcagtaggcagcagaggtgcagagatccaggtgagggagggggcaggtgcatcaagttgcagtgggcaggggactttcccagatccatgtgagagagggggcaggtacatgggcctgctgtgggcagacggtgtgcagggatccatgtgtgagagggggcaggtgcagggcagatgcagatatccacatgaaagagggggcatgttcatgggctgctgtgggcaggggacacgagaagatgcaggtgagggaagagagcaggtacagcgtgactgcagtgggtggccactgggtgacttctgcctgggaagcaggatttgaagaattgtagaaaggcagcttcaaggatgagggtagatctgagtgcaaagtgtgtgttgatctacacagtgtgatgcctgcccatggaaacaggcaagtagggcctcaggcagaagtcctggtggcccctgggcagtcaagtgttttccctgtggctcacaatggggagggcctgttgttcccagagtggcctgggatgtttgggcatctggggttctggaggtggcgggtgggcaggggctgcagctgtttcccacctggtaggaaatacttcagtgttttaacttctgatgtgactgagggtactggaaatgtatggagtggctttcagcacaccagggacttaggaggggggagggtttgagggagcttcctaacaggtttgattgataggtttgtttcaggtacctggatgacttctaaggggtgctgtccaggtgacttaggggacagatctgggtaggtgtatatgacataaccttaatgtacagtggacagcaagatcccagtttctgatgggatcaggagatggaggtaagggaagagaaggggggcagcagcgatgtggggcacgtggacccttaggtgtatgtgagaacagagacaagtgtgcatgttggcaccaccttggtttcttgtgaggtagctcccagtcagtgttttgggttcctagggaaga

SEQ ID NO: 14502 - DNA, 1118 bp, Artificial sequence
  DNA replication origin
gaagttccgccgcccgctgtcctgggggctggtgtggcggagaggaagttccgccgcccgctgtcctgggggctggtgtggcggagaggaagttccgccgcccgctgtcctgggggctggtgtggcggagaggaagttccgccgcccgctctccggggatggtgtggcggagaggaagttccgccgcccgctgtcctgggggctggtgtggcggagaggaagttccgccgcccgctgtcctgggggctggtgtggcggagaggaagttccgccgcccgctctccggggatggtgtggcggagaggaagttccgccgccgctgtcctgggggctggtgtggcggagaggaagttccgccgcccgctgtcctgggggctggtgtggcggagaggaagttccgccgcccgctgtcctgggggctggtgtggcggagaggaagttccgccgcccgctgtcctgggggctggtgtggcggagaggaagttccgccgcccgctctccggggctggtgtggtggagaggaagttccaatcctagtggctgcccaggaggcctcaccgctcaggagcccctcaggggttcagcgagaagagcgcatcacgagaaccagcagggtgccaggacggggtgcagccgaggtccggactgatgcttcctgctcgtccttccttgttagagtaaaggaaaccctgaggatgctgaagatggattctgtgtttctggcgccagggcagatttcaggggttctgttttgttcttcagcctccacgctgtgttgtgacttcctgttcagaaagcgcagtcctcacctctgtagaggcccctcctgagggcggacatgccctgccttgtcacttgctcctctttgctttgtggtcttaaaagaatatctgtagcatgatggatttattatcatttaagaagatttcaggtggtgtggggttatagccccgatgggtaaacatgttcacggttgcttgtacattagaagagaagaaggcgagaaggagtggcatgggggtggggcaggaaaaagaggaagaagaagtaaacaaaaactctcccaaacctcagcatccccgacagtccagcccatcctgctgggagcggccgtggga

SEQ ID NO: 14503 - DNA, 1167 bp, Artificial sequence
  DNA replication origin
ttgaagactggacgaagggcaggacagccgccccagtcctccaaggacaactttaaaatgatttcatgttaggtttccagaaggaatcacaggacggacaccaggtatagggaggagggagccccttacctctcagcaaagaggaacctgccttctaaatccagaggcaagagcttcagagaccacggctcacacacacatgcctctctctgcctaccccagaccccactggattgggatgtattctgcggaacgaccacgctgagccagtgaggtggattttggggaagtgaaacctgtagtcaggaaaacatgggagctgaggcagaggcttgagtctggggtggcggccacagtgctgttggagaaggtggcctgggcccttgacccacggaagtccggcatccagggtcagggtcccacggcagccccgagacctagaatgtggcaaacgcccctgtgcttgggtttcctggtctctggagtggcagccgcagtgtgtggctcctggactgtggagagatgaacggggctcaggtggagcagagcccgggccacgtgcagaggatgcagggcgcaagcagaggaggacgcagggtgcacgcagaggaggacgcagggcacaggtgcacggatgagcagcctctgtcagcagtgggaagaacacagtgttgcttgaaagaggaggagccaatggatttccacgaggggaagctggagaggttggagccctgagtcttgcggggaggccggctgagggaagaatgtgcaaaaagtggcatggggcggcgttgacctctccgatgcctctcaatgctaacaagggagacagctgcagctgaaatgtttcttccttcaagtgtttcttatgacaaaactttcttgcacctcggagaaggcaagcagcaaaatggcagatggtaccgggccaccgttaggggctgctgcgtgctcacctctgtgggggttcagttggaatgtggaattcagagaggccagtgaaggcagggatccgccggccagggagaggaactttggaaccagaagtctggaaggaggtgggggcttcggtctctccatctgccaccctcagtgagtgccctggccctgcaggttcccccagccccttcctcggctcactgtgagatgtgaaatgtgaaacccacc

SEQ ID NO: 14504 - DNA, 2921 bp, Artificial sequence
  DNA replication origin
attctcctgccttagcctcctgagtagctgggactacaggcatgcgccaccacgcctgggtcatttttgtatttttagtagagatggggtttccaccatgttggccaggctggtctcgaactcctgacctcaggtgatccacccacctcggaccccaaagtgctgggattacaggcatgagccactgcgcccagccgggcttatctttttaaaaatcagtgagttaattggattgcctttgttagagattaaaaataaggatttttttttttttttacctcttgagaaaaggtaacatcttatacattttatgttttaagagtttatactgaaaagacactggttagatttaagtttatgtcaatgtagttgttaatttccaggggttaaatataggcagtgatttacacattgatgacattgctttataaaagtttggaggtcttttggttggaaattgggttccctgtactataattggtgccagcttggagagcaggtcagcccagacactcgtgcacttgaggaggaaagacgtgtggcgtgagatggggtgtcactgagggggaaagacacgtggcgtgagatggggtgtcattgagggggaaagacgtgtggcgtgagatggggtgtcagtgagggggaatgacacgtggcatgagatggggtgtcagtgagagggaaagacacgtggcgtgagatgggatgtcattgagggggaaagatgtgtggcgtgagatggggtgtcattgaaggggaaagacacgtggcgtgagatggggtgtcattgagggggaaagacacgtggcgtgagatggggtgtcattgagggggaaagacacgtggcgtgagatggggtgtccttgagggggaaagacacgtggcgtgagatggggtgtcattgagggggaaagacacgtggcgtgagatggggtgtcattgagggggaaagacacgtggcgtgagatggggtgtcattgaaggggaaagacacgtggcgtgagatggggtgtcattgagggggaaaggcatgtggcgtgagatggggtgtcattgagggggaaagacacgtggcgtgagatggggtgtcagtgagggggaaagacacgtggcgtgagatggggtgtcagtgagggggaaagacatgtggcgtgagatggggtgtcagtgagggggaaagacctgtggcgtgagatggggtgtcagtgagggggaaagacacgtggcgtgagatggggtgtcattgagggggaaagacgtgtggcatgagatggggtgtcattgaaggggaaagacacgtggcgtgagatggggtgtcattgagggggaaagacacgtggcgtgagatggggtgtcagtgagggggaaagacacgtggcgtgagatggggtgtcattgagggggaaagacacgtggcgtgagatggggtgtcattgagggggaaagacacgtggcgtgagatggggtgtcattgagggggaaagacacgtggcgtgagatggggtgtcattgagggggaaagacacgtggcgtgagatggggtgtcattgagggggaaagacacgtggcgtgagatggggtgtcattgagggggaaagacacgtggcgtgacatggggtgtcattgagggggaaagacacgtggcgtgagatggggtgtcattgagggggaaagacacgtggcgtgagatggggtgtcattgagggggaaagacacgtggcgtgagatggtgtgtcattgagggggaaagacacctggcgtgagatggggtgtcattgagggggaaagacacgtggcgtgagatggggtgtcagtgagggggaaagacacgtggcgtgagatggggtgtcattgaaggggaaagacacgtggcgtgagatggggtgtcattgagggggaaagacgtgtggcgtgaaatggggtgtcagtgagggggaataacacgtggcgtgaggtggggtgtcattgagggggaaagacacgtggcgtgagatggggtgtcagtgagggggaaagacgtgtggcgtgagatggggtgtcagtgagggggaaagacacgtggcatgagatggggtgtcattgagggggaaagacacgtggcgtgagatggggtgtcattgagggggaaagacacgtggcgtgagatggggtgtcagtgagggggaatgacacgtggcgtgagatggggtgtcagtgagggggaaagacctgtggcgtgagatggggtgtcagtgagggggaaagacacgtggtgtgagatggggtgtcattgagggggaaagacgtgtggcatgagatggggtgtcattgaaggggaaagacacgtggcgtgagatggggtgtcattgagggggaaagatacgtggcgtgagatggggtgtcggtgagggggaaagacacgtggcatgagatggggtgtcattgaaggggaaagacacgtggcgtgagatggggtgtcattgaaggggaaagacacgtggcgtgagatggggtgtcattgagggggaaagacacgtggcgtgagatggggtgtcattgagggggaaagacacgtggcgtgagatggggtgtcattgagggggaaagacacgtggcgtgagatggggtgtcattgagggggaaagacacgtggcgtgagatggggtgtcattgagggggaaagacacgtggcgtgagatggggtgtcattgagggggaaagacacgtggcgtgagatggggtgtcattgagggggaaagacacgtggcgtgagatggggtgtcattgagggggaaagacacgtggcgtgagatggggtgtcattcagtctcttcacaggatcttaatggtgtattttccctgtaaactgtttgcttgttctatccattggtcaagtctctctggcctccaaaacattttagtgtgtctgtgctggtgtgaga

SEQ ID NO: 14505 - DNA, 1757 bp, Artificial sequence
  DNA replication origin
tcaccaccacatattctgtgcattcatggttttttttttttttttttgagacagagtctcactctttcacccaggctggagtgcagtggcgtgatctcggctcactgcaagctccgcctcccgggttcacaccattctcctgcctcagcctcctgagtagctgggactacaggcgtctgccaccacgcccggctaatttttttgtatttttagtagagacggggtttcaccatgttagccaggatggtcttgatctcctgaccttgtgatccacccgcctcggcctcccaaagtgctgggattacaggcgtgagccaccgcgcccggccgcattcatggtttttatttgtttcctgttccttctaacatagatggaagtcacacaaaagcaaggactttgctcatggatttatctctgcgccttcaaaggtagctggtgcaaaggagatgtgcagtaaatatttgtggcaggaaggaaggaaagaatgcagctagcaagggagggagggaggaagattggggagaaggaagaaagaagggaaaggaaacaagagggaagaaggagggggcgggggagtatttcacctcctgaagctctcatctgtccctgaaggggagggcgtggctcataccacccaccaccaccaccccaccacaggcagagtaagaggctgcctgcagatcgcctggagtaggacgtgcggtgaggagcagaaaggcgggcggtgtgggcagggagaggcaggaatagaaaggcgggtggtgtgggcagggagaggcaggaatagaaaggcgggcggtgtgggcagggagaggcaggaatagaaaggcgggcggtgtgggcagggagaggcaggagcagaaaggcgggcggtgtgggcagggagaggcaggaatagaaggtgggcggtgtgggcagggagaggcaggagcagaaaggcgggcggtgtgggcagggagaggcaggaatagaaaggtgagcagtgtgggcagggagaggcaggaatagaaggtgggtggtgtgggcagggagaggcaggagcagaaaggcgggcggtgtgggcagggagaggcaggaatagaaaggcgggcggtgtgggcaggggtaggagcagaaaggcgggcggtttgggcaggcaggggcaagagtggaaaggcgggcagtgtgggcaggcaggggcaggacagtgacagggcctggcttcccgcataggaggcagcatgaggtgctgagaggaacagacattgctgtaagcagggtgggatgcacagaataatatttcccagcttctcggtgttgtgtggggcccatttgctgcaaaccagtaggataattccaccagcacgttgggttggaagaacagaaaggaggccagagtggctggggtgcaaccatcatgggagagttcacaggacacggagggagaggagtgctgggtcgcggtgctgcagatacgcagcgtctcacagaccaggaaagaagagagctttgcagatcaccatgatcacccacattcttccctctgcatgacagatctcacctcagtgacccccctgggttatgttcacaagggtggaattagaggggcaggagatgacaccgagatcttaaggagaaaaggtctttccatatagatgctccttgaccttctagaaatgcccacttgtttctgggctccaggagctggtgaatactgggactcacctgggttagctttgcagtgaaggtcagtgcaggggacacaggaacatccgcc

SEQ ID NO: 14506 - DNA, 769 bp, Artificial sequence
  DNA replication origin
atgtggtcatttcacgtcctgggaacgcagtggccagtgagaggcgggaggtgatcctgacagtgggatggagaaggcgctgctgagggtgtgaggacagtgaacacagcggccagtgggaggggaggtgatcctgagggtgtgaggacagggaacgcggcggccagggggaggaggagatgatcctgagggtgtgaggacagggaacgcggcggccggggggaggaggagatgatcctgagggtgtgaggacagtgaacacagtggccagtgggaggggaggtgatcctgagggtgtgaggacagggaacgcggcacccggggggaggaggagatgatcctgagggtgtgaggacagggaacgcggcggccagtgggaggaggagatgatcctgagggtgtgaggacagggaacgcggcggccgggggggaggaggagatgatcctgagggtgtgaggacagggaacgcggcagccagggggaggaggagatgatcctgagggtgtgaggacagtgtgtgttcccttctcacttcttgttcatcccttccccagattttatgatttcacaattctactgctgaagctgatggatggggcgggcaacatggcttgcaggacgggtctggcccacagcttgtgtcatccatatctgttttggaaaattgactctgaacacgttaagtccagtgtcctttgtcgctgaactcacctctccctgtggcccagcatgtgaccgtagcccatatttatggcggtttgccacatc

SEQ ID NO: 14507 - DNA, 988 bp, Artificial sequence
  DNA replication origin
cacacgtctgcgctgacctaccctcccgggtcccggacccagctccgcgaggacctcctgccgcggaccctcggccagctccagccagatgagctcagccctaaggtggacagtggtgtggacagacaccatctgatggcggccctcagtgcctatgctgcccagaggcccccagctccccccggggagggcagcctggagccacagtaccttctgcgtgcaccctcaagaatgcccaggcctttgctggcaccagccgccccccagaagtggccttcacctctgggagattccgaagacccctccagcacaggcgatggtgagccagccccgcttggtgtttcttgtttgctgactgtcctctgtccagcccctcccagtgacagacgcaccatgctcttcccacacgtggggtctgcacaccgcactcccccgaggacgcgtggcaggaatggggcaccatgtagggaagggtcccttcggccctcataccctctctgtgctgggaaggagtatgtggtcatttcacgtcctgggaacgcagtggccagtgagaggcgggaggtgatcctgacagtgggatggagaaggcgctgctgagggtgtgaggacagtgaacacagcggccagtgggaggggaggtgatcctgagggtgtgaggacagggaacgcggcggccagggggaggaggagatgatcctgagggtgtgaggacagggaacgcggcggccggggggaggaggagatgatcctgagggtgtgaggacagtgaacacagtggccagtgggaggggaggtgatcctgagggtgtgaggacagggaacgcggcacccggggggaggaggagatgatcctgagggtgtgaggacagggaacgcggcggccagtgggaggaggagatgatcctgagggtgtgaggacagggaacgcggcggccgggggggaggaggagatgatcctgagggtgtgaggacagggaacgcggca

SEQ ID NO: 14508 - DNA, 1094 bp, Artificial sequence
  DNA replication origin
tgatcttttattgccctctgaagcatgtgatccctgtgacctactccctatttgtacacccctccccttttgaaatccctaataaaaacttgctggttttgtggctcaggtgggcatcacagaacctgccaatatgtgatgttacccctgaaggcccagctgtaaaatttacctctttgtactctttctctttatttctcagactggccaacacttagggaaaatagaaaagaacctgtgttgaaatattgggggctggttcccccaataggaagtgatgatggtggggatgctgctattgatggtgggatgatgctgatggtgagggtgatgatggtgtggatgctgctgttgatgatggggtgatgatgatggtggggacgctggtggtgttggtggtgatgggatgctattattgatggtggagatagtggagatgctgttgttgatgattggggtgatgatggtggggatcctgctatggatggtgaagatgatattggtgggatgctgctgtcgatgatggggtgatgatgatggtggggatgctgctgttgatggtggaagtgatgatggtggggatgctgctattgatggtgggatgatgctgatggtgaaggtgatgatggtatggatggtgctgtggatggtgaagttgatgatggtggggatgctgctgtggatggtgggatgatgctgatggtgaagatgatgatggtgggatgctgctgtgaatggtgaagatgatggtggggatcctgctgtggatggtgaagatgatggtggggatcctgctgtggatggtgaagatgatgatggtgaagatgatgatggtgggatgctgctgtggatggtgggatggtgatggtggggatgctgttggagatagtggagatgctgttgttgatggtggagatagtggagatgctgttgtggatggtggagatagtggagatgctgttgttgatggtggaagtgatgatggtggggatgctgctattgatggtgggatgatgctgatggtgagggtgatgatggtagggatggtgctgtggatggtgaagatgatggtggggatgctgttgtggatggtg

SEQ ID NO: 14509 - DNA, 909 bp, Artificial sequence
  DNA replication origin
gggggcgagcgtggcggccttccccatcagggggcgagcgtggcgggcttccccatcagggggcgagcgtggcggccttccccatacagggggcgagcgtggcggccttccccatcaggcggcgagcgtggcggccttccccatcagggggcgagcgtggcggccttccccatcaggcggcgagcgtggcggccttccccatcgggggcgagcgtggcggccttccccatcagggggcgagcgtggcggccttccccatcgcggggcgagcgtggcggccttccccatcaggcggcgagcgtggcggccttccccatcagggggcgagcgtggcggccttccccatacagggggcgagcgtggcggccttccccatacagggggcgagcgtggcggccttccccatcgcggggcaagcgtggcggccttccccatcaggcggcgagcgtggcggccttccccatcgcggggcgagcgtggcggccttcccagtacagggggcgagcgtggtggctgcctctgcactaggacatcccttccgttgggagctcgtgacggggccactgggggttcatctcttgggttgcgaccctgccgctccccagggctgctgggtgcatggaggaggagcatcttccaccactgcccccatcttgcctgctctccatttcaagaaagaggaatgggagaggggcgtgggcaccggtcatgtcaaatattccaccagcagccagggtccaccttctgataagtttggctgtgtcaccttggaatctcctacacacgatggtcggcctcacagtcctggtctctactgttactcagcataattatcaggaagtcattctttcccactcggaggtgtcccagtttgaattaatgagctccgtggtcattccagcacacaga

SEQ ID NO: 14510 - DNA, 996 bp, Artificial sequence
  DNA replication origin
tgactgggtgtcatttggtgttttgcggctgaccgctgcattcacaacacaagagaagcagcacgtgacctctcctggccacccactagagtcgaattttgtttccatcccacagttactccctctggcacaccccaggtggagggggtggtccaggtggagggggcagcccaggtggagggggtcgtccaggtggagggggtggcccaggttggggggaggcccaggtggagggggccgtccaggtggaggggtggtccaggtggatggggaggcccaggtggagggggtggtccaggtggaggggtggtccaggtgggggggtggtccaggtggggggggtggtccaggtggggggggtggtccaggtggagggggtcatccaggtggagggggcggtccaggtgggggggcggtccaggtgagggggtcatccaggtggagggggcggtccaggtgagggggtggtccaggtggaggggtggtccaggtggacggggtggtccaggtggagaagacggctcaggtagagaaggcaccccagggagaggggcagcccagtagaggggtggcccagcaagctcccagggagagggacagccaggtaaaggggttggcccttctgcagctaacagtggtcgaaaccttcccttattactgccctgaaaggactcagtttcccctggggtgttcagccctcaattgtgatagcagcacccactgcagggggcctggcctggtcataggcagagggagccagggggtcgggggcacgttatggccagtgagtgaggctcatctgtctccggtaggatcaccctctgtgaaggtagcagcttgcaccttgttgaccagtcaccagtgacatggagtggggccaaggaggcgtcctcaccccgagaaccatgcctgtgctcccagtgcccccgcctggctcccgctctgcacctataaagctggcctttgtgctggcccttctgccttctggccatgact

SEQ ID NO: 14511 - DNA, 2005 bp, Artificial sequence
  DNA replication origin
tctgctgacagtcccacggtttgggactctcgtttcactcattcatcatttattgagcatcagggaatatgaaagtggccatgggcctccaaacagctcagaatgtaaaggggaagagctctgtgctgtagctgcaactccagccacaaggaagacaagacccagggctgtgggacgaaggggagagaggactcaggccccagctgcaggattcgagtgcccttcgggagtgagctcgcaggggaggaaccctcctaggacagggcacgtggagctccaggcagcctctccagggccctgcgtgtgctgtttctctgtcttgaaaatgacaccgaacgtttatggccagtgagcacccaccgcaagcccacactgtgagctccttgcctgctggggaggccaggagatgcagaaccaagggcagaagcactgcctgcagccctgtcccagcgtcgtggatgcagacacgggaggagccgcagacagacgcgggaggagccgcagacagacgcgggaggagccgcagacgcagggggagccgcaggcacagggggagccgcaggcacagggggagccgcagacagacatgggaggagccgcagacacggggagccgcagacacagggggagccgcaggcacagggggagccgcagacagacatgggaggagccgcagacacggggagccgcaggcatgggggagccgcagacagacatgggaggagccgcagacacgggaggagccgcagacacagggagccgcagacacagggggagctgcagacacaggaggagacacacaaggagccgcagacacagggggagccacagacagacatgggaggagccgcagacacggggagccgcagacacagggggagccgcaggcatgggggagccgcagacacagggggagccgcagacacaggaggagacacacgaggagccgcagacgcaggaggagccgcagacagacgcgggaggagccgcagacacagggggagccgcagacacagggggagctgcagacagacatgggaggagccgcagacacagggagccgcagacacagggagccgcagacacagggggagccgcagacacaggaggagacacacgaggagccgcaggcacagggggagccgcagacacagggggagctgcagacagacatgggaggagccgcagacacggggagccgcagacacagggagccgcagacacagggggagccgcagacacaggaggagacacacgaggagccgcagacacagggggagccgcagacagacatgggaggagccacagacacgggagccgcagacacggggagccgcagacacagggggagacgcagacacaggaggagacacacaaggagccgcagccacagggggagccgcagacgcgggagagccacagacacagggggagccgcagacacagggggagccgcaggcacagggggagccacaggcacagggggagccgcagacagacatgggaggagccgcagacacggggagccgcagacacaggaggagacacacgaggagccgcaggcacagggggagccacaggcacgggggagccgcaggcacagggggagccacagacaccctcacactccgggatctagcgtgtgtggacgagcccgaggcgctcggcccagcttgtcagcagccttcctgggaacgctgtggaaatgtgtggaggggccgcgtggcttcctgctgcctgggacgacattactgcatctgcatttgaggtgtggggcccagaggggctcaggtaccctacggggggagtcaccccatgaccaggaatcacgctgtggccacacacagggagcctgactgcagctttctggaggagaacgtggttgcatttcacatagaaacacaggtcattttgtttctgaagaattcattccgaatatttatttgctacttgacaaagaagagacttcatcagggataagatctcgacaaagaccatctcctgg

SEQ ID NO: 14512 - DNA, 980 bp, Artificial sequence
  DNA replication origin
ggaggccgcccgcacacctggggaggcatatcctgccagctgagcgtccccaggccgacgtccttcccagccatggcatcagggccccgcagcagctggtgtcatagcacccacatccatcagcttccctggagcccctggcacagtgctgtgtgggcctggaaacgctggaagcatggtttcatccctcaggaagctggtggttaataaatggggccaagttaataaagaaggaagctaccaacaaggccatgcggtcaccacgactgcccagggccagggtgtgggggtgctgccttacagcctgtcggggccggggtgtgggggtgctgccttacagcctgtcggggccggggtgtgggggtgatacattacagcctgttggggccggggtgtgggggtgctgccttacagcctgtcggggccggggtgtggggggtgatacagcctgttggggccggggtgtgggggtgctgccttacagcctgtcggggccggggtgcgggggtgatacattacagcctgtcggggccggggtgtgggggtgctgccttacagcctgttggggccagagtgtgggggtgctaccaggaccgggatgtgggggtgctaccttacagcctgccggggccagggcaggagctgtgcttcaagggcagagaggctttccaggtggacaagggacgaacacttggggagggagggaaggttcagatggaagaggaagctgagaggagacgcacccctggaggcagctggctgaccggtgggctcccaggagactgtaggatttgtgcagataaaagtcaggcagcagagtcagagggcagccatagcacgtgtaaggcggcggggatgctgacagcaagacgttttctggagaatctgggttttactgcaaatacaaattcactgttctcaggatggcggagggaccagctccttgggaaggtcacccccttggccacctgttgtccctg

SEQ ID NO: 14513 - DNA, 931 bp, Artificial sequence
  DNA replication origin
tgaaacaatgatttgacaggccagttaaagcattagacgagtttaaactgcttgagagcaaactgctgtgtcttggtgcagtttgggggcagcggtggggcgtgggggccgccgcggggctctgtgggttcgggggcagcggtggggcgtgggggccgtccggggctctggattaagtgcacagacctcgactgtcttcacggaactaaggagacctttattttacctggcacaccgtggggtcaagtccacattgagaggtgataacgtgctagcagccctcgctcactctgggcgccttctctgcctcggtgtctgctctggccgggctcgaagagcccctcagcccgctgctgcactgtgggggcccctctctggggcttgctgaggccggagccggctccctctgcttgcggggaggtgtggagggagaagcgcggatgggagccggggctgcacacggggcttgtgggccggcgcaggttccgggtgggcacgggcttagcgggcctggcactccgtgggactggccggcacctgctgggcttgattggaggctggatcccgtgagaggactgccattccctcttccctgggtcgttggccatgatggtgggtctctgtctctttctcgcttcccctctttttctcttggttgtctgggacgagctcccattgggctgcctggagtgcccgggctaggggccacaaagtcctgcagcgagtaccagtgagaggtgaagctggctgggctgctgggagggtggggacttggagaagttttctgtctagctaaaggattgtaaatgcacccatcagtgctctgtgtctagctaaaggattgtaaatgcacaaatcagcactctgtgtctagctaaaggtttgtaaatgcaccaaccagcactctgtcaaaacggaccagttagcctct

SEQ ID NO: 14514 - DNA, 1171 bp, Artificial sequence
  DNA replication origin
ggacgccctcaaggacagaggtgaacccgggaccccctaaaggacagaggtgaacccgggaccccctgaaggacagaggtgaacccgggaccccctgaaggacagaggtgaacccgggaccccctgaaggacagaggtgaacccgggacgccctcaaggacagaggtgaacccgggaccccttgaaggacagaggtgaacccaggacgccctcaaggacagaggtgaacccaggaccccatgaaggacagaggtgaacccaggactccctgaaggatagaggtgaacccgggacgccctcaaggacagaggtgaacccgggacccctgaaggacagaggtgaacccgggacccctgaagaacagaggtgattggaaaccctcctgtgagcagaatctccagcagtgcacctggctggtgattccgcctggaaggagaaacggccagatgtgtgattacttatgaattaatgggctgtggccagtggtttggctggagggccagggactcggagagaatatggttggaaacattgttgacaagggcaactggggaagagacatattagatagacgtctatgaagtggtatgaagtactaagatatgaatgtcccgtgtgaatgttctccaaagagtgacctcagcagaggaggattttaataaccaagtggatagggtgacctgttctgtggacaccagtcagcctctttccccagccaccctgccgttgccccatgggcccatgaacaaggtggtcgcggtggcagagttggaggtgatgcctgggctcccactcaacaaggccagccctgctgtggccacccttgagtccccagtcagccaccacaaagaccatccctgagtccccaacatgacatcattccccgaggtgatcagccagccgccggggggcaggtggttccgcaggcagcttcccctgtggaaggggtggggaatggtccttgctggactagacgcttactccagatgtggatttcccttccctacgcacagtgctcctgccagaactaccctccgtggagtcagaacgccttatccatcaccatggtgtccacacagcactgcttctgaccaagagccctcacttcacagtcaaagaagcgcagcagtgggccggtgctgtgggaattccctggtcctaccatgttgcc

SEQ ID NO: 14515 - DNA, 3327 bp, Artificial sequence
  DNA replication origin
ttcctttcaagactccgaaagtatcatcccattttctcctggtctgtatgttttccattgagatgtctgttgacaaacaaattggagctcctttagatgttatttgcttcctttggggtcttctctttgcccttgagctttgacagtttaattattaaaagcctgaggtggtcatatttgggttgaatctggtgttctctgactttcccgaatctggttatctatacctttctcaagtttcagaaagttttctgttactgtttctttgagtaagcttggtacctcttgttctcactcagctccctcttgaacaccagtaattcttggatttggtgttttgaggtaattttctctatcttgtaggttgtctttcattctttgttctttttcctcctctgattgtgtatttgagctcactgattctttcctctgcttaagccactctgctgttgggagcttgtcatgaatttcctcatttcgctaaatgtatttttgtttcaagacttctgtctgatttttaaaaattatttcaatctgttgttaactttctgaattgatttcctggtgttatcttggggatcaccgagtttccttagggctgccattttgatttcttgatgagagctcacaaatcgccactttgttgggccagtcactggttcttggctttgtccgtttggggaggccatggtcccgtctgctgctttctggtttgttgatgtgtgtctgtgtcttggcactgaacggttatttatttatctcttctctgtctgggtgttttggtttttctggggtatgtttgcttaaagattctttgtgatttacctgtggagtgttttcttgctaggttgcagcctcctttttggcactagatggcgccttaagcccaggttcaactcagctctggtcactgatgaaagtgctgcctgtcccaaagcagatgtcccaaaggggatgtcctgataacgtgggaaggctgggaggggacctgggagcacaggtcctgcagcgtggggctgcgagtggccactctgattgagtgcctcctttggccgagttgcagagcagagtttccagggctggggacagtagccccacccccacctttgtctctggccatcctcagggctgtttctcccttcaggcactcaggatgctccccatgggttgaggcagggagaggtctcctgccagggcacccaagagcagggcaagctgttgttatctcacctttctaagtgtagaaactgtgtcaagggaaaatcttttgtgtactggatgccaggcaggttatggggaggggccttgcagatgtgggggtctggttctcctgctgtctgtctgttcggggtttttctgttcctggtggccccaggacctgactcatcctcacctctgggttctcagatgttgctggtgaccatctcagcatctcagcactgcatgtttgctttcaggtttctgctggggtggtgagacagcttgctcctgtcctgccgtttggaaccagaaaccccatttcaattgctgttttctcattgtcctttaatagaactcagaagacagcagatggttttaggtgtgtatgacaagtgtggtcttaggcaaatgtaaagtaagctttcagccataacttcaacattgtgcttagcaagtgaatgtccactcatagttttaggacttgtttacatgagtcctggattttataaagccccgagtgatgtgtcatcttttgactctgaccttaacttctattgtgttgttttctattaaggaaaacagtgggatgctagagtgccccatcagggccaagagtgaggaccacatctgcatcgtggtattggatgatgtggtgtgaggcagggggtgctcccagtgggcagcacggctgtggaggacctcagttttcttatttgtaaaatgaagggtcctgagtgaaatacatgctgctgttctcttcaacttctgataaaaatcttgattattctaaatactaacagggtgtgatctgttggcctgctgttaggagacccggaataggagcgagtgtctggcctattggcccagggtggcctgaatgtaactgggtggcctggtgcaggccctggtgcggcgaaagcagctgccatgttccagaaacagagtaacaggcagagagagccaggcagctgcagctcagaaaggttaatgtctccattcgaaaaatctatctctgctctcacctgaaacatttagattgaagggattgaaagctatatttggtaattctaagagagagttttctttgcagggaagggctaagagctttgaggctcaggtgtgattcgtttttgtcaatcaatattgtactcaggattaccaataccagcctaccccaattacgcctctctgaaatgtgtggggcccagagccttctattcctagctgcacgatgcttctgctgcctgacctcaccttcagggggcaataagaagtttaatccagccacgaatcggctgcagcacgggaggggcctgacccacctcagggtccaggcatcatcacaggagggtgaagcagccattctaatgcacttctggaaaatgcctatcgaagctgatccttgggtcctgctgtgtgcttgtgtaagtttgctccagagtagctggccagggaggggagtggtcaggaggggagcggacaggaggggagcggtcaggagggtagctggcagggaggggagcagtcaagaggggagcagacaggaggggagtggacaggaggggagcagtcaggaggggagcggacaggaggggagcggacaggaggggagcagtcaggaggggagcagtcaggaggggagcggacaggaggggagcggtcaggaggggagcagtcaggaggggagcggacaggaggggagcggacaggaggggagcggtcaggaggggagcggacaggaggggagcggacaggaggggagcggacaggaggggagcggtcaggaggggagcggacaggaggggagcggtcaggaggggagcggacaggaggggagcggacaggaggggagcggtcaggaggggagcggacaggaggggagcggtcaggaggggagcggacaggaggggagcggacaggaggggagcggacaggaggcgagcagacaggaggggagctgggctgggagtgggtggtcagaaaggtgcactttcttctcagtacttcctgttctgctacctttgtagtaaccagctcttctgatggccagagttcaagcccccctgaatgaaaatgatatctgtcactcagaaggctcctcccgtggggccgtgactggctgtggac

SEQ ID NO: 14516 - DNA, 1941 bp, Artificial sequence
  DNA replication origin
tggtatctgtgttgggggaacacagatccatgcctgcctaggatcccccaggagggtccgggagtgcccccaaggtccatggtgggcatctgctaacagcctgtcctgagggcagggctggctccggggctccagatcgtctgtggctcagctctctctggagggctgtttgggtctcaggtctgaatattggagcccagggcttcagtggaactgggcagtggggatttctgccaggtgtggatggcctgagcagcaagaaagagcaaaagaggttttcacagcgtccttctccagccagctgtgatggggtctgggcaaggatggatgaagagtctgtgggttgtcctggggaggggtggacatggcgtctgtgggtcatcctgggggagggtggacgtagggtttgtgagtcgtcccaggtgagggtggacacggggtctgtgggttgccagggtgtggggtctgcgcatcatccttggtgagggtggatgcagggtctgtgggtcaccccaggtgagggtggacgcggggtctgtgggttgccagggtgtggggtctgcgcatcatcctgggtgagggtggatgcagggtctgtgggtcaccccgggtgagggtggacgcggggtctgtgcgtcatcctgggtgagggtggatgtggggtctgtgcgtcgtcctgggtgtgggtggatgtggggtctgtgcgtcgtcctgggtgagggtggatgtggggtctgtgcatcgtcctgggtgagggtggatgtggggtctgtgcgtcgtcctgggtgagggtggatgtggggtctgtgcgtcgtcctgggtgagggtggatgcagggtctgtgggtcaccccgggtgagggtggacgcggggtctgtgcgtcgtcctgggtgagggtggatgtggggtctgtgcgtcatcctgggtgagggtggatgtggggtctgtgcgtcgtcctgggtgagggtggatgtggggtctgtgcgtcatcctgggtgagggtggatgtggggtctgtgcgtcgtcctgggtgagggtggatgtggggtctgtgggtcatcctgggtgtgggtggatgtggggtctgtgcgtcatcctgggtgagggtggatgtggggtctgtgcgtcatcctgggtgtgggtggatgtggggtctgtgcgtcgtcctgggtgagggtggatgtggggtctgtgcgtcatcctgggtgtgggtggatgtggggtctgtgcgtcatcctgggtgagggtggatgtggggtctgtgcatcgtcctgggtgagggtggatgtggggtctgtgcgtcatcctgggtgagggtggatgtggggtctgtgcgtcatcctgggtgtgggtggatgtggggtctgtgcgtcgtcctgggtgagggtggatgtggggtctgtgcgtcatcctgggtgagggtggatgtggggtctgtgcgtcatcctgggtgagggtggatgtggggtctgtgcgtcgtcctgggtgagggtggatgtggggtctgtgcgtcgtcctgggtgagggtggatgtggggtctgtgcgtcgtcctgggtgagggtggatgtggggtctgtgcgtcgtcctgggtgagggtggatgtggggtctgtgcgtcgtcctgggtgagggtggatgtggggtctgtgcgtcatcctgggtgagggtggatgtggggtctgtgcgtcgtcctgggtgtgggtggacttgggatctgtgggttgtctgggtgaggaaggatgcagcgtccgtgtccccttcacacgctgctcttaaggagcgctgtgagatgtcccactgaggggcttgtcttctcactctccacagctgacatctccagtgttaggtcttgggcaccaaggaggggccaagctaaggtgctgtatattaaaaactgtcagaggaagaaggccattccatcaggaatgccttcttcaggca

SEQ ID NO: 14517 - DNA, 1764 bp, Artificial sequence
  DNA replication origin
aaggcagtgagcgtggtcctggccccacctcagccctcctgtggtgcaggatgagccctccctgacctatttggcttgcagatgtgatttcagtgtctatgtgaattgggcatctgtgtttacagttctgaaagtttcatggaaaggtttctggtctcccatgtggtaccaggagatctgtccgtgtgggccctgaagccagggcagccgctggttgaagctgaggccacttagggcaggactttcccagcctcctggggatctgggtcccggtttggcctcagaggcatttgggcagagcctcccgtgttctagaacacatgctgccacagagacgcgtcatcaaaagagcctgggcagacgcgatcccagagggtgagaagccacagtccccccatcctcagcccacccctgtggcgagtgcttaggtgggtgatcgggccgtgtggagtcgtgttcatcatggaggatgtggaagcaccttcccattcatctcccagggtggcagattgctaacaccttcccattcatctcctagggtagcagatttgctaaaactctggagagctgcattaacacttgaaaccaccacagcaagagctgggagtcgatgcagtaggagcctgtgaagggctgggctttctgttttttgttgcctgaacttgatcgctggtaggttgtacatctacatttggtgatggtggataagattggggattgaaggatccatttttttccaggttaaatgtttgggcatttggatgatcgacagtgtgttcagttatgctttctccaggttcatgtccccactggccccatctcctgcacccatccatagctataagctcccctgaccccatcaagctacctggaaaagtgcataccctggtcccgaggggaattggatgaatgagcctggatgaacggaggcagctcctgcaccatgggaggagggactcggggcatgggaggagggactctgggcatgggaggagggacttggggcacgggaggagggacttggggcacgggaggagggaggaggggtacagaaggagggactcggcacgggaggagggactcggggcacgggaggagggacttggggcacgggaggagggactcagggcatgggaggagggaggaggggcacagaaatagggactcagagcacaggaggagggactcggggcacgggaggagggacttggggcacaggaggagggactcagggcatgggaggagggacttggggcatgggaggagggactctgggcatgggaggagggacttggggcacgggaggagggaggaagggtacagaaggagggactcggcacgggaggagggactcggggcacgggaggagggacttggggcacgggaggagggactcagggcatgggaggagggaggaggggcacagaaatagggactcagagcacaggaggagggactcggggaatgggaggagggaggaggagcacggaaggagggactcggggcatgggaggaggggcacatctgctcatggagggaaacacagcagagccctcttcctggagatgaaatccatggtgttcaccacaggagagacgcacaaggtcaccaacccatcttcttcctggagactgtggaaatttagaaacggacttgaaaccgttttctggtatcacgtagctcatcagtagcaggcctgaacttgtgcttttctgtatgccagcatttgtaaactttgagtaatatctaaaccccattaaaagg

SEQ ID NO: 14518 - DNA, 1281 bp, Artificial sequence
  DNA replication origin
ttttgtgagttgcctacagtccttgtcgccccgtcctgaatgctggaagctttgacgctagctcgtcttcctttcttaggcccccagcagcaaaaatctgctcccctcatcaatgagtgagttttgtgccttgacactttctgcgcctggggggatggacgagcagccagtacttagagaccacccggagctctgaagggggtgctcagggaaccagggctgctccattctcaccaggtgggcttggacagccacgggggctcatccccgacctgccaacctgggtcactcctggtgaggcagcagcatccccgtcgcaggctgggacagcagttccacaggtgttccctgcacacacctgtgcctctcacacttccgtggcctccaatgccctccctgtggccctgaaagcagccatggatttttgtgccaagaaaaattatacctgctccttggtgggggagccagaggggagccaggcgtctatgggggacagagtggggccagtggtccacagggaacagagaggtccaggcatctgtgggggacataggggaaccacgcatccgtgggggacagagggggtccaggtgtccgtcggggacagaggggttgaggtgtccgtgggggacagagggggtccaggtgtctgtgggagagaagggtccaggcatctgtggggtacagaggggggccacgcatctgtgagggacagagggggagcgaggtgtccatgggggtgggacattgttacccaggatgccagtggatgggctgatggcacagtttaaggggtgagagatgaagggtgggggtcccagagcagtggtgtccttggggtttgggtttgattgtgtgttaggggacgtggccttggctggggagggaggtgatggaaggtgatatacattgaacccaggctgctcaccacgtttgagaagcccctgagtgatgttccatcatgaagacggtgtgggcttccttgaagtgtgttgcaatcacgtcatgattccttcttcaccagtgttaggcgatgagattataatgaaaagcattagagccatcacactattgggaagcatcccccactaagctgtgaaaagctagaaactctgatgaaaatgacgctgaaagatgacttccacttccaaaaggtgcagattcaccaaagggagaaacccagagctgaggccggtctgcagcaggtgccgggcctgagacctttatgttgtctgagggaaacacctccatcccctgtcaggctcagagtgtccttttttg

SEQ ID NO: 14519 - DNA, 1186 bp, Artificial sequence
  DNA replication origin
cccctctcccctctcccctcgcgcctcgcccctcgcccctcgcccctcgcccctcgcgcctcgcccctcgcgcctcgcccctcgcccctctcccctcgcgcctcgcccctggcccctcgcccctggcccctcgcgcctcacccctcacccctcacccctggcccctcgcgcctcgcccctcgcccctggcccctcgcgcctcacccctcacccctcacccctggcccctcgcgcctcgcccctcgccccgcacccctcgcccctggcccctcgcccctcgcccctcgcccctggcccctcgcgcctcacccctcgcccctcacccctcacccctcgcgcctcgcccctggcccctcgcccctcgcgcctccccctcgcccctcgcccctggcccctggcccctcgcgcctcgcccctcgcccctcgcccctcacccctcgcccctcacccctcacccctcacttgtgcagggacagccctgggcgcaggtgcccgcacgggggattcaggtcgagaccgcgcctgcgtgccatctagcggccgtgctcgggtactgcagcccctccaccccagactccggaggctcctggaaggtgggtgaaccttgcagaccacccaggcgaaaacgcggctacttactcaggctggcgggaacgaggggtcagtcactgtccctcgtgcttggcaaagactcaggcaggtagaggagccgaagttttacagcagaaagggctggttggcccaggtgtcgtgtggacgggcagggcctcctgagtgctggctggggtgcccccggctttctctggctgacgcgttgcagagatgcggcctgcacagcctggccgctgtcccactgtccctgtgacgattcggtctcttttgggcacacggtaaatgcctctggtcagggctgtttaggaggtgagggtgtcgggtctccaacactgagtcaggtggaggggcagcccctgccgcacaccctctgtgtttttgtgagttgcctacagtccttgtcgccccgtcctgaatgctggaagctttgacgctagctcgtcttcctttcttaggcccccagcagcaaaaatctgctcccctcatcaatgagtgagttttgtgccttgacactttctgcgcctggggggatggacgagcagccagtacttagagaccacccggagctctgaag

SEQ ID NO: 14520 - DNA, 1345 bp, Artificial sequence
  DNA replication origin
agcctgcagcaggtgaggtcgggctacagacttccctctgccccctggtcacagaggtgagagtggggcctcatcccagtcccgccgcgacccatggggcagagctgctgccctggcccaggcacgcacagcttctcaacagccacatcgcaggctggccctggcctccccaaccagagaccaagctcccaggctgcagaggcagcgaaggccgggacacgcacagggcagcgggcagccagtgccacgtgggctgaggaggcactccctaacgggagacagcgcccagccagggctggttttctcaccgtcattgtcaaaggccttttgagcattttcacacacacacacaaagaagccgtttaaaacaataaaagtgtagtgctggggaaatgattaatgcatatatctctatttcaaacccgcaaaaggaatcaaaacaaaaagacctttaaagagacacacaaaaaggtgacagcatcgtgaggtgaagtctgtgtgtgtgtgtacatgtgcacgtgtgtgtgcatgaatgtgtcacgtgtgtgcacgcgtgtacatgcatgtgattttgttcacatgcatgcacatgtggagggagcgagctgctcccctcctcgccgagtgagttttgtgccttgcccgcttcctgtgctcagggggatggacaagcagccaggatgttagaggccacccagagctctgaagggggcactcagggaactggggcagctccgttctcacagggtaggcttgtgtgtgctttgtgtgcacgtgtgtgtgcatgtttgtgtgtgcacatgtgtgcatgtgtgtgtgtgcgcataccatctccccaagccgcctccacctgcacacaccagcggtgacccgcctcggggtctgtcctgttttgccacaacagctgtagagaatgccaagcagctcagcagtggttcccaaaataagactgttgagagcccagaaatagcccccagagaacactgtaaaagccccaagacaaggaaaaagtacacgagcttgtgacatgatggtacaatggcctcaaggaaattgcagctttggaaagaaactttattttctgtcttttgaaacaaaccgacatcctgtcctctgtggagacccaggccccgctgaagtgctctttcaatttgctcttttaatttgctcttttaattattctgaaaggccatctgctgtaagagtgcctccctgatttaaactatgcctcacaccctcaaaacttacacttcagcattttttccttccttgcgtaatctcaaagcaaacaagattcagagaggctcacttcctgggtaatgcaggagatgccctccgaggtagg

SEQ ID NO: 14521 - DNA, 1054 bp, Artificial sequence
  DNA replication origin
ccaggaattctagagatctcccaggcaccccgggaggatgtggactccaggcatcctagggggtgtggatgttcgtgatgctgtctttgtggatggggaaaccctgtaacaacttagctcctgctggggccagggagctggggccggggagctgaggccgaggagctggaggccagggagctgggggccggggagctgggggccggggagctggggccggggagctgaggccgaggagctggaggctggggagctgaggctgaggagctggaggccagggagctgggagctggggagctggggccggggagctgggagccagggagctggggccggggagctgaggccgaggagctggaggccagggagctgggggctggggagctggaggccggggagctggggccggggagctgggggccggggagctgggggccagggagctggaggccggagagctgggggccggggagctgaggccggggagctggaagccggagagctgggggccggagagctgggggccggggagctggaggcccgggagctgaggccaaggagctgggggccggggagctgaggctggggagctggaggccgaggactgcaggccctggcttgtgtttctggcacaggactcccgagtgactggtgttgttggggtggatataaccaaacagggatttaaggaatgcagccagcaattgcccaaagccacgtcccctggggagcccccgtcctcacgggtcctggtgtcttcatcctgtggactggctcagcctggcctcagcgcctgccccggggtcagcaggttaaggggtccacagcccctgcagcaggaggttttaatgcctgaactggagaaccttcaaaggcacacacagaatctctgtctcctcagcatcctcccatcaaagtctgtccgcatgtgttcctggctagtggctcaggaaaggtctgacgtcttcccacgtgtgacacagcagcacaaacctccagcacgtgtccccaccctgcacacaggtgttctggtgacgtccagtgaaagggtcac

SEQ ID NO: 14522 - DNA, 1419 bp, Artificial sequence
  DNA replication origin
agtgtgcagccaaatgtctcacggatgagccaccgggatctcagtgtgcagccaaatgtctcacggatgagccaccgggatctcagtgtgcagccaaatgtctcacggatgagccaccgggatctcagtgtgcggccacgtgtctcatggatgagccactgcgggatctcagtgtgcggccacgtgtctcacggatgagccaccgggatctcagtgtgcggccacgtgtctcatggatgagccactgcgggatctcagtgtgcggccacgtgtctcacggatgagccaccgggatctcagtgtgcagccacgtgtctcacggatgagccactgcgggatctcagtgtgcggacacgtgtctcacggatgagccactgcgggatctcagtgtgcggccacgtgtctcacggatgagccactgcgggatctcagtgtgcggacacgtgtctcacggatgagccactgcgggatctcagtgtgtggccacatgtctcacggatgagccaccgggatctcagtgtgcggccacatgcatggataagccacttgtggtcgtggtatgcagcatttcactttgcttctgggaaggttttccgagttttccaagtgcaggctccacacacagataagtttcactgtattaagagtatagagggccggatcttggttggattcagaaaagtagttattaaaaatatctgataccacataactggataaatcgtctcttgctgcagtaaagtgttgtgcatgccccgtttcttagcaagcttgcggaggctttgtttgttgttcccttccagtgtggaggagagacggtcggacgctgcagctctgtgttgtgtccttatcaggcatcatgctaaaaaaacatttcctccagggggctgtttgtgaaaggcaagattttcagaggttttaaatgggaggatttcagccctcctggaccaagcctctgcttggagctaacatcgaagctttcagagagttttcctatagctagggtggcctctgtggccatgcctgaccttcgtctaggtgttggcattgctaggaccccaaaatcctaggggatgtgacacccaggaattctagagatctcccaggcaccccgggaggatgtggactccaggcatcctagggggtgtggatgttcgtgatgctgtctttgtggatggggaaaccctgtaacaacttagctcctgctggggccagggagctggggccggggagctgaggccgaggagctggaggccagggagctgggggccggggagctgggggccggggagctggggccggggagctgaggccgaggagctggaggctggggagctgaggctgaggagctggaggccagggagctgggagctggggagctggggccggggagctgggagccagggagctggggccggg

SEQ ID NO: 14523 - DNA, 1081 bp, Artificial sequence
  DNA replication origin
cgccctggctcaaggccccgccgctcctcatgagtcactgtgtgtggttcccctgaggatctggggaaaacctgtgacgtctccctgaccgtgtcgtgtttctcttctccctcacacgtcattaaaggtccagcgagaactctgagtcctccccgccctggacaaggcatcccgtgagtcagccagaatgttccgtggtcctggctgcagtgattggctcaggaggggtcatgtgaccaaaggggatcctgttagagtggattggactctgaggatgctggacgagaatctgcatttctgctcaggtgggcttgtcactgctggcacttgagggctggtgttggtgtccagcaggcaggtcagagagagggacgagcaggtcccggataacatgatggagcactcagacacagcttcccctggcaccagcctgtccctcgggtgggtggctgtaagccagtgtgtgcccagtgtgtgcccggtgtgagccagtgtgtcctggtgtgtgcccagtgtgagccattgtgagccagtgtgtggccagtgtgagccagtgtgagccagtatgtgcccagtgtgagccagtgtgtggccagtatgtgcccagtgtgagccagtgtgtgctcgatgtgagccagtgtgtcctggtgtgtgcccagtgcgagccagtgtgtggccagtgtgagccagtgtgagccagtatgtggccagtatgtgcccagtgtgagccagtgtgtgctcgatgtgagccagtgtgcctgctgtgtgtctggtgtgagcccagtgcaagccagtgtgtgcccagtatgtgcccagtgtgtgtcgtgtgaggcagtgtgtgcctggtgtgagccagtgtgcccagtgtgagccattgtgtgctcgaggtgagccagtgtgcctggtgtgtgcctggtctaagcccagtgcaagccagtgtgagcaagtgtgtggccagtatgtgcccagtgtaagcctggtgtgtgcccagtttgagccagtgttgagcccggagtgagcccagtgtgagccagtgtgagcccagtgtatacccagtgtaagccagtgtgggcccagtgtg

SEQ ID NO: 14524 - DNA, 2824 bp, Artificial sequence
  DNA replication origin
aagtggggaagagagaagaaaggaggagaaggaagagaagaagaagaggagaaggagtaagatgaggaggaggaaacagtaatctttgtggctttcaaagccaagatatttatcatttggtcctttacagataaagcttgccaactcaagttcatgaccatctctaattcttttaaatatcaagtcatgatgtgtattaatataaagattgcatattaaatgcatcttccatagacatagaaagtaaagatatgaaaatcagtttgtactgattgtaagacaagtctctgaacgaccaacaagatggcccagtctgtggagctccaggcttatttacggggtgcacctcgtagtgcccacaaggaagctagatcttttggaaataattctgcaatgtggaaataattttgcaacgtggaaatactgaggcctggggctgactgatttattgatgagaaacccagggaggcattggtttggggttctgtgacatcatgttgaggcatctgcatttcctatcacactgtactaaatcagttagaaaatatcttaatttccctatcctcacatgagtcttactgggtcctgacaacctcctggcctctcaccctaatgagtcctcatttctgagtggacatttctcccaaattcagttgcaacaacagatggtgtgtggccacagcccataaaggtagagactcatgctcaaagctgccttctggtaggcaaagtcgccacctcgaacacaccctccaaagacttgacattcagataccaaatgctccaggtccagctcccaaaagctagatggattgtccgttccattcgggcttcaaatcagaggctgtggtggctgtggtatctcaggactggtgcagtagggttctagcacagcttcaggcagacttcctcaacaacagtgatggtgatggtagtggtggtggtgatagtgaaagcagtggtggtggtgatgatggtggtaatggtagtagctatgggtgtggtggtgatgatggtggtgatggtagtgatggtaataggggtgatagtggtgatgtggtaatgatggtggtggtggcagtggcggcggtggtggtgataatgatagtggtaacaatggtggtggtgatggtggtaatactggtgatggaggtggtcgtggtgatgatggtggcagtagtgatggtggtagtgatagtgacagggtggtggtggtggtgatggtgataggggtggatagtagtggtgaaggtggtggtgatgatgacagtggtggtgacagtggtggtggtgatgttagtgatagtggtgatggtgatgggggtggtagtggtgatggtggtagtagtagtggtggtggtggtgatggcagtgacgggggtggtggtgggggcagtggtattggtggtggtggtgaaggtggtggtggtgacggtgatgatgatggtagtgatagtggtgatggtggtggtgatgatggtgatggggtagtagtggtgttggtggtagtggtggtggtgatggcagtgatgggggtggtggtagtcgtggtggtggtgacagtggtagtagtgatggtggtagtgatgggggtggtagtgatggtggtgctggtggtagtgataggggtggtagtgatggtgatggtgatagtggtgatggcagtggtagtgatggtggtgatagtgatggtgatagcagtggtggcagtggtggtgatagtgatggtgatggtggtggtggtgatggtgatagtaatggtgatggcaatgaaggtgatggtgatggtgatggtgatagtgatggtgatggtggtggtggtgatggtgatagtaatggtgatggcaatgaaggtgatggtgatggtgatcagtgatggtggtgatggtgatggcagtggtggcagtggtggtggtggtgataatgatggtcatggtagtggtggtgatggtgatagtgatggtgatggcagtggtggcagtggtggtgatagtgatggtcatggcagtggtggtgatggtgatagtgatggtgatggcagtggtggcagtggtggtgatggtaatagtgatggtgatggcagtgatagtgatagtgatggtgatggcagtggtggtggtggtgatagtgatggtgatggcagtggtggtggtggtgatagtgatggtgatggcaatggtggtgatggtgatggtgatggtgatcagtgatggtggtggtgatggcaatggtggcagtggtggtgatggtgatagcgatggtgatggcagtggtggtgatagtgatagtgatggtcatggcagtggtggtgatggtgatagtgatggtcatggcagtggtggtgatggtgatagtgatggtcatggcagtggtggtgatggtgatagtgatggtcatggcagtggtggtgatagtgatagtgatggtcatggcagtggtggtgatggtgatagtgatggtcatggcagtggtggtggtgatagtgatagtgatggtcatggcagtggtggtggtggtgatagtgatggtcatggcagtggtggtgatagtgatggtgatagtgatggtggtgacagtggtggtgatggtgatggcagtggtggcagtggtggtgatggtgatagtgatggtcacggcagtggtggtggtggtgatagtgatggtggtggcagtggtggtgatggtgatggcaatggtggcagtggtggtgatggtgatagtaatggtcatggcagtggtgatggtggcagcaaggaaatcattctctgattacctgacatggttaaaaatctgagagcaaagatgagctgagaatgtcatcata

SEQ ID NO: 14525 - DNA, 1020 bp, Artificial sequence
  DNA replication origin
acagcttgacgcagcccaccactggcccaggccttggagggatgtttgctttccaggggcctggcaggacgcaaggcaggccgggtacccgtgcaggtggctttgtttcctggagaggtggggaagaggctctggcagcgggagcaagctgggcgggtcggccttatcgggccgcgtgggcagcatgtgtggctgagccaccgggctccctggggccctgctgcttctgggctgcccagctgggcaggtggtgccgccctggcctgagtccgtcagggcctaattatggagacgggtcttgtgctctgtagtggttattagctgccttcctctttttttttggtgccaaagaattccatttggggaatttatacagccaattaggtatttagctcaaggcaattaatggctggaatgcaagcattagctaaaacctaaattggaattcatacatccacgcttttgcttaacggtggaggctgcagggaggcaccgagtgttgtctggggagctaggagaggctgcccaggcccagagaggaactccagattggctgtggattcatggctctgtccttgcttgggaaggaatgtttcagtgtttcagagcaaaaattttaaatctgtttgacaatcagaggccatcctggtcctgcctggagctgctgttggcctgccccacctggcatcctagctgcgtccttactgggcacgtatgtcaccgccttcatctctttcaaagccacccgtgggcttctggtcatattgtgatgaccctcgaaagtgacggatgccgtgaggccgtgggaacaggagctaggaggctgcaggccggccgccttcagtccacagaagccagatttgaggtgggttccggatgtcatgggtgccctggacaggtggctgtgtgacagcccagcgtgcctgatggtggacagaggctggggctgccatggggctgggcttctccccagacagggagcagtggagaattctcaccaaaaatccagatagatgaaac

SEQ ID NO: 14526 - DNA, 1230 bp, Artificial sequence
  DNA replication origin
ttggttattatagaaaaaactgtaagggttctggaagagaaagcttaagataaagcaatcacataatcctggaacagcttgtagaaaagagagtttagatgctgttacatgggcatcctaaatatgaggaaaacaggtttcaaagaatttttaaagcggatttgatttcatggttgataactttaaatgggacacatccaaacacaggtggtatgtcctaaacattctaaaggcataataatcaactactccacaatagaaaaaaggaaaacaaatctatgaagattaaaatagatcacgcttatgtcgggaagtgagctggtcgctttcacgccctgctggtgggagcatggcctgacgtgatcgtgatggacgctgactggccagcacgttcacgccacataagggaggtggcccgtgacccggcaatctgatgtgtgagaatatgccccaataaaataatccattacccaaaatactaaagaaaacttgaagcacaaagctgctctctgcagtggtgtttgtattaattttaaaacagtagacaaatcattaatattaaacaaaggagaatgcttctttaaagctatgttatggtcacatgattcaaatgttaagcagacattaaaagagaagtgttcaaaaagttgttaataacgtcggaaaatgcaggtgggagaaagtaaatgaaaaactcaggatccaaaactgagcatctaatacgatgacagccgtgcgaaaatgtggatagcagaaaaagctcaaagaaatacaccacactgtgaatagtggctctctctgggtagtgacttttattttcttcatatttctctggttttccagtttttcacgtgagcatgttcctgctaaaaggacaagagaggtgggaaggaggcacatgaaggaaccaccattccctttgagctcagaaaggaggagaggcctgtgcaggaggggtgcagagaggggtggccgagcaggcggggcgcagagaggggtggccgagcaggaggggcgcagagaggggtggccgagcaggaggggcgcagagaggggtggccgagcaggaggggcgcagagaggggtggccgagcaggaggggcgcagagaggggtggccgagcaggaggggcgcagagaggggtggccgagcaggagaggcgcagaggggtggccgagcaggaggggcgcagagaggggtggccgagcaggaggggcgcagagaggggtg

SEQ ID NO: 14527 - DNA, 1011 bp, Artificial sequence
  DNA replication origin
gcagttattatgaaatacggcgagcagcgggtcctgcagagccccttccctccagcgcggtcaggcagagggcatctcccagggcagacgccacccgggcctgtcatgctggtgaactgggcgctgtgcgctctgaacgcgcaggggagggttaaactccagtatcctcagaaaagcgctgggcggagccgcctttctccaagtcaggggctgcgtgtgggcccggggcgcactgagcgaggccttctctttccccagctccctgcgcatctgtcctcagactgtgggcaggagcggatttaatcctagcgaggatggcggggcctgcccagaggcccctcgcacccactaatctctgcacagacgtgggtgccggcgggggactgaggtgcagggcagggcgctggcctggggtgccgccctcctggggcctttcaggacaggcctcccctgcactggtgcatccagggggagccgaggtgaatgcctctgagggtctgagaagcgaaaccgaggagctcgtgcgccctgaggtgggaccagccctgggttccggatggaattttggggctgggggcacctctgtgtctgtgcctaggcagcttctggggtcgggaagggaagccacggtggaggcgccaagaggagagcaggtcctcagcggcggcagcttctgctgttttctcttctttcgggagattcctgtgccgagtgtgacaagtgggaaccggcagctcgtggggtgcagtgtgggtggtgggtgaggttctggcccagcctaggaccccctggggctccctggcatctactccgtgcagctttaatttggaggcagccttaagaaaaatagcgatattgaaaatcctacgtcgtctgcctggactcaacagcttttgatgataatggaagcaggtgtgtgtgtttaatttaattggagccgtaagtagccccagcagaataaaagccgaggctgtctccccggctccttgacaaaggccggcctgggtgtcc

SEQ ID NO: 14528 - DNA, 1015 bp, Artificial sequence
  DNA replication origin
gcggctgttggaggagattgcagaggggcagcgaggccagtgaggaggtggaacggggctcaggctggggggcggtggggctgaggcagagtcaggccccttaagagatgtctgggaaggactgagggagacttgggaactgcagggatttaggtacagggtcacgttctggaattccccatatgtggcccaccccatcagcccacagtgcgcctgtggtgggcggtgataggtgtcgttgctgcggttctgtgagggggcgctgcccgcactctgcctcctccaaggctgtgggctgtttggtcttgcaggcttgcacccccgaagtgaggaggaagcctgtggggcagccctcaactgtgggacaggaatgggggtcaatgccacccgccctgtcttcagtgaggaccacactgtggaaccagcgttgtactgttctgtcctgctggcctttgtcaagtggtgtttggatgaatcgtgttgtgcccagtccaaaatcagtgaggcaccatgctggggcccaaggtgccccaggtctagtggtttggaaggaatcacaggactcacgagtggttctgctgggctacggtttactagagaggactttccatggtgtagtgtggagaaaagccttgcaggttacaggaatagcagaaacaccaagaacagcaccaggaacaataggcagaagcaccaagaacagcaccaagaacaataggcagaagcaccaagaacggcaccaagaacaataggcaagagcaccaagaaaagcaccaagagcaataggcaggagcaccaagaacagtaccaggaacaaaaggcagaagcaccaagaacagcaccaggaacaaaaggcagaagcaccaagaacagcaccaggaacaataggcaggagcaccaagaacagcaccaagaacaataggcaggagcaccaagaacagcaccaggaacaataggcaggagcaccaagaacagcacgaagaacaataggcaggagcaccaagaacagcaccaa

SEQ ID NO: 14529 - DNA, 1243 bp, Artificial sequence
  DNA replication origin
ctttgctaagtccagaaaggacaagcgctgatgtccctgtgtgttcatatccttctcccaccccgtgaaatccgtatcatctctattaatgttcatatccttctcccaccccgtgaaatccgtatcgtctctattaatgttcatatccttctcccaccctgtgaaatccatatcgtctctattaatgttcatatcctcccaccccatgaaatccgtatcgtctctattaattaattgatagattgattcagtaagaactattgggctctaactattttatagacaccatggcagtaactgagataaacccactcttgccctcctggagtctattttcttttaagggaggagcaagttcttaagtaatcacaatgcagttggcgagagctgggccagggagagtccagggagctgggagaatgttgcaggggtgccccgcccggtcaggaattagggagccctcttggaggaagcaaggtgcaacttggtacctgaaaaatgagtggactctagtcagactgggggggagggaaggtttttctgcagtggcatgttagtgaaggcctggtgggaacaaaccggggtgtgtgggatgtgtgacgaaggggatggaggtgcctggggaggcctgcctggctgtggtggggatgagtctggaggcatctggaggcctgcctggctatggtggggatgagtctggaagcgcctggaggcctgcctggctatggtggggaagagtctggagacgctgtccatgaggctggcttggactccaccctaaaggcaggggactgcctgagggcattgcagctcaggagcaatatgacctttgcattttgtaaagatgatcctggcggctgttggaggagattgcagaggggcagcgaggccagtgaggaggtggaacggggctcaggctggggggcggtggggctgaggcagagtcaggccccttaagagatgtctgggaaggactgagggagacttgggaactgcagggatttaggtacagggtcacgttctggaattccccatatgtggcccaccccatcagcccacagtgcgcctgtggtgggcggtgataggtgtcgttgctgcggttctgtgagggggcgctgcccgcactctgcctcctccaaggctgtgggctgtttggtcttgcaggcttgcacccccgaagtgaggaggaagcctgtggggcagccctcaactgtgggacaggaatgggggtcaatgccacccg

SEQ ID NO: 14530 - DNA, 1301 bp, Artificial sequence
  DNA replication origin
gccccagctggaatgctgtctgcgtagtcatactataattttatttgtattatttttattgttgtattgttattttatatttttttccccagtactttcaatcctctgttggtcgactcaggcagaacctgagggtatgcagggctggctgtattcttgcccaaagggacctgagaaaacatctagaccaacgcacaggactgtgtgattcacccgaaaccacacagttagttgctgagttagagacagtactaggtgtctggcttcccaacagggtgaattatttctggaaattgttttttctccctgcatctaaatttaacaatgaggaaatctattagtaatcagcaagatgctgaagcagtaactccaaaatcagttgacgaatgatttctcaggagcagcacgctgggtgctggctcaggaggaaggtccgcatcggaatggtggactgtccaggtactggctcaggggggaggtccacgtcacaatggtggactgtccaggtagtggctcaggagggaggtccacgtcacaatggtggactgtccaggtgctggctcgggagggaggtccacgtcacaatggtggactgtccaggtagtggctcaggagggaggtccacgtcacaatggtggactgtccgggtagtggctcgggagggaggtccacgtcacaatggtggactgtccaggtgctggctcgggagggaggtccacgtcacaatggtggactgtccgggtagtggctcgggagggaggtccacgtcacaatggtggactgtccaggtactggctcaggagggaggtccacgtcacaatggtggactgtccgggtactggctcgggagggaggtccacgtcacaatggtggactgtccgggtgctggctcgggagggaggtccacgtcacaatggtggactgtccgggtagtggctcaggggggaggtccacgtcacaatggtggactgtccaggtgctggctcaggagggaggtccacgtcacaatggtggactgtccaggtgctggctcaggagggaggtccacgtcacaatggtggactgtccgggtactggctcgggagggaggtccacgtcacaatggtggactgtccaggtagtggctcaggagggaggtccacgtcacaatggtggactgtccaggtgctggctcgggagggaggtccacgtcacaatggtggactgtccgggtagtggctcgggagggaggtccacgtcacaatggtggactgtccaggtgctggctcgggagggaggtccacgtcacaatggtggactgt

SEQ ID NO: 14531 - DNA, 1103 bp, Artificial sequence
  DNA replication origin
aaataacactgctgcattgggcattatcattcagtttagcagctttcctctcttcatgcacttccatctttgggttttcctttgctgcctctctcagctaccccccacctttctgactttctctgtgattttggaagaatgctgtgaactagccattgcaatggcaaggaaagcagtcaaggaccagcctccagctcacaccataatgacctaccttccctgggacactccacgcccatgtgtgcttcatgtgtaggtgaagggcggcacctggcctcagagcaaacaactctcccataaggtgactggccaggtcaagccagctggaggaaggaatacaaccccagcaagaggccactggtgcacagctgggccttctttcctgatagggggcaaggcaccaggaggaggcagagtgagcaaggcccccaagcctcccatgcaggactcccccgtgctccagcatggaagggtgagggcttcacctgggccctgggggcacagtgactgggctacatcccagaggtgcgggaccagcacagacactccctcccaggactccaaggcaggtgagcaaggacctcctttcccagcgcctgtgttccttctaacagagacaagcaggttagggagtgtgaggaaacctcaaggcaagggaggaattcaggggactctggcttgagggaggggagcgtcaactcaggagtccagggagactgtgtcaagactcctggttctctgcagtttttgtttgtttgggattttgacgataaagcactactggagaccagaagggcctagaggccgagaggaaggtgccggagcccagctgcactgaggtgggtgcaggcggcgctgggcaacggcgaaggacccccctccatccccgcctgcgtttgcttctgcaccccgtggacaccgattatcctaacctgtcatgtgtaattctggccccgaagccgcctggaaacattggctttatggtaaatcttcttaataaacaagattagcaggaaaggaggtgccggggactggaggttttatgggtttaaaacaggggcgtccgcctgggaaagcagcggcttccactccctcgctgccgt

SEQ ID NO: 14532 - DNA, 1834 bp, Artificial sequence
  DNA replication origin
acttctcttaccacctgtgttaggccattctcgcatggctgtagagtaatacccaaggctgggtaatttgtaagaaaagtggcttaattggctcacagttctgcaggctgtactggaagcatggtggcatctgcttctggggaggcctcagggagcttctgatcatggcagaaggcaaaggggagcaggcatgtcacataggatgggagagacagggagagagagggagagggacagagggacagagagggagatggagggagagagaaggagagagagggagggagggagagggagagagttagggagagggagagagggagagagggagaggcagagaggaagagagggagagagtcggggagaggcagagagttagggagagagggagagagttagggagagggagagagggagagggagagagttagagttagggagggagagagttagggagagagggagagggagagagttagggagagagagggagagttagggagagagttagggagagagggagagttagggagagagttagggaaagggagagagttagggagagagggagaggaggagagttagggaaagggagagagggagagggagagagttgagggagttagggagagggagagagttagggagaggcagagagttagggagaggtatcacatggctttaaatgatcagaacagggagtcgcggagctcactcatcaccaaggggtggctcaagccgttcaggagagatcctccgccatgctgccattgcctcccaccagaccccacctccaactccaacactggggattacaattcaacaggagattagggcaggacaaatgtccaaacagtatcaccaccaagcccacatttggggtgcgcctcgctgtgggcttacagcctttttcctggatggatattgctgggggggggggttgcatttgttttgaggcaagcgctgctgtgttaaaaattagagtctagtctactacaaataatgagtcagaagcagccccatctatccagtccttgctgccatccttctcccaaccagcggctgtttttgtaggatccgcaggtttacacacgggcctgactttgtaggagggaagggctgcccgggagctaccgtgacctctatgctgccgcattctgcaagaaggtgctttctacggggaggtggtcccctgggcgtctgggtgtgaaggataagctgccacccaccaccccctccgggcacaggtggctgcgacaaacaaagaggagctttcttgaaggatgggagggtgaggggccccagcaaggagatgacggaggtctgaggacagaggtgtccgtgaggagggcacttaagacagtcagccccaatatccaactctgaattgcagatgtttgggctacgatggaacctccccgctgccatcccagcccccattcactgtccacaggtgccagccttgcccaggctggtaaggggcgcggaaggcatggccctggtggccaggcatggaggagaaaacccacagggcgccgagcagatgtccttggaatgagaacgtggcaggaaggcacgcgggagggctcaggcctctctgtccaaggcagaagcaggtgcggaggttgggggcccaggtggggtcgccaggacagggacccggcagggggtggtcctggggtagcgtgtgagggaggtgggctgtggagaagcgcaggctccctcccacccggaggcccctactggccccctttgtcttaggacctcttggaagtggcactgtctcctgaggaggacacgcgacatcccccaggaccccgggcgggacggcggc

SEQ ID NO: 14533 - DNA, 2209 bp, Artificial sequence
  DNA replication origin
gtgtcactgactccagggtgcaattgcagggtggggaatcggaagctgcacccccccaaatggaacagcccaaggggttcaccttgcccactgccaaattaccaagacagcataattgcagtagagaaagagtaatttacgcagagcttgtgtgcggaagactggagttttattattcaaatcagtctccctgaaaacttgaggatcagagtttttaaggataatttggtgagtagaggctcgggaagtggggagtgttgattggtcgggttggagatggaatcagagggggttgaagtggggttttcttgctgtcttctgttcctgggtgggatcgcagaactggttgagacaaataccagtctgggaggtgtcagctggtacatcagaattcagggtctgcaatatctcaagcactgatcccagattttacaacagtgatgttattcccaggagcaacgtggggaggtttagaatcttgcagcctccagctgcatgactcctaaatcataattctaatcttgtggctaatttgttagtccccaggcaggaagggggtttgttttgggaaaggactgttatcatctctgtttcaaagctaaaccataaactaagttcctcctagagttagtctggcctacggccaggaatgaacaaggacagcttggaggttagaaacaagatggagtcagttaggtcaaatctctttcgctgtaataattgtctcagttataatctttgcaaaggtggttttaaaaatattgctcctagaccccaaatgtctgaagaattggccttagcatgttactgtattatcaatattttgccagtcagcagacaacaaaaaggggagtggaagtctggaccgtccatcttgggtggtgttagtgttggtgtcggtagtggtggtggtggaagtggaggtgatggtaggagtgattgttacagtggtgttgatgttgaaggtgtcagtgttggtggtgggatggtggtgatcatggtggcagtgatggggtggcaacaatggtggttggggtgacggtggtaatcatggtgactatgtagggtattggtggtggtagtaaaagtgatgctggaggtcgtggtggtggtattgatattggcagtgttagttgtggttattatggtgctgctgaaggtggtgatagagatggtaatagtggtgatggtgattgtgatggtggtggtattgacattggcagtattgctggtggtgatgatggtagagatgatggtgatttccatggtgggtgtgttgatgaaggtggtgactgttgtggtggtggtactgatattgatattgtgttggtggtggtggtattgatattgacagtaatcctgatggtggtactgatggtgatgggaaaggtggtggtgattttgacagtggatgtgttgttgaagaaagtggtgattgatacggtgatggtagtggttactgtggtggtgctggagggtggttgtagagatgatgttaaagatggtgatggcaatggtggtgaagctggtggtgatacagatggtcatggtggtagtggtggagctggtggtgatggaagtggtcgtggtggttgatatggtttggatctgtgtccccacccaaatcttatgtggaattgaaatccccagtgttggaagtggggcctggtgggaggtaattgaatcatgggggcagatttccccctttggtgctgttctcatgatagagttctcacaagatctggttgtttaaaagtgtgtagcacctcctgcttctctctctcttcctcctgctctggccatgtaagatgtgcctgcttccccttcaccttccaccgtaattgtaaatttcctgaggcctctccagccatgtttcctgtacagcctacagaaccatcagccaattaaacctcttttctttataaattactcagtctcaggggtttatggcagtgcgagaatggactaatacagtggtggtggtggaggtggaagtggaggtgttagtggtgatgaagctagtggtggtagagatggtgataatggtggtcatggtggtggaggtggagctggtgatgatggaggtggaggtgttagtggtggtgacgctggtggtggtggaggtggtggtagaggtggtgatggtggttatggtgatggtggcgaagttgtaacagaggtggagctggtggtgatggaagtgtcagtg

SEQ ID NO: 14534 - DNA, 1341 bp, Artificial sequence
  DNA replication origin
caataccaccctgctcactagctacttttgtttgggaaaatacagttttgaaaaataacacatattcataaagaatgttagcaagggctggggatggtggctcacatctatagttccggatactcaggagggtgaggcaccaggcactccaggctaagccacacaacaagaccctgtccataaacaaaaaataatattagcaggtaatagatttattgttttttaataaatgttttaaatatctcagctttaatttctaatacattaaatattgattgatgcaaaccacagaaacaaactctttggggttttcaatgcttctagactacaaaggggtgtgcaatggttacttttttgtgaatatgaccggtccacagggtactcagatcaaacatgattctgggagtgtttgtgacaggcatgtgtctgagcgtggggaaatgtctctgtgagaggcatgtgtctgtgagtggggagtgcgtgtgtgtgtgtgggggggggtgtctgtgagggggaatgtgtgaggagggagtttgaggagagagtgtgtgtgaaggaggactgtgtgtgaggaggaagtgtgtggggggagtgtttctgaggagggagtgtggggggggaatgtgtattaggaggaagcgcatgtgaggggggagtgtttgtgaggaggaagtgtgaggacagagtatgtgtgaggaggagtgtgtgtgagcgggagtttgtatgagggggagtgtgcatgagggggagtgtgcgtgggggggagtgtgtatgagggggagtgtgagtgggagcgtgtataaggggggagtgtgtgtgagtgggagcgtgtgtgaggggaaatgtgaggatgtgttcaggcggaagtatgtgagtatagtgggtgaggagggagtgtttgtgagggggagtgtgtgtgaggcagagtgtgagggagtgtgggtgagggtgtgtgtgtgaggggagtgtgagggggagtgtgtgtgaggagggagtgtttgtggggggagtgtgtgtgaggcagtgtgaggaggtagtatgtgtgagggggagtgtgtgtgagggggagtgtgtgtgaggagggagtgttggggagggagtgaggggggactgtcagtaagtgggggggtgtgagaggttaatgtgtgacgggagtgtctgtgaggggacaatgtgtgtaaagggggagtgtttttagtggggagtgtgtcttaggggcaagtgtgagcgagtggtttgtgtctttgtggtaatttctgtaagggatcagcatttgaactgggagactcagaaaagcagatgtcctgcccaatattcgtgcctctcatccaattcttgaag

SEQ ID NO: 14535 - DNA, 942 bp, Artificial sequence
  DNA replication origin
tccctctgttatgcaggctgtagtgcagtggtgcgatcttggctcactgcaacctttgcctcccaggttcaagtaattcttgtgcatcagcctcccgagtagctgggattacaggcatgcgccaccatgcccggctaatttttgtatttttagtagagacggagtttcaccatgttggccaggctggtcttgaactcctggcctcaagtgatccgcccgcctcggcctcccaaagtgctgggattacaggggtgagccaccgtgcccagccaagtgtcagggatttttatagggagttggcacgatgggttattggctagtgagagttaaagagaactctagagaatacaggactagcagatgaagagaacacctccaaccctaggtgagcgccgccaaggaaggagcccccacccggacagggagacctggcttcctacgtggaagaaattgttagcggccttctgtgggacctgaggacgtccactcacctgggtgggtggtgggccggggggatgtggagccatcgcaggggaggtgctggggagctgctggagccggagctggaaagcctactctcttgagtcccacaggctcctgtgtgtggctcggatggggtgggggcttgtggggtagttgtctggtgtgctgcttgtgctgtcagagtctgctggagaaaggggggccttacggaaacctggagaaagtcccctccttccccagtgaccttccagcaccccacggtgatgggacgttgaactgggcactaaagcaggtgggtgggtttgggctcctagcgactgagtgaatgaaatgcattcaattatgtactttattctaaaaatgattgagtgtccactatgctagttttaatcaggttagactttgcaactttatattttaagaagaaaccctctcagcactttgggaggccaaggcagg

SEQ ID NO: 14536 - DNA, 1985 bp, Artificial sequence
  DNA replication origin
taatggctaatggatgctgggcttgatacctaggtaatgggatgatctgtgcagcaaaccaccatggcacatgtctaccaatttaacaaacctgcacatcctgcatttgtacccctgaacttaaaagttggaccaaaaaacccagaaaacaaagtagactttaaggcaattattggagaaaactttttgtgaatatttttactttttttgttttaattttttattttgaattttcaaacatatataaaagcagagagactaatatagtgaattagatacacccatcacccagcttcaacaattattgctatgtccgatcttgttttatctaaactgtatccaggccacactgccggactattttgaaataaattccagacatcatattgttttctttgtatttcagaatgtatctctaaaagataagcacttaaaaccactctaccattattttataaaaaaagaataactcttcagtaaaacaaaacagaaaacagtaataggtaaggagggcggagggacccagtagtgggtaaggagggcggagggacccagttgtgggtaagggagggcggagggacccagtagtgggtaagggagggcctagggacacaaggtaggtaaggagggcagagggacccagtagtgggtaaggagggcagagggacccagtagtgggtaagggggggcggagggacccagggtcggtaaggaaggcggagggacccagtagtgggtaagagggtggagggccagagggtaggtaaggagggcggagggacccagtagtgggtaaggagggcggagggacccagtagtgggtaaggagggcggagggacccagtagtgggtaagggagggcggagggacccagtagtgggtaaggagggcggagggacccagtagtgggtaaggaaggcggagggacccagtagtgggtaagagggtggagggccagagggtaggtaaggagggcggagggacccagtagtgggtaaggagggcggagggacccagtagtgggtaaggagggcggagggacccagtagtgggtaagggagggcggagggacccagtagtgggtaaggagggcggagggacccagtagtgggtaagggagggcggagggacccagtagtgggtaagggagggcggagggccacagggtaggtaaggagggcggagggacccagtagtgggtaaggcgggcggagggacccagtagtgggtaaggaaggcggagggacccagtagtgggtaagagggtggagggccacagggtaggtaaggagggcggagggacccagtagtgggtaagggagggcggagggacccagtagtgggtaagcgggtggagggccacagggtaggtaaggagggcggagggacccagtagtgggtaaggcgggcggagggacccagtagtgggtaaggcgggcggagggacccagtagtgggtaaggagggcggagggacccagtagtgggtaaggagggcggagggacccagtagtgggtaagggggggcggagggatccggtagtggctaaggagcggagggacacagtagcggagggacacagtagcggctaagggtggaggagggacacagggtctctgagggaggcggagggacacagggtctctggcccaccaggaagtttgggcgccagagcagaggaagaaggcagaacgtttgcgtttcagtccttatctttgcaagtgcaaggcagacagccatttggttgtgaggtgtctggaaaggtttgtgacgagcatgcaagctaatttcccttgaaagttaaggttacagaatgacatgagtataagaggcagtctggctggccagaggacagctgttggagctgacgggagggcattgtctatgggcaggaacaacctggcacatgaagccaggctgccgggcctggcgtgcacacctcagtaatgggtgtgctggcccagtggagggtcttgtacatgcag

SEQ ID NO: 14537 - DNA, 2055 bp, Artificial sequence
  DNA replication origin
ccctcggcagggagggcggtcacgggggccggccaggtcggggtggggtcctcccggggatccagacacggccctgtggcctctccccgccccaagcctttcctttctctccccctctctctcttcctctccttcctccttcccacaacaccgcccgctcgcagcgccccgccctctcctggaccgcgcactccctccgcggaggccccaggacgcgcacgagcgcgcagtggacgtcggcgcgcggaccgggcatgggttccccagctgtggcgccccgcgtgcgcgttccgtagtgcccggtagggcactgggcttagctgctcgaggccgcgccctaagaggcggggcatagacaggaagaagactggcgggcatgtgggcggggcatgatctggaggcggggcgggccgggcgtgtgggcgaggcccgaggctcgcggcgccccagctctcgcgagagcggcgcctgatgacgaccgggagggcggggcccgtctggggcgccggcgggtgcgtttgaatctggtccgagcgcgggaaacggcgggtccccgagcccaggtaagagctgcggtgccgagccgggattgggttcagagcaggggctgggaagtagcagggatcgggcgggaagcccctcctcggctggtcggggtcccagcctcccctcccctaaggaggcggccgacctgcgtgcgggcagtgctgcctctgacggaactggacggaactggcgaccccgggccatcccccctacccagctcagcgacgcccgtccttcttgtccgtgtcggaggaaaatcccagccccgggcgcgggcactgccctcagagagcgaccccccagccctgagcatgggcaccgtcctcagagagtgtcccctcagtcctgggcatgggcactgccctcagagagcgacctcctctgtcctgggcatgggaactgccctcagagagtgtcccctcagtcctgggcatgggcactaccctcagagagcgaccccctcagtcctgagcatgggcactgccctcagagagcgtcccctcagtcctgggcatgggcactaccctcagagagcgaccccctcagtcctgagcatgggcactgccctcagagagcgaccccctcagtcctgggcatgggcactgccctcagagagcgtcccctcagtcctgggcatgggcactaccctcagagagcgaccccctcagtcctgagcatgggcactgccctcagagagcgtcccctcagtcctgggcatgggcactgccctcagagagcgaccccctctgtcctgggcatgggaactgccctcagagagagtcccctcagtcctgggtgtcggtactgcccttagagagagtccccctgagccctgggtgtaggcactgccctcagagagtatctccccagctgtggacgtgggcattgtcctcagagacatcagtctcctgaactcttgttgctggtttggtgcctcttgttgtgtccatgaggaaggagtttggggacggagtgggaagtcacaggtggtgagaaggtaacagggatttcttctttttaatgctcatcttgatttagtaccagacctcctgtgcgaagagtaacctgctcttcggactgataactggatggtgagatgactccttaccttgaaagtagcattctggctgcagggctgaggtcttatgcacatatggtacaagaaacatggaatattgccactttgggagatagattgaaaaattaaccattaaaaaattacagtcactaatataagagggaaaatgggaaatataggaataagtttggtagtctagaggaagtgtattactgtaagttggactaacatgccaaagaggtacacttggaaatagagcaaacaagaaaagtgaccagaactatgaaaaagtggagagtgttcacagacttgccgggcgaagatgtatgattccatgtgtttgctgcaccttattggattatttttctaaaatcatgaatttgtcctagccactattcattatgcttgttactggccactctcccttccct

SEQ ID NO: 14538 - DNA, 2147 bp, Artificial sequence
  DNA replication origin
ctaatttttgtatttttggtagagacagtgttttgccatgttgcccaggctgctcttgaactcctgagctcaagtgaaccacctgctttggcctcccaaagtgctgggattacaggtgtgagccgtctgccaaactttatacatttattcaacagataattggtttaccatgtgtctggaacagtgataggcgaccagtgagttttaaataaaactcacataatctctgcccttgaaagtttacagtccatgtaggaaagttttaaataaaactaaattgtaattacgttaaatttggtgaatcaaagtaacacaggccgggatggtggcgtaggcctgtaatcccaatactttgggaggctgaggtgggggggatcccttgatccccctactgcactccagcctgggcaacagagtaagaacctgtctcaaaaaaaaaaaaaaaaaaaaacacatacacacacatgatgctaagaaaactcacaggacaccgagatcagctttcaactgagaagttacggggagtggatgtgagctgggccagtcatggtaagagcccgcgtggaggtgctggggagaggagaggagaggagcaagtgtggaggtgggtggggcaggagcaggtgtggatgtgctggaggggaggggcagacgtggaggtgctggggggaggagcaagcatggaggtggggaggttggagcaagtgtggaggtggggggattggagcaaatgtggatgtgctgcgggggaagagcaagcgtggaggtggggggggaggagcaaatgtggaggtgctggggggaggagcaggtgtggagatagtgggggaagagcaagcgtggaggtgttgggagaagcaagtgtggatgtgcaagcgtggaggtggggggcttggcgcaagcgtggaggtgctggggggaggagcaaggtggaggttgggactggagcaaatgtggaggtgctggggggaggagcaggtgtggagatagtgggggaggagcaagcgtggaggtgctggggggaggagcaggtgtggagatagtgggggaggagcaagcgtggaggcgggagggttggagcaggtgtggaggtgctgtggaagaggggcaagtgaggatgtgctggcggggaggagcaagtgtggaggtgggggcgttggagcaggtatggaggtgctggggagaggggcaagtgtggaggtgctgggggggaggagcaagtgtggaggtgctggggggggaggagcaagtgtggaggtgctgggggggaggagcaagtgtggaggtgctcgggggagcagtgtggagatgttggggagttccgagcaggtgtggaggtgcttgcggggaggagcatgcctgggggtgttgagtgggaatgtgtaggggccgtctgtggaactgagaggcattgattgaggtacagtgggtgagggtcccagaggaagaagaaacactcagctgcagaagtcaggaaatgctcttgctcttgaacagtggaacacagctgagtgggagtgatctgtgtctgaaagattctcctgttgtatggaaaatggagcaggcaggggagaaagattgagaaatggagagggacggtggcttggactgaggggacagagttgaggtggctacattctccagttagagctcaaggacttggtgtctgcacatgggctgaggcagtgggaggtggctggtgctgtccaggtctcagctccagcaccaagacggatgatggacagacagatggacaaagggtgtgccttgaggtgtccatgtgacacagaggacggggatgcagtgggatgaactggtcctgagctcagacaacatctgtatcagtgacatacatctggaaaccagggtattgatggtattaagaacaccacataaaaataaaaagtgatcagaaccaaaacccacattatgccaattattgagtctggttgaaggtgaagacagtgttggaaaatggccaaaaatgtgcaaggaaaatacagaggaaggcgctacagaggccaagaaggatggcccacagtcaaggagaaaggaagtgcccggtgtcaaaggcccacagtcaaggagaaaggaagtgcctggtgtgaaatgccgagcggctacgaggaaaagcgcaagggctccac

SEQ ID NO: 14539 - DNA, 1111 bp, Artificial sequence
  DNA replication origin
ccgctcatcgccccgcagtgccgcgctgccctcccggccgaggcgggctgggtgctcgcgctgatcccgggcggctcagccccgcgccagcgcccctctgaggggacgcggctccgccgcacgcccgcctccgcccgggacggtggcgtcatcacgcggggcgggagcggcgtgggcctggggctggcacgtcaccgggagcgggcggggtggatactgacgtcatcgcgcggggcgggccgtgggccgggtcggagactactggagtgggccgggcaggcgcacgacgtcatcacgcgagcgttgtgtctcggctggcgggagccggggacgggaaaggagagtgctcggtgcgtgggctgggcgtgcctgcgtcccctcgagccccacggggcaccctccccacttgcctgtggcctcggagcccgcgggcggttttggctcggcgtcgcgccccgaggcggcttccgggtgcgtggctgcgctcgccgaggcccgggaagttgccgtcgtcaaacccaaaggctgaccgcctctgggagctgctggcaaacgtgggggtgcgcggccgctgagcgcagccggggtggcggtgggatgagagggcggcgtccctgtttgcggtcattttgcggccaggaggacgggtgagagggcgccgcccgccggaggtcggacgggcgccgctggcgggagtcctccggtatttttcggtgtgaggttgcctagccagtgtgcaaggttgtggcttttgcggagtctctcgggacggtcttgttatcgggcattccggcgtgagaacgctgcctctggggcccttcccaccctgcttgtcagggttttaaacacaaacgactccgttgtgaccttgacaactctcacacagttcagttggcttttaagatgcctttaatcccaaaagtcctccctgaggggtctggtagtgccgggcaaagaccaccgcaagcgcccaagggacgctgttgacactcgggaactccaccccgggcaccacgcagcttcgccgaaggtgttaatattgtggccaactatgaatagctgtttcaaacgactaattttgggcctttcctgtgattcctgaggtcacttt

SEQ ID NO: 14540 - DNA, 1326 bp, Artificial sequence
  DNA replication origin
cagcaagacagagtcctgattggtgtgtttacagtcctttagctggacagaaaagttctccaagtccccacccacccagaagcccaggaggcttcacctctgggcaccactgaactctagcctgggtgacagaatgagactctttaaataataataatatggctgttggtggtgatgctgagtcaagaggtcataaagcaggctgcttacttagctctgggtgtgggaggagcgggacttccttagctccaggtgtgtgtgaggggggcggtgagccggacgtccttagctccgggtgtgtttggggggggcggtgagcgggacgtccttagctgggggggggtgtggggagagcgggacgtccttagctcctggtgtgtgtggggggggcggtgagcgggacgtccttagctccgggtgtgtggggggaagggggacgtccttagctcccggtgtgggggcgggggggagcgggacgtccttagctctgggtgtttggtggggagccggacgtccttagctccgggtgttggagggtgttggaggggggagcgggacgtccttagctccgtgtgtgggggtggggagcgggacgtccttagctccgtgtgtgggggtggggagcgggacgtccttagctcctggtgttgcggggagcaggacgtccttagctgcggatgtgggggagagcgggacgtccttagctctgggtgtggcggggtggggagcgggaagtccttagctcccggtgtgtgtgtgtggtgtggggggagagggacgtccttagctccgggtgtgggggggggagcagacgttcttagctctgggtgtggcggggaatgagacgtgaccactgtcacatttcagtggctctgggcctaaacatttaaaggagctcacattcctcagattagtttcttttctttctcagtgtcatgcagggaacaggatgacgatgtggacgtcagcgctataccactgggtccatgtagatgaatgtcacagggttgggccgcggtgtctctgtcatgtggggactcaggctggagagtgcctttgctgctttgcacagagctagtggtcatcctgaaggtccagaatggatttatggcagtgtccctggaaggaagagtggatttagaaacatgttataagcagaaatagtagtatctggtgacgctttcctctgtttattttttaatagagatggggtttcgctgtgttgcctgggctggagtgcagtggcagttatcacagctcactgcagcctcgacctcctgggctcaagtgagcctcctgtcttagcctcctgagtagctgggactg

SEQ ID NO: 14541 - DNA, 1979 bp, Artificial sequence
  DNA replication origin
gacatccagatggtatgctttttggttcgttcataattatttccttatgattaatttctgaaaatgaacttgctggatcaaagtaaatgtaaacttaactcattagctttacataaaagttgtaattatttatatcatcagagcataattccttatgtcctaagcaggagctgggcatcatcttcgtttaaaagttttgctcatttgattcagaagaaaatggcatttctgggcatttttaaaagcaggtttactgtcttttgttatttaccacttgtgtacttttgcttattttttttctctcttttttttattttttagagacagggtcttgctctgtcacccaggtttgagtgttttagtcacagagatggttaaactctggtcccattttcaagactctccatctgcgtgggactaattaggagagaaagagtgatgtgacatgtccatatgagagatgtggcagccttgtgctgtcatactcaccggagaaggcatctctcagagaagtcagagcttgctcaggagggaccccagggctggcggagcttaggctgagggccaccagcatgagggatgaggctgtggaggccaggagggctgactgtgagtgccgggtgccatgtggaggggccaggagggccgactgtgagtgccaggtgccatgtggagaggccaggagggccgacagtgagtgctgggcatcatgtggggaggcgaggaggggaggccaggagggctgactgtgagtgctgggcatcatgtggggaggcgaggaggggaagccaggagggccgactgtgagtgccgggtgctgtgtggggaggccaggagggccgactgtgagtgctgggtgccatgtggagaggccaggagggccgactgtgagtgctgggcaccatgtggggatgccaggagggccgactgtgagtgccgggcaccatgtggggaggcgaggaggggaggccaggagggccgactgtgaatgccgggtgccatgtggggaggccaggagggccgactgtgagtgccgggcgccatgtggggtggccaggagggccgacagtgagtgccgggtgccatgtggaggggccaggagggccgactgtgagtgccgggcgccatgtggggatgccaggagggccgactgtgagtgtcgggcgccatgtggggaggcgaggaggggaggccaggagggccgactgtgaatgccgggtgccatgtggggaggccaggagggccgactctgagtgccaggtgccatgtggggtggccaggagggttgactgtgagtgctgggcaccatgtggggaggcgaggagggcagactgtgagtgccgggtgccatgtggggaggcgaggaggggaggccaggagggccgactctgagtgccaggtgccatgtggggaggccaggagggccgactgtgagtgccgggcgccatgtggggtggccaggagggccgactgtgagtgccgggcaccatgtggggaggccaggagggccgactgtgagtgctgggtgccatgtggggaggcgaggaggggaggccaggaggactgactgtgagtgccgggtgccatgtggggaggccaggagggccgactgtgagtgctgggtgccatgtggagaggccaggagggccgaccgtgagtgtcgggcaccatgtggggaggcattgctttctctgtgggagcgaggtggctgggctgcagagttactgtgtggcgttggggtgacagcagtgtctgaccatggaccatgacatgaatagggtttttccttacacaagggtaacagattaagttttcaggaatatatctgacagtggaattgaggagtgaagggggcagtggtagttctgtaagttttcctccttttattgtaacatttataaagacagcacagtcgtcccttggtatccatgggagaagggctccaggaccccctcagataccaaaatccatgaatactc

SEQ ID NO: 14542 - DNA, 1486 bp, Artificial sequence
  DNA replication origin
tgcaaataactgcttagatccatgacgctatcataactacaagaaaaacgatacggtcctttctgctcaatactgaaaactaatacagtaagattaactaaaactccacaggagaatcatcatttgccctgaatgttgtttttcacaccacatacactgctaaaaatcacagtgggagaaagggggctgggtatccagcattcataaatgaacaaagcagtgtaaagagcagtcatgaacccaccgagtctctctcactgggttttggtaaaaagccagagtgagtggtaaaacactgtcattgttccaggagggtcatccttaggatttgacagggcagaaagagaagattgggagacaaaacaggattgatggaaaaagaactggaaatgttcctgagaactaacacaaggaaagtgaggaaggcagagagtgttgaatgagaagcaacaggatttgtgcgaggaagagggagctgcgtagtgagaatggaggccaggaagtgttcattgggaactgacatgacccgggaacactcagggtcaggacggccgggaatactgagtgagaagtgacagaatatgggagggcgggaggcaggaaatgttgagtgagagctgactgtgtgagagtgaggaaggcagaaacagacagtgaaagccaaccgtatgggagtgaggaaggcagagaatgtttcatgtgaactgacagaacgggagagtgagagacaggaaatgttgagtgagaattgataggattcgtgtgagaaagggaatgtgtagtgaggactgacaggatgggtgtgaagaaggaagaaaatgttaatgagaactgacaggaagagagtgtggaaggcaggagatttgaagtgagaaatgacaggatgggaacgggcaagaaaaggagtgtttagtgagaggcagagggtggagtgtggagggcagggggtgtttagtgagaggtggagggtggagtgtggagggcagggggtgtttagcgagaggcggagggtggagtgtggaggacaggaggtgtttagtgagaggtggagggtggagtgtggagggcagggggtgtttagcgagaggcggagggtggagtgtggaggacaggaggtgtttagtgagaggcagagggtggagtgtggaggacaggaggtgtttagtgagaggtggagggtggagtgtggaggacaggaggtgtttagcgagaggcggagggtggagtgtggaggacaggaggtgtttagtgagaggcagagggtggagtgtggaggacaggaggtgtttagtgagaggtggagggtggagtgtggagggcagggggtgtttagtgacgtctcacaatcatccttaatttcaaccagcatgtcgacgtttcacaatcatccttaatgtcaacgagcgtgtcaacatttcacaatcatccttaatctcaaccagcgtgtcgacgtttcacaatcatccttaatgtcaaccacgtgtca

SEQ ID NO: 14543 - DNA, 1018 bp, Artificial sequence
  DNA replication origin
ccgcgcctgccctgagactgagccgggcctgagcgagggttccgccgggcgcctgcagtcgggcagcctcgtggcgccccagccacggcctctgcacagcacacatctccatctgagatgcagaaacgctaaccgggtccctgccacacgtcaaacgtcggcgcgggaagccacgggcctcctcaggccggaaaggaacagcccgccccctactgtgcagagcgaggctccgcggcctgaggaagggagacctgcctgggcgctgagctcacaggcttctaggcaccttcggaggccgctgaagagcgggggtggcgcgagctggcggtcaccgggaagccccggttaccatggcaaggcgatgggtgcgcggttacccggcgtgcagcctcgcgaggacacctgggccacggacgcgccgcgccctcggggagccggctccggaggcctctctcttcctcctcctcctacccctaatgaccatggattacttttgaaatggaaaaacggtaaaccttttctaacataagtcacacttataaagaaagcatctgctaaagaggacgtgttatgtcatgaaatggggggctctcatcacggcgggggtcagggaaggtccgctagggctttagcagaagagattaacctgctgactaccaggcgccttccaatactaatattctgagattttaatatattttatattaccataaagatcttgagtgctttagaaataatactaggtagctgagcacagtggctcacccctgtaatcccacggctttgggaggccgaggtgggaggcccgaggccaggaggttgagaccagcctggacaacataacatcccatctctacagaaacccaccatttcattaaaacattagcggggcatggtggcagtgttcgtggtctgggaggctaagctgggaggatcacttgagcccaggagtttgtggctgcagtgcaccatggtctcaccactgcactcaagcctgggcaacagagcaaaactcaat

SEQ ID NO: 14544 - DNA, 937 bp, Artificial sequence
  DNA replication origin
gggcctgggcacccggccctgccctcgcgcaccctccagacccgccacttcttagatagagagcggccgcctccccgccctcctttcagccactcgctccgcgcagtcagctctgctgactcttccggaggattctggaaggttccagagggtgtgccgccgaggccctgcgagagggcgttccctggggagaacattccagagcaaggtaacatccataaacggaggctgaaacggcctgagacgtcccgggagtaacgaagaccccaaggcggccccaacttgaggggggcgaggtagccaggaatgggggggtggtgggagggacgggaaggcaaacgcgctgcctgctggggacggacgcgccttggggcagccggggaggccccgaacgcagagatgggggaggccaggcgggtggggaggagcccgcggggccgccaagggggttccaggcaggcaaggccgcccggcctcggggctctgcggcacccaggtttctctttctttaatttttttgatggaatcttgctctgtcgcccaggctggagtgcagtggtgcgatcttggctcactgcaacctccacctcccgggttcaagcgattctcctgcctcagcctcccgtgaatttatttttaagtttcctggggggtgggatgaggacctctttggccttttgtttggaatcatgttaacttagtagacttcttagctctgttggacatttttaaaacagaagaggctgcccagctgtgaatatctcatttcttatgatactcatccatagtcagaagaaccaaggcagaaactgaggatgcttgttgtaaagttgggctaagaatacaccccagagccatgatagacatagactctgaaagaaaggcagatctggaactaataagcaattatagcaaggtcgcaggaaacaaggctaat

SEQ ID NO: 14545 - DNA, 931 bp, Artificial sequence
  DNA replication origin
tggacgcacgtggggggtgtggaggggggtccccactgaggagaggggagcgtggatgaaggtggggagtgtggaggggggtccccactgaggagaggggagcgtggaccacgtggggggtgtggaggggggtcccactgaggagaggggagcgtggatgaaggtggggagtgtggaggggggtcccactgaggagaggggagcgtggatgaaggtggggagtgtggaggggggtcccactgaggagaggggagcgtggatgaagatgggggtgtggaggggggtcccactgaggagaggggagcgtggacgcacgtggggggtgtggaggggggtccacactgaggagaggggagcgtggatgaagatgggggtgtggaggggggtcccactgaggagaggggagcgtggaccacgtgggggtgtggaggggggtccccactgaggagaggggagcgtggatgaaggtggggagtgtggagggggggtccctctgaggagaggggagcgtggacgcaggtcgggggtgtggagggggccccccacactgggatttccatccgaaatccacattccaagcttcatccaccagccttcgcactcctccggaggtccccaaatccaagtcaccagaggctgatacgcagaagctagaccgtgggtgcgcagctggcggcgagggtgagcagagccctgtcttctggtcagagctaaccccaggaaggccgaggggcatgggccgaggacatgtgcgtgggacccccagcggaggggaccgccgagggacggcctctcttctgtggactgtgtaaggcgccgcgtgtccctcctttctctaagcttaactgctgcaaagcctgccccttagccctctgcccgatgagccttcctggcagatggtggcatattcacccttcatcacggtgcagtt

SEQ ID NO: 14546 - DNA, 1405 bp, Artificial sequence
  DNA replication origin
ggccgtcctcttcctgaggaaaccggcagcgcgcgggaggccgtcctcttcctgaggaaaccggcagcaggcgggaggccgtcctcttcctgaggaagcaggcagcgcgcgggaggccgtcctcttcctgaggaagccggcagcgcgcgggaggccgtcctcttcctgagaaagcaggcagcgcgcgggaggccgtcctcttcctgaggaaaccggcagcgcgcgggaggccgtcctcttcctgaggaagccggcagcgcgcgggaggccgtcctcttcctgaggaagccggcagcgcccgggaggccgtcctcttcctgaggaagcaggcagcgcgcgggaggccgtcctcttcctgaggaagccggcagcgcgcgggaggccgtcctcttcctgaggaagccggcagcgcgcgggaggccgtcctcttcctgaggaagccggcagcgcgcgggaggccgtcctcttcctgagaaagcaggcagcgcgcgggaggccgtcctcttcctcggccgcaggcaccggagcgcgggaggccgtcctcttatctcaaagccccgctgcctcgtgggtgatgtcaaagtgcacattttcaaatactgtttttgttcattgattggcattcaagggtcacaatacgaccacagttgctcgggttgatttgtgaaagagaacacacacagaacagtcctccacactgggttccaccgggaaggaacatgtgcctctcccgggaaggagcacagggcagctttcagttcttcatcctgcccccaaatcaacagacacttcactggttactcaggttttttaagtcctttttcaatttccaaaggacaggtgggctctttgtggatagaaacagacttcgatcacctacgtgaacctgcatgtttaaaagcccagataactacacctagaaaaacgcaggtcccaggaccagacctactcccaccctgcagccacaagggcctgtggtctccacacaccggaaaaacgattccacatcttgctacaaatcttaactccagccagattttcttctgtgccatggggtagtggagatgaagcttggagggatttatgcaaacgcacaaggaacagtgggaatgaaatggctcagctcaaaccctgctgggggcagatgtcctctccgaggatccagttatgtcacggttcctgcccttagtcaggttttagcttattcatccatgtctgctcccagtgctttttttttttttttttttttttttttgagacagggtctcactctgtgtgcagactggagtgcagtggcacaatctcggttcacggcaaccccccgcctcccgggttcaagtgattctcatgcctcagcctcccaagcaactgagattacagacatccaccatgacatctggctaat

SEQ ID NO: 14547 - DNA, 1519 bp, Artificial sequence
  DNA replication origin
ggaagaggacggcctcccgcgcgctgcctgctttctcaggaagaggacggcctcccgcgcgctgccggcttcctcaggaagaggacggcctcccgcgcgctgcctgcttcctcaggaagaggacggcctcccgcctgctgccggtttcctcaggaagaggacggcctcccgcgcgctgccggtttcctcaggaagaggacggcctcccgcgcgctgcctgcttcctcaggaagaggacggcctcccgcgcgctgccggtttcctcaggaagaggacggcctcccgcgcgctgccggcttcctcaggaagaggacggcctcccgcgcgctgccggcttccacaggaagaggacggcctcccgcgcgctgccggcttcctcaggaagaggacggcctcccgcgcgctgccggcttcctcaggaagaggacggcctcccgcgcgctgccggcttcctcaggaagaggacggcctcccgcgcgctgctggctttatctgggctcctgaggttctcctttgagtgtcatcacacccacacttgcgactccttcccgccacagagggaggttggtggcgattggttttgtcttcattttgcccagaaagacatggaaaaaccaagttagatcaaacggaggaaaggagtcctgccacctgtgtgggctatgtggcctgggccaggtgctcagggcaggtagggctcctggcatgtgtctagggctccaggcgtgtgtctagggctcctgatgagtcagcctcacacgtggcctgctcaggggcccgggaaagagtcagcgctgcacagtcaggcacggggaccctcgcgtgtgagtccacggccttcagaggggtcaggtgggaggacagagtttgcttctgaacgaccttgaccatggaggtggatagattgtgttcacttaaatgtaaaacagtgaaatttaaatgttttaaggaaacaaaatgttatttgtatttaaaattgattaacagtgaaagatagataaatggtaaatggaacaaacatacaacagacgtgagaaagagcaaaagatgggaatgacgagatgagacaaagaggagcctgagaagagaaagggccggcgggcgcagagacagaggacccagccacgctggggagggcgggcgcagagacggaggacccagctataccatggagggcgggtgcagaggggccaggcgagagggccaggcaggcacagagacagaggacgcagctttgccagggagggcaggtgcagagacagaggacccagctatgccagggagggcgggtgcagagacagaggacccagctatgccagggagggcaggtgcagagacagaggacccagctatgccagggagggcgggtgcagaggggtcaagcgctgacagtgagggggtctttccagtggcttcccctctggagctcacacacacttactttaatccttataaggccctgtgaggcaggcaccgtaataattgctccataaccagctggcgagaaaatccaagctcg

SEQ ID NO: 14548 - DNA, 1493 bp, Artificial sequence
  DNA replication origin
ccgtctatgtagtacccatttccaaattagtagagaatcaaaattcacgaggtttatgttccacacagtgaagtttaatgaggaagggccaagttcatctgcagcacgtctggatgagcgcccggccccgctggggctccaggcactggcatttcctgttggccccagcatcggtcacaagtgcaaggtggcagcagccagggacttctttagagaacatagccccacgtaactccctttcaccattgttctccaaattctcccatgcttaaaaccacagagggctcatggcagaaggcgaggaatgggctctttcctgcagtttctgtgaggctgcttctgaaaggcactggctgggttttagcaaatcctcatgatggcaggacctgcctaatccccaggagcatttggaggatgctgccgttgggggccccaggctctgctgggaggagggcaacggcctcacccttccccgggtcagggacgaggtcagggtcggggctggggtcagggtcagattgggattgaggtcgaggtcggggtcggggtcagggttggggtcacggttgaggtcaggtcggggttgggtctgggtcgggtcgggttggagtcagggttgaggttgaggttgggttggggtcaagtttggggtcagggtcaaggtcaggattgggttggggtcaggttggggtcagggttgaggttgaggtcgggttgggagtcaaggttggggtcagggtcaaggttgggatggggtctgggttgggttggggtcagggttgaggttgaggtcgggttgggggtcaaggttggggtcagggtcaagatggggattgggtcgggttgggtcagggtcagggttgaggttgggtcggggggtcaaggttggggtcagggtcaaggtcggggttggggtcgaggtcgcattggggtcaaaggggcttgtgcacttctgtatctttgcatttgctttttatgttctgatttgaaatgacttaaaacgtattattttggcatttttcaagcaacattatggtaaaatttctggagatgaggtctccaggctcccctgggccattaaatcatctcggccttgtccctcttttgggtctgcacaagtcatgggcatggcagggcccttggctggtgtccagggcactggcctcagtgggcaaacctggtgtggggggaggcggacatgcagtggccataggagatgttctgttcaggccctgcccaggcactgcagacctcggacctgtcctgggccctggcaccacacaccctcctgctcagcacggccagctgcctccccatgccctgctcagatgaatgcatgggactccttgggagaccgaggtcagagtcacatcatatgtgggaagtatcttgggaaggaggagctgtggaggtgagcagctgggcccttctgtggccctgcaaggctgtagaggccagagggcatgggcaggtgctggcttcgcccgtgtggg

SEQ ID NO: 14549 - DNA, 900 bp, Artificial sequence
  DNA replication origin
ggacagacacaatggggggtgagactgagacacaatggggagttgggacagacacaatggggggtgagactgagacacaatggggagttgagacagacataatggggggtgagactgagacacaatgcggtgggtgagacagagacacaatgagggggtgagactgagacacaatggggggatgagacagacacaatgtggggggtgagacagacacaatggggaggtgagactgagaaacaatgtgggggatgagacagacacaatgtggggggtgagactgagacacagtggggggggatgagacagacacaatgaggggtaagacagagacacaatggggggggtgagactgagacacaatggggggtgagactgagacacaatggggggtgagactgagacacaatggggggtgagactgagacacaatgggggatgagactcacacacaatggggggtgagactgagacacaacggggggtgagactgagacacaatgtggggtgagactgagataaaatggggagttgggacagacacagtgggggagctaaggctgagacacactgtagtgatgacacagacacagtggaggggatgagattgaagcataaaggggacagaagccgagacatgatgggtgaggggttgagagtagacagaatgtggaggagagtgagactgagaaaccatgtcagaaaccacaagctaaatcaaaagggaaacagtaatatggaaaaatatatgcaagaaatacgaaaaggagttagtattcttatggttgagtcagtaagagaaacaccaagagtctaacagatagtaacaaattacataaatttcaatccaaaaaaacacaaataaaaatgtttaagaaatattcaaaaattaccaatcca

SEQ ID NO: 14550 - DNA, 1522 bp, Artificial sequence
  DNA replication origin
cctgatcgcggtgcgccctgctgctgcaggaccgctgcgtgcctgcgactgtccacacacctgatcgcggtgtgccctgatgttgggagaccgctgcgtgcctgcgactgtccacacgcctgatcgatgccacagcgcacggtaaggtggactttttccttcacacggatgcttcacgatggcattggcagggcatttggacagtcggtggcacacagccatctcgcgtcggaggacgcagcagtgctttagggcactgggcagccatgacctcctcacagtggtgcagctcggggtgcctggcggcggcgaggacagccaccttcagggacagcacagctcaacctcgggcctggccgagctcctgggtgcccattgggcactctggcctggatcaagttaaacaggtcttatgtgagtcaaaccccacatccctgccagaattctatttggggcacttaaaggatatgcagtgctgtgagacgcctcataggggaggggtctgtcctcgagaatgaccctgaagggtcgatgacaaggttaaggtcacacgaccaggcccaggtcaggggcagcagagcagagtggaggacagggcagcatgggagtgagggtcagggtggggtggctgcagccacacagcagcacagcacggtggtctggggcccgcggagcagcaccgcagagagagggtgctgggtcagcagtgtggtcccataaaccaaacctgccacgtgctctgtgtggagagaaacagagaggccagtccccagtgcagcatgtgagaacctgtagctggtgatatcctccaggtgggactgtgggtgcagccaggggctggcgtggtgaggtgggccaggagcagtgtctgcatcgggtgggactgtgggcgcagccaggggcaggcgtggtgaggtgggccaggagcagcgtctgcatcgggtgggactgtgggtgcagccaggggtgggcgtggtgaggtgggtcagcagcagtgtctgcatcgggtgggactgtgggcgcagccaggggcgggcgtggtgaggtgggccgggagcagtgtctgcatcgggtgggactgtgggcgcagccaggggcgggcgtggtgaggtgggccgggagcagtgtctgcatcgggtgggactgtgggcgcagccagcggcgggcattgtgaggtgggtcagcagcagtgtctgcatcgggtgggactgtggcgcagccaggggcgggtgtggtgaggtgggccgggagcagtgtctgcatcgggtgggactgtgggcacagccgggggcgggtgtggtgaggtgggccgggagcagcgtctgcatggtgtgttgccccagctgggctctctctttggagctagcgtggattagtagggacagcaatgaagaccactcctccagaccccgttgggccaacactgggtccaactatactggaccttggcccagtggcctccccagcaagatcatatctgatgccagccttgcagcagcacggacgccttctgtcctcagca

SEQ ID NO: 14551 - DNA, 1922 bp, Artificial sequence
  DNA replication origin
tgtggaccacaggcacacacagccacacccggctaattatttttccattttttttatggagacgggggtgtcactctgttgcccaggctggtctcaaattcctgggagcaagcagtcctcccacctcggcttcccaaagtgctgggattttgcaggtgtgagccaccaagcccagccttttttttttttttcaacttttattttagactcagggggcacatgggcaggcttgttacctggatatatttcatgatgataagtttggggtctgactgatcccgccacccagctacagagcatagtacccaacagtttttcaacccttgcccctccgtttctccctccatttctcctccctgagtaccgtgttttgctcccacttacgagaacacgtggtatttggttttctgttgctgtgctaattggcttaggatgatggcctccagctgcctccatggtgcttcaaaggacgtgatttcagtctttgtggctgcgtaatattccatgctctgtatgtaccacatgttcttcatctagtccacctttgatggagacgtattgattccatgtctttgctttgtgaatagggctgttgatgggcatgtctttttgctagaatgatttctgtgcctttgggtttatagccagtaatggtattgccaggttgaatggtagttctaagttctttgagaaatcagcaaactgctttccaccacaaagtgaaggtggtggttacgtgatgtgagggtggctgttaggtgaggtgagggtgggttaggtaaggtgcaggctgtggttagttgaagtgaatataggttagatgagttcagagtggtggttaggtgaagtgaggttagtggttaggtgaggtgaagatgggttccatgaggtgagtcaggtggtgggtaagtgaagggagtatgtgttggatgaggtgagggtggtggctagataaagtgagtaaagtggttaggtggagatgaaggtggttgttagatgatgtgagggtggcagttaggtgaggtaagagttatggataagtgaggtgaatatggtgggtaagcgaagtgagtatgggttagatgaattgagagtggtggttaggtgagaagagtggttaggtgaagtgaagttgataggtgaagtgagatggtggttaggtgaaggagatggttagatgaattgagaatggtggttggatgaggtgagggtcatggttaggtgaagtatgggttagatgaggcttgaggtgagggtggtggttgggtgaagtgatggttaggcgaggtgagtgggggtggttaggtgaagtgagtacagattaggtaagttgagagtggtgattaggtgaggtgaagttagtggttaggtgagtgaaggtggtgattaggtgaggtgagggtgatggttaggtgaggtgaaggtggtgattaggtgaggtgaggttagtggttaggtgaggtgaagatgggttccgtgaggtgagggtggtgggtaagtgaagtgaggatgggttggatgagttgatagtggtggttagataaggtgaggagagtggttaggtgaagtgaaggtgactgttaggtgaagtgagatggtggttaggtgaaggggatggttagatgagttgagaatggaggttagatgaggtgagggtcatggttaggtggagtatgggttagatgagacttgtggttaggtgaggtgagggtggtagttgggtgaagtgatgtgatggttaggtgaggtgagggtggtagttgaagtgagtacgggttagataagttgagagtggtggttaggtgaggtgagggtggtggttaatgacatattctcgtgagtggagtcgggaaggatgaggaatagcaaggagaagggatctggccaggactactctgtgctcttctctgagctgtcctaag

SEQ ID NO: 14552 - DNA, 1313 bp, Artificial sequence
  DNA replication origin
cagacaggaaagacggctttctggatctcacgctcagcgggagggcgagccgcggcggagtaccgggatcaagctcggtgcgcggctgtgcggggaagccaggccggctcggacgcactgctagcgggagaagcctgccgctctgggatcccggtgggaggggagcggcggccgcgtctggagtccatggcgggagggcggaaagcctgaagcctctagaggagccccgtcctgagaagcctggtcttgcggagccccatcccgagggccctgcagagggcgaggtgtggggtcttcaggcggcggtgtggccatggggcgccggcgggtgtgaagcagacgagaactggccggatcccaacagggacttgatggggggcccgcgggccttcccgacggagacgggagaaaaacagggcaaggacaccccgaagggttcagcctgagccccggcaagtcacagccacagcagcccgcaggtgagagagcagcgccagcctcgggctcgggtctgggggtcctggcgaggtgttcgtaattcgtgggtttttggtctcactgacttgaagaactaagacacggaccctcacagtgagtgttacagttcttaaaggtaatgtgtccccagtttgttccttctgatgttcggacatgtttagagtttgttccttctgctggattcgcggtctcgctggcttcaagagtgaagctgcagaccttcacggtgagtgttacagctcttaaggcggcccctctctggagttgttcattcctcccgcccagagttacttattcctcccggtgggtttgtggtctcgctggtcttaggagtgaagccgcagacattcctagtgagtattacagctcataagcgcagtgctgacccaaagaacaagcagcagcaagatttactgcagcaagatttattacaaagggcaaaagaacacgactgccacagcacataaggagacccagtgaattgtctctacaggctccggccgcctgcttttattcccttatctggccccaccctcatcctactgattggtccattttacagagagctgattggtctgttttactgagagctgattggtccgttttgacagggtactgattggtgcgtttacaatccctgagccagacacaaaagttctccaagtcaacactagattagctagacacagaacactgattggtgcatttacaaatcttgagctagacacagggtgttgactggtgtatttacaatctcttagctagacataaaggttccccacgtccccactggactcaggagcccagctggcttc

SEQ ID NO: 14553 - DNA, 953 bp, Artificial sequence
  DNA replication origin
ggaggcagctgaggccccgcgagaattcgagcacactgccagcaggccggcactgctgggggaacccggtgcaccctccacagctgctggcccgggtgctaagcccctcactgcccggggccggcagcgccggccggccgctccaagtgcggggcctaccgagcccacgaacttgcgctggcccgcaagggccgcgcacagccccggttcccgcccgcgcctctccctccacacctccctgcaagctgagggagccggctctggctttggccatcccagaaacgggctcccacagtgcagcggcgggctgaagcgctcctcaagcgcggccagagtgggcaccgaggcagaggaggcgccaagagcgagcgagggctgccagcatgctgtcacctctcagtggggtccaggggtcttggggggatctggggttcctggcgggtcggagggcctggcgggatctgggggacctggcggggtctgggagtccaggtggggtctgggggtcctggtggggtccgggggtcctggtggggtccgggggtcctggtggggtctggggggcctggtgggttccgggggtcctggtggggtctgggggtcctggggggatctggggttcctggagggatgtggggtcctggttggatctggggggcctggcggggtccgggggtcgtggagcacccggtgctcacaccgggctggggttcaagaggaaggtctaggccagaggcgtcccctgagacttcctcaggctcaggcagcactgaggcctggggcgttcaccaagaaattcaatgacaaaaacgcctctcatgtgattctggatggggaagccgcgcccggcgtgggtgggcgcggagggagcagaaaggaggcgatgcggctgctggggtgggagaggggcggccccacgcgccgggccaggagggctccttcttcccgcattt

SEQ ID NO: 14554 - DNA, 898 bp, Artificial sequence
  DNA replication origin
ctggtgggttccgggggtcctggtggggtctgggggtcctggggggatctggggttcctggagggatgtggggtcctggttggatctggggggcctggcggggtccgggggtcgtggagcacccggtgctcacaccgggctggggttcaagaggaaggtctaggccagaggcgtcccctgagacttcctcaggctcaggcagcactgaggcctggggcgttcaccaagaaattcaatgacaaaaacgcctctcatgtgattctggatggggaagccgcgcccggcgtgggtgggcgcggagggagcagaaaggaggcgatgcggctgctggggtgggagaggggcggccccacgcgccgggccaggagggctccttcttcccgcatttcacgggagccccggtcccctgccccggagccactggggcctggctgaggcgaccctgcacctgggccccgtgggctcgagcgggtccacagaggacccccggctgcccctctgtgcagaaccctccgggacgggaccgtggcggggagagatgcaggaagggatggagacggagtggaattggcggctcctgaggcagcagtgtccgggttcgttgtgagtgaggatgatggcggggtgaaaatggacgagaccagaactgtggtctcaagtcggggcggccagctgggtgctgggctgaaggtggcagcagccacccgctgtcgggtggggcttcgaggttgtcagcagcaggagtacagggcctgggtttgggtcctgggtgcagtggcacagaggccggccaggctgctctctcgaggccgagcagtcggtgctgactgagtcctgccaggtcagcgtccagtcctgaggcgcatccagggccgtctgctggcccggccttcgcccc

SEQ ID NO: 14555 - DNA, 981 bp, Artificial sequence
  DNA replication origin
accagggtactttctgggcggagggtttctgagaccggaggagcaaagcactttcaataactgtgtccctgatgtcttctcgtttcctgtgcgatctcaagttctaaaaccttagtgttgaaaaattttcctggtcaatctgatggtctttttatggggatttgagttcataaaaaatgttattgtacatgcaaggaacagtgtgtcgattcagggttcaaacaggacactgctggcacacgccaaggataaaactgaaaagagcttaaacgcagagaatccttacagaggtctgggcagtcacggagccctgtgagaactgtgcagcctccactctccagccacgggaagccggaaccctggccagaggggcagggaagggacccgagacaccagggcttgacgtatttgagcagccacggagggccagagcctggggtggccgccctcctgcccccgtctcctgcgggctcctcctgtagcagccactgcaggggaggggagggagggagatgggcgggcagagggaacagcagcatgacgctgtccaaggctttctaaatccaggggttgagatcctagaacaactcagaaacacagacacatccagacacttctctctcagctctcagatcttccactccccagggatcaagcctttaggagagccaagaaagccttagtccaggaggaatcgtgtggggttccaacaccgtgttgtgatttccgccctcccagctttcagagagcggtgcagtgggcccgccatggctccaagtcccacggagttcccaccgcctgcttctggaaggtgggcaggttctcggtagaggtggcgatgcagagtctacgtggggaacatcaggcccctgcaaagctgagacaggagcttcctccacacttcatcaaagcctgtcttgccaggcatggaaccccgggcctctaggcgaggcctctgcagggactgaaggagggagggtc

SEQ ID NO: 14556 - DNA, 1270 bp, Artificial sequence
  DNA replication origin
gtgcatggaggggtccggcctcctgggctctgctgtgggggtgaccctaacaccatgcagccatgctcggggcaaggctggcacggcgttcagtgcctggttttattcttacggctcggacaccttcgagagctttatcacttactgttctgtgtggccatctgctaaggacacacacaaatacaaggaacattgaatttctgagcttacatatgattttagttccgtaggcgcaaaagatgagattgtaagggaacaactgccttggtttcctacaattaaactgtaattccgccatcctttcttccaacaccagtggccaaatggagcctgccctactgggtcacggttggtgatgagggcctggccaggaggagggaaggtgctgtcaggaactggggcaggccaggcaccaggtcaccgttggtggtgagggcctggccaggaggagggaggatactgtcaggaactggggcaggccgggcacccggtcaccatcggtggcaagggtgctggctgggaggagagagggtgctgtcaggaactgggtggggcacccagtcaccgtcggtggtgagggcctggctggaaggagggagggtgctgtcaggaggagggagggtgttgctgggaggagggagggtgctgtcgggaggagggagagtgctgccaggaactggagcaggtggggtacccggtcaccatcggtggtgagggcctggctgggaggagggagggcattgctgggaggagggagggtgctgccaggaggaggtagggtgctgtcaggaactggactgggcacctggtcaccatcagtggcaagggtgctggccaggaggagggagggtgctgtcgggaactggagcaggcgggacacctggtcactgtcgtgctgttgggaactggagcagtggggcatctggtcaccgtcagtggcgagggtgctggccgggaggagggagggtgctgcccagaactggagcaggcggggtacccggtcactgtcggtggtgagggcctggccgggaggagggagggtgctgtcaggaactggggcaggctgggctcctggctccaggatggccagggcttggctataaatatcacttatggtggcagaacctaagagtctgttaagaattttcattctgccccaaaagaactacacttacagttgcggtaattatgacttatgacacagtgcgttcactcacatctcaggacccaccggccccgagaggtgacctgctgtccaggtcacatggac

SEQ ID NO: 14557 - DNA, 1531 bp, Artificial sequence
  DNA replication origin
taataatactagtcatgtggtagtggccactacgactcactgagccctcaggaatgccgggctctgtgcttgcatcaacccagttaatcctgacaccacaggaggcagctctccaattaatctcagagatgagacggccaaggctgaggaagtcgtgtcacttgcccaaagtcacactggtgagcgatgggccaagcgccacacctgacagcctggctctcacctgagcagggcacctgcaggcccctatcctgagcctggaagccaggacctcggtgggagctgagcctgtcactcatcctctgcgaggtgcagccttttctccttcctacgggagatcagtgtttaccaatccaaagaagatgctgaaataaaactccacaaactaagtcagaaagtcattctatgaagtgcagattccctcacaggttctttatcctttctgacttctcactcctgagacacatggggcagatgtggaaggacaggaaatgactgaggtggcaacctgcagagagatcagggaggtacagagagaccagggaggggcagagagaggccagggaggggcagagaggccagggaggggcagagagaggccaggaaggggcagagagaggccggggaggggcagagagaggccaaggaggggcagagagaggccaaggaggggcagagagaggccagggaggggcagagagaggccagggaggggcacagagaggccaggtaggtgctgagagaggccgggaaggggcagaaaggccagggaggggcagagagaggccagggaggggcagagaggccagggaggggcagagaggccagggaggggcagagaggccagggaagggcagagagaggccagggaggggcagagagaggctgggtaggggcagagaggccggggaggtagagagagaggccggggaggtacagagagaggccggggagatgcagagagaggccagggaggcacacagaggccagggaggggcagagagatcagggaggtgcagaaagaggccagggaggtgcagaaagaggccagggaggtgcagagagatcagggaggtacagagagaggccagggaggtgcagagagaggccatccaggggcagagaggccagggaggtgcagagaaaggttgtggggggtgggagcacactctcgcccacttgcaggatgacgaatacttgaaggcctcccttagggcttcagtgcttctcagcgactattccaagccccatgagcctacatcatcctccactgggggatgtgctgatgcccctttaaaggatcagaaccacacctggccctacacctgtgctggatgggcggctgagctgctgccctgggtctggctaaaacagtgccatgcagaattggcaggtgggcaccaggagcaactggaaacacagaaagcaagtcaagggagaaaggtcagcacacagctgtcggagctgcctcctggcccctgagcatggggcatgaacagcagctgctcacagaaggctgtcctcccagtga

SEQ ID NO: 14558 - DNA, 1138 bp, Artificial sequence
  DNA replication origin
agcagccggaagtgcagccgaaggcgcagccggaagcgctgccacagtgccggtcgcacacgtggcactggctgcaacctcctggcaacagctgccaggcgggaacacaggagtttctctctcagcttctcaacctcacgcaaaggacagccaaaaatttgaaagggcagcaccaagagatgtcactacagccttgcagacagaagcaactgtgttaaataggcaggcagaggagggggagaagcgagagacaggccatcggtacccccggcaccggcaagggtggaggacgctgcagggaaccgacgggacccggccgagagccccgactgtgaggaggcggctcacggcgcctacctgggaccgaccctgactgtgaggaggagactcacggcgcctacctgggaccgaccctgactgtgagaaggaggctcatggcgcctgcctgggacgggacccggctgagagccccgactgtgaagaggaggctcacggcgcctacctgggaccgaccctgactgtgaggaggagactcacgggacctacttgggaccggatcctgaccgtgaggaggaggctcatggcgccttcctggggccagatccccaaccgaggaccccgactgtgtgagcaggaggctcacaatgcctgcctggggccagaccccagctcaaggatcccgacttggcaaggagggggaatccagaaggagtggctctaggagtgagagaagagagacagaccctctcacattgttttagattgttttatactcagaaaaggaaacagaagcgaaactaaaggcaggtagcccagcgcctaggaaccagacccgacaccaggcctggacctgcctgacctaagcctggtagttaaaatttgacccctgacctagcaactgatgttatctatagattgcagacattgtatagaaagacactgtgaaacttcccggtctgttctgtttcactctgaccacccgtgcatgcagcccctgtcacataccccctggcttgctcaatcaatcatgaccctttcatgtgaaacccttagcgttgtgagcccttaaaagggacaaaaattgtgcacctgacaagctcggattttaagacgctagtctgccaatgcttccagctga

SEQ ID NO: 14559 - DNA, 1313 bp, Artificial sequence
  DNA replication origin
ccctgtgtgggatagaaacacacatcgtcacagccaggaggtcagtcgggtgagggtctgctttgcttacaaggtccagaaacccagcagaaaaccctcgaggccacatcagtgaagagtaacttatttcagcaacatttccatgtgtgacacaagacacacatttcctgcatccacctttaaagtcaagaagttgaagctgaataaagccagcaggcagcgaaaatcacctgcactcagttcagttgtggcaggaaagggaaagagccatgaagaaaggagagggggatggagagggagaaaggagagggggatggagaggagaaaggagagggggatggagagggagaaaggagagggggatagagaggagaaaggagagggggctagagaggagaaaggagagggagatggagagggagaaaggagagggggatggagaggagaaagaagagggggtggagaggagaaaggagagggagatggagagggggatggagagggggatggagaggagaaaggagacggggatggaggggggatggagagaagaaaggagaggagggtggagagcgacagctgcagagggaggcagggaggctggctgggcgtggacagctgcagagggaggcaggggaggccggctgggcatggacgctgcagaggggacacagccactctgggaacagcagccagtggcggatctgcctggaatgctgttccctcctgtccaggatgggcctgtctctgcagacaggggccctccccttcctggcctggctgtgcactccccatgtgcatggtggaagctctgcagaggccgttctgctccagagtggggcatagcctcgggcgaggttcacagcttggggggctggtcctgccctgtcccacatgtggctgtgtgggcagcatggatcttcttccgcggtgaccctgtatgcccaccccccccaacttatgcctgcttcccaaggccatgggcctcaccctcagacttcacttttgtgtatatggaaagacacaattatcgggacagaaacagatcagtatttgccagtgggtgagtgaggggagaggagtttactaccgaggggccgaactggggccatttttgagggatgaaagtcttctgtgtggctctacagagctgggtacgtgatgctgtgtttgtcaaaccccacaggactggacctcactgtgggaacaacaagatcaacaagaggagcaagaacaacatcaagagtcagggcccgggggtcctgacgggtacaggatgggtacagacccacacaggaatcccagagtgtgtt

SEQ ID NO: 14560 - DNA, 1613 bp, Artificial sequence
  DNA replication origin
cgtgggctctctgtggccagcaggcggcgctgcaggagagctcaggagcaggggcctgggcctgctccgggggaatccgcccaccccaccgcggcggcctctcctgaggttccctagtggccgcgaagggtgggctcagggtgaggggtcaggccacaccagtgggtgcagggatggctgcggccacgggagggcgtccagggaggaggccggagctcaggcccactctgcacacccagcccgccacctcccccggctctctcttccttcgtgcacattctggggctcatgcttctgctgtggtcccatttagccaacctggccagcctttcatgcctgcttcatgggtgagacgtggaggccaggtcagccgcagagcccggggcacacgccgcagccagcacagcagcaggtgggcgtctgcggccggggccagcgcggggcccactgggcctcggaggggcctccctgccgactctgcccccgtcctgtggccgtaagtccacccagagcgctcgatcttccgtccaccaggccagggatgcacgcagagtaaggatgtgtgtgtctacgcatgtgggggtgtgggtgtgacggggtgtgtgctgtgtgagaacgtgtgtgtagtgttcacctgtcctctgtgcgtgagtccctgtgtgtgatgttgtgttctcggtgtgagttcatgggtgtgacggggcgtgtgctgtgtgagaacgtgtgtgtagtgttcacatgtcctctgtgcgtgagtccctgtgtgtgatgtgttctcggtgtgagttcatgggtgtgatggggtgtgctgtgtgagaacgtgtgtgtagtgtccacatgtcctctgtgcgtgagtccctgtgtgtgatgttgtgttctcggtgtgagttcatgggtgtgacggggcgtgtgctgtgtgagaacgtgtgtgtagtgtccacatgtcctctgcgcgtgagtccccgtgtgtgatgttgtgttctcggtgtgagttcatgagtgtgacggggcgtgtgctgtgtgagaacgtgtgtgtagtgtccacatgtcctctgtgcgtgagtccctgtgtgtgatgttgtgttctcggtgtgagttcatgggtgtgacggggtgtgctgtgtgagaacgtgtgtgtagtgtccacatgtcctctgtgcgtgagtccctgtgtgtgatgttgtgttctcggtgtgagttcatgggtgtgacggggtgtgctgtgtgagaacgtgtgtgtagtgtccacatgtcctctgtgcgtgagtccctgtgtgtgatgtgttctcggtgtgagttcatgggtgtgacggggtgtgctgtgtgagaacgtgtgtgtagtgttcacatgtcctctgtgcgtgagtccctgtgtgtgatgttgtgttctcggtgtgagttcatgggtgtgacggggcgtgtgctgtgtgagaacatgtgtgtagtgttcacatgtcctctgtgcgtgagtccctatgtgtgatgcccgtgttctcagtgtgagttcatatgtgtgacagggtgtgctgtgtgagaacgtgtgtgtagtgttcatatgttctcagtgtgagttcatgtgtgtgacggggtgtgctgtgtgagaacccgtgtgc

SEQ ID NO: 14561 - DNA, 927 bp, Artificial sequence
  DNA replication origin
gtgaggggcgcctctgcccggccgcccctactgggaagtgaggagcccctcagcccggccagccaccccgtccgggagggagatgggggggtcagccccccgcccggccagccgccctgtccgggagggaggtgggggggtcagccctccgtccggccagccgccccgtccgggaggtgaggggcgcctctgcccggccgcccctactgggaagtgaggagcccctctgcccggccagccgccccgtccgggagggaggtgggggggtcagccccccgcccggccagccgccccgtccgggagggaggttggggggtcagccccccgcccggccagccgccccgtccaggagggaggtggggggggtcagcccccctgcccggccagccgccccgtccgggaggtgaggggcgcctctgcccggccgcccctactgggaggtgaggagcccctctgcccggccaccaccctgtctgggaggtgtgcccaacagctcattgagaacgggccaggatgacaatggcggctttgtggaatagaaaggcgggaaaggtggggaaaagattgagaaatcggatggttgccgtgtctgtgtagaaagaagtagacatgggagacttttcattttgttctgcactaagaaaaattcctctgccttgggatcctgttgatctgtgaccttacccccaaccctgtgctctctgaaacatgtgctgtgtccactcagggttaaatggattaagggcggtgcaagatgtgctttgttaaacagatgcttgaaggcagcatgctcgttaagagtcatcaccaatccctaatctcaagtaatcagggacacaaacactgcggaaggccgcagggtcctctgcctaggaaaaccagagacctttgttcacttgtttatctgctgaccttccctccactatt

SEQ ID NO: 14562 - DNA, 1246 bp, Artificial sequence
  DNA replication origin
gggacaactcggggccgcatcgacggtgaataaaatctttcccggttgcagccgttaataatcaaggtcagagaccagttagaacggttcagtgtggaaaacgggaaaccaaaagcccctctgaatcctgcgcaccgagattctcccaagtcaaggcgaggggctgcattgcaggggccaactgcagtgtcggaacacaaatgcagcattcctaatgcacacatgacacccaaaatataatacccacattgctcatgtggtttagggttagggtgagggttaggggttaggggttagggttggggttggggtagggttagggttaagggttagggttaggggttagggttaggggttagggttagggttcgggttcgggttcgggctaggggtagggttagggttaggggttagggtttagggttaggggtcggggtcagggtcgggttggggttggggttgggtttagggttggggttggggttaggggttaggggttagggataggggttaggggttagggttaggggttagggttagggttagggttagggttaggagttaggggttaggagttaggtttaggtttaggggctagggttaggtttgggttagggttgggttaggggctagggttagggttagggttgggttatggttagggttgggttagggttagggtttgggttaggattagggttaggggttagggttagggttaggattaggggtgagagttagggttacggtactgtaaataatttcacattattactaataataaattattatttgtattacactgttacgtaatgtaaacgctattaagacatgtttttcttcaaagaatggccttggtttctgtgggctgtgcctcgtcatggaagggtaatgcattcctgctaaatcatggacaaaacgggcttccaggagctacaggcccctgcagcagcagcttctcctctacgtccttcactgcctcaaactgttgttgactttgaaagcttctttcagtctagttttatcaacagagctagtatttcatgaggttctactacataccaggttccagaaagctaaatgccttttgttattattcactaaatacaaatcacaactctctcctcattactcacacaacaaaatttagctgagggagattgagtgactttcccagggtcacatagctactaagagcagagtcgtgtttagattcatgtgggaatattgaacacagaaatgaacc

SEQ ID NO: 14563 - DNA, 2013 bp, Artificial sequence
  DNA replication origin
gggatcggcgagcgcctgaggagggagggtccgggggtcactgcgcacctgcggaggtgggggcggccagggtcagtgtccccctggggagggggggtcagggggtcagccttcacctgaggagggggcggccagggtccgtgcccacctgaggaggggggttcagggggtcagccttcacctgcggaggtgggggcggccagggtcagtgtccacctgggggggggttagggggtcagccttcacctgcggaggtgggggcggccagggtcagtgtccacctgggggggggtcagggggtcagccttcacctgaggaggtgggggcagccagggtccgtgtccacctgggggggggtcagggggtcagccttcacctgaggagggggcggccggcggtcagtgcgcacctgaagagggggaggcccggggtcagggcgcacacggggatgcggcggtcgggggatcagtgcccacctggggagggggcggccgggggtcggtgtgcagctgcagagggggcggccggggtcagtgcgcacctgcggagatgggggtggcggagggtgagtgcgcacctgggaggggacgatctgggggtcagtgcgcattggcggaaggggtagtccgggcgtctgtgcccacctgcggagggggtggcagggggtcagtgcgcaactgcagagggtgcggtccgggggtcagtgctcacctgggagggggcagtcgggggccagtgcgcacctggggagggggcagtctgggggtcagtgcgcacctgcggaggtgtgggggccgccgggggtcagcgagcagctgaggagcgggcgaggccgggggtcagtgagcacctgcggaggaggcgctgggagtggggagaggggaccaggaggggcgtgtggggagacgggagaggggcttgggggtaccctgaagtgagaagtgggggggcagggagtggggtctgaggggacaggggagtgttaggaggatcctgcagtggaatgtgaagggaccgagacgggggtgtggggggaccacaggggatatgggggcatgaggggttgggagggttggggggaccctggagtgggatatagggccaccaggaagggatgtctggggaacaggggcggtgtggggatgtggggagatgggggaggggattgggtgggacgtgggaggactggcaggtgggctttggggacaagggtggccagggggaccctggaggaggatgtagggggcactctctgtgggatgttgggaacaacctggttgggggctgggcagagtggggcagatttcctgtgctcctgtggaaatgcagcctggataatcgctagaccagaagaccacagcacagaacagttttagttgacagagcccataatgtgaagccaaatccatgtggacatgcttagatagacatgatatttttgtggagggattcttcaactgctaagagtgggagtagaaatagaagagtggggaaggacacaaaaccttatatttcatttcataacctttggaattcttaattttttctatgtgcatgtattaccatgtaataaaaattaatttaaaagacatttaataagagtataaaggcatgaaggactacggtaaggcatgaataaattatagtgtgcttgaagttttcaccataggatgaaaggacaaacagagaattaggagtattgttttccacaccaaaatatcatgacttggctgaagaaatatatctatctgtatctgaaatcaacattaatgttatcaaataattcagacttagagttttcaataaatgtatagaaattgttttattcaaagactaagggggaaagggtgagaaattaagtctagcagtacaattatagaacctctggtgtattctcatgggaaaattaatgttttaggtaaaatggagacgacagtagttacgacaaatacttgagaaaagcctatgaaattactgactttggtagtccagccaaacatttgcttcaggaaa

SEQ ID NO: 14564 - DNA, 1022 bp, Artificial sequence
  DNA replication origin
caagacgtgtgaagaaacgagttcagaaagatgggatatggcattcagggagccccaaatgacagggccgggattcactcccaggtttagtttaggctaaagaccatgcttcttccaggacccctggacttccttagcactgccccccacccagagctctagggccctggatcctgaagatggggggggcggtccctgggtcagatttgtcccgtgccaccctcctgggagaggctgcagtaaataaaccagggcccaggaaggccaagggcaggaccctgccccacagtgaggaagaaggaaagaaacccgggagccagaagtgggaggcacacaggagggaggttgtgggtgtaggagtggggggttgggggactgaggggtgggggaagggggtgtggggtggaaggtgtagaggggggatgggggtgaggggtgaggggtgggaggtgggggttgggagcgggggatgggaggtggaggttggggtacaggtgaggggttggggtatggggtttggggtggagggcgaggaaggtatagggtgggaactgggtgaggggtgagaagtgggaggtggtgggtgagggtaaaggtggaaggtgtgggatattgggctggagactgtacggtggggtgggagtagagggtggggttggggtgaagattgtggggtgggggtaggaagtgtgggatgtggggtgcaaggtgggaggtgtgggtggggttgggggtgtcaggtggaagctctgctctctccttcactcccacaggcccagcttcaaagcacatttccagcaccctcccaggaaccgatgtgattcaaagaagtgaaacagcctctcagaaaggcttaccgggcttaggatgcagcctgcttgagttcggttccttttcaaagtcaggtgcttctcatctatcaactgggggtcccaagaggcaacctcacccagttaaaaaaggattaaatgcgctttctatgcagacttgaggcttttcccagcatgcaatctgtcaagggc

SEQ ID NO: 14565 - DNA, 788 bp, Artificial sequence
  DNA replication origin
caggggaagacatggggtcgcgagcgcgtcaggtggggacggggcctgtgggagggtcaggtggggaccgggggcctcgggcgcgtcaggtggggacggggttgtcgcgggcgcgtcaggtggggacgggattgccgcgtgcgcgtctgctgaagtctgggtccgcgggcgcgtcaggtagggacgatgggccgcgggcgcgtcaggtggggtctgggggcggccggcgggtgtggagggttcattcagggagctgcgggcgagtcgggtgggcacgggggccgcccacaggtgcaccgcgcgtcctcagccgcttcccctgcccaccttctgcgaccccttcccgcccccaccctcctgggccgtcttgcaggcccgagcttgtgtccgcctcgctgggcaaggtgtttcggggacgactcctgccggcgtttgccctccgggctcggtccttgcctcttcgccggtgggcacctgctaggtgtgacccctcattcctccaggccactctgccccgtctgctgcttacctttttttccctactcctggtctgtggctctggctctgtctctgtctcctcccttaatttctttccatgcttatttttcttgcagcagacactaattttgcatccttcccctcacagtaagctcaatttgacctttttctcaattagattccacctctgtccttgggcctattcaaactcattttgaagactaaagaatctagagaaccatttcttcccttatgaagctgtctcttgctgcctccaaatccttaccatc

SEQ ID NO: 14566 - DNA, 983 bp, Artificial sequence
  DNA replication origin
catagccacgcgggaaaacgttctccgggccctgagccccaacctgggcgccgcgggggtcccaagggttctgcgcggcccggcaccacggccccatccccgccccccaccgccgtcagtccgggccgagcccgcggcgccccaggccccagcggccccaccgcccaccagggctgggcgaggcttcctcccggcgcccccactatcccgcgacctcgggcgccggaggggatgagtcccggatgcccggcgcccaggccccgagggatgccctgaagcgctggggtacaggcgccgctccgcggactgtgccccctccaccttcccctcagccttgccgcggcctgagcgccagcggcgcgcatgcgcactgcgctcccggccgttgccttggtgacccgagcggacgtggccacgccctccggccagggtctgggaaagggtggggggagggggcagtccgggagtaagtgggggtcggcgggggagaaggagagaaccgggagaggggaatttgcgggggccgggtgggggctcgggggtagaggaggacccagggaaccggggatagggcagggctaggggctcggtgggggctcaggatgggggcgtttccgggtgaggaagcagctaggggcgggtaggtgggggtcaaggtggggggaccaggtgacggggtagcctggggtgaggacgtcgttcagtagaacagtgaagggcgagggtctcgccggggcggtggcggggaccacactgggaggagggggccggggttgacctttctgtgggggatgggattcggagccccgtcgaatttgggggtgggtctggtcctggggaaggtttgggggcgggtctggtcttcggaagggtttggggcgggcctggtcctgaggagggcttggagcgggcctggttctggggatggtttgggggcgggccgggtcctggggagggtttggggcgggcctggtggggagggg

SEQ ID NO: 14567 - DNA, 2030 bp, Artificial sequence
  DNA replication origin
tctccaccagcgcagcagggcctgacccattgcagtgttgggaactttaaggtttcaggttcatatctggtgccaaaattcacaggatgaggttgtctttaaagtctttcctggctctcatattttatgagtcagttctacgattttggagacaggagatatcccgaacgaaagcagagagaacaagggttgtaatctatctgggtttgagagggagaagaggaaagagtactgcagaggaggataaaagaacataagccaggagcgcgcggcggtgcctgtggtcccagctaccctggcggctgaggcagtagtcagcagagatcacgcaactgcactccagcccgggcagcagaccaagaccctgtctcaaaaagtaaataaataaaaaggaacacattggaggctggaatgtcctgggcaccttgactctagacctgccagagcactgtgataggagggcagtgaggggagcgctgtgaggggggagctctgtgaggggagcgctgtgagggaacgcggggagggatgtgagggagcgctgcgccagagcgctgtgaggggagcactgtgaggggagggatgtgaggggggcgctgtgaggggagctctgtgaagggagcgctatgccagagcgctgtgaggggagcactgtgaggggagggatgtgaggggagctctgtgaggggagggatgtgaagggggcgctgtgaggggagctctgtgaggggagggatgtgagggggggccctgtgaagggagggatgtgaacaagtgctgtgaggggagcgccgtgagcggagacatgtggggggagcgccctgacgggaaggatgtgaggggggcccagtgaggggagggatgtgaggggagcgccatgagtggaaggatgtgaggggagtgccgtgagcagaaggaagtgagggggcactgtgaggggagagatgtgaggggagcgccctgaggggagggatgtgagaggggcgctgtgaggggagcgccacgaggggaaggatgtgagaggagtgccatgagcagaaggatgtgaaggggcgctgtgaggggagagatgtgaggggagcccctgagaggagggatgtgagaggggcactatgaggggagggatgtgaggggagcgctgtgaggggagcgtcgtgaggggagcgccgtgaggggagcgccgtgaggggaaggatgtgaggggagtgccgtgagcagaaggatgtgagggggtcgctgtgaggggagagatgtgagtggagcgccgtgaggggagagatgtgaggggagcactgtgccagagtgctgtgacgggagcactgtgaggggactgttgtgaggggagcaccgtgaggagagggatgtgaggggggcgctgtgaggaaagggatgtgagcaaacattgtgaggggagcaccgtgaggggagagatgtgaagggagcgccctgaggggagggatgtgaagggggcgctgtgaggggagggatgtgagtgagtactgtgaggagagctcagtgaggggacgttttaagcacaactccttggtttcaccttcatcattctctcccttcttcctccacacaggcctggcactggcatgggttgctgagaaggcccctgaagcagcatttcatcaccaccatggcctccaagagagcggtgcctcctatgagccctagagtgcaggttctccaagggccactgaggccctgagaaccttcctctgctcaccgtcaaggtcagccgggacctcggaaactggtgttcctcactctccctctcatgtaaacacctctggctgacctggtcgtgggagcaggctcggacctgtgaggccaggcaagggtccctggtgagaagggcctgttcacctcccctgcctcctgccagtcactgtggttctctccggggtcatcatggaagtctccttcttggttcttcgtcagccaagagtgacaggaacaagaacaacaagaggacctcgtgcaaggagctcctgatgccttccccagtccatttgtccacccct

SEQ ID NO: 14568 - DNA, 2447 bp, Artificial sequence
  DNA replication origin
acatcggactgttaaggcccctccacttcccgctcaggttacagaccccagggcacatccccccatcctcacccgcctgcatgaccaggctgccccctgccccgcacacctctctctgagtagcctcctgtcttccctctggcagctgagtcagcttcaccacctcactgggtctggaacagccaactcctgacactttcacactcacagaggtggagcaggggcacgggggctgggcaccaccagtgtgtgggcagcacccaggcattaaacacagcagaggatggcgcaggcacccctgttctcctcccagagccaagcttcaggccatgtccagcgggggaggctgtgagtcacctctgcctcatgtgggtgatcataggagggtgtgagtcagctctgtccacatggttgctcatgggagggtatgagtcagctctgtcaatgtgggtggtgggtggtcacgggagggtgtgagtcagctctgtccacgtggttgctcataggaggttgtgagtcagctctgtccatgtggggtgctcacaggagggtgtgtgtcagctctgtctgtgtgggtggtcacgggagggtgtgagtcagctctgtctgtgggtggtcacaggagggtgtgagtcagctctgtctgagtgggtggtcacgggagggtgtgtgtcagctctgtctgtgtgggtggtcacgggagggtgtgtgtcagctctgtccgtgtgggtgctcacgggagggtgtgagtcagctctgtctgtgtgggtggtcacaggagggtgtgtgtcagctctgtccgtgtgggtgctcacgggagggtgtgagtcagctctgtctgtgtgggtggtcacaggagggtgtgtgtcagctctgtctgtgtgggtgctcacgggagggtgtgagtcagctctgtctgtgtgggtggtcacagaagggtgtgtgtcagctctgtgtgggtgctcacgggagggtgtgagtcagctctgtctgtgtgggtggtcacaggagggtgtgtgtcagctctgtctgtctgggtgctcacgggagggtgtgagtcatctctgtctgtgtgggtggtcacaggagggtgtgagtcagctctgtctgtgtgggtggtcacaggagggtgtgagtcagctctgtccatgtgggtgctcacgggaggttgtgagtcagctctgtctgtgtgggtggtcacaggagggtgtgagtcacctctgcctgtgggtggtcacgggagggtgtgagtcagctctgtctgtgtgggtggtcacaggagggtgtgagtcagctctgggtggtcacgggagggtgtgagtcagctctgtctgtgtgggtggtcacgggagggtgtgagtcagctctgtctgtgtgggtgctcacgggagggtgtgagtcagctctgtctgtgtgggtgctcacaggagggtgtgagtcagctctgtctgtgtgggtggtcacgggagggtgtgagtcagctttgtctgtgtgggtgctcacaggagggtgtgagtcagttctgtgtgggtggtcacaggagggtgtgagtcagctctgtgtgggtggtcacgggagggtgtgagtcagctctgtctgtgtgggtgctcacaggagggtgtgagtcagctctgtctgtgtgggtggtcacgggagggtgtgtgtcagctttgtctgtgtgggtgctcacaggagggtgtgagtcagctctgtccgtgtgggtgctcacaggagggtgtgagtcagctctgtgtgggttgtcacgggagggtgtgagtcagctctgtctgtgtgggtggtcacaggagggtgtgagtcagctctgtctctgtgggtggtcacaggcgggtgtgagtcagctctgtctctggggtggtcacaggcgggtgtgagtcagctctgtctctgtgggtggtcaccggcgggtgtgagtcagctctgtccgtgtgggtgctcacaggagggtgtgtgtcagctctgtctctgtgggtggtcacagtagcgtgtgagtcagctctgtctgtgtgggtggtcacgggagcgtgtgagtcagctctgtctgtgtgggtgctcacaggagggtgtgagtcagctctgtgtgtgtgggtggtcacaggagagtgtgagtcagctctgtgtgtgtgggtggtcacaggagggtgtgagtcagctctgtctctgtgggtggtcacgggagggtgtgagtcagctgtacgtcatgtagttggtcatctgtgtgttccacctgcatcctggggtagcctgttggccatttttgttgccactataaagccctgagtgtggctaggaagggggtgctgggtgggaccgtatgatcacgtgtgctcagtttggcatgtgtgatcgtcatgtgactgggctcacagaaaggagcttgtccctaatgatttccaaccttcggactgtgtcctgacctggcctgtagt

SEQ ID NO: 14569 - DNA, 1397 bp, Artificial sequence
  DNA replication origin
gcgtatcagagcaggtgagctgacagctgggctccagcaagagctttccaggaatcgctgtcagggctgggaggagcagtggccccaggttgggaggagacgtgacaggaccgggcctggggaagcgtgtgctggcgtcagggagaagacggcagccgcgacatctggcacctggggctgcagagcctgagcaccccggaccgcgcccggcgagggcggcctccctgcgctgagcgcgacctgcgtgtcctgctctcggctttcgtgccggttcagaagaacaaggccggaaggttgcggtctcagcgctcgctccatgccgggagcgcgcagagctgagggcgcttgcgtgtccggcacagcgtggagcccgcgttcctctctgcactcaggagctgcgtcccgttccgtgctggcgatgaggacgccggcctccgccaggccgagtcagcactctgtccccggggtctgactccgtggcccctgtcctcgctgggtctccccgttccaactttagtgacacggtctcaggagaggatgcaggcagaacgggctttcctttttcctgccctgggggctgacatctgcctcacggatgccacccactgaaagggcagcccttgtcgccttaactcgttttccatctcagttaccgtcctcggcagggcactgtcacatcctaacgtgaggacgaaatgggcttgacctcccagcagcagccgccccggtggctgcaggtacccccgaggccggccccagacactgaaagggaagcagccagcctgaccagggaggaaccggtgtcaacgcgctcagattccagagccggcaccgtgccatagggcaggagagaaggaggacatgaggcgcaggacgcaagttcaggccaccctgaccctgaagagggtgcagccaccccgcagcacacgctgataaaagggtctcttctgttgtgggctccgaggcctgcagagccgagacctgacctgataaagccagagcaaggggctgcagccaccgcaggaggcttcaacgattcatggtgaaaggtccgactgagagccctggagtgtgttatcccaggagagctccttgagtgtgactgagaaatagatctggggtcctgtcaccaaggcggtgtataaacagtttacaaatgacagcagatacgaatcaccgaagccaggcagaacacccctcgttcgtccacgatagagctctagtcttgcaggggttcagtggtttaaggaagatgcgttgttggggagccacagtccctggcttatcacacatcttgccatggcttgattcaggccaacattgatactgcatttcagttaagttgaattagacactgcaagtcaatgtcagttgttttgggcttcagttcacatctg

SEQ ID NO: 14570 - DNA, 1368 bp, Artificial sequence
  DNA replication origin
ggagagagaggctgagacggagcgggaggggagggcatctggtttcccttcggcagccactctgacatcattgtcaactctactcggaaatcggtgaggaaagggactgacttcagcagttcccccttgcttaagagaaagtgtgtttcatttcctcttgatgagaaaaaagcctttttcacagaatgcttggtaataaatgtggcaggaatggtgaaattagaagatcaactattttgcaacccgaatgaaggcactgatttgggaaaaggccgttggcagttgctgaggcatccggggacctggaggcagagcgtttgcgggcgctggggcatctctgcataggtttaccaccgacggctctgcactcacctcttcagacaagcgattgccctggtgctccatgccaccccatcgacgccttccctgaactcaccctgcacccacgtgccctctgaatccgacgcctgaagaccttacttccggtggcaggaaatgcagccagcaggaggaaaggttacgtgatggagggagaagctgttctacaagagcaagactggggcctggccccgtcagagtcaccacctttagggaagcagtggacagagataaatgagacaacacaggctcgcaaccaaatgcagagcccgaccgttgttggctgctggttggaaagatgtgctggggacagtggggaaatctagataggaacggagtggagttgatatcacataaagtgaccacgagcttgcctgggatggttctggctcacacctgctgtttccgcataattattaatcccacctcattcactttccaaagtgtcctgttctgctgataattcctatggtcattcaaaagctggggaattggtgtagttgtcttaggcatgaataatggtgttgagcttacagggtgtcttcattcctaggagatgcctcaggctcagagaatttaagctacttggagagaccaggggcacacagctcatctgatgtagaactggtttataaaaactgtgataaacaaaacaacccaaaagtaggcacgggaccggaatggaaattctcctaagaagatagacaaaggtcaacacgcacgcaaaaagatgtccggcaccactaatcagcaaggaaatgcaaatcaaaaccacgaggtgctgcttcataaccatcaggatgattatcatatatttttacaaacgagaaataagtgctggagaggatgaggaggaatgagcacactcatgtgctgttgctgggaatgaaaaacggtacagccattgtggaagacggggtagaaattcctcagaaaatgaaacccagatttaattaccgtatgatccagcccttccacttctgggcataa

SEQ ID NO: 14571 - DNA, 1404 bp, Artificial sequence
  DNA replication origin
taatatatgcagaaatgcatgtgcagtctaagtttccggacttgggagctgtcaactcttggagccaaattttcctaagtttaaatagaaatgaattcatttcttcctcttttccttctcctctactgctgtggtagatggtaaatttttgcttacctccaactctctggtaccttattgaacccctgacgtggtgatgacgacttttattttctgccaccttcaccgggcatccttttcatgcaaactgttgtgtgctggagcagctgtgctcatgtcttcccaatgccgtgtgcggtgacacaagctgtggtgagggtattcaggccacagaaacctgcaaatgctgaaaatcagaaattcaggctgttgagccattcacctgcacaccactgagtgcagagcagcccacctggcccagggctggcgtcccagaggaggagtggaggagggtccgtggcacccgtcagtggcacctatcccagaggaggagtgaaggtgggtccgtggcacccgtcccagagaaggagtgaaggaggctctgcagattttgtggagggagtttcagagtaagtgtcgggagtggtttctgtccgtagaaaccacattgctgaggggtcaagaccagcatgttagagaagccaggtagcaaacagttacataaccacggtatgatgatgccgtggcactggtgcagggagccgggggctgcagggaccacaaggctggagtcacagcgtgcagagcatatgggtgctggaggagctgccttcatgcagaacgccctcatccgtcaaggagctgttggctttgtgttgccctgcatggtgctgtgggctgtgcagcctaccactggggaaggctggtggggaccccaccctggggcgcttgctccctagctgaggagctggaaaagaagccagatactcggtgagatgcgtcatagagctgcagatagatcctggagatgaggctgtggaggagcgggaagaggagggtgttgttgcagccaagtgcgcatgcgctgagatgggtgaacccatgtgtttgggaactgcgaggagcccggtggctggaccaggggatggatgtgagttgcagaaggtggagaaggtgaagaggtgacagggccaggcacatgggaggagcccggtggctggaccaggggatgcacgtgacagggcgagaggcattgagtgagtctcagaagggggaaaggtgacaggaccaggcacatgggaccccgggcatgtgagccttgtgggcttctacgcagacagagacaggaggttcctggaagctatgaggcttctgggctgttatcttgaggctggatggaggagatagagaatggagaccagtctggggctgctgaggacctgctgagagatacctgcagcgtgg

SEQ ID NO: 14572 - DNA, 1058 bp, Artificial sequence
  DNA replication origin
cccctcgtgaggacagagacgcggcggcccctcgtgaggacagagacgcggcggcccctcgtgaggacagagacgcggcggcccctcgtgaggacagagacgcggcgccccctcggcgaggacagagacgcggcgccccctcggcgaggacagagacgcggcggcccctcggcgaggacagagacgcggcggcccctcggcgaggacagaggcgcggcggcccctcgtgaggacagagacgcggcggcccctcgtgaggacagagacgcggcgccccctcggcgaggacagagacgcggcggcccctcggcgaggacagagacgcggcggcccctcgtgaggacagagacgcggcggcccctcgtgaggacagagacgcggcgccccctcggcgaggacagagacgcggcggcccctcggcgaggacagagacgcggcggcccctcggcgaggacagagacgcggcggcccctcgtgaggacagaggcgcggcggcccctcgtgaggacagaggcacactacccgtgctgctgctccctgacagaagggtatcagataagtaactggcgccatgcggggggaacagagggtgtgtgcaggccaagaacagacggcacatggcgcacacgccccgccccacacccaagccccgcccagacactgatgggtaaagtctataccacgggcgtctgtgccacggccggcacacggctcccgggtgttgcccgagcagacctagaactataaagcttgccgctgcaccacgccaagggcgggggttcagacagttctcattttaggaagcgcctgttggagttttctgagctgtgcaccccatcacagattgtgaagaatcaagatgaaacaacgtgagtgaagtttgtgagacactgtaagggcagattccctatcatttccactcaagcgctttcccttcacctctgaaatgagatagaatacatgagttcctcttccacaatgaagctcttcaaagcggtttcctattctcctctgtctcaacagcctcaagcacaccgccctcaaagcccagggcctgc

SEQ ID NO: 14573 - DNA, 1210 bp, Artificial sequence
  DNA replication origin
cacaggggtggcagctgtggattctcttgcatcttctgtgttcacaggggtggcagctgcgtttcttcccttccagctcttgcacacgttgtctccctggtgccctgcctggagccccagtgtggaggtgaccacagtgatgtcacaggacctgttggagaaaaggctttcagcatttcaacatgacttatgaccttgcctgtgggttcttgtaggtatccggtatccgatttagatttcttcctttgaggcagtttgatttgagattttatcatacactttacatgactggaatctcgtgaatatcttgcatggaatatttgtagcagcatccacgggagagatgggcccgtggccctcccttcttgcaatgcccttgtcaggggagtggagacgctggaggcctcacagagctgcgaggggtgggtgctgtgaggggtgggagctgtgacggccagagcttttgtgagggctgggtgctgtgatgggtgggagctgtgaggggtgggtgctgtgaggggccagagcttttgtgaggggtgggagctgtgaggggtcactgctgtgaggggtggaagccgtgaggggtcacttgctgtgagcagtaggagctgtgagggatcaaagctgtgaggggtcggagctgaagctgtgagttgggagctgtgaggggtcactgctgagagggactggagctttgaggggtgggtgctgtgaggggtgggagctgtgaggggccggagctttgacgggtgagagctgtgagaggtgggagctgtgaggagtcggagctgtgaggggtcactgctgtaaggggtgggagctgtgagaggtcactgctgagggatgggagctgtaaggggtcacttgctgtgagtaggagctgtgagggatcaaagctgtgaggggtcggagctgaagctttgaggggccagaatcataagaggccagagctgtgacggtcgtcagagccatgagggcccagagccgtgagggacgttggagtcgtcaggggtcattatcttttctgctatctggaaacgggtatgtaagacatgtgttggctttttcttttcttttgagatggagtctcgcgctgtcacccaggctggagtgcagtggtgcaatctgggctcactgcaagctccgcctcccaggttcaagcgattcttctgcctcagcctccggagtagctgggactacaggcacc

SEQ ID NO: 14574 - DNA, 3998 bp, Artificial sequence
  DNA replication origin
tgagcccaggagctctagacagtgagccatgatcgcatcattgcattctaacctgtgcaacagagtgagaccctgtctctaaaagaattttttaaaaatgtttttcagaagtgtgtaatttttcaatgaccaccttgtcattgagaattgaggaaaatgaatactcataaattgctggcaggaatgtaattcagggccgggcacggtggctctcacctgtaatcccagcactttaggaggccgaggcaggaggatcacttgaggtcaggagttcaagacgaccttgggtaacatggtgaaaccctgtctctactaaaagtacaaaaattatctgggcgtggtggtgcacacctgtagtcccaggtactcgggagactgaggaatgagagtcgctggaacctgggaggcagaagttgcagtgagcggagatcgagccgctgcactccagcctgggtgacagagtgagactccacctcaaaaaaaaaaaaagaaaaggaatatgatttaggatggcctttctggagggtagtttacaggatgcattaaaatactaaagcgttctgtctttggctgtatgttaaattgactcagatccacaacccctgcacgggggcaggcggcgggcgcagagcgcatgcctccacctcctcctctctacacccacccccgggtccgagggctccatgtcacaggtacacgccggtggcccccgtgagctctccaacctgggcccagccccagacgcagggatttgtgtcccttgcagcccatcaggcagctgcctcattccccacaacaaagctcctggtccctacactcctcgtctcagggatggcctctcccaggggctcaagcccaggtcaccccacacctatcacgcactctgctgtgtctctcagacccacgtgctgctgctgctgcatgtcccgaatctgctcagggaaaacctgctgtgctgacagctgaagtccctcccctcttgagaggggcgcctgtgtgggtggctgagggggcgggggcgggggctgtgtggttccacaaggactgtgcggggtgggcagaggcagggagaccaaaatggcgaagagctggtagaacctgccctgacccctcacccaccctcaggcctccagctccgtgccaggtgaggggacgatttgacagggaggcaggaggaggggtcgcctggggctggggacctgcaggcctgtcactgggagtctgagccaagcttctttctgggcaccctggcagcacccctgaggtgtgggcatgcagcaggatgacggagttgcatcgtgggccctggttttgcctccagcactttttcctgccgattcagttgctcgtggggtcggcgttgcaccggcttctccatcgctgttcagagaagagacaagcccaagcctgtgcctgcgctggcaggaggctggagagtgagtggtgtccgccttgtcccctggggccatttgcagctgtcaggatggacgggagcctcagcaccaagacaggccatgggtgaaaagcaagaggccacgagagttcgctgctggattcatttcaaagacagaggaaagaagaatatgtgtccatctgtgtatatacagagagccctgctagcacgtgcagcaagtggtaaggccagctgcctcctgggagggaagtcaccctgaggacaggagatccccaccgagggctccaaaaggaaggagcggagtggagggtaagaggagcaagcacaggtgcaggctgatggggaggaaggagtggagggtgagagaagcgagtacaggctgatggggaggaaggagagggagggtgtgaggagcgcgcacaggctgatggggaggaaggagagggagagagggtgagaggagcgagcgcaggctgatggggaggaaggagaggagtggagggtgagaggagcgagcgcaggctgatggggaggaaggagaggagtggagggtgagaggagcgagcgcaggctgatggggaggaaggagaggagtggagaaggagaagagtggagggtgaggagcgagcgcaggctgatggggaggaaggagaggagtggagggtgagaggagcgagcgcaggctgatggggaggaaggagtggagggtaagaggagcgagtacaggctgatggggaggaaggagagggagggtgtgaggagcgcgcacaggctgatggggaggaaggagagggagagagggtgagaggagcgagcgcaggctgatggggaggaaggagaggagtggagggtgagaggagcgagtgcaggctgatggggaggaaggagaggagtggagaaggagaagagtggagggtgaggagcgagcgcaggctgatggggaggaaggagaggagtggagggtgagaggagcgagcgcaggctgatggggaggaaggagaggagtgaagggtgagaggagcgagcgcaggctgatggggaggaaggagaggagtggagggtgagaggagccagcacaggcgcaggctgatggggaggaaggagaggagtggagggtgagaggagcgagtgcaggctgatggggaggaaggagaggagtggagggtgagaggagccagcacaggtgcaggctgatggggaggagggagaggaagggagggtgagaggagccagcacaggcgcaggttgatggggaggaaggagaggagtggagggtgagaggagccagcacaggcgcaggctgatggggaggaaggagaggagtggagggtgagaggagcgagtgcaggctgatggggaggaaggagaggagtggagggtgagaggagcgagtgcaggctgatggggaggaaggagaggagtggagggtgagaggagcgagcacaggtgcaggctgatggggagggaggagaggaagggagggtgagaggagccagcacaggtgcaggttgatggggaggaaggagaggagtggagggtgagaggagccagcacaggcgcaggctgatggggaggaagtagaggagtggagggcgagaggagcaagcacaggtgcaggctgatggggaggaaggagaggagtggagggcgagaggagcaagcacaggtgcaggctgatggggaggaaggagaggagtggagggcgagaggagccagcacaggcgcaggctgatggggaggaaggagaggagtggagggcgagaggagcaagcacaggtgcaggctgatggggaggaaggagaggagagggagggaggcgggagctgctgtgctctctcagaggcagggatggctggcctctgccaggtgagcggcgtaaggatctgtgtcagatgcaggttttgctcacagccgtcatggtgtgcaggtacctgtggcagtcttctctgatttctttattttcctggtgaagcaagggcaagggctgtggggagagggaggcggagctttgaaagatggtgggagagccaggagggaacggatgagggtcccttccgcacagggctgggtggtacccagtgctcacctgaagtgggccaggggctggctgtgagcccctccatagctgtcggctgccaggagcagcccagaggagctgaggggaacctgacggggagaaaggagccaggtcaatgacacctgcgaagaggtgacactggtgaaacccacagggcagccaaccgcctatcaccctagggctccgagccaccacgcccctctgcctttcccgagggatgctggtgcttgtgacttgtccagcagggaggtgggtttctgactgcccctctctgaccctgactcttagatgccaggtccagggcagctgtgctcacagacgctgcattctctgtgcgtccggcggaggagatgatgggacggggaactctcgctgccgcccaccccataaagtgtaaccggtctcttccttgcacctgatcaagacatgtaacgttcaacttgtgcaaggcgtaagtgtcctcacagtaaaccatacattacccaaaagaatataaaaagttagaac

SEQ ID NO: 14575 - DNA, 1314 bp, Artificial sequence
  DNA replication origin
cacaaggcagtgggacattttactgcacataaaacagctgtgataagttgtagcttggaagctggatagtgaggactgactggagctgtcaggcgtgtgcatgtgtgcgggtctgtgcgcctgtgcgggcctgtgcgcgtgtgcgggcctgtgcgcctgtgcgggcctgtgcgcctgtgcgggcctgtgcgcgtgtgcgggcctgtgcgcctgtgcgggtctgtgcgcctgtgcgggtctgtggcctgtgagggcctgtgcgcgtctgcgggcctgtgcgcctgtgcgggcctgtgcgcgtgtgcgggcctgtgcgcctgtgcgggcctgtgcgcgtgtgcggatctgtgcgcgtgtgcgggcctgtgcgcgtgtgcgggtctgtgcgcgtgtccgggcctgtgcgggtctgtgcgcctgtgcgggcctgtgcgcgtgtgcgggcctgtgcgggcctgtgcgcgtgtgcgggtgtgtgcgcctgtgccggcctgtgcgcgtgtgcgggcctgtgcgggcctgtgcgcgtgtgcgggtctgtgcgcctgtgcgggtctgtgcgcctgtgagggtgtgtgcgcgtgtgcgggtctgtgcgcgtgtgcgggtctgtgcgcctgtgagggcctgtgcgcgtgtgcgggcctgtgcgcctgtgagggtctgtgcgcgtgtgcgggtctgtgcgcctgtgagggtctgtgcgcgtgtgcgggtctgtgcgcgtgtgcgggcctgtgcgcgtgtgcgggtctgtgcgcctgtgcgggcctgtgcgcctgtgcgggtctgtgcgcgtgtgcggatctgtgcgcctgtgagggtctgtgcgcgtgtgcgggtctgtgcgcctgtgcgggtctgtgcgcttgtgcggatctgtgcgcgtgtgcgggtctgtgcgcgtgtgcgggtctgtgcggctgtgtgagtgtgcacgtgtgcgtgtctgtgcgcctgtgagtctgtgcacgtgtgcgggtctgtgcgcctgtgtgagtctgtgcacgtgtgcgggtctgtacgtgctcctgtgtgtgctttcacgcgcgtgttgagatcttggatgctggagcttgtttaaatatgatgaaaataggagggaaatgaagccgtcctccttctctggaacgcctgcttttgtgagtcgccgtcaccctgaggggtggggagggtctgggtgcggcgcccagcggagataccaggcagcattgttgtgctcgtgcttgtccttggattttacactgatttcacttgaagttgctgtgattgtggcctcgcattgatacagatctaattacttgaaatgtcgtg

SEQ ID NO: 14576 - DNA, 2391 bp, Artificial sequence
  DNA replication origin
ctcgcgtcaaggagagagctccaagggcaccatgctgctggcccggccttgctggcccggctgggccttctgtagggaaggccacagagccctgtcccagaggcctcctcctggtaggcacccagcctggtgtcagcctggggaacatgtgctggagcgcaggatgcttggatgctttttaataagaatccattcttgctgtgactgctgcacgcacaggacagcttcactcgcccttgcaggtgcatcctccagggccaaggggtctgcagcaggcaggcggcctctgtcttcctgagactcctcagatgaagttggagctgccagtgccttgctgtgagcagtcacacttcctgttcaccatctccctgtcatcttctggtttctcctgcacctcagggagtggattgccccaacttcacacgccaggaatcgctggcgctgtccacggtgctggcactggtgccagttcctgcagctctggtagtccgggagagatgtctgtgtgtaggtgtgggtctgtgagcttgtgtgtgcatattgtcaatgtgcatgcatgtatgtgtgccgctgttcctatgtgtgcacgtgtctgtgtatgcctttgtgcacacgtgtctggtgtatgtgtgcatgcatgtctgtgtgcatctgtgcaggtgtgtgtggtgtgtatctgtgcatgcatgtgtgtgcctttgtggtgtgcgtgtgtgtatgtgtatgtgtacgtgtgtgcatgtgtatgtgcctgagtggtgtatgtgtgtgcatgcatgtgtgtgcctgtgtggtgtgcgtgtgtgtatgtgtatgtgtacgtgtgtgcatgtgtatgtgcctgtgtggtgtatgtatgtgtgttttgcatgtggtctgtgtgtacatgcatgtctgggatgtgtgtgtacatgtgtgtgcatgtgtatctgtgtacatacgtatgtgcctgtgtggtgtctgtgtctgtgcatgtgtggtgtgtgtccatgtgtccatgttcatgtatgtgtgtatgtgtacatgtgtctgtgtgtggtgtgcgtgtacatgcatatctgtttgcctgtgtgtgcctgtgtgtgtacatgtgtgtgcctgtgtatgatgtgcctgtgtacacgtctgtgtgtggcacttgtgtacatgtgtgtctgtgtgttcacctgtgtctatgtgcatgcatgtgtgcctgtgtgtgtatgtgtgtgcgcctgtgtgtcttgtgcctgtgtacacgtgtctgtgtgtggtgtgtgtgtacatgagtgtctggctgtttgcctatgtatatgtgcatgcatgtgtgcctgtgtgtgtatgtgtgtgcacctgtgtgttgtgtgcctgtgtacacgtgtctgcctgtggcatgggtgtacatgtgtgtctgtgtgttttcctgtgtgtctatgcatgcatgtgcgcctgtgtatgcatgtgcgcctgtgtgttgtgtgcctgcatacacgtgtctgcgtgtggcgtgtttgtacatgcgtgtctgtgtgtgtccttgtgtggtgtgtgcatctcccagctgtaccctgcaacttgcctgtgatacctgcctctcccttggagtcccagagctgaagatgctggctcagatttgtttccattggaaagaggcccctttttcttcttacagcatggcgttggtctggttgggtgcctggtgactctgttggggccgactttcattctggccccgtgtgtgggactgtgtgcagaactggacaggagtcattgctgtgctgcaggagaagtggggctgtgttcattgacacatgtggctttgacattttctactcagatgtggtagaatccttcctccagaacaggagttggcacctcttttcccatcttcaaggaaggacaacgtgctcaggagcgcttcccaagtgaatgactgaatgaatgaacgaaggaggggagagaagaaggaaggaatcagcctcatggaacagggaggtttagagaatcctggcaaaggaagaggcgccgtgccagccaggtcctgcgggagtgttggtgcatggtgaggttggggggtgagggtcggccccagcagggaagggcaggtgcagggatggcaaggccagagcacgtggggatgaagagatgcggtactgcgacggctggaggagggttgcaggagctgctcagacatgggggcagctgcagtctcggctgcttgcaggttgggagagagtcgtgcttggtgtacagctggagagggaagtgggccgaggaggtggtggatgcccaatgtgcccatccctgacggctggcgcctcagtgcacagcaggcctaggtctcgatggggatggccaccgaggtcagtcctgctgggctgctgcctcagagctcactctactaatgctcag

SEQ ID NO: 14577 - DNA, 1818 bp, Artificial sequence
  DNA replication origin
ggatccccagtccccgcttcgcccccaggcacccgccggacacagggaatggccagggcagtgcccccggccccaaggcacctgcaggatacagggagtggctagggcggtgtccccggtccccgggcacctgcgagacacggatagtggccctggctgtgaccccagcccccaggcacctggaggatatagggagtggccagggcggtgacccctagcccctaggcacctgctggatacaaggagtgggcagggcggtgtccccggcccccaggcacctgcaggatacaaggaatggccagggcggtgtccctggcccccaggcacctacaggatacagggaatggccagccggtccccagacacctgctggacacatgagtggccagggcggtgaccccaacccccaggcacctgctggacacagggcatggccagggcggtgtccctggcccccaggcacctgtgggacacagggagtggtcagggcagcggcccccacgtcaccccggcttgccagaccccttcttgtctccctgtccagctccaagggcctctgccctcccgctccaccccctcaggaccctcctccttgaattcgtttcttccaaaacatttcccaggtgtgtgccaggcgctgttcctcatgtgggctgtctcaggagaggaacccacggagatgggtgttttggaggaaaatgaagctggtagggcctaactgtagagtgatgggcgcgggcttgaggtaggtgagggagcaagactgggggtgcccagggaaagagagcccacaggagggaaacgatgtcccaggagaacggctgccctgtttgagtttggggaccagaagcaagggcaggataaggggagctcagatcaggaggaaaggagacccagacccaggcagggtctgcagggagcctgataactttgcatgttccaagaagcagggtggaaagttgttacacgatgtagagcaaaggggtgaaatgatctgatgcattttctttctttttggggtagacagggtctcactctggcccaggctggagtgcagtggtgccatcacagctcactacagcctccagctcctggcctccagcaatcctcccacctcagcctcccaatgtgtgggattacatgcatgagccactgtgcatggcctgatgtacattttaaagaagtcatttagcgttgtgatgactagagttgcatggaaggaagtgtggagatttcatctgctgcaataagagatgctgacagctcacatccaagtggtggcactggaggttctgggtgggggggctagttggattgtggacatgttttaaggtaaagccaaagagattttccgattgatcaaactgggctgtgacagaaaaggagaaatgtagaatggctgtaaatttttcgtttggaaactggaaggctggagttgcactgaggaggtggagagccttctggggatcttcgtttggtggtagtgtgcagttttagacaggtcaagtttgaggtgctcataagatgagtaagcatatgaggtcatgaagggagcaggcgtgaactttagaaagtggtccaaggaataagccccgaggggctctggcctttgagaggtggggagatgagggggcccaagctgtggtacatgaagggtggccagggagaaaaggaaggtcctgaagccaagtcaaagaacgaaccactggtctccaatgatgtggatgaagcaagaggaggaccagtgatgtacggttgcatttgtaaagggcagaggccatcagggatcttggttacaggaattttgttgaagtggta

SEQ ID NO: 14578 - DNA, 1132 bp, Artificial sequence
  DNA replication origin
ctggggaagggcccggcttggggagcgcgcgggcagcccggctccaactgttgcgcggggcgcgcgggtcacccggggactgtgccgggctcccggcgggaaagcagcggcctccaccgcggcgcgcgcaggcgacgctcaccgcgcccgaaagttagcgggggacccggtcacacccgtcgcccccgggcagggtcagcctttctggaccgctgttagagacgcgccggcgcgtttgtgcgcgggactcgcgctcgggttcgagtcggctcggcgcccaggggggctcgcggggcagaggggacgcggggcgagggaggcgcgggcgcttgcgagggtctcactgcgaggtgcggccgccgcttgggtgctggaggcagaacctcccccggtttccactggcgggctacgctgaggaaggtgtgcggcggcggcttcgcggggacccaccggggggcgccccgagaacctgggtccggacgcaaggagcgccctcggagggggcccgccgcctgggtttgctgtgagtggcgtatggacgacagagccgaggaaaagggaaaatcgatccggagaagtggtgttgacaaccacagcagccgggaagatcagccaccctggccacgtgtggacggaccctcgccaggatcatgggttttcccttccgggatcggaacgcgggagctagacgcgctggtatggggatccctgggcggtcaccgaccctgggcaagtctctcagccccagtttaacataaacgcagaaatggatttctgctttccacctgcatggctacggcatttaaatgaggtaaaagatgcgaaaacaaaccgcatagaaagacggatgggagttagaatgaaatcaggtcatccaaaatatttggaatggacaaaccaatcttttccagaaattccaagatctttaaacaaaaaacaggctctgtaagaattccccgtataattgatcaccaaaatattcatcagttgcagtttattttcaaggcagagtgctaaacgacgagggggtagaaaggtgaatgggagaaagaagtccggccgctgtccatttcttctaaatgtttcccgaatctatcagtggtctccactgtcaaaaaaaaaaaaaaaaaag

SEQ ID NO: 14579 - DNA, 1403 bp, Artificial sequence
  DNA replication origin
caggctggacctgggaacccggggaggggcctggaggagagatagctgggcgaggtgggcgccggcgagaaggcggagcccccggacagcgtaggttcgcaggtggagagcggacgcgggggcgagggtgcgcggcgggtctgcgatgcgcgtcggaaactcgcggcccccggtcccggccctgcgcgcttggagcccgggtccttccagcccctgcgcgacgccgccgccgccgccgccggtgaatggcgatcccggccacggcctggaattggaaattcgtgacttgtcggcggccccggtcttctatcgattaaagataaagcgatcagcagtgaatttatccttcgtgtggatgaactcggccagcccgggctgtggggggtttgggaactgtaaatattctccaaagcgccgccgcttctcccgtcttcccggactcgaggctggaggcagctccggcgacgcgaaggggggtaccccccggagaggtcgggcctggggcgcggcggacagagacccggtcccagagcctggcggagcccgacaatccgccctgtcaggaggaatctcatcaacagcccgtgaattaattgtccttgcagttgggaaataacccggtacctcggcgtagcccgagggagtccaggaggctctccaaggagccttcccccgggtcgcgaagctgcgctaaaccccggccccagcgcaccttggaaggcgcattttggcctgaggtgaacgcaccttacaccattttcattttacttccttttctctgagaaaggtaatagataaccaaggccaaaaatggcgaaatgatgaaaaaatggtaattcttggcaggtcaagttgttactctgggtttaaaaaaatgtcattaatcaggattttccagtagccaaattgtcttgtgccggcagctgggtgactcacagatttggctccaatagtaattgtagagtgtgcgtaccatttccttctggatggtgtgactttttcattgcttggaagagaacacattagaatattttatcccctacatctggcagcatgtggagcaggctgtaggcaatactctgtccaagcacatctgggcggggaggccgtggagggaccgaggtgacacagagccggccctgtcctcggttctgtctcgggtcacctgaggcatcttcaccgcggcagctcgggcgcgtgggatctgctctcagtgatgacctgggacgcatcctgcctctgtgcgccattcctgccccttcactgtcactccttggtgatcgcccgtgttcttgggtaagcagtggagaggcacagaatggcttcctctgttgatctaccgcgtcaaatctgtatattataatttcaggttaaagggtaagagttgtaagcaaaatgagtac

SEQ ID NO: 14580 - DNA, 1129 bp, Artificial sequence
  DNA replication origin
cctgcggcaggtgtggggatggcctgggctaccccttcccgccatctctgctgcactgaggacagcatgcggacagactgggggatggggaagccgggacccagtccaagcgaggaattcggaggctgggagcatgacctcactcaggcatcggggccggggaagcagcattccaactaggtttgagagaacagacatgaggaaaggacggaatgaaaagcaccgtccagtgtgggtgaagccagagtgttgctggggcacagcccaggcagggaacagggagtgaccgtgggaagcagacagccagcaccccgggagggcgacgtggccggagaagaggcagggagtgaccgtggggagcagacagccagcaccccgggagggcgacgtggccggagaagaggcagggagtgaccgtggggagcagacggccagcaccccgggagggcgacgtggccggagaagaggcagggagtgaccgtggggagcagacggccagcaccccgggagggcgacgtggccggagaagagggagggacgcaggttgggctggggaatctgtacctcgaggaggcgtcagcccctcttctgcaccttcacccattcagatcattagatgcgacccagggccagggttcaagggtgatcaagacccttcctcacagagtggctattccaatacatcaaagacaaggaaagtgggaattacaaggtggtgagaggtgtcaccctaacagtcagagcacagagaaaccttcccaacccaatctcgtgggtcgggggtatatgtggagaggagacgctgcctctaagcttgctgagcgaacgagcacttcttcccaacgcacaagatgagagacagaagagggaagcggcgctgggtctgagagaaccacgatgatggctccatccatagactgccacggccaccagaacaagtcacttccttcagctaaaacaggtgtctgggcatttagatgcaaagactcagaggaaacgtgaaggcacgtgaaacttgagaaactgctgttgtctgcaggacacacgacgtgaatccacgtcttcagccctaaaccacagtagcttagtgagtgatccagacatgaagacccggccacggaaatcacat

SEQ ID NO: 14581 - DNA, 2439 bp, Artificial sequence
  DNA replication origin
tgaatgtggatcagaatgccagctgcacactggcaggtgctgaggtggacagtggttttgattttctgtttttgtttttttgctgtatcagcatacttttggctgcatataatagaaagtcccacacaaaacagaaactgaggatttgtgcgttcttaccacaaagcaccacagccgggcatcctcagcaaccaggttccctctgtctgctctgtggccttcaccatcccggtgtagcccctgctggctgcggacgctggtcctgaaggcatgatgcgaggacggtgcccctgttagggtgatgtcggccctgcaggcgtgatggggacacctttgcagtaaggaaaccttactgtgagttctcgggaagacctcccctcacatctcaccatgtccgagccagtggctaggaagggaaatgggccccttgccctgggcctggggtggttttactcgccctcctggcctgagctgtcctggttctcggggggctggggagagcgacactggaaagccggcctgtcctagagaccaggaggctctagagtgtgaggggctgccgggcactgccccgcctctgactgctcttctgagtttgtgtactacccacaacgcgtcatacttctgagtcttacgggacttctttacgttttcattcagtaaaaagactgcaagatatcataaagcagacagggaaggagaaacctcctctgaaaaccatcgagccgtagtgacaaatgcaccatttaccatgctccgcgccagtcacgcgatgggcttctccgccgggcctcgcttaggcatctttggtcccaagttccagaaacaagctctggctgatgaaaagcaaggcggagaggctgggacaggccacgttccagccgaggggaacgcggaggacacaggcggctggagggtgacctttgaagtaggacggggcgcagggcgggggtggggggctctgcagcagtatgaggggctccatgacgggacgggcaggctgtgtggcaggattgggtgcgggggctccaggatggggcagggtgggggcctttgtggtgggatgagtgtgctccatggtgggatgggcgggtctgtggtggaatgaacgtgtctgcggtgggatgggggggctctgcggtgggatgggggtctctgcggtgggatggggggctctgcggtgggatggggggctctgtggtgggatgggcgggcctgcggtgggatggggggctctgtggtgggatgggcgggtctgcggtgggatgggcgggtctgcggtgggatgggcgggtctgcggtgggatggggggctctgcggtgggatgggcgggcctgcggtgggatggggggctctgtggtgggatgggcgggcctgcggtgggatggggggctctgcggtgggatgggcgggtctgcggtgggatgggcgggtctgcggtgggatgggcgggtctgcggtgggatggggggctctgcggtgggatgggcgggtctgcggtgggatggggagctctgcggtgggatgggcgggtctgcggtgggatgggcgggtctgcggtgggatgggcgggtctgcggtgggatggggggctctgcggtgggatgagcgggtctgcggtgggatgggcgggtctgcggtgggatggggccggcctctgtggtgggatgggtggactctggtggtggctccgtgggggactccgtggtgggatgggcaggctctggtgctttctgtctctgtctcgctcctccaagactgaggtccacagagccagctcagctcagccgcatgctccacgtagccacaggggtgcagggcccctgggtgggaacagagtgggccatgtgggcgttggtgggtcagcatatcccacactgtgacccgaggaggaagcccttacctggcatttgttttctcccagaaaagcagcagagtccaaagcatagaggagccgagagatagaatatctcgtatcatttaccacgcactttagctttttaaaaagtgcttacatatattgggtgacatccagccctgcggtgctgtgaatttgcaaatggcctcactgaggagctcgtggtggcacacaggtgttctgcactgcccatcagcacctgcccgctccttagagccctcctctgcagtggactgggatgctctcggaaagcagccagtggcttcccagtggacaaggatgggtgaaaccccggggttactgctttgttgtgcggcgcggagacctttcgttggctgccagatctttgctttctgacaacttttattatatttgttacatctcttgagattcttctcacctacaatctattttgctctctctgtatctggtggtataacgggaggtgagcaggctacttttgtacattttcttttcttttttctgtatgtgagagggggccttgcttgttacccaggct

SEQ ID NO: 14582 - DNA, 1055 bp, Artificial sequence
  DNA replication origin
accttgtatctacaaaaaatactcaaattattaatacctaggcgtgggggctcttgcctgaggtctcagctactcgggagatgggaggaacacttgaacacaggaggcagaggttgcagtgagctgtgattgccactgcactccagcctgggcgacagagcaagaccctgtctcaaaaagaaaaaaaattaattgccaagcaagtgaattgctaaacatgtttttaataatcttaattataactgagctctgactgtgggagcagctggaagcccagcggagaagcggcatttgaggtgtgaggtctggtgcgtgagtaggaacgaggggcaggtgggggtgaatgtattccaggcccagggagagagggaggggtggagctctttgtgaatctgaggactgtgggttgactagcggctggcatggctagggggcctggagaggggccccatgtgtgtcagatccccagctggggtgccgtcctctgggtgatgcccccaggtgtgcttttgaaagagcaaagtgctgggtgttggctgggaagccaggattctgaatttgtcaattgactgtcagggctgtgccacccacacaccagaaaccatggcagggaaggaggcgggtggagagtgtgggataatgctggggtgtgcccacaggtggtcgggggatccagggtcatcctagtgcttacctgaggcttggtgccctgagccgctagggtcctgttttaggttataaccggtatttggctgacaaggcagttaggggccaggctgtgagggccttttaggtcatgttagcggctttttttgtgctaatagtcataagaacacgctgagtttgtggctggaataccttgctgggggctgtgtgaggatgagcgggttggggccacgagtgtctgggaggagctggcgtctgggggggatactgctggtggcataggagacgggagaaggtgatgggctcatgctgtttagcaagtgggccaggcatggtcatggccggatagggagcaggtgtgggcaggttggggctgacggcaaagacga

SEQ ID NO: 14583 - DNA, 926 bp, Artificial sequence
  DNA replication origin
ggggcaaggacgcctgccaggacgggcttttcctgcccctgcgccggcccagctgagctaagctcaggcatgggtgtttcgcaaaggggctttggtcccggttacggaggcggcgggcagcgagctctggtctgggcattcctgacgaagctctctgcagaaaaggctcacagccctcggtgacggtgacacatcacacctccacggggtacgtgatatcgcctggtgctcccgttccctcattcattcattcggtctctgcagcacccgggaggggcccggcaggagcctgtacagcgggtgagggaggagggaggccggtctcagaggggcctgaggggaggagggaggccggtctcagaggagcctgaggggaggagggaggccggtctcagaggggcctgaggggaggagggaggccggtctcagaggggcctgaggggaggagggaggccggtctcagaggggcctgaggggaggagggaagccggtctcagaggggcctgaggggaggagggaggccggtctcagaggggcctgaggggaggagggaggccggtctcagaggggtctgaggggaggagggaggccggtctcagaggggcctgaggggagggaggccggtctcagagagacctgaggggaggagggaagccggtctcagaaaggcctgaggggaggagggaagctggtctcacaggggctgaggggaggagggaggccggtctcagagagacctgaggggaggagagaagccggtctcagagagacctgaggggaggagagaagccggtctcagaggggcatgaggtgcaggggcccggcctgcctcatgagagctccgctttcagcctgagccacatgggaatcgcccagagctttggctcaagcatggcaggatccggcgcatctgaagtgtcaggacg

SEQ ID NO: 14584 - DNA, 931 bp, Artificial sequence
  DNA replication origin
tggaccaaataaagcatgcaaaggacagatgtgtgcagtgtgcactgacataaggccgcatgttgccctttcaactgcagtggaaaattgtgcatcggagactcacaggtccgtcatggagcaggtgtccagtgagagcaggcgtccagtgagagcaggcgtccagtgagagcaggtgtccagtgagaacaggcgtccagtgagagcaggcgtccagtgagagcaggcgtccagtgagagcaggcgtccagtgagaacaggcgtccagtgagagcaggcgtccagtgagagcaggcgtccggtgagaacaggcgtccggtgagagcaggcgtccggtgagagcagctgtccggtgagagcaggcgtccagtgagagcaggcgtccagtgagagcaggcgtccagtgagagcagctgtccagtgagaacaggcgtccagtgagagcaggcgtccagtgagagcaggcgtccagtgagagcaggcgtccagtgagagcagctgtccagtgagagcaggcgtccagtgagagcaggcatccagtgagagcaggcgtccagtgagagcagctgtccagtgagagcaggcgtccagtgagagcaggcgtccagtgagagcagctgtccagtgagagcagctgtccagtgagagcaggcgtccagtgagagcaggtgtccagtgagaacaggtgtccagtgtgagcacagctttgggggttccaggtagagtttagcaagcaggtgaattcacgaccgggctccccggtgatgagctgactctggtcccgggatcccgcttggactttgtgtccctgctctgagcttgtcatctggccactcgctcctgggagaattcttctgtcacggcccctccgagactccgaactgacttctgcctttcacggtaccctcaggatttccctgcgactgcctgg

SEQ ID NO: 14585 - DNA, 1422 bp, Artificial sequence
  DNA replication origin
ctttttcctatttaatttctatgaatttctgctcctgtctttattatttttttcccctttactttcttctgttcggtggttcttattttgacttttagcttggatgcttgcttgcgtgtttgtttatactttgatttagacttaatgtgaatattaaaggggtaaacacttctgctaagatcttgtttagtggcacctgcaagtgtgggcctgttactcttcagttctgtgtttcctgttgccctgctcccagccacaggcacctgcctgcctgttctctgtctgtcgtgtttccttttccaaaatgtgacatagatggagtttaccagaggcaaccttgagacactggcttcttccagttcgcacgatgtattatagacttatctatattgctatatgaatcaatagttgatttttataaattgctgagtagtattccagtataggatcgtgtggtgtgtgttccaatatagaaacgtgcggtgcctgttccagtataggatcgtgcggtgcgtgttccagtataggaacgtgcggtgcctgttccagtgtagggtcgtgcggtgcgtgttccagtgtagggtcgtgcggtgcctgttccagtgtagggtcgtgcggtgcgtgttccagtgtagggtcgtgcggtgcgtgttccagtgtagggtcgtgcggtgcgtgttccagtgtagggtcgtgcggtgcgtgttccagtgtagggtcgtgcggtgcgtgttccagtgtagggtcgtgcggtgcgtgttccagtgtagggtcgtgcggtgcgtgttccagtgtagggtcgtgcggtgcgtgttccagtgtagggtcgtgcggtgcgtgttccagtgtagggtcgtgcggtgcgtgttccagtgtagggtcgtgcggtgcgtgttccagtgtagggtcgtgcggtgcgtgttccagtgtagggtcgtgcggtgcgtgttccagtgtagggtcgtgcggtgcgtgttccagtgtaggaacgtgccagggtttgttccagtctaggatcttgtgatgtgtgttccagcataggatcgcgcggtgtctgttccagcataggaacgcgcggtgcctgttccagcataggaacgcgcggtgcctgttccagcataggaacgcgcggtgcctgttccagcataggatcgtgaggtgcctgttccagcataggatcgtgaggtgcctgttccagtataggaatgtgcggtgcctgttccagtataggatgtgccgtgtctgttccagtatagaatcttgtggtgcatgttccagtataggaatgtgcagtgtctgttctggtataggatcatgtgatgtgtgttccagtataggaacatgccagggtttgttccagtctaggatcttgtggtgcatgttccagtataggaacacgtggtgtgtgttccagcataggat

SEQ ID NO: 14586 - DNA, 1020 bp, Artificial sequence
  DNA replication origin
tctctgtggtgggctgaaggtttgtcccccagattcataccctaacccccaatgtgatggtgttaggaggagagaccactgggaggtcatgaagtcatgagggtggggccgccacaggtgggataagtgcctttttaaaagggacctgagagagctccctgcacctcctacctagcaaggacacagtgagaaggcgctgtctctggaccaggaaagaggccctcggcagagagtggaatccgctgtgcctggttggtggacttccagcctccagaaccgtgggagatgaattcccgtttcttgtatgtcacccggtctatgataccttgttctagcagccacatagactaagaccctgtaggaggactgcacagcagaggggacttgggctcaccaccatgagggggacagcgcattgcggggttagtggggcttgtgtaggggaccttagagcaaggcccagcaaggaggagctgctgagtgggggccttcagtgggtatccttatccttttattcaggaggcaaaaaggacagagtgggctctgtcttggtccatttgtgtggctataacacaatacctgagaccctcacaggctggaggctgcagtctgaggccaggaggctgtgtctggtgagggccttgctgtattgtcctgtagcagaaggggggaggtgggtgagagtgagagagtgggtgagagagggccggactgacatgtgtgttcatgtgtgcatgtgtctgcatatgtttgtgtgttcatgttgtatgtgcatgcatgtgtgtgcatgttcatgcatgtacgtgtctttttgtgtgtgcatgtgtctgtgtgtgttcacatgtgtgtgcatatgtgctttcatgcaggggtgaggggacatggagggccagggctgtctgcagtctgcaatggcaggttggattcagctgttgtagggcctgcctcagtggcaggaatgtggttttggaaatactgagcttcaggatgaggtccctgagatgcgatgaagctctggag

SEQ ID NO: 14587 - DNA, 1456 bp, Artificial sequence
  DNA replication origin
atgaggctgccctgtgattcatctaacttacgtgtcgtatctaatttctcacattgcaaatccattcaattagatttaattaggcagatggagcaaatatgcacccttgtctgcagcagataggcaggaaacctgtcccatgaaggggagggtggggttagagcccagtcctgcggtcttggatgaagctgcccttccatccagtgtggccctggggccgcccctcagcccggaagctgtcaggagggtctttctgcagtgagggaagtccgttaggcatgctgtggtttcatgacagcatccagcggccctcctgcctgcaggtctatccaggactctgttaaccgtcgttcttttggaaaatgtttgcagagcaccagccctgccaggtgctgtcctaggctctggacatgggggtctccaaggtgtgtcctgacagaacgagacccccttcggccagcagcatggggcccgagcccctcctcttgctgtgacaatgcggatgtggttgtctcggagtgcagaggttcccatggttactgttgaagcattgggaggttcggcgtctccgagtagctcagccttctctccttggctgtcggcccgaggcttcgaggtcacccaggccgtgtggctcaggcttcaggcccctcttgctcttcccttctggcaggcaggggcttcttcccctcgtgcgtgagacgtccttgtgggaagggccctctcggagcagtgtgcgtctccctctcccatggccactgcaatgtttctgctgttggaggctcagtcagctgagcccttgggtgggagacgcccccagagcagcctccctgcagcctgaggtggacacggaatgagtgatctttgtggcttccagcccttagacttggaggttgtcactccagcacggtcgagacatctctgtgttacagagactggtgtgacagggacagggctgccctcccctctgatgcgttcacagcagccaagatgctgaatctacctgcgtgcccaggagtgatgtgtgggtgaagagaatgtggcatgtacacaatggaatactatttagccttaaaaaagaatgaaatcctgtcatttgtggaaacatggatggagctgggggacaccgtgacaaataagccaggtgcagaaagacaagcacagctgatctcactcacgtgggaatctatgacaaggcaaatgtatggaggcggagcaggggtgtggtggggagagcagagtgacagctggcaggggtggggtggggagagtggagtggcggctggcaggggcggggtggggaaagtggagcggtggatggcaggggtggcatgggaagagcagagtggtggctggcagggcagggtggggagagcggagtggtgactggcaggggtagtggctggcaggggcggggtggggacagcagagtggtggctggcaggggtggggtggg

SEQ ID NO: 14588 - DNA, 1914 bp, Artificial sequence
  DNA replication origin
aatactatttagccttaaaaaagaatgaaatcctgtcatttgtggaaacatggatggagctgggggacaccgtgacaaataagccaggtgcagaaagacaagcacagctgatctcactcacgtgggaatctatgacaaggcaaatgtatggaggcggagcaggggtgtggtggggagagcagagtgacagctggcaggggtggggtggggagagtggagtggcggctggcaggggcggggtggggaaagtggagcggtggatggcaggggtggcatgggaagagcagagtggtggctggcagggcagggtggggagagcggagtggtgactggcaggggtagtggctggcaggggcggggtggggacagcagagtggtggctggcaggggtggggtggggagaacagagtggaggctggcaggggcggggtggggagagcggagtggtgactggcaggggtagcggccggcaggggcggggtggggggagtggagtggcggttggcaggggcggggtggggaaagtggggtggcggatggcaggggtggcatgggaagagcagagtggtggctggcagggcagggtgggggagtggggtggtggctggcagggctggggtgggtgtggggagtcagctgggtgggctggtgggctctggaggctacacagtatagtgactgcagttaataataacacagagctgcatatttcagaacagccagaagaggggatttaaaatgttctcaccacaaagaaatggtaaatccttgaggtgatggatatgctaattagctcaatttggtcattccacaatgtatgcaggacggatacatcatatcggactccataagtatacacagtcattatatgtcaactaaaaataaaacttaaaattatggatgtgtataatgtaatagctgttgcagttgcagtgttgttttatctgcagcatcccccgtgctgagacacagcagctctttccacctctgtttccggggagcagggggctgtcggtctctggacgctgcccgtccccccttctgagaccacacgcttggcgctgatgaggagcaggaagggtttgtgtaaccagagcttgagaggaggctggaagtggtagctagagccacattgcatggggccttcaggccctttaacgatgaaatgtttggggccattgcagtgggttttgagcagaataatgcagtgtgacttagggttcacgaggtttatgagagccctttcggtggtggtgtgaaggagggttatgggacaggaggctgctgaaccagtcaggctgcgggaggatggttgctgtccaggtcggtgtggggcagtggtgagaggtgtcaatccccagggtttgttggatggggatgatagtggctaggtaggtgtggggcagtggtgagaggtgtcaatccccagggtttgttggatggggatgatagtggctaggtaggtgtggggcagtggtgagaggtgtcaatccccagggtttgttggatggggatgatagtggctaggtaggtgtggggcagtggtgagaggtgtcaatccccagggtttgttggatggggatgatagtggctaggtaggtgtggggcagtggtgagaggtgtcaatccccagggtttgttggatggggatgatagtggctaggtaggtgtggggcagtggtgagaggtgtcaatccccagggtttgttggatggggatgatagtggctaggtaggtgtggggcagtggtgagaggtgtcaatccccagggtttgttggatggggatgatagtggctaggtaggtgtggggcagtggtgagaggtgtcaatctccagggtttgttggatggggataatggatgggatgcaggtttggaggagaggatgtagggttttgtgcaggacctggccgg

SEQ ID NO: 14589 - DNA, 1106 bp, Artificial sequence
  DNA replication origin
atcacggtgagatgtgtattctgagggcttgagaaatgccgggtaggggttcagaggagagcagtatgtaagcatgtggagtaaagttgtgcagggagggtttggaccggaagttgaaactgtttgatcagtggagagggagatccagcaagaacagcctcgatggcagcacggggcgtccccattgccccattgctgtggcagcgtcgttctcctgacgcttgagcttgaaccctcccaggctcatcaacaagcatctcgtacgttgccagccatttaatacttgccctgtaacattgttgctcccgtttgcaggctgggcatgagatttccagggcttcgctggacatctgtggctcagtttggatcctccgggatgggcagggaggaaactggctggagggcagcgtgggagccgtgcaacccccactggaccccacctgtgaggttctgtggtcaggggaacccaggggggttccaagccatggtcatcggaaccgaggaaccctggtgggtccaccgcagagggattgctcaggaatgttgcgccagaagcaagacacaggctggactgaggctggggctagcagactggggacagtgcccaggcacagatccaagcccggccgctcccctcctcgggcgcccagccacgttcatttattcctctcgggctctgatcattcctactggataggagtcctcgctgagcccccatggtatctggcacagagcggacgtgtgttctgggactgtgttttaatttgtgagggggacacgcggtcttgcattggcgggcgcgggggctgggggggcactccaagggcagccggagggttcatggaaggagtcacggtgtgcagttcgtgctggtggagagtggggggtccaggcgtgtgcaaggtttgagcccaggtagcctagcgtgagtcacagaggcgctgggtgccctgcgtgagggtgactgagatacagccccggcggccttggggagccgagaatcacaagaaaacagcggggctgggaaggaagaagagggctggtggcacgaggagatggatgccaggggtcgggggtggaaagtgttcgggtgggcggggcagggg

SEQ ID NO: 14590 - DNA, 1323 bp, Artificial sequence
  DNA replication origin
cagcggggctgggaaggaagaagagggctggtggcacgaggagatggatgccaggggtcgggggtggaaagtgttcgggtgggcggggcagggggagatggaaagtgtgcgggtgggcggggccggggggagatggaaagtgtgcgggtgggcggggccgggggaggtggaaagtgtgcgggtgggcgggggcgggggcggtggaaagtgcaggtgggcggggccgggggagggcttgaaagtgtgcgggtgggcggggccgccggcgtggaaagtgttcgggtaggggggcgggggggcggaaagtgtgtgggtgggcaggggtgggtgggtggaacgtgtgcgggtgggcgggggcggtggaacgtgggcaggtgggtgggggcgggggcggtggaacgtgttcgggtgggtgggggcgggggggcggaaagtgtgtgggtgggcaggggtggggggtggaaagagtgcgggtggacgggggcggtggggcggtttgagaccagtgttgtggcgcagcaggcaagggatccccaagcggccgtcagagtccctatgagttatcttgtcgcctccatgctctttaatctcgttaatgtcaggacgtttttatcctttgctttctggaggcagtcacaggttggttggggccaaagattacaaacaaggatgttttatgaagctactcagcaggttggggaatagctgggtttggctgtaggataagcgagttgtaggcgtcctgcccactggttcaaacatcagttcgagagcagggaggggcggtagaaataactgcagagccccccgggcagcacctttgaaggctgtgatgtcagctcaatacatgtgcaaggccgtgtccataaaatcagccacaacaggcctgtgtatttttgtggctatggcttgtgtagagctagtaacgacggtcaccatctcagaatacagcagctgccagtgtcagattacttcccataggacgtcatcgcgaggcagcttgtttctactgctggacccctgcttggtatgagtgttattcctccactctgttcatggggccactgagaccaagagcttagtgacttggtgaatggcacggccatggaggacgccaagctctcccgcccgcaccccggtgatgttatggctgaaacgtgtctcccaaaaagtgtgtgatggagcccagcgcctccagacatgaccttatttggaaatagagtcttgggggaaaccaagtcggcacatttctgttaagtcacctgacttacggtgctcgttatgcagccgcagcagactgccgcgttccacaggaacacttcc

SEQ ID NO: 14591 - DNA, 3420 bp, Artificial sequence
  DNA replication origin
ctcagagctggtggcgggacctgtttctgtgtacagaggtcttgccatgatggcctcctgtgtgaaggccccgcacatctacagacatgtggtgcccttcagccatggcactcttcttaagactttctcctgaggacgctcctcaagtctccctcgctcgcctgacgaggtgctgcctgtcttgctgttgtactgggaaaatgctatcatttagaaaggatctctcagctgtgagtcctctctagtcattatcaccatgatgggcatgctgtttcttatggattcaaaaacatgcccatatttcaccatattaagatcaaaacaagagtgatgttttaagtttttcatcatctctattgttttaaaatcggatctaattgtcactggctttctccaaaaaaatttttttaagaagcctatttttccccatgactatgagagagacttctttaaagagatgccagttaatggaattttttagaatgtcgcatgattttcaaagccaaaaacaacacagtggaaagaccctcagctctgtggatggtggggtgcatttatcagagagagagcaatctttctccacacaggtccctggagttgcttggggctggaggagctggaggaaatgctggagagaatacccttggaaggcaggggccttatcttgcccaactgcctcgctgggtgccaggtggagcttggatgggacagggtcttctcctccatctcctacaatcaagggaatctggtgttgtctgcgtctgtgccctgtgtcctaaggtgtatgttccctgtctaggcctcatttttctcttaccgaaagtgaaggagtgggatcgactctacggacgcctccaagttcagtgtcctgcctttttgtgactctgtgaggaggtgacaggtgcctggggtagggggacaggaggtgtccatcccggcctttctgcagtgctgatccaaggtggagctgagggtagttcagcagttcttactctcatatcaggaccctctggccttgtgtctcagacaactattccttccacacatatctgctgaggccctgccgtgcactgtgaaagaggaggggtgctgcgcttcctgacttaggacatcaaacgtgcagtgtgagctgcggatctcacacgagcctgggaaggccacaaagctcaatgacaagttagactcagcatgttttccctttaaattgagacagggtctctctctgttgcccaggctggagtataatggtgacagagagagaccctttgaaggctcactacagcccagaactcccaggcttaagcgatcctccttcctccgtctctgggtagctaggactacaggtatgcgccaccatgcctggctgatttttaaatttttttgtagagacaaggtctcactatgttgcccatagagagcttgaggttggatccaagttctcaaggggacggaggtgaagaagaaagaccaggcctggaccctgagcaggctgtagtggatgcatggtttgtgtggagcacacggtgggggtagggaagggatctgggccagacccagcctacaagggcctcccctgctccctgcagaagcagttccttattcctgactgcaagaaagaggcttggatggccacactggcctcctgctcagaagccagagtgtgacctgggggtgaccagccggcatggcagccctgtgtagctcagcttgtggggggctgtggcctggctgtgaggtggtgtgggcacggccagccaatgtttcagccctgtgtgtctcagcacaggggccacgggagccagagggaacccaggtctcggctctcattgcctcagaggccaaggagagggcagaggatgggagagaaaatggcagaaactcccaggcctctgccttaagccccgaggaagagtgtgaggatgagaccaaggtatgaggtgaagggcatctgtgctaaggaggctgagcctttctgttcagaaacctctgcaggcaacctccagagacgcagcagagcagccaccggcagggctgcagaaagcgggatcacggcccctgcctgggagtgggaggtgcagacacaggggctggggtgcctgggagtgggaggtgcagacacaggggctggggtgcctgggagtgggaggtgcagacacaggggctggggtgcctgggagtgggaggtgcagacacagaggggctggggtgcctgggagtgggaggtgcagacacaggggctggggtgcctgggagtgggaggtgcagacacagaggggctggggtgcctgggagttggaggtgcagacacaggggctggggtgcctgggagtgggaggtgcagacacaggggggctggggtgcctgggagtgggaggtgcagacacagaggggctggggtgcctgggagtgggaggtgcacacacaggggctggggtgcctgggagtgggaggtgcacacacaggggctggggtgcctgggagtgggaggtgcagacacagaggggctggggtgcctgggagtgggaggtgcacacacaggggctggggtgcctgggagtgggaggtgcacacacagaggggctggggtgcctgggagtgggaggtgcacacacaggggctggggtgcctgggagtgggaggtgcacacacaggggctggggtgcctgggagtgggaggtgcagacacaggggctggggtgcctgggagtgggaggtgcagacacaggggggctggggtgcctgggagtgggaggtgcagacacaggggctggggtgcctgggattgggaggtgcagacacaggggctggggtgcctgggagtgggaggtgcagacacaggggctggggtgcctgggagtgggaggtgcagacacaggggctggggtgcccactcggaggccccaggctgcggtcccatgaggggatggctgaggccttcccagggtgaacacgtacaggctcctgagagcgcacaccaggcccccaactgcccatgagagaatccgggaatagaaggagccgggatctccgtctttaaggtggaaagcttctttggctgctatggagtgcagtagggtgcttggaatgtgaacgaaggccacagagctgtggaaagacagtggggcgtggggcgtggggcctgaagacatggcttatggcttgagttttactacgtatttgatgactcttgtgacatttacttaagttctctgagtttccatttcacctttaaaattgggagaacaataatggcgacattctgagctggtcaggtggccaggatgggcagaggcacgaaaaccaatgcctgcgacatgaggtggtcctgtgaggttgacagagccaggcacagggacagagagagagagagagagagggagagggagagagagagggaaaagggtgctgaagcccaggagt

SEQ ID NO: 14592 - DNA, 1454 bp, Artificial sequence
  DNA replication origin
aggcgcctggtgtggtgggagagatggaggccgggcctgaggaaggaaggggaaggcatgggaccctgtcgcccgcttcgcccactcctcctgcacccggggctggccgagctcacgtcttacttcctctttcttccttcctctgcacggacctcacgcccgcaggcgacacgcatgaggagccagggtcgaggccagtggcatcacagcacccaggaaacagggtcctccacacagggccgtagggggagcctccacctatgccccaaatcaaagtgaaagatcttctctcccggcccaagttgtcccacggcctggggttcaggacgcccacagctgggcagcagatcagcccgcactggctggcacagggtcagtggaaccatggcgcacgcgggctggcatggggtcggggaagccatggcgcacacgcggtggggtcatgacgcacgcgggctggcacggggtcgggggagccatggcgcacacgcgggctggcatgggatcagggaagccatggcgcacgcgggctggcacggggtcggtggaacccatggcacacgcgggttggcacgggttcggtggggccatggcccacacgggctggcacagggttggggagccatggcacacatgggctggcacggggtcgggagccatggcacacacgggctggcacagggtcggggagccatggcacatgctggctggcacaggagggaccggggagccggatcctcaaaagtgacgggtgggaatggagaagtctcttggcagagcccttcccggagccgtgggcagggagggccaggacaggatggcccggccaagagcagacagcgccgcgcgtggaggtggtgaccaggctgaagccagcggggcctgggccggttggtgtgagactggcaggcacaccgaggggcccggcaacctgtgggtccaggatcagcaacctgcagccaccacaggctccacgggccacatcttactggaacacagccgccaccgtctctacgcttcgtgtaagggcagggctgagccgcgcggacgtaaggggcctgtcgcagcaagtgcaaggccagcgcaacatgaaaatccttcccgcaaaattacgtcctgtgtgagggagcccctgctgacaggacccctctgctgccaggacccctgcccccgtccccagggcccaaaccacctggcgcccagcccctgacaggaacgagagtggaccccgggagattcctggtagagagtgtggggcagccctgcagatgcagctccccgggctcctgggttgttcttacagtaagaacaactgtaaagcatgactcggctgctgtgttcaattgaaagacagtcttcctggcagatgcgggcgcacccggagccagggatgccatcccagagggaactagaaagtctctcttgggaggcgccttcctgggagcctgaagccg

SEQ ID NO: 14593 - DNA, 1683 bp, Artificial sequence
  DNA replication origin
ccgggtgcaggaggagtgggcgaagcgggcgacagggtcccatgccttccccttccttcctcaggcccggcctccatctctcccaccacaccaggcgcctgctgggtgatggcggggtcacagcaggggagacgttggctcctccgctctgctccctgagccccacggggcctgagtgcagaggaaggaggtgaagtaagcggtgacagtgggttcctcaaggcgccgtggaaggcgaggctgcgttctcagagccaggccggggttgcagtgtggaaatgccgcggcgctgcccggccccacgtctccctgctgctccagcgcagcccaggccacccttctcactgcccctggggctgagtgagcagggctcaggccgtggggagccagccttgtcagacactgcctttcgccatgagtgaccgggcaaacacctcatgctttggagcagaggcgcgtcctggcctgaagccactcgggagccagggctggtgttagggtgggagcagggcccgtgggcgtgactgccgccatcttggcggggggacgccagggtgagagcagggcccgtgggcgtgactgccgccatcttgaggagtcgccggggtgggagcaggacctgtcggggtggctgccgccatcttgaggggacgccagggtgggagcagggcccgtgggcgtgactgccgccgtcttgaggggatgctggggtggttggaggtcgtggctctggagaggttgggtatttagagatacagctgaagggatttgtgggtggaaaggacgtgtggttcctggagtagatgggatcagggatgcatcaagggtccagcctgtgctgtggaaagccaagttgccatttgtcggcaggaaaaggaggaactttcctagttcaggcacaggtgcggaccaggccgttgggcgtgagtctgggattcaggatgggttcgtggcagacaccacgctggatagtcccagctgtagacagtgtttagagccacggattggctggggccgcccaggagtgaatgcggatccaggagagaggatgaggagggaggggtctgcaagaggagccctgggcttccggagctgaaactcgggaagatgcgaacattcaagcagaaaagaagaggaaggcacagtcgggccagtgcctgccggggcaggaccccacacgtgggcgcgtgccagggcgtgtgctccccaggacgggcctccccgctgcagcttcctcattgtgggtcactctttttctggcaggtcctctttctcctacatgtcctcgttcccaccccccttgcagtgtccccggttgtcctcaggtcagttcagggacccggcagatgttctgctgtcaggaacgggcagagagtagagctaagaggcttttgtgggggccgtcctgggacgcaggtcacgcgggccctccagagaacacaggcacccacagtgaccctttggtctaatggaaccggcgcttttctcttggtggcagatgagtaaaaatagcgttgattttctgctaacaggaaatgggagtcgtggaagatacttatctgggcccagcagcttttagtacattttcaaagcgaggcacacacacaaagagacactcggacaaatcgctgcaatgtgtcccgtcttgcttctccaggggacccaggtctttaggacgcctta

SEQ ID NO: 14594 - DNA, 626 bp, Artificial sequence
  DNA replication origin
ccgtctgagaagtgaggagcccctccgcccggcagccaccccgtctgggaagtgaggagcgtctccgcccggcagccgccctgtctgggaggtggggggacagcccccgcccggccagctgccccgtccgggagggaggtggggggacagcctccgcccggccagccgccccgtctgggagggaggtgggggtcgcctctgcccggccgccccttctgggaagtgaggagcccctctgccctgccgccaccccatctgggaggtgtacccaacagctcattgagaacgggccatgatgacgatggcggttttgtcgaatagaaaagggggaaatgtggtgaaaagatagagaaatcagattgatgctgtgtctgtgtagaaagaagtagacataggggactccattttgttctgtactaagaaaaattcttctgccttggaatgctgttatctatgaccttacccccaacacggtggtctctgaaacatctgctgtgtccactcagggttaaatggattaagggcggtgcaagatgtgctttgttaaacagatgcttgaaggcagcatgctcgttaagagtcatcaccactccctaatctcaagtacccagggacacaaacaccgc

SEQ ID NO: 14595 - DNA, 1681 bp, Artificial sequence
  DNA replication origin
ttctgtagaccagccctacagtgggcagagacccactccttgcctctgtctgtacctggttggtctaaaggcaatgagaaaatgaaatcattccttctcttgaagtctgtctccctgaagagcacctcccatgttcttctgacagctgaggtggacacatgcctttggtcaggcaggtaaacaattttatgtgcaaatgagtggattagtttccatggagggcacatggcaatgtgaggtcaaaactaggtttctgacccctgtgatgtgtgacactttctgatatagcaaaatatctttctccagtaaggtatattcaaagctgctgcttcaaattattgccagttagttttgggtacttatttttgaactcatgcctccttgcgaactttttcaatgagttttaacaggatccatattttaatttatacttagtaaactctataaaactgtccttctttgtgaaatataattagaacattttccctgttatagactgttttttaagagagttcatagaattttagtaatgtggggagggcgtcggggatgcagtgaggggctgggttctggtctttggtgttgtggggagggcgtcggggatgcagtgaggtgctgggttctggtctttggtgttgtggggagggcgtcggggatgcagtgaggggctgcgttctggtctttggtgttgtggggagggcgtcggggatgcagtgaggggctgcgttctggtctttggtgacgtggggagggcgtcggggatgcagtgaggagctgggttctggtctttggtgttgtggggagggcgtcggggatgcagtgaggggctgggttctggtctttggtgttgtggggagggcgtcggggatgcagtgaggggctgggttctggtctttggtgttgtggggagggcgtcggggatgcagtgaggtgctgggttctggtctttggtgttgtggggagggcgtcggggatgcagtgagagggtgggttctggtctttggtgttgtggggagggcgtcggggatgcagtgaggggctgggttctggtctttggtgttgtggggagggcgtcggggatgcagtgaggggctgggttctggtctttggtgttgtggggagggcgtcggggatgcagtgaggtgctgggttccggtctttggtgttgtggggagggcgtcggggatgcagtgaggtgctgcgttccggtctttggtgacgtggggagggcgtcggggatgcagtgaggtgctgcgttctggtctttggtgacgtggggagggcgtcggggatgcagtgaggtgctgggttctggtctttggtgacgtggggagggcgtcggggatgcagtgagagggtgggttctggtctttggtgttgtggggagggcgtcggggatgcagtgaggggctgggttctggtctttggtgacgtggggagggcgtcggggatgcagtgagagggtgggttctggtctttggtgttgtggggagggcgtcggggattcactgaggggctgagttctggtctttgccacgcgggcatgtgtatatcatctggtaaggcatttcaatggtgggattttccccagaagtgaatgaagacttttcaaacagcttaccttttgataagcttgacaaaaccaggtttctttacacattcccagttaaaaataatgctg

SEQ ID NO: 14596 - DNA, 1022 bp, Artificial sequence
  DNA replication origin
tgcagggggtctgggcaaggtgggagagaagaacaggaactccgagtatgggggtgcagggggtctgggcaaggtgggagagaagaacaggaactccgagtatgggggtgcagggggtctgggcaaggtgggagagaagaacaggaactccgagtatgggggtgcagggggtctgggcaaggtgggagagaagaacaggaactccgagtatgggggtgcagggggtctgggcaaggtgggagagaagaacaggaactccgagtatgggggtgcagggggtctgggcaaggtgggagagaagaacaggaactccgagtatgggggtgcagggggtctgggcaaggtgggagagaagaacaggaactccgagtatgggggtgcagggggtctgggcaaggtgggagagaagaacaggaactccgagtatgggggtgcagggggtccgggtaaggtgggagagaagaacaggaactccgagtatgggggtgcagggggtccgggcaaggtgggagagaagaacaggaactccgagtatgggggtgcagggggtctgggcaaggggggagagaagaacaggaactccgagtatgggggtgcagggggtccgggcaaggagggagagaagaacaggaactccgagtatgggggtgcagggggtctgggccactttcatagaaaacttcagaaggtcgattcccatgcagcgcaggacttgggcacccacatggcaacatcacgacacaaatataacaggtgaaaagttgggaatactctcaccaacaaaaagaatggaccactaatacaaacaacaccatggatggagctcaaatcatcaggctgatagaaaggaggtaacacagcactgaagtcgtagatgacccctttcatgaaattctacagtgggaagcagtgatctgtaatgaagccatcatgctggcacagtggtccaggaggttggctgggagcggcaagagaggctttctgaggaatacgttcctcagagctcatcgaacccaacaccc

SEQ ID NO: 14597 - DNA, 1033 bp, Artificial sequence
  DNA replication origin
gggtctcagtctgcacagtggaccctggaatgaggggtctcagtctgcacagtgagccctggaatgaggggtctcagtctacacagtgagccctagaatgaggagtctcagtctacacagtgagccctggaatgaggggtctcagtctacacagtgagccctggaatggggggtctcagtctgcacagtgggccctggaatgaggggtctcagtctgcacagtgagccctggaatgaggagtctcagtctacacagtgagccctggaatgaggagtctcagtctacacagtgagccctggacgaggttcctcagtctgcacagtgggccctggaatgaggggtctcagtctgcacagtgagccctggaatgaggagtctcagtctatagagtgagccctggaatgaggagtctcagtctacacagtgagccctggacgagggtcctcagtctgcacagtgggccctggaatgaggggtctcagtctacacagtgggccctggaatgagagtcctcagtctgcacagtgggccctgggcgagggtgtcagtctgaggcacagatgtggaaccaggagttgtggatggacgttttcccagggctttgtgttttaccgaggatgctctcttgccctctgctccacctgggcgtgtagacggatgtctcggctcactctaaattcaggctggttgcctgagtggctcaagtccaggggcatggctttcacagaagatgttttataggccctgcaaacacatgccaggtccttcacatgcatggcccgtgtcgcaggaagaccagactctgttccccacttgcagactcagccaggtgcagcggtatccccttgctaggctgtgtgattttctccttgaagttctgccttttaattttcgtcctcactcaggcctgacatgtctgacacccctgctgacttccatctttgacaggcttaaatccccatcccttcgctcttcctgtagtcctgtctgttgcacggattacagttaaaatagaagacgaagaacgcactc

SEQ ID NO: 14598 - DNA, 2228 bp, Artificial sequence
  DNA replication origin
gtggtttctatttctgtaaaagcatgtagaatttgaaccttgaaaggaataataggactcaaacaaaatatgacagtaggtgagggtcaaaattaatatgtggttgggagttatgtatgtatgtataactacgaccccacatttgctcatggaaacatccatgtttttttcagtcggaaaatcaagttgtgtgaggaacctcattgagactcagtgtcatattacatcaactatttgtcagtttctcgggtaacccatccatttgaattggatgctttcgtgtctctccaagttgtatttaattcttatgcactgaaatcatatagcctgttagaaagattttaggatgcagttgatttctgtaatttttcggaaacttagttttcagccccactttcctcctttataaaatggaaacaatcacctcattggagcaaactcacctggttggttgcgttgagggagactcataggaagtgacccatgtggaaatgcgtggtcagctcggtgtgcgtggtcagctcggtttccgtggtcagctcggtgtgcgtggtcagctcggtttccgtggtcagctcggtgtgcgtggtcgtctcagtttccatggtcggctcggtttccatggtcggctcggtttccatggtcagctcggtgtgcgtggtcagcttggtgtgcgtggtcagctcggtgtgcgtggtcagctcggtgtgcatggtcagctcggtttccgtgctaagcttggtttctgtggtcagctcggtttctgtagtcggctcggtgtgtgtggttggctcggtatgcatgttcagctcggtttccgtggtcggctcggtgtgcatggtcggctcggtgtgcatgttcagctcggtgtgcgtggtcagcttggtgtgcgtggtcagcttggtgtgcgtggtcagctcggtgtgcgtggtcagcttggtgtgcgtggtcagctcggtgtgcgtggtcagctcggtgtgcgtggtcagctcggtgtgggtggtcagctcggtgtgcgtggtcagctcggtgtgcgtggtcagctcggtttccgtggtcagcttggtttctgtggtcagctcggtttctgtagtcggctcggtgtgtgtggttggctcggtatgcatgttcagctcggtttccgtggtcggctcggtgtgcatggtcggctcggtgtgcatgttcagctcggtgtgcgtggtcggctcattgtgcatggtcggctcggtatgcatggtcagctcggtgtgcgtggtcagctcggtgtgcatggtcggctcagtttccgtggtcagctcggtgtgcgtggtcggctcggtgtgcatggtctgctcagtttccgtggtcagctcggtttccgtggtcagctcggtgtgcatggtcggctcggtgtgcgtggtcagctcggtttccgtggtcagctcggtttccgtggtcggctcggtgtgcgtggtcggctcggtgtgcgtggtcagctcgctgcacgtgttcggctcggtgtgtgttgtcagctcggtttccatggtcagctcagtgtgcgtggtcagctcggtgtgcatggtcggctcggtttctgtggtcagctcggtttccatggtcagctcggtgtgcgtggtcagctcgggttccgtggtcagctcggtgtgcatggtcggctcagtgtgcgtggtcagctcggtgtgcgtggtcggctcagtgtgcgtggtcagcttggtttccgtggtcagctcggtgtgcgtggtcggctcggtgtgcgtggtcggctcaatgtgcgtggtcggctcagtttccgtggtcgtctcggtgtgcatggtcggctcggtttccgtggtcgtctcggtgtgcgtggttggctcggtttccgtggtcggctcggtgtgcgtggtcggctcggtgcgtgtggtcggctcggtttccgtggtcggctcagtgtgcgtggtcagctcggtgtgcgtggtcggctcgatttccgtggttggctcggtgtgcgtggtcggcttggtgtgtgtggtcggctcggtttccgtggtcggctcggtgtgcatggtcagctagatttctgtggtcagctccgttcagaagaggtgcatatgaggggacatgatgctttgggctgtgaaaatgcagatccagcaggagcgcagagtcgtggccccttcctggtgggaggatatttttcatcactgactccgaggtgagctcttattcttcctcagcacgcaccctca

SEQ ID NO: 14599 - DNA, 2534 bp, Artificial sequence
  DNA replication origin
tccgagctccttgccgtgggtcagcgttctccgagccctttgccgtgggtcagctggactctcaccatgcggaagaatgtcgggtaaccatcagtgcctgctcttctcttggagtgagctctctctttctccccggctgtttcaggagcctgcggggatttcttctggctcggctgtcgaggtaattctgtgtcccctagatggagccgtcgacctgatttgcagagcagaacggccagggagtgtctctgggccgtgtcctcagactgcaaaccccaacacagacaggcaggagagcccccagccccagcacctgcctggctggggaaagccagcaaccccagtgagtccctcacacctgagtgatgccttgtccggctttcccagggaggctgctcaccccctggctgtggagagtggaagcagggacattcttggggcacagccttgttttggattgagctgttcccaagatcatgatccatgagggagaaaatcaacaacgtgcctagtacagaaagcagatctgtggggcttccttaggggtttcaggaaaaacatgttagacgcagaggtggcttaggatttaacatctgaccttgaatctgtcagatcacttgttatcttgtaaacgtgagccctcaaaggaagccgtaggcctgcagtcgtgttctgcctgagatgtgtgtggaaaatggtggtgagaagagccgtgaagcgtagcccaggaaagcaccgccggtattgagtgatgcattcagcatgtgaggtcacagaccaggtccccaggagccagtggccagggaaggcctccaccctgggagctccatcctctgggaagtcctgggggcttggatgtaggtggtggatgtgggtgttggatgtcggtggtgggtgtgggtggtggatgtgagtggtggatgtgggtcgtggatgtaggtggtggatgtgggtgatggatgtgggtggtgggtgtgggtggtgggtgtgggtggtggatgtgggtggtgggtgtgggtggtgggtgtgggtggtggatgtgggtggtgggtgtgggtggtgggtgtgggtgatggatgtgggtggtgggtgtgggtggtgggtgtgggtggtggatgtgggtggtggatatggctggtaggtggtggatgtgggtggtggatgtgggtgatggatgtgggtggtgggtgtgggtggtgggtgtgggtggtggatgtgggtggtggatgtggctggcaggtggtggatgtgggtggtggatgtgggaggtggatgtaggtggtggatatgggtggtggaagtgggtggtagatgtggctggcaggttgtgggtgtgggtggtggacgtgggtggtgggtgtgggtggtgggtgttggtggtggatgcgggtggtgggtgtgggtggtggatgtgggtggtgggtgtgggtggtgggtgtgggtggtggatgtgggtggtggacgtgggtggtgggtgtgggtggtgggtgtgggtgatggacgtgggtgatgggtgtgggtggtgggtgtgggtggtgggtgtgggtggtggacgtggctggcaggtggtggacgtaggtggtggatataggtggtggatgtgggtggtggatgtggctcacgggtggtggatgtaggtggtggctggtaggtggtggatgtgtctaccctggggcttctctgtggaaagctccccctggccttcgtaggacaaaggattcttcaggaagcagtaggtggctgagagacccctgtgacagtgttggtgagtgataacgaaaactaggaggactgcagtggggaagggggatgaagggggaacatgagctgtgctgccttttcagggagggcttggtcagtcatgtggatttggaccaggtgtgaagggaaggaagtgttctggcctgttaggttgtcaaatagtaataatgcccaggtttctgtgcatggggtaagttaatcacctgtgttttgggctctcaggggtgggcaatgcctctttggctgctgttagaaggacacagtaaggcagtgaagcaatcaagaagcaagcgtgcctcgctgctgggctccaggaaggcaggtgtggagagacgggcagtgagatctcagctggggtgcagttgcttgtgatgctttctgggttagagactttgcatcacctctgaagcccccaggacttcccaaaggacggagcacaaacgtgacacttctcacagcagtgactgccctgccacgccacgctgtgttttatggctcaccggtcccactcctgctggatgtgaagctcaggatggtgagatactaccacagtcctccttgtaacccatccccttacagcctggcacagactaggggcccaataaagccctgttgagaggaactggtggtcataaaacccaaaatacggcaagttgtcacttagtgttatcccagataaatggaatatgtaagaaaatgaaaagatgggggttcatgattgcaaactctccctgggcaaaactcagccgtctgtgaatttgttgtgttgcctt

SEQ ID NO: 14600 - DNA, 2500 bp, Artificial sequence
  DNA replication origin
acagctcagagctgcagctctttggcaagaaactgtcacatgtgtctccaacccccgagtgtctcccaaacaatcaggtctgatcacaatgtggaatccatacaaaagcgaaagaatggatggatatgttgtaggaatgtcctttaatgtcctccagaggaaaacacccctccttttaaaaatatcctttaaactgccatgataaatgataaaatcatgaacacagcatttataagaacagcattccttggcctgaaaatcaatatgaacctatcatttttcagcacatttgcaaaacagctacttccaacccaactctgagcagtgggcctcagtgctctcagcctgcatggcaaggagggagggtgccagtctctgcagagacagagatgttgctgaaggcctggggcagcaggagagaccctgggggacagacggagctgactctgggcccattcaggcccctgatgctggaggaaggcgatggagtctcaccagcccacggttatgagtgagggcagcatgcctcagggggacaaacggctggctggtgtcaaaagggaaagtaagacatttgttttcatattgtggtgccactcaggccgacatatacagaccaatagaccatgtccggagaaagcctgtgcaggcctaagagatttgttactttcatttttacttttgcagcagctactatggccagagcaattgcatagcctgctggatgaggggtggagagagtgaggccggggagcgagaattgcatagcctgctggatgaggggtggagagagtgaggccggggagcaagaattgcatagcctgctggacgaggggtggagagagtgaggccggggagcaagaatggcatagcctgctggatgaggggtggagagagtgaggccggggagcgagaatggcatagcctgctggatgaggggtggagagagtgaggccggggagcgagaatggcatagcctgctggatgaggggtggagagagtgaggcggggggagcgagaacggcatagcctgctggatgaggggtggagagagtggggtggggggagcgagaatggcatagcctgctggatgaggggtggagagagtggggtggggggagtgagaattgcatagcctgctggatgaggggtggagagagtagggtggggagagtgagaattgcatagcctgctggatgaggggtggagagaatgagactggggagtgagaattgcatagcctgctgcatgaggggtggagagagtggggtggtgggagcaagtaacgttcttctgcctgtttgcctttcggagaccctggaagaagccacagctaaatttcctacaatctctgatgatgcaccacatgtcagagatttgacagctttatcccatctcaagggcatgaaaaacagacagagaaagactaaaattcagctgttttctgaatttccggcagtgttactggtcaactgccatagaagatggaaatcagccaacagcacgcagatgaggaggagaaaagcttttcaccttgcttagaaagtcctgtgtcacccagtccccaccaggcccttggtgccctgtcccacacctccccgccacagacagacggatatggaacaactcttcatggtagctctaaagtccattaatgaaacgccacagaggtccaaggagaagcaatgaatattggctaccaggactagtgcagaaattgcagggcccatttaggggatgggaagtcgtctggaaggtggaccagcagccgccttggtgacgtggaacaagcaaagctctcaaagcagacatcccctgtggggccaagcccagctggagaaatccattttggcagtggtgtgaaggcagagccagacgggaagggacccagagctgtgacgcagtgaagtgcagctctatccaggatggataaggaggccacatagcccaggaactggcactgacattgtgccctgagggcggactgtgccagggtggggacctggtgacatggatgtggagacagggaggaggcagaaggatccagagctttgcactgtgtgctgatggcaagcccatgaagagaaaggacagagggagcaggagggtcaggagacagtaaaatggattctgttttgacatgggttgttagtgataaccaatcatcaaggtgagaatgtccagtagattttggaaggaggctctgacaatttggagatgcatcaagactaccatttagctccagggaatcaaagatgttgatgtgacaattggagaaataagatcagatgaaacagccaaaggagacagcctagaagatgaagatggcacagagagaacatgaaaaaaaaaaaaagagagagagagaaagaggagtcacacatgtggttcactgacaactaaacaaaatgtctgagattacaaatcatcctgccaaatactgcaagagtcacacacaatttgatgctgctcacagccttgagaaaggagctggagtgag

SEQ ID NO: 14601 - DNA, 1153 bp, Artificial sequence
  DNA replication origin
tgtgcgtggggccttgtgagtctccggggtctttgtgagtctctggggtctctggttttctggggtcttcatgagtttcaggggtctttgtgagtctctgggtccctatgagtctctggggtctctgtggttttccggggtcttcatgagattctggggtcttcgtgagtctgtggttccctatgagtctctggagtctctgtggttccctatgagtctctggagtctctgtggttttccggggtcttcgtaactttctgggggtctctgaggttttccggggtctttctgagtctctggagtctgactctggtggaggtaagaagggaacggaggtggccgtgagtcccggtggcctatctgccctgtgtgtgtatcacatgctggctgccctgggcgtcgtctgggggtgtttggagacttccaggctctgttggattcatgtggacccaccatgctgaaactttcagggcttctcagagtcgtatggccttggttaacggtgatgactggcagggccttggttaacggtgatgactgacggggacttggttaacggtgacgactggcagggccttgtttaacggtgatgactggcagggctttggttaacggtgatgactggcggggccttggttaacgttgatgactggcggggccttggttgacggtgatgactggcggggccttggttgacggtgatgactggcggggccttggttgacggtgatgactggcggggccttggttgacggtgatgactggcggggccttggttgacggtgatgactggcggggccttggttgacggtgatgactggcggggccttggttgacggtgatgactggcggggccttggttgacggtgatgactggcggggccttggttgacggtgatgactggcggggccttggttgacggtgatgactggcggggccttggttgacggtgatgactggcggggccttggttgacggtgatgactggcaggtgtctgctgtattcaggagtgtgcaagtggttgtttattggaaatcagttcgaggggtccccgcacccatgttggggctgcatctgccactgttgagttggcctttggtgaggatgccagtgatggacctggctgtgggaatcttctaacaacaaaccct

SEQ ID NO: 14602 - DNA, 2610 bp, Artificial sequence
  DNA replication origin
gcagaaaaccaacttgcgtgttttctttttattgttgcttttttgaaaaaatggtcctaatttcagcttgtttttccaaccatgtgaaaggatggactggacgctgcgcagaagtggagatcttaggtaagaagaaaggataggaaggttgatgggaaatgaattggctgtcactgtccttcctgtccagatgcatttggaggctttctggagaatggtttccaaactcagtatgtgctgaatgtttccccaatctatggggaaatgaaaagaagacagtgcagtcaatttctgaaagttaaccactttcagcattaatagaacaaacgaaaccctgggagcagccttcatgcttgtttgacgttgcagggcggcctgtgattgaagccgtcatgtaagatgatgctgtgagatgtgagtgagtgcacgtgcctgtgatgtgcgctgggtctgtgaagtgtgcacgtgcctgtgacgtgtgctgggtctgtgaggtgtgaatgtgtctatgaggtgtgcatgtgcctatgaagtgtgctgggtctgtgaggtgtgcacgggtctgtgagatgtgcatgggtctgtgaggtgtgcacgtgcctatgatgtgtgcacgtgcctatgaagtgtgctgggtctgtgaggtgtgcacgggtctgtgaggtgtgcatgggtctgtgaggtgtgcacgtgcctataatgtgtgcacgtgcctatgaagtgtgctgggtctgtgaggtgtgcacgtgcctatgaagtgtgctgggtctgtgaggtgtgaatgtgtctatgaggtgtgcatgtgcctatgaagtgtgctgggtctgtgaggtgtgcacgggtctgtgagatgtgcatgggtctgtgaggtgtgcacgtgcctatgaagtgtgctggatctgtgaggtgtgcataggtctgtgacgtgctgggtctgtgaggtgtgtacgggtctgtgaggtgtgcacatgcctatgaagtgtgctgggtctgtgaggtgtgaatgtgtctatgaggtgtgcatgtgcctatgaagtgtgctgggtctgtgaggtgtgcacgggtctgtgaggtgtgcacgggtctgtgaggtgtgcacgtgcctatgaggtgtgctggatctgtgaggtgtgcacgggtctgtgaggtgtgcatgggtctgtgaggtgtgcacgtgcctatgaagtgtgctggatctgtgaggtgtgcacgggtctgtgaggtgtgcatgggtctgtgaggtgtgcacgtgcctatgaagtgtgctggatctgtgaggtgtgcacgggtctgtgaggtgtgcatgggtctgtgaggtgtgcacgtgcctatgaagtgtgctggatctgtgaggtgtgcacgggtctgtgaggtgtgcatgggtctgtgaggtgtgcacgtgcctatgaagtgtgctggatctgtgaggtgtgcataggtctgtgacgtgctgggtctgtgaggtgtgtacgggtctgtgaggtgtgcatgggtctgtgacatgtgctgggtctgtgaggtgtgcacgggtctgtgaggtgtgcacgtgcctatgaagtgtgctgggtctgtgatgtgtgcacaggtctgtgaggtgtgcacgggtctgtgaggtgtgcatgggtctgtgaggtgtgcacgtgcctatgaagtgtgctggatctgtgaggtgtgcataggtctgtgacgtgctgggtctgtgaggtgtgtacgggtctgtgaggtgtgcatgggtctgtgacatgtgctgggtctgtgaggtgtgcacgggtctgtgaggtgtgcacgtgcctatgaagtgtgctgggtctgtgatgtgtgcacaggtctgtgaggtgtgcacgggtctgtgaggtgtgcatgggtctgtgaggtgtgcacgtgcctatgaagtgtgctggatctgtgaggtgtgcataggtctgtgacgtgctgggtctgtgaggtgtgtacgggtctgtgaggtgtgcatgggtctgtgacatgtgctgggtctgtgaggtgtgcacgtgcctatgaagtgtgctgggtctgtgatgtgtgcacaggtctgtgaggtgtgcacgggtctgtgaggtgtgcatgggtctgtgaggtgtgcacgtgcctgtgatgtgtactgtatctgtgaggtgtgcacgggtctgtgaggtgtgcatgggtctgtgacatgtgctggatctgtgaggtgtgcatgggtctgtgacgtgtgctggatctgtgaggtgtgcacgggtctgtgacatgtgctggatctgtgaggtgtgcacgggtctgtgacatgtgctgggtctgtgaggtgtgcacgggtctgtgacatgtgctgggtctgggtctgtgatgtgtgcatgtgcttatggagtatgctggatctgtgaggtgtgcatgggtctgagaggtgtgcatgggtctgtgacacgtgctgggtctgtggggtgtgcatgggtctgtgacatgtgctcggtctgtgatgtgtgcacgtgcctgtgaagtgtgctgggtctgtgaggtgtgcatagggtgggtgaggtgtgcacgtgcctgtgaagtgtgcatgggtcttcagtgtgtctgcatctggcatgtgagagatccagcagtgccatactg

SEQ ID NO: 14603 - DNA, 1412 bp, Artificial sequence
  DNA replication origin
aagaccggaacctgatggtaaccgtagtaacaccagtccacatctggctcaaagttcacctaagggagtgcaatctctggctcaatggcttggggcattaccacgaggggcaaatgcactcaatccctaggaaggtctgtctcccattaaatgaaattctgtatgggttggggcaacaccatgagaaagaagcactcaatacctaggagggtctgtctcccattaaatgaaattctgagcaaatggccaaaataggacagatgctcatggatgctaaaggaacaaggatagaaggttataagttctgaagagacaaggatgtgttgtcatgaattctaaaggaatgaggatgagaggccacgggttctaaggagacaaggatgggtggtcatgggttcaggaaagatgaagacgggtggttgtgggttctaaagggacaaggatgggtggtcatgggttcaggaaagatgaggttgggtggtcaggggttctgaagacatgaggatgggtgatcaggggttctgaagggatgaagatgggtagtcatgggttctgaaggaaagaggatgggaggtcatgggttctaatgggaagaagatgggtggtcatgagttctgaaggaacaaggataggtggtaatggattctggaggaacaaggatgggaggtcatgggttctagagagatgaggatgggaggtcatgtgttctgaagggatgaggatgggtggtcaggggttctgaagggaagaggatgggtggtcagggtttctaaagggataaggatggcaggtcatgggttctaactgggcgaggatgggtggtcatgggttctgaagggacgaggatgggtggccatggcttctaactggacgaggatgggaggtcatgggttctgaagggacgaggatgggtgttcatgggttctaactggacaaggatgggaggtcatgggttccaaaggggaggacgggtggtcatgggatctaactggatgaggatgggtggtcatggcttctaactggacgaggatgggaggtcatggggtctgaaggaatgaggatgggtgatcaggggttctaaagggataaggatgggaggtcatgggttctgaagggacaaggatgcgtggccaggggttctaaagggataaggatgggaggtcttgggttctgaagggacgaggatgggtggtcagggtttctaaagggataaggatggcaggtcatgggttctaactggatgaggatgggaggtcatgggatctgaaggaatgacgatgggtggtcacgggttctgaagggacaaggatgggtggtcatgggttctaactggacgaggatgggagacgaggggttctgaagggactaggatgggactagaatgactagtttctaaataaattaggatgggt

SEQ ID NO: 14604 - DNA, 2492 bp, Artificial sequence
  DNA replication origin
tgaacccagtgtgcctgtgggctcagcgctgagggctggtcacagatcccacccttgcaggtctcagtctgcctctcccttccctgaaatcagtgcctcccacaggcaccatggtgaagccggcgtctcccctgccctgggggaaccccgggcacatccaggactccgctctgtccccatcatgtgacctctgatgggtccatcaaggcctcgtggtctcctccacgtgggaggccagagtggatcccacagttcctgacatgcatgttcactccgttttcctgagtgtcatgccaaggtctcagtggtcacatttaggaacgtcttgattaaataagatgcaatgggcttctatgtcgtgggcctcctcggagcctctagtttggaagtggctctcatgaacttaccgtggggcgcgatcattggcagcactgactttttgtttggggaaaatcacgatctatggcctaagacggcttctcgcatctgcattccaaaatagggtttcagagcttcgtgctctcatttaaagcagttttttgtctgtatgactcagtggtgtctttcccaggaacctcctgccttagctcttctcaggatgagacgaaaaaatcccttttgggtttcgggggccgagtgagtgtgcagagttgttgacttttggattttagcttccctggcccacgcagttcactgcgctcccacaaagaccgctcctgacttttcctccgtgggcctcactccctggccctctcatcctgcctctcctgcccgcgtgctgtgtctgtgctctctcctgcccaggtgctgtgtgtgtgccctctcctgcccgggtgctgtgtgtgtgtcctctcatcctgtccgggtgctgtgtgtgtgtcctctcatcctgcttgggcgctgtgtgtgtgtcttctcctgcccagccgctgtgtgtgtgtcctctcatcctgcccggccgctgtgtgtgtgtcctctcatcctgcctgggtgctgtgtgtgtgtcctctcctgcccgggcgctgagtgtgtgtcctctcctgcccgggtgctgtgtgtgtgccctctcatcctgcctgggtgctgtgtgtgtgccctctcatcctgcctgggtgctgtgtgtgtgccctctcatcctgcccgggtgctgtgtgtgtgtcctctcctgcctgggtgctgtgtgtgtgccctctcatcctgcccgggtgctgtgtgtgtgccctctcatcctgcctgggtgctgtgtgtgtgccctctcatcctgcccgggtgctgtgtgtgtgtcctctcctgcctgggtgctgtgtgtgtgtcctcatcctgcccgagcactgtatgtgtgtcctctcttgcctgggtgctgtgtgtgtgtgtcctcatcttgcccgggcgctgtgtgtgtgtcatctcctgcctgggagctgtgtgtctgtcctctcctgcctgggagctgtgtgtgtgtcctttcctgcctgagcactgtatgtgtgtcctctcttgcctgggtgctgtgtgtgtgtgtcctcatcctgcccgggcgctgtgtgtgtgtcgtctcctgcctgggagctgtgtgtgtgtcctcttctgcctgggagctgtgtgtgtgtcctctcctgcccgagcactgtatgtgtgtcctctcctgcctgggtgctgtgtgtgtgtcctctcatcctgcctgggtgctatgtgtgtgtcttctcctgcccaggtgctgtgtgtgtgtcctctcctgcctgggtgccgtgtgtgtgtcctctcatcctgcctgggtgctatgtgtgtgtcttctcctgcccaggtgctgtgtgtgtgtcctctcctgcctgggtgctgtgtgtgtgccctctcatcctgcgtgggtgctgtgtgtgtcctctcctgcctgggtgctgtgtgtgtgtcctctcctgcccgggtgctgtgtgtgtgtcctctcatcctgcctgggtgctatgtgtgtgtcttctcctgcccgggcgctgtgtgtgtgtcctctcctgcctgggtgctttctgtgtcctctcatgcctgggtgctgtgtgtgtgtcctctcatcctgcctgggtgctgtgtgtgtcctctcatgcccgggtgctgtgtgtgtgccctctcctgcccgggtgctgtgtgtgtgtcctctcctgcctgggtgctgtgtgtgtgtcctctcctgcccgggtgctgtctgtgtgtcctctcatcctgtctgggtgccatgtgtgtgtcctctcctgcccgggtgctgtgtgtgtgtcctctcatcctgcctgggtgctgtgtgtgtgccgtcttatcctgcttgggcgctgtgcgtctgtcctctcctgcccaggtgctgtgcgtgtcctctcctgcctgggtgctgtgtgtgtgtcctctcctgcctgggtgctgtgtgtgtgcccgtctcatcctgcccaggcgctgtgtgtgtgtcctttcctgcccgggtgctgtgcgtgtgtactctcctgcccgggtgctgt

SEQ ID NO: 14605 - DNA, 1759 bp, Artificial sequence
  DNA replication origin
ggctgtacctgcctgagcccaagttagcactgctgtgagccctatcaaactggggctggattttccaccaagtgtctcataccaaacaggcctaggatatttcagaaccttgtcttctagctctgctgaagtgcacaactcattgctgcaagctgcagccgccctgccgtgcagtagaaccccagagcttcctctccccatccgattcacttgcttgtctgactgtggctgggactgagtgagctgcggaccccagggacagaacggatgtccattaaagtggctttgctccatttcccatgtttgtggtgggtcacagtccctcatgtggggtcgaggtttctttgtatcttgcccctgcgagaggtgtggctgtgggagtgaggaggtggtggcaggagccaacaggtgctggccgtggtgctgacgcccagggactgagttctgggtgagagcactacttcacagggactgagttctgggtgggagcaccgcttcgcagggactgagttctgggtgggactgagttctgggtgggagcactacttcacagggactgagttctgggtgggagcaccgcttcgcggggactgagttctgggtgggactgagttctgggtgggagcacctcttcacagggactagttctgggtgggagcaccgcttcgcggggactgagttctgggtgggactgagttctgggtgggagcaccacttcacgaggactgagttttgggtgggagcaccgcttcacggggactgagttctgggtgggactgagttctgggtgggagcaccgcttcacagggactgagttctgtgtgggagcaccgcttcacggggaccgagttctgggtgggagcaccgcttcacggggaccgagttctgggtgggactgagttctgggtgggagcaccgcttcatggggactgagttctgggtgggattgagttctgggtgggagcgccacttcaccaggactgagttctgggtgggagcaccgcttcatcgggaccgagttctgggtgggagcactgcttcacggggaccgagttctgggtgggactgagttctgggtgggagcacagcttcacagggactgagttctgggtgggagcatcgcttcacggggactgagttctgtgtgggagcaccacttcatggggactgagttctgggtgggactgagttctgggtgggagcgccacttcaccgggactgagttctgggtgggagcaccgcttcatggggactgagttctgggtgggagcaccgcttcacaggagcgtgaagagactgcaatgccagggaggacgggctgctcctagctggcttagctgcctgctgggtactcatgcacgctttctttcatctgtgttaataatcaaatggccgtcacagtgcactgggggaagtggattcttagtcgacaggtagaaatgcagcgatgtggcactgatgtgctagttgaagccatactgtgtgccataactaaggccgcaaattccttcagaggtcctggaagccacagtgtctggggttatgctggttgggtgggttggctgcacagtgtcctcacacacccgtttcacagcccagggtgggctagtgggcaggtcgctggcctttcctacggactcgagcctgaaatgtgtccgtccctcccctttgcaaacctgccctccttccaggcaccatgccgggcaaacaacagactcctcctgcccagggaagccttttctgattttttagggacacg

SEQ ID NO: 14606 - DNA, 598 bp, Artificial sequence
  DNA replication origin
gagagcgggttgcagggacttgccttctgggtgtgaccttggtgcaggtgcataagggttagcgactcctgctgcttcccgggtgtgctcaggggcggggcttttccggggcggggcttctccggggcggggcttctccggggcggggcttctccggggcggggcttctctggggcggggcttctccggggcggggcttctccggggcggggcttctccaggacggtgctttcaacaaatcaccagcccagggtgcagctagaggctttgcgctgcgtctgtctgagcctgtgttggagtagagtgcatgggtgtcctccaggtgccctgagtgttttgcccactccaggaagcaaattgaagggaccctgccccactgcatgcggacgtggctcagggttggttgtttgccctcgaggggcagcacgggaccacggctgtgccatctgggtgagctgggctggcaggtaccccgaaaagcacacagggaatccacaggaaatccacctcagccagggacatatgcacaccccccacatcctgaaggcaactgcagctctcagagaccgagaaacacacaccacaccgcccccaccat

SEQ ID NO: 14607 - DNA, 1023 bp, Artificial sequence
  DNA replication origin
caggtgtcagggctgtgagaggcagagaccgtggatgaggaggcgctggttcaggtgtcagggctgtaagaggcagaggccgtggatgaggaggcgctggttcaggtgtcagggctgtgagaggcagatgccgtggatgaggaggtgctggttcaagtgtcagggctgtgagaggcagaggccatggatgaggaggcgctggttcaggtgtcagggctgtgagagcagaggccgtggatggggaggcgctggttcaagtgtcagggctgtgagaggcagatgccgtggatgaggaagcgctggttcaagtgtcagggctgtgagaggcagaggccgtggatgaggaggcgctggttcaggtgtcagggctttgagaggcagaggcagtgggtggggaggcactggttcaggtgtcagggctgtgagagcagaggccgtggatggggaggctctggttcaggtgtcagggctgtgagaggcagacgccgtggaagaggaggcgctggttcaggtgtcagggctgtaagaggcagaggccgtggatgaggaggcgctggttcaggtgtcagggctgtgagaggcagatgccgtggatgaggaggcgctggttcaagtgtcagggctgtgagaggcagaggccgtggatgaggaggcgctggttcaggtgtcagggctgtgagagcagaggccgtggatggggaggcgctggttcaagtgtcagggctgtgagaggcagatgccgtggatgaggaagcgctggttcaagtgtcagggctgtgagaggcagaggccgtggatgaggaggcgctggttcaggtgtcagggctgtgagagcagaggccgtggatgaggaggcgctggttcaggtgtcagggctgtgagagcagaggccgtggatgaggaggctctggttcaggtgtcagggctgtgagagcagaggctgcaggtggggagggctctggtcccacagactaagggtgtggaagtgcagggcctcttcatgacgggaggcacgtggacctc

SEQ ID NO: 14608 - DNA, 1511 bp, Artificial sequence
  DNA replication origin
ttcttagtcctgacttccagtttgattgcactgtggtctgagagacagtttgttataatttctgttcttttacatttgctgaggagagctttacttccaactatgtggtcaattttggaataggtgtggtgtggtgctgaaaaaaatgtatattctgttgatttggggtggagagttctgtagatgtctattaggtccacttgcttatgtactcaaacaaacactatcacccacaaaataatacggctaaataaatttaatacttctgagcaactatcttgaagactttgatagttctttgctattgtttttaaatgtacttttttcacttggagacccaacatttttgttctgcattcccgttcccctcactgcgtgcaaaaatcaatgcatgacatcaatcattgccctgatccggccatggaaagatttggagaaagcctggattctaatgttgatcctgacccataatagcatgtcacatttcagatgtctctacagtgggtcaaacatgcagccgctgctgggccttcaaggaagcaaagtctgtgtccttaggtcacgcaaagtctggtttaaaagctgacgcatgttctgagagctgtaggctgtgatggggaggctcagcacgggtcagggacggcacatcccggccccccagagcagctctgggaatgcctcgtgcctgtcatcccggcctaatgattattaattcctgttctctttcctctcatcttcccctgatggggaaagtcacttatatgatcacgctgaccacacagcacagttctcagcccagctgagcctcctattgccagggaggtttttacacgtaccaatgaagtcctcaccctggtgattccggggtaattgttctgagacagggtcgggccatgatggactaaagagtgaagggtcactggggcatgggcaggcatgcttagtccagcccaggcagctgcaggaattctctcagagttgtcttggggctggagcttccagggggactcgagtttgacagagctgggagtagagctcagcgttttgggaagagcagtgggacgggacggcaccagcgggcatggacctgggatgtcagaggctctcacagccaagctgctggcttccaggcaccacagccactgagtcctgtctgcacccagaccccgttcctgagctccagggtgggcctggcactctgcattctgaacgggcaatgctgaggctgagggtccctgggccacacttggaaaggtcaaggcttcagcagaaggtgggagcagggggtgtgcagatgacaccagctgccaggacaagccttgctgtaaggatgcaggatgcgaatgggagaggcaccaagggccgcagagaaggagccgtgctgcactgggctgccgtgaagacgaggtgggcggcctcggtggctgtgactgtagcggagctgtgagggtgaagacgaggtgggcggcctcggtggctgaggcggagctgtgagggtgaagacgaggtgg

SEQ ID NO: 14609 - DNA, 1821 bp, Artificial sequence
  DNA replication origin
acgatttaatgatgttgtactgggcacaagaagtggttgcaatcacaaccgtttacggaccgcaggcctgcgcagagccccattcaactgtcacggcacttgtgagctcctggaagaaaagaagacttggagagtttgatgtgatttcacccagctttagccacaaaggtgggatttgaacccaaggatgggagtagcaagggtgaattcctacacagcatggtccgtcaccagctgctgatggatatgaacccttcttggtcttgaagaggcatttcccatgctcataaagggaggtgtgtggggtggttgtttgaggatcccttaattcagggatgagtgggctgtgggcaggaggtgagaggaggttaggagggaggctggggaggggagggcgtcgcagaggaggttaggaggaggctgggaggggaggggagggcatcgcagaggctgggttggccatggtgcacaggcctctgacagaggtgaggaggctggggatgtcctgcgtcacaggcagatggaagccttgtttgggagctgtgctggggacagagtgtggaggtcagcagctggcgggaaaggctggaggggtcgggaaaagctggaggggtcgggaaaggctggaggggtcgggaaaggctggaggggtcgggaaaagctggaggggtcgggaaaggctggaggggtcgggaaagcctggaggggtcgggaaaggctggaggggtcgggaaaggctggaggggtcgggaaaggctggaggggtcgggaaagcctggaggggtcgggaaaggctggaggggtcgggaaaggctggaggggtcgggaaagcctggaggggtcgggaaaggctggaggggtcgggaaaggctggaggggtcgggaaaggctggaggggtcgggaaaggctggaggggtcgggaaagcctggaggggtcgggaaaggctggaggggtcgggaaaggctggaggggtcgggaaagcctggaggggtcgggaaaggctggaggggtcgggaaaggctggaggggtcgggaaaggctggaggggtcgggaaaggctggaggggtcgggaaaggatggaggggtcgggaaaggctggaggggtcgggaaagcctggaggggtcgggaaaggctggaggggtcgggaaaggctggaggggtcgggaaaggctgggggagtcgggaaaggctggaggagtcggggaaggagtcggggaaggggaggccgtggtcggtgatgccttcatcatggaatatccacgtggagctacaggatcttaaaatggtaggattgtgccgagagattagtcactttcacttttgttctgttaaactatttattcagtggcttgggatttagtcaaacatcaaatatttaagagagaatagaataggattccaatatgtgcttctgcgtgtgactggcccatggattttgttgtatttaaacgattctgtgaaagtattcagaagagagcaggtggcgggagggatttcagcagggatgatattaaacatatctatcagctgccatgccactgcatcggccactcagaatgaatccagctcccactgtggtggactcaggttgtaaggaaccagcggggctcacttggtggcaccagctgagggatgaaggatggcattgggggctgagaagtgctggatggagcacctggctgccaggacttaacacaggcgacagtgtagacgtccagcgagacagcggagtgaagcatccatggtctggcatgatcctgtctttcagcagccacaactgaggcttttctttggagacagggtctggccctgtcacc

SEQ ID NO: 14610 - DNA, 906 bp, Artificial sequence
  DNA replication origin
cgtgctcgggccctggcgcacctgttcttccctccggcactgcctcctccttggagctggcttgagtgagcctccggcgcgcgcggccggagaggcgcaagggagccccgcggcagcctgggagataaaccacgctcggtgccggcaggaagggcagcggtgcaccgagctgctgctgggcgtttgcagggagtgatctgtggctgatgagaggccctgaggggtccagggagtccgtactttgtggggaaactcagaaggttttcatgaggaagtgacccagcccaggctttaaaatgcgtccctctagactctgccccacgcgtgaggaagtgagcgtggcgggcagagactgggctggacgtgcgtgaggccgcggtgtgtttccagagtctccaggcgccacgtggagatgagcacacctgctgttggcttgacggacccagaagctgaactgctgtgtaagaggctcagggagcaggacctgagggcgtctccacagggcagggaggcaggcgcagaacgtgaggacaagggaaggctgaactgctgtgcaagaggctcaggaagcaggacctgagggcgtctacacagagcagggaggcaggcgcagaacgtgaggacaagggaaggctgaactgctgtgcaggaggctcagggagcaggacctgagggcgtctacacagagcagggaggcaggtgcaggaggtggggaccagggaggcaggtgcaggacgtggggaccaggaaggcaggtgcagaatgtggggaccagggaggcatgtgcaggacatggggaccagggaggcaggcagggctgccaggagcagccacagaccacagggcttttgtaagggtctgggagctgtggtttgctcacaattgttcattgattagtgcctgtta

SEQ ID NO: 14611 - DNA, 1211 bp, Artificial sequence
  DNA replication origin
tgcttgcggggaggcgtggagggagaggtgtgggctcatgggccagcgcgagttctgggtgggcgcgggctccgcggccccgcacttggagcggccggccagcgccagcggggcagtgaagggctcagcacctgggccagcagctgcggaggatgtgctgggtcccccagcagtgctggcccaccggcgctgcacgccaaatctccccgggcctcagctgcctccccgtgggacagggctcgggacctgcagcccgccatgcctgagcctccccctcgcggtgggctcccgcgcggcccaagcctccctgatggacgctgccccctgctccgcggcgcccggtcccattgaccctccaagggctgaggagtgcaggcgcctggcaggcagctctgcccgtggccccagcgcaggatccgctaggtgaagccagctgggctcctgagtccggtggggacttggagaacttttatgtgtagctaggagattgtaaatgcaccaatgagaactctgtgtctagcaaaaggtttgtagatgcaccaatcagcaccctgtatctagctaatctggtggggacttggagaacttttatgtctagctagaggattgtaaatgcaccaatcagcactctgtgtctagctcaaggtttgtaaatgcaccaatctatgctctgtgtctagctcatctagtggggacttggaaaacttttatgtctagatagaggattgtaaatgcaccaatcagcactctttgtctagctcagggattgtaaatgcaccaatcagcaccctgtcaaaacagaccaatcagctctttgtaaaacagaccaatcagctctctgtaaaatggaccaatcagcaggatgtgggtggggccagataagggaataaaagcagtctgcctgagccggcactggcaacctgctgagatcgtcttgggcagtgtggatgcttaatttttacgctgtatgcactaaatcttgctgttgctcactctttgggtccgcactccttttatgagctgcaacactcaccgcgaagatctgcagcttcactcctgaggccattgagaccacaaaccgaccagaaggaagaaactccaaaaacgtctgaacattaaaaggaacaaactccggacactcacccaaaaggtccacagcttcattcttgacgtcagtgagaccaagaacctacaatgtaatacacttccgc

SEQ ID NO: 14612 - DNA, 2072 bp, Artificial sequence
  DNA replication origin
tattaaagtgctctcattataatttgactgtttgagaaaggaagacgccgccggccattacagtgtaggtgctcctgtgagacagcgtaggcacctgaaatataacacagtgaggctcaccttgaagttaaaggatctctttatccttcaactggggactgtttactgtgagaatatgcaggagcaatccctttgctggcctcagtgggagaaacagccccacaccttgctgtcagtctctcgggatccctcaggaaatctttacgttcccttctgcattcacacctgggtgtgagaagccggtccctgacttcccagggactcatgaaatcgtatcccttccttatcccatgtttccatggccatgctggcccagacggctggccgtcctggatcctgaaatctgcgacgttttgaggccatacctaggactagtcacttggtaaacattatcagcaggggattttgttgttgttgtttgtttgtttttgccttggttacctggagggttggggttggacacgatgggaaaactctcactccccatcactctgcttgctttccctggcatccatgttgctcagggagtcagagtgggtggctctccaagcgcagggcatgatggactcaccccaagactgcaagcaggggtgcatctcaggctgcttagggtggtggcgagagaggagcaagtgggagagacgcttatggtgacgggagagctggcaggcaggaattcgttccgggatccgaggcatggaggtggtccaggagaggcaggtattggacaaacgtgtggggggatagttcccttcctgaggagacggccacgctcagccgtcgaggtggccacttcttgctcctgtctgggtctttggcctcgaggacggcacacagcaaggccgagtggtgtggagccgggtcttggagtgaatgcagggatgcattccaggcctgggaggagaggcggcaggacccgggcagcgacatctacaaatgacggcagccgggtgtgcttaaggctcagcagactcacagggacgtgcggaccgtggggcagagggaggctcggcagctcctctggtcatcacagagcttggacgtctggtctgggcctggcactgctgcgggatggcccgtggctgtcacaaggaaggcagctgtgcccgcagggagcttgctgtcctagatgtggccctgggtgacaggctgagaagaacagggctcccctaaaagttggtggatgggctggggtgcatttgagggggtcagccccacagctgtgtctgggtggaggcagggggagagggagagagaggaggaggccatcgtgatggtcctggtgacaaggaggagggtctggggcaggaggggcctgggatggaggaggcagatgtggggttgaggggggcctgccagaaggaggaaggtgtgagtgcagagaccaggggagcaacaggccgtggagctggcagatcctccttctctgcaggtcaccccagcgcccagccgccttcccagggagagaggagagagcaagcgacctgccccttggtggctcagtggccataagacaggtggtgctttgttgtagccacagcctcgctcctccaggcattcagggaaagcccatcacaggccgcagaaggacacagggaggagtcaagcgggattcctctggggaaggaggcacagctgcccccacacagatgggacctcgagaaagctcctcccatcctcactggcctgtaagggtgtggactgaacaaacgatttcacgattaatacctgtgtatgtgatacatgagcttactagacaatatcacccatcaagtaccagatgctatttttaaaacttcttaagctgtacgacaaaactgaaatctatgtgaaatacaactatgcttttcccccaaattgttaatttcctttaataccacaaaatccggctgtcaagagacctgttcaatctactagatgctaaatcttggtcattaaccatttgggaacatcagtgtttcctctccactcctcacactttgcgatataaaaacaactgcctggccgggtgt

SEQ ID NO: 14613 - DNA, 2582 bp, Artificial sequence
  DNA replication origin
tccccagccacgtggaactgagtcagttaaacctctttcctttataaattgcccagtctggggtatgtctttattagcagtgtgagaagagatgcatacaatacctccaattccctttcagcgcggtctgtattcctctttgaacacgtgcagacctgggcacaaggcaccaggtcataaaggctttagaagaacccggctggagagcaccacagacaccgcctgtccagctcacggtcacagttcaggatccttgtcctgagcctttgggcctcttggaatctgggtggagggagaatctggaacttcccatcctgtccaaccctctcctcatcacagcatctggatcttctagtgtgcgtggtgctagggtgtcactgtgagctgccgtgtgcctgggccaccttgggggtgctacagctgtgatccacctgcaccgtgacccacaggggcctgcgggactgtggtgttgggtgtccgcgcctcgttactgggggactgtgtggtgttggggtgtccgcgcctcgtttctgggggactgtgtggtgttggggtgtccgcgcctcgttactgggggactgtgtggtgttggggtgtctgcacctcgttactgggggactgtgtggtgttgggtgtccgcgcctcgttactgggggactgtgtggtgttgggtgtccgcgcctcgttactgggggactgtgtggagttggggtgtccgcgcctcgttgctgcgggactgtgtggtgttggggtgtccgcgcctcgttgctgcgggactgtgtggtgttggggtgtcggcgcctcgttactgggggactgtgtggtgttgggtgtccgcgcctcgttactgggggactgtgtggtgttggggtgtccgcgcctcgttactgggggactgtgtggtgttgggtgtccgcgcctcgttactgggggactgtgtggtgttggggtgtccgcgcctcgttactgggggactgtgtggtgttggggtgtctgcacctcgttactgggggactgtgtggtgttggggtgtctgcgcctcgttactgggggactgtgtggtgttgggtgtcggcgcctcgttactgggggactgtgtggtgttggggtgtccgcgcctcgttactgggggactgtgtggtgttggggtgtccgcgcctcgttgctgggggactgtgtggtgttcgggtgtccgcgcctcgttactgggggactgtgtggagttcgggtgtccgcgcctcgttgctgcgggactgtgtgttgttggggtgtcggcgcctcgttactgggggactgtgtggtgttggggtgtccgcgcctcgttactgggggactgtgtggtgttgggtgtccgtgcctcgttgctggtggactgtgtggtgttgggtgtccgcgcctcgttgctcggggactgtgtggtgttggggtgtccgcgcctcgttgctgggggactgtgtggtgttggggtgtccgcgcctcattactggggggctgtgtggtgttggggtgtccgcgcctcgttactgggggactgtgtggtgttggggtgtctgcgcctcgttactgggggactgtgtggtgttgggtgtccgcgcctcgttactggggggctgtgtggtgttggggtgtccgcgcctcgttactggggggctgtgtggtgttggggtgtccgcgcctcgttactgggggactgtgtggtgttggggtgtccgtgcctcgttactgcggggactgtgcagtgtccgggtgtccgcgcctcgttactgggggactgtgtggtgttggggtgtccgcgcctcgttgctggggggctgtgtggttttggggtgtccgcgcctcgttactgggggactgtgtggtgttgggtgtccgcgcctcgttgctgggggactgtgtggtgttggggtgtccgcgcctcattgctgggggactgtgtggtgttggggtgtccgcgcctcgttactggggggctgtgtggtgttggggtgtctgcgcctcgttactgggggactggtgttggagtgtctgcgcctcgttactgggggactgtgtggtgttgggtgtctgcgcctcgttgctgggggactgtgtggtgttggggtgtccgtgcctcgttactggggggctgtgtggttttggggtgtccgcgcctcattactggggggctgtgtggtgttggggtgtccgcgcctcgttactggggggctgtgtggtgttggggtgtccgcgcctcgttactgggggactgtgtggtgttggggtgtccgcgcctcgttactgggggactgtgtggtgttggggtgtccgtgcctcgttactgcggggaccgtgcagtgtccgggtgtccgcgcctcgttgctgcgggactgtgtggtgttgaggactccttgccacacggggtccatggtaaggggagctcctgctcgtccaggctggaagtccaggatatgtgagtgacagaaatgagcatgcctctccctctcccttggctcctgtcctgggctgcaatgtggaagatgtcagatctgccggagcactggtgtggcatggcatttaggaatgaatacaggggccttcagcca

SEQ ID NO: 14614 - DNA, 3830 bp, Artificial sequence
  DNA replication origin
cacatcatagggacctcagattaaacaggaaagacaagaccggggaggcacatacacatccatgtgccgtcttcattctgctggcctccagggtcatgttaactgtgctgggaacgacttgggtttcacccacgtgaacgcccagcaccccctatgactgtggctggcaccatgatgtcgtctctgcatcctgttccattacgcacagccctttcataatgttcactcctgggggctctttcaatctaggcacatttaaatatcagcatttttaacgtgtagcaggtgaatattcatatcccaaacatgttctcctaatccaattcctcatttgtcttagttttaaaattgatttctgagttgaccattcccacctaagctttgagaaggctcagttggatttcacatgttcaccacagtgtaggtgcagacgctgtaatgcccaagaggctggctgtggaggcgtctgctgggatggagaggagagaaggatgaagagaggacacatctgctgggatggagggaggggtgaactgtgggggtgtctgatgagatggagaggagagaggggtaaactggagggacatcttctgggatggagaggagaggggtgaactgcgggggtgtctgatgagatggagaggagagagggtgaactgtggggatgtctgatgagatggagaggagagagggtgaactgtggggatgtctgatgagatggagaagagagaggggtgaactggaggggcgtcttctgggatggagaggagagagggtgaactgtgggggtgtctgatgagatggagaggagagaggggtgaactgtggggcgtctgatgagatggagaagagagagcggtgaactggaggggcatcttctgggatggagaggagagaggtgaactgtgggggcatctgatgagatggggaggagagagggtgaactgtggggacatctgatgagatggagaggagaaaggggtgaactgtgggggcatcttctgggatggagaggagagagggtgaactgtgggggcatctgatgagatggagaggggagagggtgaactctgggggtgtctgatgagatggagaagagagaggggtgaactggaggggtgtcttctgggatggagaggagagaggtgaactgtgcgggcatctgatgagatggggaggagagagggtgaactgtgggggcatctgatgagatggagaggagagaggggtgaactgtgggggcatctgatgagatggagaggagagagggtgaattgtggggtgtctgatgagatggagaggagagaggggtgaactgtggggtgtctgatgagatggagaggagaaaggggtgaactggagggttgtcttctgggatggagaggagagaggagtgaactgtggggtgtctgatgagatggagaggggagaggggtgaactggaggggcatcttctgggacggagaggagagagggggtgaactatgggggcatctgatgagatggagagagagaagggtgaactgtgggggcatcttctgggatggagaggagagagggtgaactgtgggggcgtctgatgagatggagaggagagagggtgaactgtgggggcgtcttctgggatggagaggagacggggtgaactatggggcgtctgatgagatggagaggagagagggtaaactgtgggggcgtctgctgggatggagaggagacagggtgaactgtgggggcgtctaatgagatggagaggagagagggtaaactgtgggggcgtctgctgggatggagaggagagagggtgaactgtgggggcgtctgatgagatggagaggagagagggtgaactgtgggggcgtctgatgagacggagaggagagagggtgaactgtggggatgtctgatgagatggagaggagagagggtgaactgtgggggcgtctgatgagatggagaggagagagggtgaactggaggggcatcttctgggatggagaggagagagggtgaactgtgggggtgtctgatgagatggagaggagagagggtgaactgtgggggcatctgatgagatggagaggagagggggtgaactatgggggcatctgctggaatagagaggagagaggtgaactgtgggggcatctgatgagatggagaggagaaaggagtgaactgtgggggcgtcttctgggatggagaggagagagggtgaactgtgggttgtctgatgagatggagaggagagaggggtgaactgtgggggcatctgctggaatagagacgagagaggtgaactgtggggcgtctgatgagatggagaggagagaagggtgaactgtgggggcatcttctgggatggagaggagagagggtgaactgtgggggcgtctgatgagatggagaggagagagggtgaactgtgggggcgtctgctggtatggagaggagagggtgaactgtgggggcgactgatgggatggagaggagagagggtgaactggaggggcatcttctgggatggagaggagagagggtggactgtgggggtgtctgatgagatggagaggagagagggtgaactgtgggggcgtctgatgagatggagaggagagaggggtgaactgtgggggcatctgatgagatggagaggagagaggggtgaactgtgggggcatctgatgagatggagaggagagagggttgaactgtgggggcatctgatgagatggagaggagagatggtgaactggaggggtgtctgatgagatggagatgagagagggtgaagtattgggggcatctgatgagatggagaggagagagggtgaactggaggggcgtcttctgggatggagaggagagagggtggactgtgggggtgtctgatgagatggagaggagagagggtgaactgtgggggcatctgatgagatggagaggagagaggggtgaactgtgggggcatctgatgagatggagaggagagatggtgaactggaggggtaatctgatgagatggagatgagagagggtgaagtgtcaggggcatctgatgagatggagaggagagagggtgaactggaggggcgtcttctgggatggagaggagagagggtggactgtgggggtgtctgatgagatggagaggagagagggtgaactgtgggggcatctgatgagatggaggggagagaggggtgaactgtgggggcgtctgatgagatggaggggagagaggggtgaactgtgggggcgtctgatgagatggagaggagagaaggtgaactgtgggggcatctaatgggattgagaagacagaaagggtgaagagtgtctgagagaaaagtcctttagacccctgactgccatccgtgggtttcacagcttggggagcatattcttgcttaagttatatttagtcatcaataataacagctcgtttattcgggaagtatgcaggaaacatcacgtgctgttctggtgcccaaatgcaggtaaactaacaccagagaatggagctttcagtccagatgctggcaagcaagggcctgccaagggccttttttgtgaataaagttttattggaatgtggcccgctcactggtcatcatgttgctgtgggtacctcccagcttcaggcagggctgagcaggtgtgaggcaccccgacagccggcagaccctagaatacttacatctgggcctttacagaaggtgtgagctgaccccttagaatctaacagacccagtgcacttcagtgagtagtcataagtggcgtaggtaacttacaagtgtaaagtgaggtgctctctaaatgcgtgaga

SEQ ID NO: 14615 - DNA, 1001 bp, Artificial sequence
  DNA replication origin
atctcagttctaccatttttcttgtgggctgatgtcaggaagaggtttaagcccattcagacttccaccttctcttccaagatatgcaaatgccaagaccgcctaccccacaaggttgttctgaagcttaatgaactgcaaagtataacgtgctccacagagtgcctggcacatgtgtgagtgtggggtgtgtgtgtacacacgtgtgagtgtgggctgtgagtgtgtgcatacatgtgtgagtgtggggaatgtgtgcctgtgtgtacacgtgtgagtgtggggtgtgtgcgcgtgtgtacatgtgtgagtgtgggggatgcatgtctgtgtgtacacgtagtgtggggtgtgtgtgtgtacacatgtgtgagtgtggggtatgactgtgtgtgtacatgtgtgagtgtggggtgtgtgtgtgtgtatacctgtgtgagtgtgggggatgtgtgcctgtgtgtacacatagtgtggggtgtgtgtgcgtttgtacatgtgtgtgggggatgtgtgcctgtgtgtacacagtgtggggggtgtgtgtgtgtatgtgtgagtgtgggggatgtgtgcctgtgtgtacacgtgtgagtgtggggtatgactgtgtgtgtgtacacgtgtgagtgtggggtgtgagtgtgtgtgtacatgcacatgcgcactccaaggtgacttttctttctcatactgaagaaatgaaggggtggtggcaagtttgcagctgctgctggcattttcttctctcctttgatggtggagtcggccagtgctgtttggggacccggtggtgacagcgcccttactgtgcacccgtcttcgccagcttctctggatgcttatctccgcttcgtgggacgccggacaccgcagagcaccctcagacagagggaaggcagtttctccaagatcacatgatgacatgctttcatgtctgaagcaagaaagattgatttaatagaaccagaaagaagtgtgtgagatttccctgtccacag

SEQ ID NO: 14616 - DNA, 1593 bp, Artificial sequence
  DNA replication origin
ggccggccagtcgtgactgggcggcaatgaggtcagtgactgccgggagtcctgcaggggcggggcggcgccaagcgcagggagcccggctgagtggcagcccaggtgagcgctcagggagcccgggtgagggccgggaacccaggtgaggggcagcccaggtgagcgcgcggggtgcccgggttaggggccgggaacccaggtgaggggcagcccaggtgagcgcgcgtggagcccaggcgagggggctgggaagcccgggtgaggggaccggggatcccaggtgaggggccgggaactcagctgagggggaacccagatgggcgcgcgggagcccacgtgagggggagcccgggtgaggggccggggtggctcctggcgtccgcggtcccagccctgccttccggtgggcgtgcggcaccccgggccgtgcggttcccggacagcagcttgtgggggactttcgagccccgcagcccggggtcctgcctgcgcgggttgggcgtggggggctcctcaccgcgacgctgactttggagtccttgagcggcgcggatgccggacggagggaggggacaggcggaggcggaggcggcgccgtcgcccctgacctcgcttccctcagaccggctgggcaagtacggtcagctcacctgtgtgcccacgaggcggggaggcggctcctgcagagccacagaggtgccgtcggagctgctgtcaaggacagcaggtgtcacgtgggtgtggcctccactggtcaccgagttagctggggcggaaggggacaaggtgcagctcaacatggtgtgggaggcggagggacgctgggtcagtcagaacctgtaggagcggggagggacgctgggtaaggtcaccaaagtgtgcgggggagagagcgggcgctgggtcaggtcagcaggaggtgggacccgcctgggctctgggccctatagccagctgctctaggttggggttgggtgtggacagtagggaggggagccaggggctccccagcctgtgtagattctgctgtaagtgactcttctctgaaagactggcgcgaggcggctgcttctgactcctgtttcagtttaccctctgtgtgaaatctgtaactatccagcttctgcttacctcactcccgtattttgatttttatttacatacaacttttcaggaaggttgtgagaggaaagagcaatggtgcaggaagtgtgagtgattgagggaatatgagatggccacagctccccactgagcttgaacacttctgtgcctcactttcagattggccgtcatggaggctgtggttgttaaggaagttcttcctgagcatccagtttccatacaaagagcacaggttctctaggtggcctcagagatgttcaatacacaatgtcttctgataacgaggaactgggcaaaagcctggtaggacaccgggtaggtaaatggtggagtccctgcaaccgtgttgcagaggaggattagctgttgctgagagaagagaagcaggccggggagcagcttgtatactgttatccccttttatgtaaaaagaagagtttatatctagaaaaacaattgacccag

SEQ ID NO: 14617 - DNA, 1013 bp, Artificial sequence
  DNA replication origin
ctctcgccgcacaccccaggggacagcatgacagatcctctcgccgcacaccccaggggacagcatcacagatccttccgctccgcaccccaggggacagcatgacagatccttccgccccgcaccccagggaccccagaattcctttcagggaaacacacccatgagaaaaatctgcgtgattcaagagttcctcagtatgagacccacgcgcctccctggttatccccggtcccacaggcaaacctccttatgccacagacacacacacacacacacacacgcacacccggggttccacatcctttctcagtgcctcatgctgagaaataaatagtcgaagaccaccagacacaaggaagccttcgacatggagaaagaggcaaaaccaaattgtgtggtcagaggagacagtgaatggggcagaagaaaacttcaacagagaaaagcgattgttgaaatgctccggggtgtctgtctcccaccagtggaattgctgtgacactcggtgtgtgtcagtgtgtgcagaggcatctcctgtctctagtggagactctgggatcaaattagtgactggtacacgaacactcatccaaccactagaggaggaggaaagggcgcagggctttattatgaacaggctaggtcaacaggacgggcctcgggatgggaagtgggtttgaagagaaagaggaatcaagaaaaatcccaaaagttttgactgcaacacctggaaggagagcagccccctgtaccgagatggaggtaacaggaagaagagcaccttgtgggggaaagcaaagccctggtgtgggtggcctgaggctgtagaaagtgtgtgatgctccagataaggtgtcagctgacccagtattcaggtctgggctggaagtgagattttgggagcttcttgggtatggatgtgatttacaggtgactttgcctgggaagatcctacagatggagaagaaagacaggaggaggttaggatgatgggagggggaccaggatcg

SEQ ID NO: 14618 - DNA, 1790 bp, Artificial sequence
  DNA replication origin
gaaggggtttgtttagatcagatgcaagggcttctggtccaacaggcagacagagccctcatgtccatccatttcctgctgaaacctggctaaaaatatttaagtgttgaaagtagagaaagaagatagaaggcatggccgggtgtagtggctcacacctgtaatcccagctctttgggaggccgagacaaaaggattgttcaaggccaggaattcaaggccagcctgggcaacatggtgagaccctgtctccatttagaagaaaaagaagaagaagaagaagaagaagaagaagaggaagaggaagaggaagaggaagaggaagaagaagaagaagaagaacaagaattggaggaggaggaggaggagggggaggagaaggagggggaggaggaggagggggacggggagggggagggggaggggggagggggaggaggaggagaagaaggaggaggaggagaagaagaaggaggaggaggaggagaagaagaaggaggagcaggaggaggaatacaatggtccagtgccaagacagtgaaaggcagagggccatggcaaagtctgagggctggaggcagatggacagatgatggacgaatgggcaccggtgaggccaaccagaggaggctaccggagctacagggagagcctttcaggcatctctgaaaggggacatcaggcgaggctgaaagcaggaggcacaggatcaccaggtcctgctccacacccaggagggcaggtggcagccccagcccagctcggagggcccaggaggaatcggccagaagacactgtcatggagatcctgaggcagcaatgggaagcaggaggagtgaaagaacagtggcctttgcctacttggatccaagagttgtggcagtcgaatgacagatccttccgctccgcaccccaggggacagcatgacagatccttccgctccgcaccccaggggacagaatgacagatccttccgcctcacaccccaggggacagcatgacagatcctctcgccgcacaccccaggggacagcatgacagatcctctcgccgcacaccccaggggacagcatgacagatcctctcgccgcacaccccaggggacagcatgacagatcctctcgccccgcaccccaggggacagcatgacagatccttccgccccgcaccccaggggacagcatgacagatccttccgccccgcaccccaggggacagcatgacagatcctctcgccgcacaccccaggggacagcatgacagatcctctcgccccgcaccccaggggacagcatgacagatccttccgccccgcaccccaggggacagcatgacagatcctctcgccgcacaccccaggggacagcatgacagatcctctcgccgcacaccccaggggacagcatgacagatcctctcgccgcacaccccaggggacagcatcacagatccttccgctccgcaccccaggggacagcatgacagatccttccgccccgcaccccagggaccccagaattcctttcagggaaacacacccatgagaaaaatctgcgtgattcaagagttcctcagtatgagacccacgcgcctccctggttatccccggtcccacaggcaaacctccttatgccacagacacacacacacacacacacacgcacacccggggttccacatcctttctcagtgcctcatgctgagaaataaatagtcgaagaccaccagacacaaggaagccttcgacatggagaaagaggcaaaaccaaattgtgtggtcagaggagac

SEQ ID NO: 14619 - DNA, 1386 bp, Artificial sequence
  DNA replication origin
cccagctcaggaggtgctaggggaggatggaggaagtgaatgacccagctcaggacgtggtgagggaggatggaggaagtgcttccctttaaatgcttcccctttgcgggggctcacctaaggcccagggagggccacgactctcatgtggggcaggccccaccagcacctccctccatcctgccccctgtccttcccctccgtcatctagagccagcctctgccagcacagctcagaggtcagtggcagggctggaaggagtgtcaatgcagaaaccaggggcgggagggagtggggtgggggggggcgggggggaaggaacaggggtcggggaggggggcaggaggttggggagtggggcagggggtgggggagtggggtggggcccggtgggggaggagtggggcccgggtggggcgggggaggggctctggtggtgacatccagggctctctcctgcactggggacctggcgttcggaacatgctctagccctcagcatataggagagcgtggggaggggtcagtgcatagcaggacacgtggccaggatgggccatgatttgagggccacaggggagagtgccccacacccaaaacacgcctgtgtaggtgagtcttccgtccttctgacccactggcctgaagttccctgttactcctggttaaagcactgaaagcctcagttataacgtaagggtgtttcctgaagtcccgcatttataacgcacacagctgaacaccagcagttggccagatccacactagtcatttgaggaccatttaggaagagcttcgaggacaggtaggtttacaagggaacaagggcaaggaaagatgtaggatgcgggaccacatgaggagggacgtgggaaattcataaggcataatgttactagatacgggaggagagtaagaagatgaaaaatagtcagagagggacggaaaatatggtgctgggtccaactgtatccagaaacatgcaggctgaatgggcacgcttatctgaagggaaaccaacgtgctgtataacagctcctcagctctgttcacaggggacacagtcctcttcctgctcaaggccacagcagtcctgtgatgtgcagagtttacctgtgattctattgctagttcaaaacaggcacaaaattcacaagcacaacaaactccactgaaaatgttcaaaactcctttcaaagacggccagtcatgctccccctgccctaggatcccctcagagtcccctgtgcccatgctccagtgtggtctcccctccatcgcaggacccctcacagctccctgtccatcctccagtgtgggctcccctccatcccaggacccctcacagctccctgtccatcacccagtgtgggctcccctccatc

SEQ ID NO: 14620 - DNA, 2228 bp, Artificial sequence
  DNA replication origin
tttgttttaagcagcacttccccatacaacgccttctagcaacttcgtaagtgagcaccctcaagtcccgtgagaagtctggactcacagggccagggaaaagcttccccacctcaacccaggtctgtaactccacaccctccacaccacccaacgcctctatctacaactcacacacgcgcacacacacacacacaaagcgcacacacacacagcacacacacaaacacacgcacacacaaacgcacacacatgcatacaaacacaaacacatacacaaagacacacgcacacgtatgcacacacaaactgcagaggaaaggcagcacaccaaagcacccagaagacaaatgtggttacatctggaagtcaagcatcaacttttaaaaacataaaaagctattctgaataacttttaacttcacttcacccccaactgtctacaactaatgaattacaaatagcaccttatacaaatgacttttcttactgctgagaaatcctggaggtctcatctgtctataaagagttatgcatccgtaactgccgatgttggctgctaaagccagcaaataaatgctgtgagagacagacagggacaaagtgtgtttttaaaaatacatgacgtgtaaacctcagtaatcatctctcttttcgaataaaaattattttctataaagcaggtgttcaaaacatattattaatcagcaacagtgaaattgttcctccttgcagcattccacccatatggacattaagtcactcctgcacagaatctagaatactgaccagtccgtactcaggttatggttaaccagagaaaagaattaaaacccgttacatcttgagtcaatgagaatttttacttgcagccaaagttagtgactggaatcaatatcagacaacagcaagttcgtctactgctgcctgggaacatgacctactggccacagtcgggaggggtactcagacctcaccttcagtgcccaggggcccatggaaggggagtggggctgggacaggtgggcagggcgtctgtggacctagggcagtttcctcagaatctaccttggcttcttgggcaccagcgggctgtggggtgcaggggaacaggtggagtacgggggggacagctggggtgcgagggacagctggggtgcagggtaaacaggtgaggtgtagggggacaggtgaggtgcagaggacaggtggggatcagggggacaggtggggtgcaggacagttgaggtgcaggggacaggtggggttcagggagagaggtggggtgcgaggacaggtggggtgcgggggaacaggtggggtacggggagacaggtggggtgcggggggacaggtggggtgcaggtgaacaggtggggtgcgggggacaggtggggtgcggggggacaggtggggtgcggggggacaggtggggtgcggggggacaggtggagtgcggggggacaggtggggtgcggggggacaggtggggtgcggggggacaggtgaggtgcaggggggacaggtggggtgcggggggacaggtggagtgcggggggacaggtggagtgcgggtgaacaggtggggtgtggggggacagctggggtgcagagtaaacaggtggggtgtggggaggacaggtggggtgcgaggggacaggtggggtgcggggaactggtggagtgcagagttaacatggggtgctgagggacaggcggggtacacggggtgcggggaactggtggggtgtggggggacagctggggtgcagagtaaacaggtggggtgtggggaagacaggtggggtgcagggggaacaggtggggtgcgaggggacaggtggggtgcagaataaacaggtagggtgcggggggacaggcggggtgcgggggaataggtggggtgtgggggggacagctgcggcgcgggggacagctggggtgcagggtaaacaggtggggtgcggggggacagctggggtgcggggaactggtggagtgcagagtgaacagggggtgctgagggacaggcggggtacacggggtgcggggaactggtggggtagggggacaggtagggtgcgggggaaagacgccggctttccttacaccggtccttctctgcatcctgaggcggaccgcattcttctcctttaccggaaaatctaagttactgcacgaccccccaggcgaagccagctcgcccctcgggctccttccgccgatcg

SEQ ID NO: 14621 - DNA, 2885 bp, Artificial sequence
  DNA replication origin
ctctcacgccccaaggcagggtgtgaaccgcagagaccatgtgcttgccctggggggctggcacccttgtcttcaggaaagatgatttaagaagtaaagtaatatgatgaaaagctgcggaaagagaaggcatacacggggctacaaggtggagaaataaggcatacacggggctacaaggtgcggagaggagggatttgaaattgaataggagccatggcaggcgaggcgccaagagaatggggtcattgcctgaaatgccactggagccgagagatgagctgagcccacgtccacagaagcccattcccagtgggaggaacagcgtctgcgcggccctgaggtggtgcacccagcatgtccaggaacagcaggtcggccagggctggagggccgaaggcaagaggggactggtgaatgccagggcagcgggggaactgcatgggaagaagccttggaggctctgtgtgtcagagcggctggaagggccacgggccagacccatggagggacagtgtgggagagccacggaggggccatgtgacagagagctgtagcagacagggtgatggacatccatggagggacagtgtgtggcagccgtggagggacagtgtgacatccgtggagggacagtggcagccgtggagggacagtgtgacggctgtggagggacagtgtgacatccatggagggacagtggcagccatagagggacagtgtgacggccatggagggacagtgtgacatccatggagggacagtggcagccgtggagggacagtgtgtgatggctgtggagagacagtgtgacatctgtggagggacagtgtgacggccgtggagggacagtgtgacatccgtggagggacagtgtgacggccgtggagggacagtgtgacatccgtggagggacagtgtgacggccgtggagggacagtgtgacatccgtggagggacagtgtgacggccgtggagggacagtggcagccgtggaggggccgtgcacagtgagtggtgagcgagttgggacgcgaaggctgctctgtgctgctgggattgctggtgtcagcgcccactgcagagtcctgtgctgcggctcatgtactgctgtgcgggtcgtgcactgctcgctcctggacacctgcacagggtgctcctgatggagtcacttttcagtgtgttgactttcacgtcgatgacaggcagctttttctcattctcaccatgggatcctatggggctgtggccctgggtcaggagtgccctggagggtggcacatggccgggtggagttggatgggctcccttcccgcagctgcctgtggaaaccagcacgttggcaggaggggagggtggtgcccgagcctgtgggtgtggccgctggggactgggtgtggggacaggagtctgtggaatgcggtgcttcctcctgactgtggggctggaggagcagcggtgggtcgagggtggtttagtccacccagggggtcctgtggccccgctctgctggtgcctgtcgaaggggcagctgcagtcgaatcaccacgctgctccaagggagtctcccaagggctccaagggatggagcgtccgtagatgcccggaggagttgcggtgggcggggggcgcgttgtgtccaaggctgtgtcgagggtcatgtgcagccgcccttgctgtggacagagagacaggcagaggcagagacagagacagagggagagagagacagagacaggcagagacagagacagagacagaggcagaggcagagacagagagaggcagaggcagagacagagagagacagaggcagacagaggcagagacagagacagaggcagagacagaggcagagagagacacaggcagaggcagagacacaggcagagacagagacagaggtagagagacacagaggcagaggcagagacagagagagacagaggcagagacagaggcagagacagagacagagacaggcagaggcagagacagaggcagagagagacagaggcagaggcagagacagagagagacagaggcagagacagaggcagagacagagacagagagacaggcagaggcagagacagaggcagagagagacagaggcagaggcagaggcagagacagagacagaggcagagacagaggcagagacagagagagacagaggcagaggcagagacagaggcagagagagaggcagaggcagagacagaggcagagagagacagaggcagaggcagagacagagagacagaggcagacgcagagacagagagacagacagaggcagagacagaggcagagacagaagcagagacagaggcagaggcagatacagaggcagagagagacagagacagaggcagagacaggcagagagagacagaggcagagacaggcagagagagacagagacagaggcagagagagacagagacagaggcagagagacagagacagaggcagagagacagagacagaggcagagagagacagaggcagaggcagagacagaagcagagacagaggcagagacagaagcagagggaggcagagacagaagcagagacagaggcagaggcagaagcagagggatgcagagggagacaaagacagaggccgagacagaggcagaggcagagacagaggtagagacagaagcagagacagaggcagagacagaagcagagggagacagagacagaggcagagacagaggcagagagagacagaggcagagacagaggcaggtgcagcgacaggggcagagacagagacagaggcagagacagagacagagacagaggcaggggcagagacaggggcagaggcaggggcagagacaggggcaggctacagcccggggccttcag

SEQ ID NO: 14622 - DNA, 2514 bp, Artificial sequence
  DNA replication origin
ccagcgtcccagggaaagatgacatcaacctaaactcttgaggactcatagctgtattggagcattgttaattttctttgttgggagatgctccagccatggaacgtactcttcttccatccgtctctgaggctgcagagtcatccaggccaggctgacgaatgaaggagtcttctccttcccacagccacccggcacccgcccagcctggggagaagccatccctttctctgcactcagggcagcagtcagcgtctggtcctgctgctgtgtgcacgccggaggcagtcctcttcagacctcatgtgttcattccttcaaagagccacgcactcttcagcacagttggtgttggctgaatatttttgactgaggctaaagggtcattttgggttttgtcagggtctcagagccagtgtggtcctctctgtccatgggatccgattgtcggaagcattgatgccatctggcgtggaggccgtccaccgtggggactgtgcagcgtgggggccatctggcatgggggctgtctgatgtgggggacatccagcttggaagctgtctggcgtggatgccgtccagtgtggttgctgtctggcatggaagctgtctggtgtggggactgtccagcgtggaaggtgtctggagtggaaggtgtttgatgtggggaccatccagtgtggggctgtctggtgtgggggccatctggcatggaagctgtctggcgtggggactctctggcgtgggggccatctggcgtggatgccgtccgatgtggggactgtccagcgtggaagctgtctggtgtggaagctgtccgatatggggactgtctggtgtggaagctgtctggtgtggggagtgtctggtgtggggactgtctggtgtggaaactgtctggtatggggactgtccggtgtggggacagtctggtgtggggactgtctgatgtggggactgttttgtgtggggactgcctggtgtggaagctgtctggtgtggggactgtccgctgtgggtactgtctggtgtggaagctgtctggtgtgggtactgtccggtgtggggactgtctggtgtggggactgtctggtgtagggactgtctggtgtggggactgtctggtgtggaagctgtctggtgtgggactgtctgctgtggggactgtctgctgtggaagctgtctggtgtggggagtgtctggtgtggaagctgtctggtgtggggactgtctggtgtggaaactgtctggtgtggggactgtccggtgtggaagctgtccgatatggggactgtctggtgtggaagctgtctggtgtggggagtgtctggtgtggaagctgtctggtgtgggactgtctgctgtggggactgtctggtgtggaagctgtctggtgtggggactgtccgctgtgggtactgtctggtgtggaaactggtgtggggactgtccggtgtggggactgtctggtgtggggactgtccggtgtggaagctgtctggtgtggaagctgtctggtgtggggactgtctggtgtgggtactgtctggtgtggggactgtcttgtgtggaagctgtctggtgtggggactgtctggtgtggaagctgtctggtgtggggactgtctggtgtggaaactgtctggtgtggggactgtccggtgtggggactgtccggtgtggggactgtctggtgtggggactgtccggtgtggaagctgtctggtgtggaagctgtctggtgtggggactgtctggtgtggaagctgtccgatatggggactgtcctgtgtggaagctgtccgatatggggactgtctggtgtggaagctgtctggtgtggggactgtccggtgtggaatctgtccggtgtggggactgtcctgtgtggaagctgtctggtgtggggactgtccggtgtgcaagctgtccgatatggggactgtctggtgtggaagctgtccgatatggggactgtctggtgtggaagctgtctggtgtggggactgtccggtgtggaatctgtccggtgtggggactgtcctgtgtggaagctgtctggtgtggggactgtctggtgtggaagctgtccgatatggggactgtctggtgtggaagctgtccgatatggggactgtctggtgtggaagctgtctggtgtggggactgtctggtgtggaagctgtccggtgtggggactgtccggtgtggaagctgtccggtgtgggtactgtcctgtgtggaagctgtccggtgtggggactgtccggtgtggaatctgtccggtgtggggactgtccggtgtggaagctgtctgatatggggactgtctggtgtggaagctgtccgatatggggactgtctgatgtggaagctgtctggtttggggactgtccgacgtggggactgtccggtgtggggactgtccattgtttgctgcacttgtctttgaggtttcctcccatgagcgtcattccctacattcactgttgtggtccaagcatgtctgtctg

SEQ ID NO: 14623 - DNA, 825 bp, Artificial sequence
  DNA replication origin
tctctcggggcctgatgatgtgaaagggctcccatccctcaaaccgaagttccgctcttttctcagcagtcgtgttaacagatgagacaatcgcagctgctgctcgtggggagccccagtgcgtgttgagctactcgtgtgccatgttggtgaaatgacctgaaacctaggaactggggccgcggcgggaactggggccgcgacgggaactggggccgcggcgggaactggggccgcggcgggaactggggccgcggcgggaactggggccgcggcgggaactggggccgcggcgggaactggggccgcgaccggaactggggccgcgaccggaactggggccgcggcgggaactggggccgcggcgggaactggggccgcggcgggaactggggccgcggcgggaactggggccgcggcgggaactggggccgcggcgggaactggggccgcgaggcgccgaaccacgaggccaggtgctggggatggggcgggggtggtggcacgtggcaggcacctgagcaagtctgggggatggagggagagcaggttcagggctgggaatacaggaaggcagaagggcgggcactgggctgggaatacaggaggtgccgcatctgaggttgggggcagggtcccactgccatcctcattggaaagtagtgtctgtctgcttctgagagtgccagagccagtggccagctctctgcactaggataagggaattcgccggcctggtggcgtcctgggtgtgtgtcaggcagagcctggagctcttggcagcctgccatcccctcgcgttcccctcattgaatagtacgtgag

SEQ ID NO: 14624 - DNA, 1975 bp, Artificial sequence
  DNA replication origin
tgaatctcgagctatcaagacggctaacggcctgtctgagcctgagagccgtccccacacccacagggcccctctgcttgtgtctgtcttcatatggtctgcagcagagattcatttccatttggttattaattttttttttttttgagacagagtcatgctctgttgcccgcgctggagtgcagtattgcgatcgcagcttactgcagccttgacctcctgggctcaagcaatcctcccacctcagcctcccaagcagccaggactacaggcatgagccaccacgcctggctaagttttattatttttaatagagacgaggtggcactatgttgcccaggctggtctcaaactcctgaactcaagtgatcctcctgcctcggcctcccaaagtgctgggattacaggcaagagccaacgtgcccaccccagtttggttgcttttaagagatacaactttttagagcagttttaggttcacaggaaaattgagaggaaggtacagagagttctcatatactccccacccccaaagagagcctcccccaacactatcccccatcctttgccagagtggaacacttgttgcaactgagaagccaacactgaggtacgtcactaactaaagcccacggtgtgtgttaggcctcgctcctggtgctgtgccttctgtgtgaggagccaacaatgaggtatgtcactaactaaagcccacggtgtgcgtgaggcctcgctcctggtgctgtgccttctgtgtgaggagccaacactgaggtacgtcgctaactaaagcccacggtgtgcgtgaggcctcgctcctggtgctgtgccttctatgggtttggacaggcgtgtaatgatgttgaggtacgtcgctaactaaagcccacggtgtgcgtgaggcctcgctcctggtgctgtgccttctatgggtttggacaggcgtgtaatgacatggatgcaccattatcaaggaatttcgtggccctaaaaatcccgtgctccgcctgtcacccctcccccccgcaaacccctagcaaccctgagcttgttactgtataattttgttttctagaatgtcacgtggttggaatcgcaccgggcgcagccttttcaggttggcttctctcgctcagtaagatgcatttaaggctcctccatgtcttttcacggcttggcagctcatttcttcctagcactgaatgttccactgtctgaatgggccccagtttatccatccattcacctcctgaaggacatcatggctgcttctgggttctggcaattatgaataaagctgctatcaacacctatatgggcaggtattgagtggacattaagttttcaactcatttaaataaatacgccggggcatggctgcaagtcacacggtaagagtgtgctcaggtttgaagaagccaccaaactgccctcccacgcggctgccccacgccctctagccacccgccagcacccggccctcctcagcatttgccgtctgtgtccacgcagctgccccacgccctcctcagcatttgccatctgtgtccacgcgggtggcccatgccgtcttccgcacttgccgtccatgcccacgcggttgccccacaccctcctcagcatttgccgtctgtgtccacgcggttgccccacaccctcctcagcatttgccgtccatgcccacgcggccgccccacaccctcctcggcatttgccgtctgtccacacggttgccccacgccctcctcagcatttgccgtccatgcccacgcggccgccccacaccctcctcagcatttgccgtctgtgtccacgcgactgccccacgccctccttagcatttgccatccatgcccatgtggccgccccacgccctcctcagcatttgccctctgtgtccacgtggccgccccacaccctcctcagcatttgccctctgtgtccatgcagccggcccacgccctcctcagcattt

SEQ ID NO: 14625 - DNA, 1297 bp, Artificial sequence
  DNA replication origin
tacccgcagggcacatggagacccacattctcctcctcagcgctgggcacgggggtgggcggctggtcctcctggaatggcgtgatgtcgatgacagaatatgggttgactttcatcgggagcaccagcttagtaggctctgccactggggtggtttctgctccagctccatcctcacctcctggggatgcagaaaggacttgtcagcagacacatcaccaagggcatggcaggcatgccctcctggagcgcaagtgggaagcaggtatgagctcccaccatcatcccatgccaggacccctagacgttcccaggtcatcaggtggcctcggagggagcactcacacatggggaacccagcatcacctctgggcacaggtgagacggatgcagcctggtcactacaggaggctcatcccatgagctaagtcagggagaagctgccggaggagggcagctgctcccctcaccaagagtctggtgctacacacaaagaaacaccatgcaagctgagaggcgggtgctgtgcacaaagaaacgccatgcaaacaaccgagaggctgatgctatggccaaagaaacactgtgcaaacaaccgagaggctggtgctatgcacaaagaaacaccatgtaagcagagaggcgggtgctgcgcacaaagaaacaccgtgcaaacaaccgagaggcaggtgctatggccaaagaaacaccgggcaaacaaccgagaggctggtgctatgcacaaagaaacaccgtgtaagcagagaggcgcgtgctgcacacaaagaaacaccatgcaaacaaccaagaggcaggtgctatggccaaagaaacaccgggcaaacaaccgagaggcaggtgctatggccaaagaaacaccgggcaaacaaccgagaggctggtgctgtgcacaaagaaacaccgtgtaagcagagaggcgcgtgctgcgcacaaagaaacaccgtgcaagcagagaggcgggtactatgcacaaagaaacaccgtgcaaacaaccaagaggcaggtgctatggccaaagaaacaccgggcaaacaaccgagaggctggcgctacgcacaaagaaaccatgcaaagaaccgagaggctggtgctacgcacaaagaaacacggtacaagccaagaggtgggtgctatgcacaaagaaacggcatgcaaacaaccgagaggctggtgctgcacccaaagaaatgccgtgcaagcagagagaaacactgtgcaaactgacaggctggtactacacctgaagaaacaccgtgcgagccaagaggaacgctgc

SEQ ID NO: 14626 - DNA, 4031 bp, Artificial sequence
  DNA replication origin
ggaacagaggatctagcgctttctcctgtgcatgctgtccagctcacccacctcacttcatgctcaggagttataaaaggggttcatggctgaacaccttcttgccagtcctatgaggcgctcaataggatgacacgctggccagtcctctactatctggggccctcactgcatgtggggtacctattctggtgaggacacaccatgtgagaggaacttggatcctgcactctgagaacttactgtagcgatgaagccgaaaaccaaaaatagcaaaagaagggaaaagcacaggggaaatgcttcctagcagatgagggactaaacaggaatcataacaggagtgtgagtgactcaggaccagaagagtcaggagaccttgaggacacatggcccaagccaagacagcggcctgagctgaagaccagtgggcaggatgcgggggtgagtgtgaaagaggcgatgccagaccctgagtggggtgtgaggggtctgtgaggagatactgagtggggtgtgaggggtctgtgaggagacactgagtggggtgtgaggggtctgtgaggagaccctgagtggggtgagggatacgtgaggaaacactgagttgggtgaggagtctgtgaggagactgagtgaggtgaggggtctgtgagaagtccctgagcaggtgagggttgtgaggagactgtgagtgagctgagagtctgtgaggagacactgagtgcaatgtgaggggtctgtgaggagacagtgagtgggatgagggtttgtgagaagacgctagatgggatgagggttttgaggagacacggagtggggtgagggttgtgatgagacagtgagtggagtaagggttgtggggagatgctgaggagaggtgaaagttctgaggagacactgagtgggatgtgaggggtctgtggggagtcaccaagtgccgtgagagttgcaaggaaacacggagtggggtgcgggtcatcaggagacagtgattggggtgaggggtctgtgatgagacactgtgagtggggtgagagttgtgaagagacagtgagtggggtgagctttgttaggaggcactgagtagggtgagggttgttaggagacagtgagtgggatgagggtttatgaggagacactaggtagggtgaatgttttgaggagacacttagtggggtgagggtttgcgaggagacacttagtggggcgagggttgcgaggagacagtgagtggggtgagggtttgcgaggagacacttagtggggcgagggttgcgaggagacagtgagtgtggtgagggttgcgaggagatgctgagtggggctgtaggttctgaggaggggtggggtgagggtttgtgaggatatgctgagtgggatgttgactgtgaggagacactgagtggggtgagggttgtgaggagatactgaggtgatagttttgaggagacagtggggtgagagttgtgaggagacactgagtgtggagggctgtgaggaggcactgagtggggtgaggggtattgaggagacactgagtggggtaagaagtctgtggagatactgagtggggtgaggggtctgtgaggagacgctgagtggggtgaggtatggggagacactgagtggggtgtgaggggtctgtgaggtgtcactgagtgtggtgaggtttgtgaggaaacacagagtgtggtaagggtcctgaggaaacactgagttgggtgagggtttgtgaggagacactgaatagggtgaggtttgtgaggagacactgaatagggtgaggtttgtgaggagacactgaatagggtgaggtttgtgaggagacactgagtggggtgagtattgtgaggagacactgagtggggtgagagttatgaggagacactgaatagggtgaggtttgtgaggagacactgagtggggtgagagttatgaggagacactgagttgggtgagggttgtgaggagacagtggggtgaggggtctgtgacgagacactgagtggggtgaggggtctgcgaggagacactgaggtgtgaggggtctacaaggagtcacggagtgcagtgagagttgtgaggaaacatggagtggggtgcgggtcatgaggagacagtgattggggtgaggggtccgtgaggagacactgagtggggtgtgaggggtctgtgaggagacactgtgagtggggtgagggttgtgaggagacgctgagttggggggttgtgaggagagcgtggggtgaggtttattaggagacactgaatggggtgagggttgtgaggagacattgagtgggatgagaggtgtgaggagacactgaatgtggtgagggtttgtgaggagatactgcatggggtgagctttcttaggagacactgagtgggtaagagttgtgaggagacactgagtggggtgaggggtatgtgaggagacagtgatgtgaggcatctgtgaggagacactgagtggggtgaggggtctgtgaggagacactgagtggggtgaggggtctgtgaggagacactgagtggggtgaggggtctgtgaggagacactgagtggggtgaggggtattgaggagacactgagtagggtaaggagtctgtgtggagacactgagtggggtgaggggtttgtgaggagacactgagtgtgggtgaggggtctgtgaggagtcatggagtgtggtgtgagttgtgagaaaactcggagtggggtgagggtcgtgaggaaacagtggggtgaaggtttgtgaggagaccctgagtggagtgagggttgcgaggagacattgagtgggatgagggttgtgaggagacactgagtggggtgagggttgtgagcagacacttcatgggaggagggtttgtgagaagacactaggtggggtgaggtttgtgaggagacactgagtgtggtgagggtttgtgaggagacactgcatggggtgaactttgttaggaggcagtgagtggggcgagggttgtgaggagacactgagtgggggaggggtatgtgaggagacactgagtgatgtgagcaatctgtgaggagacactgagtgcggtgaggggtattgagacactgagtggggtaaggagtctgtgcggagacaccgagtgtggtgtgaggggtctgtgaggagtcaccgagtgccgtgtgagttgtgagaaaacggagtggggtgagggtttgtgaggagacactgagtggggtgagggtttgtgaggagacactgaatagggtgagggttgtgaagagacactgagtggggtgagggtttgtgaggaggcactgagggttgtggattgtgaggagacattgagtggggtgagggttctgaggagacactgatggggtgagggttgtgagcagatactgagtggggtgagagttgtgaggatacactgagttgggtgaggagtctgtgaggagacactgaattgggtgagggttgtgagaagacactgaatgggttgaggttgtgaggagacagtgagtggggtgagtgttgtgaggagacactgagtggggtgagggttgtgaggagattctgagtggggcgagacgggtctctgaggagacactgagtggggtgagagttttgaggagtcactgagtgtgtaagggtctgtgaggagacactgagtttggcgaaggttatgaagagacactgagtgcagtgagggttgtgaggagacactaagtggggtgtgaggggtctgtgaggagacactgagtgggtcacggggtccgtggggtgtcactgggtaagagtcgaggttctgtgaagagagagtgagtagtgattggtaggggtgtgtgcacatatcagaggaaagaggtttgacctttttgttgtatggcacttttccaagggcctgtctgttgggtactgattttggtggatttgctcagcgaattggcagtgactgttcattgttttatggtttctgtaaagggtttaagcttcccaaattagtctcacagacctggatgaaattctgttttttgctctgat

SEQ ID NO: 14627 - DNA, 909 bp, Artificial sequence
  DNA replication origin
gagcacctgcgagcgggagctgctcctccgacccgcagcggggcgtgggcggcagagggggcggtggacaggcctctccgcctctccaggccgcgcggagccagcgctccggctccaggctgcgaggggcgcgcgcggggcgcggggaggggggcgggcgcgtgcacacggggcgttttcgggcgcgcgccccctggctgggtctgcggaggggctgtgggttccccggggcttccctgccccgcgcctgcccgccgggcgcttctccccctccaggaccgcggcccacgtcgccactcgagcccgagcccgagcccgcgcccacgcgcgggggccgcttcctgcgaggaggcggggacaggtgtccgcgggcgcaaacagcggagtttcgtgcgcctattttttggtaaaagtagaggcgatgcgttgttgacatatttagtggttaaaaacttattgccaaattctcaacagattccagaattttttaaagttcacaacacgagagtggacgaaatgtcggagcttttgctcatatccagaaatgtggcctctgcctcccactcgggccctgcggtgcagacgggttcagggcggcgaggactgagccaggagcgccgagagttccagctgctcccaggctgggttctaattaacgctggacccctgctggtaaatgctatttttaatggctttgtgcaaattaatgacgatgagatttccataagtaccgagagccagagcctttactttctctttttgtgttctttttgcttgtgacagtctttgccagttccatgctgtatacacataatgagccgttacaactccagcaccaaagctaacgccccgggaacatctttaaaacctttttcactctgttgccaagaagagtagtacctgctgtca

SEQ ID NO: 14628 - DNA, 1080 bp, Artificial sequence
  DNA replication origin
ggtgggcggcggtgggtggtctccgctccgcctccgggaggccgcgtggggggcgtgggggcctcctcgcggggtctccacaggccctcccccgggacgcggcaaccccggccggaagacaatgagccgcccgcgccgcgcccgcagtcaccgcccccgccgagggtcccgccgccccagccggcacggaagcaggagcagaagccgaagccaagcgcgcggggccagggcgggggctcctcccggggttgctccgcttggctctcggcggtcgcggggatcggctgtccggagcgaacgggggtctctcctggactcggggccctggggaggggagcgcggcccttggtcctccgccgctgcgcccggggtgcgggggtgtcctggctgctgacccccgcgagccccgagcaccgcgacccacccgccccaccgcgccgcggctcccgagtcctgccgggcgccccttgcagcccccgccccatgtgctggggagacccccgggcggtctgggcgggattccgcaggggtccctcctctcaggcggggctcattctggagcatgaaaagagggtgaaccaaagtccctccacctctttagagtcctacaaaaccacgtttccccctccacccactccagtgtctattctaaggaaaagaaaaggaacaaatcagtgcagcgagctttattctactcagcccacgaaaggcgccgccgtcagattttaaagttccagccatcccctcaggccctgagtgagaagttcgcccgattccccgcggttcccgcctccatttcccactaaggagcagttactcaggctccaattaggaccccttaatggatgtcaatggaacccttcagccttttatcctgagctaatagtgtgctattattagaataatcctccccattcctgacatcacggaagggagcgttccattgccttcagatttgctccagcaacaacctcgtgtgtgcagatttatggtaactggcattgcaatgctcccatcagggcataactaagtaaaaattgtaatgaggtaaagcctttgaactttccatgtcagttgcac

SEQ ID NO: 14629 - DNA, 1251 bp, Artificial sequence
  DNA replication origin
cttacactttttatgttgaaaacagttaattgttgatactcgactgcttttgacctacagaactagcaacttcatatggttcaaccgatgcgtgtcaggccttaatgtttggtggtgccaattgcttgaactggactctcctgagtcctcaaaatcaggagaggaatatcgagagggtactttaaaaaattcctaaataattctgcatgtcctattcatcaaactctccagcagagaaaaatcacaacccctttacaaccaaaactgaattctataatctgaacgttggagagggaagggtggtagactccgctgacacgaaataaccttactgaaaaacgcacaaatatcctctctttttgtcctataaacaggaacaagagtgtggtgagaggacgcggaaacacctgatatcccagcaaaggaagctgcagaggaagggtcctgccccgtgagcgaggacagcctccaggagcacagcggcttctcctaacatccccctggcagtgaattacggatgaccccgtatatgaggaggtgtggatgccgacacacggggagagctcctgagaccagcacacaggaccagtgtcctccccgtgaccttgcagttgtgtagccacaagtgggagccacagagaaggagagcccataaggggactcttttcaagacacggtgttaaatcaaggctctgaagttggggccacagccggtctcagctttctgtgttctgggggcgcggtgatatgacagcatgtgaagtgagtgggtgagcacggactcctgagagcgagggcgcacccaatacctggttatctggtactgcagagagacacctagtcagccagcgttgcaaagagggatagctagtcactcaggctgcagagagagacacctggtcacccaggctgcagaaacaaccgcagtcaactgcagctccagtcattgctggatgttggctgacgcggtcctggcgccagctggagatccattcaccaagactttctgggcagatttaaagtggctggggttcagaagttcagcaagtcggacacacccctcctcgctggagaggagagggcaaaggcgaggcgggggagcagcgtgtgagattccccccttcacacacacaacaacaaagcgtggacacacagaagtgaaatctgatcgcgtgccaggaaaagctgtgaggctggaaaccccggagtaaggctcgaccttggccagacctgcaggctgcggaaccgggg

SEQ ID NO: 14630 - DNA, 1115 bp, Artificial sequence
  DNA replication origin
tggaggcagcgctgcatggccggctgagcagggacagctggaggcagcacgggctgggtgctgggctttccaaccccactccctggcaaggcagggtctctacgtggtgggctgaggagatgggacacaaggggggatacgagcaggagcccgctgccctctgaggtgctcagctggcagtgagggagagcgaggggagtcagggtggctttgtctttccttctggatggagacgctcaatcctatttataggcagaggggtcagtggaagaggactcacaggtgaaggaaggggagcacatggggacacaggaggggcagtgctggcctggagggagatgagaccaggtcagcacagccatgcaaggggctgcttggcccccagggcagctccctgtgaaggacaatgagggggcgggggggatgccaaaaaccagggcagagcaagcggcagatccatcagtgcagcccgttggtttcacactctttccagtgaagggttggagggtgttgaagatgaggaaggtagcccacagtggggggagtggcaggagtgggctgtgattgccactgaaggaggcaagacagcagctccttattaagaatggaaatcattgttgagtgcatcaacgtggagatagctcgtagtggcccacataggggtgctgggattgatttttccagatgtggccagtgacctagtgtgagtcaggggacagactcatgattggggtcttgctggatggaagttgcaagaagggaagatggaataggaactttgggtcttgtttaactgtcgttagttggtcaaccagctgtctaagttgagcaggaaagtgaggccaggcgggataaatggagaggaggcagggctaagccttggtgatctccacttggccacctcagcggggacactggggtgtgagcttgttgatgagcctaagtgtcaggtggggacctgccgtgaagagcaagtgcgtgcctgtggagcagaggtctgcagtgcactcgggagtggacccgggcaaggggatttgcaggaggatggggcatgggggtttggaactaggtggctgttgaacacaccctagataggtgcaggttactcctagaaa

SEQ ID NO: 14631 - DNA, 1224 bp, Artificial sequence
  DNA replication origin
aagcagagatgcagcggctgaggggacatgcacattatgttgggagttggatagggacagaggggacaggcccagaacttcccatatcaatagggagcctttattctcatgggaaactggacgccatgggctggagtctctccctgacatatcagaatggaagaagtggaaggcatgttgtcaacacactcacacccacacactcacatccccacactcacacagcagtcacacacacacgatttcccactcagacatacacacacactgacacacaccagtgtacccacaccctacacactcacacactcatacatgcacacacttacatgtgaactcacacactgacacacacactcatacacacacttactcatatgggcacacacttgtgtagactcacacactgatgcatacagactcatacacaggagccctgggaggctgggggagcattgggggaggctgatacaggctggggaagcaccgggagaggctgatggaggctgggggagcactgagggaggctgatggaggctgggtgagcactgggggaggctgatagaggctggaggaccactgggggaggatgggggagtactaggagaggctgatggaggctgggggagcactgggggaggctgataaagtctgggggagcactgggagaggttgatagaggctggaggagcactgggggatgctgagggagcattgagagaggctgatggaggctgggggagcactgggggaggcagatagaggctggaggagcactgggggaggatggggaagcactgagagaggctgacggaggctgggggagcactgggagaggctgatagaggctgggggagctgcttctggtctgtgtgctttgctctcaggctgctccgaccctcccgtgttctgcctggttagggtggtgttggtctcatgagtcagtgtcagggaatttgagcagagggaaggggggtcgggtgggggaatatggctctgcagtgtgttgacttcacccagttcccaagctctttttcaagttgtgattccttgaagggtgaactcctgtctccgagtagaggaaacagagtcccacctgactggggaggggagatggtggtcagggatctctgccttacagattttcaataaccctcctgtctgcagccggcccagatgcagggaccctccaagtcctgagctcactcggttccctgcgcactt

SEQ ID NO: 14632 - DNA, 898 bp, Artificial sequence
  DNA replication origin
ggaactgggcttgaagggtgaagaattcaccgaggacggaaggcctggagagccgcgtgtgtccctgagttgggcagaaagtgacggggtcctggccaggcgcagtggctcacgcctgtaatcccaacactttgggaggccaaggcgggcagatcatctgaggtcaggagttagagaccagcctggccaacatgatgaaaccctgtctctactaaaaatacaaaaattagccgggcatgatggcgggtgcctgtaatcccagctactcgggaagttgaggcaggagaatcgcttgaacccaggaggcagaggttgcaatgggccgagatcatgccattgcactccagcctgggtgacagagcaagactctgtcaaaaaaaaaaaaagaataaagggagggaggggaggaagggaggaagggagggagggagggagggagggaaggggaggggagggaggaagggagggaaagaaagtgaagtggccctgggtgtctgggctgcaggttctgcaagggaggagggagggagggtgtccaaggggtgacggggctaaggccgaaagcagtgcaaggatcagtggtgcaggacatggggctccaggacagggtgtggtgttggtggcgttgttacatcagggtgggggattgctggttattatttaatacacaaagttggtcctccaaaatatggacacttttgccccaccccaaataattcaccatcctggttacaatccaacaggtacttactcttctctgcaaaagcagcagctctaaaagttaaaggggacagaaaggagagaatgaaaagagagtatgagaaaatgcttccaacaaaatgcacagctgagaggctcactagcgatgaagcaaaagaagaaggagatacgtttgcat

SEQ ID NO: 14633 - DNA, 1361 bp, Artificial sequence
  DNA replication origin
taggggggtcagcatgcggagggaaagcatcaagataaatagctaattcatgctggggttaatacctaggtgatggattgacaggtgcagcaaaccaccatggcacatgtttacctgtgtaacaaacctgcacatccttcacatgtatcccagaacttaaataaaataaaaaggctgggtgcatatttataataattgtgcttgaagcaaaagattcaaggaggatgctgtgcggaaggggctggatcaggccaagagtgaaggggtcggggccatcttgggtctgcagacctcctgcatgtcctgaattgggccaggtcacctaatctctcagccttccttcctcatctgtacaatggggaggaaactccaaaactcacgtctggaatttatcatgaggatgaactggaaaaatagaggcaaaacgctcacagaggccacatcctatgtgttgatggtggtgattaatagttggctctgcatgccagggataaagcagtgaaccgagcaggcagaagatctcgagtcttcagagagctcatgtcagctcagggaaggtggacagccatcagatgggcttgccgttacagtgctcagtgggtgcaagagctatgtgcaaaattagggcagaagaagagggtctgggagggctggggtgggtgagagatctaaggccatgcccaggagagacctcggtgagaagggcctttggagaatggactggaaagaagggagggagcctggtgggtgtttggaggatggagaggcaggtgccgctggggcaggagtggcctggtgtgtctggagaagcacacagccaccgcagtgggtggagagaggagagcaggcaggcaaaggaaggagcgctcatgcagagcacacaggccaggcagggacaggagagaggagtgtcgcatgcagagcacacaggccgggcgtggacaggagagaggagtgtcacatgcagagcacacaggccgggcacggacaggagagaggagtgtcacatgcagagcacccaggccgggcacggacaggagagaggagtgtcacatgcagagcacacaggccgggcacggacaggagagaggagtgtcacatgcagccaatgtttcctcggcctcttgtttgcaggaggatcaggcgggtagagggaggaagggagaacgggaccagcgaaggggctccttagccacccagaagcaggaggtgggtgaagggagagctggtgagagctgaccgacctggccatattctggagttagaggcagccggggtttctggcagatggacagtgagatgctgaggaaagaggaacctgggcagccaagaaggggaactcaccaagcacagggcgggga

SEQ ID NO: 14634 - DNA, 936 bp, Artificial sequence
  DNA replication origin
tctaaactgaagtaaataactcaggtccttaatttttcatttttgtggttaatcctgttttcagacatatcacagacatggatgaaaggtcatgtttctcagacatcaagttaaaaaccaatagtgaccacagtcatgaaagaacattcagcctgagacaaaaggggttaacgcacagggaagataacgacggtgagacccgccacctgcagtccgggtaggagaggggtggtgacagggggggagggggtggtgatggggtgggaggggtggtgatgggggggagggggtcgtgataggggtgggaggggtggtgatgggggtgggagacaggtggtgataggggtgggagaggggtgggagatggtgataggggtgggagggggtgggagaggggtgggagatggtgataggggtgggagggggtggtgatgggggtgggagacacttggtgatgggttgggagaggggtgatgatacacgcaggcccagtgctgaggcttagggaatgtccggggcctgaggaactgagggcaaaaccactgtgctgtcaacgaggaggtttcctgttggaagccttggctttgaatacggactgttttgttaatagtctagtgaaccaggcaggtgtatccaatatctgtaaaactcagcctcctcgtttgtaaaaggaagacagtatttctgacagagtagttgagaagattgagaaccacgcacacgtggtaccgggcgacgtgcttgctgctccacctgagcgtggcggtttgctctcatctggtctgggcacccgtgtgcttcctggatcagccactcttgcccatgtccctgtctgctcagtagccaaggagcactgtcctcgggtgtggggcagaacctcccttagggtggggtggtgtgatttatggcaaacccaagatcccaggtagagctggc

SEQ ID NO: 14635 - DNA, 983 bp, Artificial sequence
  DNA replication origin
cttagggaatgtccggggcctgaggaactgagggcaaaaccactgtgctgtcaacgaggaggtttcctgttggaagccttggctttgaatacggactgttttgttaatagtctagtgaaccaggcaggtgtatccaatatctgtaaaactcagcctcctcgtttgtaaaaggaagacagtatttctgacagagtagttgagaagattgagaaccacgcacacgtggtaccgggcgacgtgcttgctgctccacctgagcgtggcggtttgctctcatctggtctgggcacccgtgtgcttcctggatcagccactcttgcccatgtccctgtctgctcagtagccaaggagcactgtcctcgggtgtggggcagaacctcccttagggtggggtggtgtgatttatggcaaacccaagatcccaggtagagctggccctgagcccccgctgcacagggagcccccgctgcacagggagcaggcggcctgtgggagagctcactgctggggagggcgtctgtgcaggatgaatgggagcttctgaggctcaggaccccggagcagaagtcaggacccgaagacatcggtaaatacctctgacgctaaccccagtcagccccaacttttcggtggatgcttccatggggattccttttatttttacagcacgttacgttttctgttgtggacactaataaggttctgacagcgcagaggcactggttgcattattttcgccaagcgtgggcagtagatgttcgtagacggtggcaacaagggctgtttcaatgggcatcttgctgctgagagactcattttatttactgtaagggataaaaattacacttctaatctcacacactactcagatttctgtaggccccagtagcaaggtgatgtggggccttgggaaagtctcccaaaaagaacaaaacatcacattccatgggtgtggtttctcgggtacacagagccctgatgcc

SEQ ID NO: 14636 - DNA, 734 bp, Artificial sequence
  DNA replication origin
tgggtaggtttcctccaaataattgaaaaccaaagactggggttacccaaagaacacaatctgcctaaaagattgcatgatcaagtttttgcctatatttctagcctgtcaatctgccctggagatttcagacttgctctccgtgctgggggctgtccatgtccagggcctgtccatgctgggggctgtgcatgatagggtctgtttatgctgggagaagtccacgatggagtctgtccgtggtgggggctgtccatgtccagggtttgtccatgctgggggctgtccatgatagggtctgtttatgctgggggctgtccacgatggagtctgtccgtggtgggggctgtccatgtccagggtctgtccatgctgggggctgcctatgccgctgtctgtccatggtggggtttgtttatgctggcggctgtccatgctgggggctgtccgtcctgggatctgtccatgcctgggctctctgtgctgggcacagtgtggggaggctgagtcatggagcttgtagcaggaggatcggatgaatatctctgaacacacttggggatcagtgagggctgttatttgaagctggggaagagtgagctgtttgtgggctaggttgggacagtttaatggatgagagatcagggaaggagagagggaaaacaggaagagaagtcactgggcagggagaggaggtggggtcgggtatttatggttagtgacaggaagggagc

SEQ ID NO: 14637 - DNA, 1024 bp, Artificial sequence
  DNA replication origin
ttttacatcatccgcgctgccaagagctatcatggtttctaatccagctgcaggcccatggccacgatggagggtggatgcaatgttatacttaaggctgaaacagtcctttacattagttttgtacccagtctttcagcccttgtttagactctttctgccctctctgttgggagccgttcctgagttatagcccttagctttttaattttttctcaaatttacaatccattctcatactgacaaatacctctttggtggaaatatgtttgtgtgtgactgtgtgtgtgtgagtgtgtgtgagagagcatgtgtgtgtgaatgtgtgaatgagttgagagagcatgtgtgtgtgagagagagcatatgagtgtgtgtgagagagcatgtgagtgtgtgtgagacagcatgtgtgtgtgagagagcatgtgtgtgtgtgagagacagcatgtgagtgtgagtgtgtgagtgtaggagagagcatgtgtgtgtgagagagcatgggagagtatgtgtgtgtgagtgtgagagagcatgtgtgtgtgagtgtgtgtgagagcatgtgtgtgagtgtgtgtgtgagacagcatgtgagtgtgagagagcatgtgagtgtgagagcatgtgtgtgagagcatgtgtgtgtgagcatgtgagtgtgagtgtgtgagtgtatgagagagcatgtgtgtgagagcatatgagtgtgagcatgggagagtatgtgagtgtgtgtgactgtgtgagcatgtgagtgtgtgagtgcaaatgtgtgtgagagagcatgtgagtgtgtgtgacagcatgtgaatgtgtgtgagaccatgtgtgtgtgagtgtgtgtgagtgtgtgagagagagcatgtgtgtgtgagagtgtgagtgtgtgtgcatgcacatgtgtttttcttctttgctcccattcctcctaccgctctgacaccctctggcttcatgtgtttggaggggttgacaggttacttgcacttaaagacaagactcaggtttcattctcacacttcat

SEQ ID NO: 14638 - DNA, 650 bp, Artificial sequence
  DNA replication origin
taggtttcctccaaataattgaaaaccaaagactggggttacccaaagaacacaatctgcctaaaagattgcatgatcaagtttttgcctatatttctagcctgtcaatctgccctggagatttcagacttgctctccgtgctgggggctgtccatgtccagggcctgtccatgctgggggctgtgcatgatagggtctgtttatgctgggagaagtccacgatggagtctgtccgtggtgggggctgtccatgtccagggtttgtccatgctgggggctgtccatgatagggtctgtttatgctgggggctgtccacgatggagtctgtccgtggtgggggctgtccatgtccagggtctgtccatgctgggggctgcctatgccgctgtctgtccatggtggggtttgtttatgctggcggctgtccatgctgggggctgtccgtcctgggatctgtccatgcctgggctctctgtgctgggcacagtgtggggaggctgagtcatggagcttgtagcaggaggatcggatgaatatctctgaacacacttggggatcagtgagggctgttatttgaagctggggaagagtgagctgtttgtgggctaggttgggacagtttaatggatgagagatcagggaaggaga

SEQ ID NO: 14639 - DNA, 968 bp, Artificial sequence
  DNA replication origin
tgaaagccacaagctctctgtcccgtttgctttctaaactgaagtaaataactcaggtccttaatttttcatttttgtggttaatcctgttttcagacatatcacagacatggatgaaaggtcatgtttctcagacatcaagttaaaaaccaatagtgaccacagtcatgaaagaacattcagcctgagacaaaaggggttaacgcacagggaagataacgacggtgagacccgccacctgcagtccgggtaggagaggggtggtgacagggggggagggggtggtgatggggtgggaggggtggtgatgggggggagggggtcgtgataggggtgggaggggtggtgatgggggtgggagacaggtggtgataggggtgggagaggggtgggagatggtgataggggtgggagggggtgggagaggggtgggagatggtgataggggtgggagggggtggtgatgggggtgggagacacttggtgatggggtgggagaggggtgatgatacacgcaggcccagtgctgaggctcagggaatgtccggggcctgaggaactgagggcaaaaccactgtgctgtcaacgaggaggtttcctgttggaagccttggctttgaatacggactgttttgttaatagtctagtgaaccaggcaggtgtatccaatatctgtaaaactcagcctcctcgtttgtaaaaggaagacagtatttctgacagagtagttgagaagattgagaaccacgcacacgtggtaccgggcgacgtgcttgctgctccacctgagcgtggcggtttgctctcatctggtctgggcacccgtgtgcttcctggatcagccactcttgcccatgtccctgtctgctcagtagccaaggagcactgtcctcgggtgtggggcagaacctcccttagggtggggtggtgtgatttatggcaaacccaagatcccaggtagagctggc

SEQ ID NO: 14640 - DNA, 1158 bp, Artificial sequence
  DNA replication origin
tgtatcccagaacttaaataaaataaaaattctgggtgcatatttataataattgtgcttgaagcaaaagattcaaggaggacactgtgcggaaggggctggatcagaccaagagtgaagggggacggggccatcttgggtctgcagacctcctgcatgtcctcaatggggccaggtcacctaacctctcagccttccttcctcatctgtaaaatggggaggaaactccaaaactcatgtcttgaatttattatgaggatgaattggaaaaatagaggcaaaacgctcacagaggccacatcctatgtattgatggtggtgattaatagttggttctgcatgccagggataaagcagtgaaccgagcaggcagaagatctcgagtcttcagagagctcatgtcagctcagggaagatggacagccatcagatgggcttgccattagagcgctcagtgggtgcaagagctatgtgcaaaattagggcagaagaagagggtctgggagggctggggtgggtgagagatctaaggccatgcccaggagagacctcggtgagaagggcctttggagaatggactggaaagaagggagggagcctggtgggtgtttggaggatggagaggcaggtgccgctggggcaggagtggcctggtgtgtctggagaagcacacagccaccgcagtgggtggagagagagaggacagcaggtaggcaaaggaagaagtgctcatgcagagcacacaggccaggcatggacaggagagaggagtgtcacatgcagagcacacaggccgggcgtggacaggagagaagagtgtcacatgcagagcacacaggccgggcgtggacgggagagaggagtgtcacatgcagagcacacaggccaggcacagacaggagagaagtgtgttatgtgcagccagtgtttcctcggcctcttgtttgcagaaggatcaggcggatacagagaggaaggtagaactggaccagcgaaggggctccttagccacccagaagcaggaggtgggtgaagggagagctggtgagagctgactgacctggccatattctggagttagaggcagccggggtttctggcagatggacagtgagatgctgaggaaagaggaacctgggcagccgagaagaggaactc

SEQ ID NO: 14641 - DNA, 1034 bp, Artificial sequence
  DNA replication origin
ttttctggccgtggacagagcgatgaggtcggggcggctgtgaccgtcaggggagaggagcaggctgggcgcagccggcgctggcctattccctgcttccaggcagtgacctggggacgcatccagagcttggaattgcgccaaggctcaagccccgcctccgccgtgcgctgctcagggacccagggcctggcgactttggacctgatgaccctcaaccaggccagcttgggagccaggagcagggacttctgctgaaggcggacttcccggctcagcagtttctcctcggggtctgagcatcaggtcttcctgtctcctgcgcccttttaaggaatttgtcccattgaaacgggtcttagttttcaggatatcctgtctgtctgagtagaagctaagttctttgatggtagcagaatgtctatatttttgtctcgaaataacttgcatagtgacttgcctgtagcagtctgaggagggataagctttgctctatgctccggtgggtggtaggatccccgggttcacagggagggtgcagaggctcaggggtgtgcagaggctcaggtggatgcaaaggctcacgtgggtgcaggggctcaggagggtgtagaggctcagatgggtgaagaaggtcggggggtgcagaggctcggggggtacaggggctcagttgggtgccaaggcacaggagggtgtagaggctcaggtggatgcagggactcagatgcgtgcagaggctcaggtaggtgcagaggctcaggtgggtgcagaggctcaggtaggtgcagaggctcagttgggtgcagaggctcagttgggtgcagaggctcaggagggtgcagaggctcatttggatgcaggggctcaggtggatgcaggagcttaggtgggtgctgagacttagatgggtgcagaggctcaggtgggtgcagggactcagaaggatgcagaggttcagcggggtgagtcacaggtcctcctgacacaagcagtgctagggcaggttttgaactgaaatccgtctgactcaa

SEQ ID NO: 14642 - DNA, 992 bp, Artificial sequence
  DNA replication origin
gtcggcacattgggtcaggctctgatctcacatggcaagtccatggcttgccgggggttgttaacctaggtgagcttcagtgtctgcatctgaaacctgaccatggtgatgtcagatatttcaaagaatggggttcccatgagccagcactcagagtaaccttcatgcactacatgccacatgtccagctgcattagggaaccgatattatttattagggtcattatcattatccagaaacaggtttatacatgactaattaaaatgcctaaggaggagggctctaatggagacaggaacagattgtggtgggagcacaaaggcaatcatgtagggtattgaaatgaggcgtgggactttccagaaggtaggtggaaaagccattctagacagggcagcatgtggggaaggcagtgtggaggagagcacagccactgaggactgagggaagaagggtggggcgcaatagacaggtgagcatacagaaggcttccccttccccgctgggaactttgtatggaattacgcaggtgaggaggagccgctgaaggattcgaggtaggcagcagtcaaatcatgcgtgctttctttttcagtagttgtgtgagggagtgttgcctggtggtgggggcagggggggagagtagaagaagaatcatgtgagggtaactgaggaagagattggtcaggaggggatggttctaaacagtcattggagtgaggacagctggagttagggcaggagggtgaaggaaaagcccagaaaacccccgatctctgactctcctggcctctgagtggatggacaggaagtgctggcggagctcttacctgatgaagatgcctgatgccggtgaggtgagttgacttccttaaagttcagtgtgtctggccggtgcggtggctcacacatgtaatcacgccggcactttgggaggctgaggcgggcggatcacgaggtcaggagatcgagactatcctgcctaacacgg

SEQ ID NO: 14643 - DNA, 1491 bp, Artificial sequence
  DNA replication origin
agctgggcacagtggtgcacatgaagtcccagctacttgggatgcagaagcaggagaatcttttgaacccaggaggcagaggttgcattgagctaagatcccaccactgcactccagcctgggtgacagaggtagactccatctcaagaaaaaagaaataataaatgaataaaataaaacaatcgatagtcatctgcaaatgggtgagactggaaaaagttacttgggaagtgagggtaggaaaaaaaaaaaaaaaagatctgacagagaagagaattgccaaggatactaaaagtacagccagtgggttgtagaagagccaagatacagggttgactggaagaccagagacagttgggggaggatacagtggaagctgtgtggtgctgctttcaggtgacctgagatgagtgtaggtgctgctgcttaaattcagcaaaatatggggcatagataaccttgacatgagcggtttcagaggaaaactggaaaggaaaatgggagggaggaattagagacagagaataaaacacctatttcaaagagttttactgccagggccagcagcaccagggcctgtgactggaaaggatgacaggaaggcaaatatttttacagtgaagggaatgatacagcagccaaggaaacctggatgtgggattgcatgcagggtggagggggtgtttccttctgtggcatttaatgcaggatggagggtatgtctcctgttacggggttgaatgaaggatagagagtgtgtctcctggtgtggggtttaatgcaagttagagggcgtgcttcctggtgtgggatttaatgtggggtggagggtatgtctccaggtgtggggtttaatgtaggatggagggcgtgtctcctggtgtgggattgaatgcaggatggagggtgtgtgtctaggtgtgggatttaatgtggggtggagggtgtgtctccaagtgtggggttgaatgtaggatggaggctgtgtctcctggtgtggggtttaatgcaggatggagagtatgtctcctggtgtggggttgactgtaggatggagggtgtgtctcctggtttgggattgaatgcaggatggagggtgtgtctccaggtgtgggagttaatgtggggtggagggtgtgtctccaggtgtggggtttaatgtaggatggaggctgtgtctgccaggaggatcactggcaatgattggtaggaagaaggccgagtgtctgactgaatgtgcagggaatcctgaggtcgggggctgtgggacttctcttctgaataattatgcttcctggcacccctgcttctcagttaggtctataatgtgtggatttaatgcgctcctccagcctcaagggcacaggactcctcagaaacttttcttgttctgaatgtcatacactaggctttgaccatagggttcttataatggaagacaacagggttcttataagtggatagaatagggttcttaaaatgttagacaat

SEQ ID NO: 14644 - DNA, 1242 bp, Artificial sequence
  DNA replication origin
ggagaggtgctgtgcgcaagtgtgtgcgcgcggagggggtccaggacgctcggacgtagctctcactgcgctattgtctggcccacgaggcagtgggtccgtggagctccttcattaaccccacagggaccagggaccgtgtctcctccacgcctgcggggtcaagtgcgagctcctgtaccggcctgggaaggggctgcaggcaggaagggggctggtgacgccagcgccggagtcgccgtttgtgcgctctggccattggggcggcgtcgcgttccccttgcctagcaaagcccgggtgaccaaggtcgggcctccccccgggggcgtcggcgctgggccccggggctcggcagcgcgctccagggcccaccggaggcgcttgcaagcagcagggctttcccggggaggagcgctccggcaggagggcgcccggccactgccgtgggcagctgcgccgcgcgcgcccgggtggcggctcccgctgtggcgaaggcaggcgcagagtttttgatgcgtggggcataattcgtgacctgtttgcggagtcgtgaggctggaggcggtcgcagttgaggtcactggaacccgttactgtgggtacttgagtatcagcttcagctgatggtgctgtactcttcaataaagcgttggggatatcgaaaattcactggcgatttcctttttcttctggattattaatggcattgtaaaggttgaatcccaagtgtgcctttctctttaaatgcctattttcagggaccaggggaaaaggagtaaggctgtaagcattttcatctggtaaacaggaatattaattctgtgtatgctggctcgtatctgcccctttacccggggctgatctactggctgtttggaagaagtttccttctcagttgtttcttgcatatgtgcagccatgagaatgcaggtatttgcagacaattacttacccagaaagcgtcctaaaggagagcacacacaacactactacgccagagcagcctcattttgagaagcccgaaagagaaaggtggaacattcgttaaagtaagtaattcaaacatttcctgacccacccagcagagatgtgagcacgcactgctgagtttccagagaaaccctgtaactccaccgcgagagaggtgcgccctcccatacctgcatggttttagatgagttaccttattaaagactcatcccaccaagaagtatgctaagacctttaatttgcaggtcaga

SEQ ID NO: 14645 - DNA, 848 bp, Artificial sequence
  DNA replication origin
tggtcacttgcttttttccctacataatatttccccgtcctctctagattcttccatcttcttttccacccatttccttttcctccagtggtccagatggaagagtgattggcagggcgaaggaggactgtatctggttcattaggaaactccagatctgcctggagagcgggggagagacgtgccgcctgggcttcccctccctgcacttgcctccacggggcgtccagggctccgtgaaagctgaccgctcagcaccagctcctcctcaccggcatccaccctcacaagggggtgtctgcgggaatgcgccccgagatctcggggatcgcaaacagtgggtcttagtcacccaagctcgtggtcgctcgggactggggagcttcttgcagacgccgaccctctgcccacccgcccggctcagtccggatgccttggccggtgcctctgacattgccggctgcggaggcagcgcctgctgagcagggcccgactggcagcggcctctggtcagcactggactggctgggaattggaaggcgaggcagctaaagtctagggaaaagagggttgtgccctgtgaggtgtgctggggcgtgtgtgtcgcagcggggtgagggcaggagcccaagggacaggacctggctttttccagccgagcccctgcgtggagaggaaacacctgccacgcaactccgcaaaacttcccgccctttcccctgcactccaagcctaactgggcccggggcttcctcctttccaggcaggcaactcagcctctgagctcactctcggttccctcgagttccgcacgctccggctgccttcccccgcaattagcagaggtt

SEQ ID NO: 14646 - DNA, 1664 bp, Artificial sequence
  DNA replication origin
agccccgggcccagttaggcttggagtgcaggggaaagggcgggaagttttgcggagttgcgtggcaggtgtttcctctccacgcaggggctcggctggaaaaagccaggtcctgtcccttgggctcctgccctcaccccgctgcgacacacacgccccagcacacctcacagggcacaaccctcttttccctagactttagctgcctcgccttccaattcccagccagtccagtgctgaccagaggccgctgccagtcgggccctgctcagcaggcgctgcctccgcagccggcaatgtcagaggcaccggccaaggcatccggactgagccgggcgggtgggcagagggtcggcgtctgcaagaagctccccagtcccgagcgaccacgagcttgggtgactaagacccactgtttgcgatccccgagatctcggggcgcattcccgcagacacccccttgtgagggtggatgccggtgaggaggagctggtgctgagcggtcagctttcacggagccctggacgccccgtggaggcaagtgcagggaggggaagcccaggcggcacgtctctcccccgctctccaggcagatctggagtttcctaatgaaccagatacagtcctccttcgccctgccaatcactcttccatctggaccactggaggaaaaggaaatgggtggaaaagaagatggaagaatctagagaggacggggaaatattatgtagggaaaaaagcaagtgaccattgaaaaaaaatcgtaagattggactccaacctttaaaaatgaaacgaaagaaaaaccctttgtagatacagatactcccgggaacatctatggaagtgctgactgataaagaaagcatctaaggaggctaaaaatgaggacaggggcaggtatttccaatgtgaaaaccaatcagtattctctctctctctgtctctctccctctttctcgccctgtctcaaaagggagcttatgttctttcccggagaataaacaagtacacaagctattgccagccttgaggtcgcagcctgtaggctacttagaagaaaacattccccaactcattcagggagaaaaccaagctcacagagccccaagcccaggagccacccagagaaactccttcccctgaccagcgtagaaggaggatacccgtgcgcccacagtgaatgtatctgacttggaagccggtccagaactcctagcctgtttcacgcaccttgccaacaccttacaacttgcaaggagcgaagtccgggggagaggaaagcgggggcgaccttctagaggcagctactcctcgccggctgaggacgttggagagggaaggaggagaggaggaatggggtgtatgggtgcgaggaggccgggccggcggagacctttgcctattggtaccaaaacccccgtagagagcccgaactttccaggccggcttcacccgggacgctttcccaggcgcgtcgggtccggggagaaagtcctgggaactgcccctcagccaccccgacccgtggagtccacgtctcggaggaggcaacaccgccccggcggagcacagttccagcccaactcgtattgggttcctttctccttgacaccctgtactgccgagaaaaagagatctctcctgtgagcccaagagagggg

SEQ ID NO: 14647 - DNA, 1476 bp, Artificial sequence
  DNA replication origin
ggtgtcttcccttgccacagaggggagactttcaacatggtcatgggcacgttgcagagcaattcaaggaagcctttgacactgcacagaaaggaagcagctgatctcaagatgcagctctggtgccaaggggcagatccctggctcattacatcagcgccttccaagtcctgctggcactggcaggccagttccaggaagactcagaggctgtcccgggagggaggtggagctgtctgaactcccacgcctcccgccaggcataaaagtgccattttctgaactgactctggcaccacataaacctcccacccatctatgaaacgaaggtgtgtgagtttagaaaccacccacatagcttggaggaacaacccagataaggcctcacagtggcctgacttttagggtgggtctggattcactatgaagaaaggctccaaaagaagtaacgcacaggccttccagtgtgcaccagtgtgggctgtgtgtgtgagtgtgtgtgagagtacatgagagtggtgtgtgtgtgtgagggatatatgcgtgtggtgtctgtgtttttttgtacatgagtgtggtttgtgtgtggtatatgtgtggtgtgtgtgaacgtggtgcatgtgtatttgtgtgtacatgagtggtgtgtgtggtatatgtgggtgtgtgtgagcatgtgtacgtgtgtgtatttttgtatacatgagtgtggtgtgtgtgagggatatgtgtgtgcgtgatgtgtcaatgtggtgtgtatgtgtttttgtgtacatgagtggtgtgcatgtgtgtgtgtggtacacgtgtatatgatagatgtggttgtgtgtgagcatgtgtgtgtgggtggtatgtgtgaacgtggtgtgtatttgtgttcacatgaatggtgtgtatgtatgggggttatatgtgggtgtgtgtgtatgagcatgtatgtgtatgtggtgggggcaggaatggagggtcacaggtcctggtcctgaggggtatatgtgtgcatgtgtgagcatgttgtgtgtgtgtgtttgtgtacatgagtgtgatttgtgctgtttggtgtgtgaacgtgatgtgtgtatttgtgtatacatgagtggtctgtgtgtggcgtgtgtgtgtgtgagcatgtcctgtgtgtgtgtgtatgtgtggtgggggcagtaatggagggtcacaggtcctggtcttgggtgtgtgtgtgggggagcggggcaagaatggagggtcgcaggtcctggtcgtgggtgtgtgtgtgggggagcgggacaagaatggagggtcacaggtcttggtcttgggggggtatatgtgtgtgtgtgtaaggatgtcgtgtgtgcgtttgtgtgtgtgtgtttttgtgtacatgagtgtggtttgtgtgtggtgtgtgtgaatatgatgtgtatttatgtgtgtaggagtgatgtgtgtgtgtttgtgtgtgtgtgtgtgtgtgtgtgtgtgtgtgct

SEQ ID NO: 14648 - DNA, 1330 bp, Artificial sequence
  DNA replication origin
acaaagcacatcttgcaccgcccttaatccatttaaccctgagtggacacagcacatgtttcagagcacagggttgggggtaaggtcacagatcaacaggatcccaaggcagaagaatttttcttagtatagaacaaaatgaaaagtctcccatgtcttctactttctacacagacacagcaaccatccgatttctcaatcttttccccacctttcccccctttctattccacaaaactgccattgtcatcatggcccgttctcaatgagctgttgggtacacctcccagacggggcgagtggccgggcagaggggctcctcacttcccagtaggggcggccgggcagaggcgcccctcacctcccgagtggctggccgggcggggggctgatccccccaccaccctcccggacggggcggctggccaggcgggggactgacccccccatctccctcccggacggggcggctgccaggcggagacgctcctcacttcccagacagggtggctgccgggcggaggggctcctcacttctcagacagggcggttgccaggcagagggtctcctcacttctcagacggggcggccgggcagagacgctcctcacatcccggacagggcgacagggcagaggcgctccccacatctcaggcgatgggcagccgggcagagatgctcctcacttcctagatgggatggcggctgggaagaggcgttcctcacttcctagatgggatggcggccgggcagagacgctcctcactttccagactgggtagccaggtagaggggctcctcacatcccagacgatgggcggccaggcagagatgctcctcacttcccagacggggtggcggccgggcagaggctgcaatctcggcactttgggaggccaaggcaggcggctgggaggtggaggttgtagcgagccgagatcacgccactgcactccagcctgggcaccattgagcactgagtgaacgagactccgtctgcaatcccggcacctcgggaggccgaggctggtggatcactcgcggttaggagctggagaccagcccggccaacacagcgaaaccccgtctccacccaaaaaatacgaaaaccagtcaggcatggcggcgcgcgcctgcaattgcaggcactcggcaggctgaggcaggataatcaggcagggaggttgcagtgagccgagatggcagcagtacagtccagcttcggctcggcatcagagggagaccgtggaaagaggggagagggagagggagagggagggaagcatcttaatctctaatgataccaagttcagtggcaaagaagctttt

SEQ ID NO: 14649 - DNA, 917 bp, Artificial sequence
  DNA replication origin
aggagcgtctctgcccggccgccatcccatctaggaagtgaggaacgcctcttcccagccgccatcccatctaggaagtgaggagcatctctgcccggctgcccatcgcctgagatgtggggagcgcctctgccctgtcgccctgtccgggatgtgaggagcgtctctgcccggccgccccgtctgagaagtgaggagaccctctgcctggcaaccgccctgtctgagaagtgaggagcccctccgcccggcagccaccctgtctgggaagtgaggagcgtctccgcctggcagccgccccgtccgggagggagatgggggggtcagtcccccgcctggccagccgccccgtccgggagggtggtggggggatcagccccccgcccggccagccactcgggaggtgaggggcgcctctgcccggccgcccctactgggaagtgaggagcccctctgcccggccactcgccccgtctgggaggtgtacccaacagctcattgagaacgggccatgatgacaatggcagttttgtggaatagaaaggggggaaaggtggggaaaagattgagaaatcggatggttgctgtgtctgtgtagaaagtagaagacatgggagacttttcattttgttctatactaagaaaaattcttctgccttgggatcctgttgatctgtgaccttacccccaaccctgtgctctgaaacatgtgctgtgtccactcagggttaaatggattaagggcggtgcaagatgtgctttgttaaacagacgcttgaaggcagcatgctcgttaagagtcatcaccatttcctaatctcaagtacccagagacacaaacactgcggaaggccgcagggtcctctgcctaggaaaaccagagacctttgttcacttgtttatctgctgaccttccc

SEQ ID NO: 14650 - DNA, 1943 bp, Artificial sequence
  DNA replication origin
caggctgatatccaactcctaggctcaagtgatcctcctaccttggcctctcaaagtgctgggactacagacataagacactgcacctgacctctgattcattttaactcataaaactttgaatatgcaattgtgtttaattatctttcttacgttttctgtgacaggttttctggacttgaccaacaaaagcggttaatatattccctatagttaatttttatttcctggaagtttaggaggcagaagaaaagtgtgaaagatattgaggaggaagtttcagttaatacacactcacacgcaagcccagcccctgcagtcatatccttcactttgctttgagtgacaaatggtggtgacttgtcacagtgctcttagtctgagggaggctggatggggtctcactgcacagggagcacagaatgggagcacggcggctggggagagccctccccccttcccggcgccagcctgatggagaggagatgagacaggccaggaggaggtcaggttgtggctgcagattaggaaggacctggtagggttttgattgggttttggctttaattctgggtgagagtggaagtcctgggaggattctgagcagaggagtgacaagctgacatttggacgccatcatggtgcctgctgagccagggacagagtgtcggggcccaggcagagcagggcggggctggcgcaggtgtctgtgtgtgtggtggtgcaagggcatggtgatgggggtggtgatgggggatggtgatgggggtggtctgcagattctggagatgctttgaggctagagccaacaggatttcctaaggatgggcattgggtgggagagaatgaagaaagttgaagatggctctggattttattttgtttgtttttgtttgagcaattctagtgaatgcaattgtcattaacagcataggaaagactatgagggaagcatgcttggcagggacaataaaggaatagcttttcagctttgggcaggttaagtttgagatgccagtcatatatcccacaagagaggccatgcagtttgttggatgacgaggtgtgagttcagctgggcatggtggcttgtgcctgcaactccagcacttttgagaggctgaggtgggcaggtcagctgaagtcaggagttcgaggccaccctggccaacatggtaaatccccatctctactaaaaatacaaaagttagccaggtgtggtcgcggatgcctgtaatctcagctactgcagaggctgaggcaggagaatcacttgagcccaggagatggaggttgtggtcagctgagactgcgtcactgcactccagcctgggtgacggagtgagattctatctcaaaacaacaacaagaacagccagctttgagttcaggggagacatcgggaatcattagtgagaagggatggggtctagagagaacagggcagaggtagtggtctgcgtcggaaagcaagctagcaaaaacaacacaaaacaaaacaaaaaaagggtggtgaggagaagccagcttggacatggaggtggctctctggaggagaagcagggcagggtcgtgtccttaagctgaggaaagaaggagagatgtttcaaggaggaacagctgcacccaagctactgaggggccacacaggagaaaactgacaagacactgctgaggttaggcagcgatgggacattgagcaccatggtgagagactcagggaggtggtgggagagaaatgatgatggaaaggggtttaagaatgaccaggaaagatttaaaacagagggagcagatgattctttttcaggagttttattgtgaagtaaaaagagaggaggttgtagctggaggggataaaggttatgagttttgttttgtttaccttgcaagacgggagaaaaccccaacactattataaaccaatgggaataatctgggag

SEQ ID NO: 14651 - DNA, 956 bp, Artificial sequence
  DNA replication origin
aataggacagaggtgggccaggtacagtggttcatgcctgcaatcccagcacttggggccaggtgcggtggctcacacctataatcccagcactttgggaggcagaggcaggaggatcacaaggtcagtattcgagaccatcctggccaacatggtgaaaccccgtctctactaaaaatacaaaaaattagccgggcatggtggcacgtgcctgtaatcccaattactagggagcctgaggcgggagaatcacttgaacccgggaggtggaggttgcagtaagccgagatcatgccactgcaacccatcctgggtgacacagtgagactctgtcaaaagaaagaaagaaggaaggagggagggaggaaggcaggaaggaaggaaggaaggaaggaaggaaggaaggaaggagggagggagggagggagggagggaggcaggcaggcaggcaggcaggcaggcaggcaggcaggcaggcaggcaggcaggaaggaaggaaggaaggaaggaaggaaggaaggaaggaaggagggaaggcaggcaggcaggcaggcaggctccaaataaaaggaacaaagtgtggaaaggatctgtggagggagcagggactagaagcaggtgtggctacagcaaggagagtttctgagctgaggatgtcagggagggaaatgataagcggaacacggttccctggcacattgcccccaggatgctttgttgctagaaaggtgtcctaactgataagatatcagggtctgtgatctcttttgtcttctcacggtggcatcggtgtcatagttaacattataacactcctcctaagaagcatactttcttcaacattactttccaactaaaacttacaaaatataatgcctaataacaacagtctggatgtctacattgcaacttcaacaaatacgctgggatatgaacatcagatttcacaaaactat

SEQ ID NO: 14652 - DNA, 848 bp, Artificial sequence
  DNA replication origin
tgagactctgtctcaaaaaaaaaaaaaaaaaaaacagatacactaacagatacagtgttttactgaaggccgggacattttgtgagctctcttaatatatgactgtagctctaaaatcacctctcccaggaaagagtcccttggcaagcaaggaagcaaatgagagaaggagaggcagagggagagagagagaaaaggcaggcaggcaggaaggagaaagaaggaaagaaagaaagaaagaaagaaagaaagaaagaaagaaagaaagggagaaagaaagaaggaaagaaggaaggaaagaaagaaggaaggaaggagagagagagaaagaaagggagaaagagagaaagaaagagatagaagaaagggagggaaggatgggtgaagagaaaggaagggaggaaggaaggaaggaaggaaggaaggaaggaaggaaggaaggaagggagggagggagggaggaagagaggaaggaaggaagggagggagggaaggagggagggaggaaggaatgggtttagctttgaatatgggtttagcctactgattcaggagtcacatcatagctaaggcaagagaatggtgtcaactcaggaggaaggaagggaagaagggaagagggagggaggaaggaggggaggagaagggaaaagaaggaatgaaaggaggaggaagagaagagcaaagaaagaaggaaggaagagaaaggaagaaaggagatccagccaggtactgcttaatactagcattttctagcattttctaattaattttgtttgttcattttgcttgtacagtctactagaagttctccagtgtgcattttagaattcatgagagagacagaa

SEQ ID NO: 14653 - DNA, 1746 bp, Artificial sequence
  DNA replication origin
ccgggtgcacaatatgccatgtgcagctggcatggactccatccttttcaaattccctcaagttccgaacatggaaggaacagctctttgtagattcctaaatggaaattatcggaaccagagagtcaggggaagctctagtagagccggagttggcaaactctgtccagtgtcagatggtaattattttcggctctgcaggctatacggccaccatcgccaccactcaaaggtaatgcggtgcaaagcagctgtgggacagcattaactgagtgagcgtgctgggctccaataaagctttattcgtgatactgaaatttgaatttcttgtaattttcacatcatgaaagattctattttctgcaatcatttaaaagtttaaaaaccattcttagctcataggctgttagaaaccgggcctggactgtagcttgctggcctctgagagcctaggtggtctgtgggggtaggaggtgctgggcaaggccgtccacagtgcacgcggtgtggtgaccgtgtgtggttggcaaggctgtcagcagtacacacagtgcagcaaccaccgtgtgtggtcagcaaggccatccacagtccacacagtgcaataaccgtgtgtggcgagcaaggctattgacactgtacgccgtgcagcgaccgtgtgtggtcagcaaggccatggagagtgcacacagtacagtgaccacctgtggtcggcatggccattaacagggcacacagcacggtgaccatgtgtgatcagcaaggccgtggatagtgcccgtggtgtggtatccatgtgtgatcggcaaggccatggatagtgcatgtggtgcggtgaccctgtgtgattggcaaggccatggatagtgaacgtggtgcggtgaccgtgtgtgatcggcaaggccatggatagtgcacgtgttgcggtgaccatgtgtgattggcatgaccatcgacagtgcttatggtgtggtgaccgtgtgtgatccgcaaggccatggatagtgagtgcacacggtgcggtgaccatgtgtgatcagcaaggccatggatagtacacgcggtgcggtgaccatgtgtgatcggcaaggccatggatagtgcacgcggtgcggtgaccgtgtgtgatcggcaaggccatggatagtacacgcggtgcggtgacggtgtgtgatcggcaaggccatagatagtgcacgcggtgcggtgaccatgtgtgatcggcaaggccatggatagtgcacgcggtgtggtgaccgtgtgtgatcggcaaggccatggatagtgcacgcggtgcggtgaccgtgtgtgatcggcaaggccatggatagtgcccgtggcgtggtgtccatgtatgatcagcaaggccatggatagtgcacgtggtgcggtgaccgtgtgtgatcggtaaggccatgatagagcatgcagtgcggtgaccgtgtgtgatccgcaaggtcatggatagtgtacacggtgcgatgaccatgtgtgatccgcaaggtcatggatagtgcacacggtgcggtgaccatgtttgatcggcaaggccatggatagtgcacacggtgcagtgaccaccgtgtgaacaggggaggactggtgcctcggctcagccttctgtgtggctgcttacaggggcttactaacgggatagaataggtgcttagagaaagtgccacactgaagtgaattaaggatgccaggtggggagaggggccaggaagtggcctgggatgcaagtgt

SEQ ID NO: 14654 - DNA, 1391 bp, Artificial sequence
  DNA replication origin
cagctggctggcctgcctctgttccgacctcccctgcctggcctggtgttctgggcgcctcctccgctcacatcgccgcttcacctgcttttgctatctgcactttccatgtcctgctccttctcccagctggtggtgcctctgagaagaggactgagaaccgcctgtgaaccccgcaatttcgtgggtgtggtggaagcaaaggcagagcgtgtgagtttagtgggcgtgcgccactctttcaagaagttttgttacaaaaagatgcaaaggaagtgaagagggaaggggtttgcaggttgggagaaataacagcatttgtgttctttgttgttgtgacggttttgagccaaaacatgacaaacgggacagaaggaagacctgatggagcgtgtccttgagaaggcgagaggcatggggttggcctgctgggggatcggccttccatatgggggttcctctccagcagcctggggttctgaggaaggcaggcctgcagcaggtgccgggtgccgggaagcaggagacatctctgttactccactgtcctcagtggggagccacggctgagcgtgagaaagggcttataggctgaaggccaggcagacgggaatggccaggcagaggaggggaggacgagccgggtagaaacagtggatagaaacacggagggccacacggccaacggtcaggggactggcacaccagccagattcacccgcggcgatgccggtgcagagaagctcggcatctgaatttaacccgggttgtggtttgactcagtctgacgtggagagaagggccagggagtcacgggggggtggtgggctgtgtgctggtttaggggctgggacatggaggggtgaaggcgggagtcagtcgcatccgctgggcaggggcctggggctgcagacaaggtgggaggtggcagctacggaggaagctgcaagggattctgcagttccccggggagacaggagcccaagggaccggggggtgagggggttggaaggggcacctgtggatgtcctgagacttccaggaagtgggacaggatcagtgatggagatagagacagagtcatcagggccgagaggaatgacagtaacagcgaggttgaagtgggcacccccgtctagcagcacggggtgtggagctggcttgtggacggccagggaacaggacgctttgaggtggcagccaggggcagggatgcttttgatcgccaagggagaagacttgatgcagagtttcaggagcctccatgacttccccatctgaagaccttttttactttaatgggattgaagtgatcaccagaatagttaatggtgtgctccgttcctatttctctggtttttctaaggtccacaggctgcagacatcgtttg

SEQ ID NO: 14655 - DNA, 962 bp, Artificial sequence
  DNA replication origin
aaaaaaaaaagaatttgaagaggattagtgaatctgtcctctaaaaagaaaagtagatattgtttaaaggaaattatgaaaatatttacatgtggcaaactaataattggatagtaaatcatttaaaaatctcttgcctctactgtttctcctactattcaaggagcaaggagtctttctgtagtctctgatttcgcagttattgcagaaatggccaggtgcggtggctcacacgtgtaattccacctgcttgggaggctgaggtgggagaatcacttgacccaagagttcaagaccagcttaagcaagatagttagatcccaagtttcataaaaaaagaaaataaaaattattgccaaaatgctacaagatattgcttgagcttggctttgaatatcaacagcaaagcctagaaaatgaaccacagagaactggcaccacgccttggattgcagagaagaagcgatgatatcgatggcctcactgatacagtgatgggctggagtgcgctggctgagggaggggtcattgggtgatgatatcaacgccgtcatcggtacagtgatgggctggagtgcgctggctgagggaggggtcagcgggtgatgatatcaacgccgtcatcggtacagtgatgggctggagtgcgctggctgagggagggggtcagtgggcggagggcagcatcttgagggctggggagaagattagccagagtaggagagtcagagagacaggagaggatgggggagcttggacagtggaggccagctgtgccaagagtgtggtgagcctgggcaggggcatttgatggcatcgtaagaggaactatctggtcagtggtcctgcgatgaaaaagctgtctaggggctgagagagctctgaacatgacaaaggagatcagtgtcccgatcctgagccctgcctaactcctgcaattttgggcaggtcgtgtcccctcc

SEQ ID NO: 14656 - DNA, 1046 bp, Artificial sequence
  DNA replication origin
gatgatatcaacgccgtcatcggtacagtgatgggctggagtgcgctggctgagggaggggtcagcgggtgatgatatcaacgccgtcatcggtacagtgatgggctggagtgcgctggctgagggagggggtcagtgggcggagggcagcatcttgagggctggggagaagattagccagagtaggagagtcagagagacaggagaggatgggggagcttggacagtggaggccagctgtgccaagagtgtggtgagcctgggcaggggcatttgatggcatcgtaagaggaactatctggtcagtggtcctgcgatgaaaaagctgtctaggggctgagagagctctgaacatgacaaaggagatcagtgtcccgatcctgagccctgcctaactcctgcaattttgggcaggtcgtgtcccctccagctccgtcaaccttaaaagcggtgggggggggggttggattggatgcctctggggtttcttctagatcatacctattctgtgtcaactggaggtcactggctgtttggggagagccctgaggatgaaggccaaggcaaggggtggagctggaattggtgaagatgcaggaaagggagagaaaggtggctttggcttgaggagggtcccaagagccatttcttcctggtggaccctcagagatgtttggagtcttgggggaagcatctagaaagtgaggtggggtaaaccacggaggaagggagggaggacgcagggagagtcaaaggtgctcgggcagggagatgggtgtttgtgggagcaggagacagtagatggggaagtgaatgagaaatgtggggcgttaacggagctccactcggatgggttccatcttcccagctaagcaggagtttcagggaaagcacagaggacactgtgtggggcaaatgccatgggggaacatgaggaattaagggccaatgcatcaagcatttccagaaaagcataaagagccccactcagaatgaagagggtgcatttacactgaaattcatgtcctgccttgctgatttttctc

SEQ ID NO: 14657 - DNA, 1617 bp, Artificial sequence
  DNA replication origin
ctgcagtccttaccaacagcaccgcccagacccgggggaccaagggcggcgagcactctctctgggggtcgacagcagccccacgcccgccctcagggatgcaggcggagcgctctgccattcctcctgggtttcctaactctaccccacactttgtaaacagctcctctgagcaggaaagagagaagcggccatgttctgagatgtcagagttctccgctacagaggacaggggagggagtgaaaatgtttccacaaagaccggcctacaaaatgggtgttcagaagctttgcttctggaggtaaaatcctgagtcattcagaaaagcctggaaatcgaattccacggtaagagtgcttgccatgagccatttatcaagcagggtctcaaggggacagagagttgaacaaaatttcctgccctaaggagcttataatcggtatggaaacattcattgaaatcgagcctaattttccacaggtcctggatagcagaggttccctgcttttggtggagacagcggtgcagtgcagtctgtggtgtagggcataagaggggtacctgcacgggacaagaggggggtgacgtggacttaaaaaatgaagagaggcgacctggtagctgccgcagcagacggaggatcagtgctctgaggggaaatgccattgtgaagctgtgggtgacggccacctcctgaggaagaggcatcagaggaggagacagagacaggagaagactgcagcccaggagaacggcccacaagttccctggtgtttgcttgaggatggatctccgcggcaccaagtcagggcagccacggcgcacgagtggagggaggagtccctgaggcgaggagcgatctttcagggcgcacagttttatggcgggggaggctggaaaggacctagtgggggtgggggatgcggggtgagtggatgggacaagagtgagtgcggggggatggagggtgagagggtgaggatggggggtaagtgggtgggaatgggggtgagtgggtgtgaagggtggggatggagggtggttggttgggaaagaagggcgagtctggtggaaatggagggtgaatctggtggaaatacggggagaatctgcgtcctgctcactgtggacttggagagttctcccacgagtatggctttgcctcccatactccctgtgtcagggaaaggaggaggtcgtacctctgtcgggacagacgtggtgactcaagcgggagcttctcacgcactggacgtggcacagcctgggcagcgccggcccctgtccttcctgcggacctgtgaggagcatccggctatctgcactggctcagcctcgcccccgggcaggtgggtcacggttgtgtgaccttgggcttctgtgatagacatggctgtttccgctgtctccggacatcagtgtacgctgtggacaaatgcagccggtctacgtgaggtccgctctgcactaaggacgggatgggctgaaatgcaaactcgggtccagacatagctggaagatgagtgacccgccgctgggactcaggaaaagctactgttttggttgtgatccaatagataatatttaggctaccaaacatctataaaactaccact

SEQ ID NO: 14658 - DNA, 1300 bp, Artificial sequence
  DNA replication origin
agagcccgccagccgcggcggagcaagatggccccatttttcgcgcccttctggtttgaacgcgtaactccttcagtgccgggaggagcgtctccgcccacttccgccgggctccctgcggaagctttttcccgggcagagtccctggggtggaagagggggtaccctgggaacgccgccttgggacttttccctgagttcgcgggcgtccccgcaggtcccgctgcttccgaggcgcgccgagcaggacgcacacggaggacgcgcaagcgccctggctccgcgccccggactggaagggctgagacaggacctgcgggggtcggcacccaccccaggtgtcctcccttgccctccagctgggcacggactgggtgtcagcattccccagccctgcagcaccgaaggcttttcgtgcaagggaggctgccgcaggacgctcggggtggtgacagccggacccagcctgggcgctaagggctgcctgagcccggaccccgcggtctagagctgcagcgtctgcagctgtacctcagggcagttttcccagtttccctaaaatccgcggcttgtgttcattcatccacttagaactttactattggaaaacctaagtaacagttgtgtgaaacgatgcctgtgtgcggtgcctctaccagcgcaccgcctccaagatcagcctcagacaaccctgaggaggccgtgctaggagtattggggaggcccagagttccaggccagggagttccccatgtgaaagtaggagaaaagggaccccacagagagagctgtgaccccacagggactaacggtttcgtagtgcggagttactgactgcggagtgcacattctctctccactgcgtaaccaccatcaaaaacaaacaagcaaacaaaccagagaggaggtttcatcgttctcgaggatgcacaagatgctaggcgcttcacacatgtcgtatattgcccaacagctctggaaagccctgacaatgtcatttagtgaatgcctgtccctgttgccagaggctctgctggctcccagcctgctcctaggagactcttgctggtgatggggacactgtgttggttggttactgttttgttttgttttgagacaagagtcttgctctgtggcccaggctggaatgcagtggcccaatctcgactcactgcaaactccgcctcctgagttgaagccattctggtgcctcatccatcccgagtagctggtattacaggcacgcagccagcaaacttgctcatttttgtatttttagtagagaggcccagactggtct

SEQ ID NO: 14659 - DNA, 931 bp, Artificial sequence
  DNA replication origin
ggcggatacatctcccctgcttctgcgaggggatcttgcatgcgtggggcggggggatcgtgcatgggcgggaggaagtcaagcaccagtcgggaggggggggaaccgagcatgggtggaggaaaatcatgcatccttggggggatggtgcatgcgtgggcatctactaaggacgggaggacgtgctctgcaggtgggatggccaccaccgtgcgtcaccggcgcgcagtgctgggcgcaggctggggcagtgcccgcccgggcataggcagcctgtgcggctcccggcgccggggtggggttaggggctgcaggggtgagcacagcctcgggctgccgcactcacgcgcgctctgctcggccgcctgcagcagggccgagagccccaggagcctcgcgtgcatcttccgtgccgaccccgcagcctgcgcccgccccttcccctgcacgcggccccgcgtcggggaggtttccggcccggggcccgactgcgggtggcatttctggctaagccgttaggcgcgaattgtatgtctggtttattcgtagtggccagcaggggagggagggaggatgcttggggtttctggcttccagggtgggtggggacgaggtggtggagtccagctcaggtccgggctcctgataagggcagaagcgggttctgcgctgcccccaaccctgtaaccgccaggaaagcgcttggtgagcgtcgggactgcgcaggttcctcgggaggtggctaaactggccaccgcctctggggccgcctaaagcaagtccgttaaccactagtcagggaggaatactgtgtttgagtaaatatatgtagagttgggttagaatcattgattgggtctttttgaaatcttacagttctgtgtccagaaaacacagggcacgttacccggtatcgtggtctacacctcgc

SEQ ID NO: 14660 - DNA, 1389 bp, Artificial sequence
  DNA replication origin
actgcgcaggttcctcgggaggtggctaaactggccaccgcctctggggccgcctaaagcaagtccgttaaccactagtcagggaggaatactgtgtttgagtaaatatatgtagagttgggttagaatcattgattgggtctttttgaaatcttacagttctgtgtccagaaaacacagggcacgttacccggtatcgtggtctacacctcgcccacaaatccatcccaggctgtatcctcatggaagctttttccagatgtgcttgagggttaagatcgcaatgtgcaagaagaaaaagtgcacattggaaaaccttctcttcggagatatctatatctatatttatatatatttacagatatggagatatatacacacacgtatctgaaaacattctgacgttttaaaaacggtaagacagacttttattcagaaccatttccttagatgtaagggactgcactgaggttttgcagcaggggagagagattggggtccgaaaataataaggaaaagtggggatttatagccaaggagcagtgtgggggacggtggatggaaagtcattgagaaggggacatcaagtgggggttctggcttccctgacctaacaggattcctgctgagggtgggccaagttgatccacatcggggatgggggtggggtggagcaggtgttggaatttggtcagatatggagggtattcagacacctgaggtggggaattgggattaaactgacttagcaggattcttgctaaaactagactctgcaggaacagaggaaggaatgcccaggttgggcccagtcgtgcagagagctcggaggaggctgtccagagtctgatcagggagacattctttgtcattcatgtatatacccatatattgtaataggctgttcttgtatgactataaagaaatacctgagactgggtaatttatcagaaaagaagtttgattggctcacagttcttcaggatttacaggaagcacggtgctggcatctgctcagtttctaggaaggccttgggagcttatgctcataacggaaggtgaaaggggagcaggcacatcccatggcgaaagcatgttcaaattaacataagaagaaagagaacttggccaggcacgatgtctcatgcctgtaatcccagcattttgagaggccaaggcaggcggatcacctgaggtcaggagtttgagaccagcctggccaacatggcgaaacgctgtctctactaaaaatacaaagattagctgggtgtggtggtggacacctgtaatcccagctacttgggaggctgagacaggagaaccgcttgaacctgggaggtggaggttgcagttagccgagatcgtaccattgtactccagcctgggtga

SEQ ID NO: 14661 - DNA, 2726 bp, Artificial sequence
  DNA replication origin
gggcacatgacgtcaggacttcctgaggctgtgtcacgggtgcgcatcctccaccttgacaaactttctaaattaactgaaacctgtctcagattttgggggttcccatacctaacgagtcacatcagtcaaatcagttataacactttgccgagtaagttcccataaacgttttattaccatgtttgccataattttaagggagaaaaacaagggcccgagagttttaagtccttgtccaggtagacacgcaggtgggtggtggcagaggaactggacccaaggccttcgccttcacctctctggatggtttctagtctgttcagcttcaactgtgacatcctttctgctccaaagcctttcaagtgtccagttgtacctgacttctgtcttcttgtacatatattctgattcagccctgagccatactctaggccacagttggaggctcttcaatccacagaaagagcaaaaccaccttatgagagatggaggcagatggaggcagccaaggaaaccatgtgtggatgggccagtcaggctccttcacgctggccggctggacgaggtgactcaggtgtcccatccatgacacctccaagagcaagatggagaatgaggaaggagactgagatgagctgagttctgattgtatgtcaggggctggctgggctggatgagtgccacataaaggttatctcactgagtcctcacacctgtccgggggggtccatttattctactcactttcatacacccaagaatgcaagaatcagagaagttgtgcagcttgtccaaaggcccaggtctgtctgacttgagagtcagcctgtggtttcctgccccacgtggggttcacggtgacctgctttggtgctgggtcatagtcgctggatgagagattctctagtagctggaggaaggggatctaaggggggctgggctcacagaacatggggaggtgaggaaaaacacactagaagctctggctcaggtggaggcaggaacgctctggggtgaaatgtgttgtcaaccatgggatgacggctgccccgggacaggacatgtctaatcacactctgccctggtttctgcaagagtcactgggctggttacgaagctattgtttctcagccccaagttccctactcagtacctgctttgcggtggggcggatctgggaaggtcctgctcagctctgcccacagggcagggagcgggtagggaggctggtggggagtgggggaggctggtggggagtgggggaggctagaagggacgtggggaagctggtggggaaaagggaggcttacggagagtggggagcctggcagggagtaggggaagctggtggaagaggggaggctggcggggagtggaaaagctggcggggagtagggaggctgatagggagtggggaggctggcgtggaggtggggatgctggcagggagtggagaggctggaggggatgggggagtctggcagagagtgggggaggctggcagggagtgggagaggctggagggagttggggaagctggtggggagttggggaggctggtggggattgggggagctggtgcagaggtggggaagctggaggggagggtggggaggctggcggggagggaggctggctgggaggtggggaggctggtggggacggaggaggctggcagggagtggaaaggctggcggggacgtgggaggctggcggggacgtgggagcctggcggggacaagggaggctggcggggaggggctcctcctgtggctgcttcctgaggcctccaaagtctctgagcaggccccctgacctacgtgtaccccgacctggcagcagcagtttcttcttgtggcagcagctggatttgattttgcgtgtttcccacttagaatcagcctcataataccctgttgggactcagtaagggcctgtgaggtgaggcaggcgtgttagctgggtctgcatctcttgttcttcctgccactagcagactgcctctaggcaagtagcagacccagaagcatgatttacccccagggggtggtctgttattcactccttgttaggtcgctatcagtctgcatggaaagtctgctgtgaataggactctgctagacccaggggtacaaagtgctctgagacgcagggctgctctgggctgcgctggggtccaggtgtgagaggtggtagaaggtgcagggtgcgtgtgcaagcagagaatgctcaggaggtttcggtggtttaaggggagaatgtgtcaacttaacataatagaaagggtcagaaactagtttacagagggtttattcaagtgcagaggttgaaaacgggacatctctgggaagcacagattccaaagaatggaagtcagtgttaccaagtgtagagatttgggattgctttatataaacaaagcttaggggaatttcacagaatttcaacatctgtgtaaggcttaatgcatagttccaatgatctgattacttgaggggggcctcttttggaaaggtatatctaacattccacactgccatctaggctgagttatggtcgggactcttaaagaggtggtaaatctgtaacaaaggtctgtgattagaaggcggagatctggtctccggtgtttcctagccattacagaaaaagaagaatgaggaagagttaagctgtaatccaagcaacagaattgcaaaacatgttccatgacccagatcata

SEQ ID NO: 14662 - DNA, 1256 bp, Artificial sequence
  DNA replication origin
tccaagcctgactttgccactttctacctgaatggacttgacaaacccagcacgaaaatggaggcttcatttcctcctccataaccttgtggcagctgtctcaaaacttgactatgggacctaacaggattcttcataacggtggtcagagacttagacatcaaaggtggggaataaataacacagtcagataggaagggtgggggggtgacctagcaagtgggggtgacctagtgagtgagggggtgacctagcaaatggggggtgacctagcaagcggggggggtgacttgacctagtaaggggggtggcctagcaagtgacggggtgacctagcaagtggagggtgacctagtaagtgggggtgacctagtaagtgggggggtgacctagcaagtgggggtgacctagtgagtgagggggtgacctagcaaatgggggtgacccagtaagtggggggtgaactggcaaggggagacgtgacctagcaagtgggggggtggcctagcaagtgagggggtggcctagcaagtggggggatggcctagaaagtcgaggggtgacctagcaggattctttgctaagatggggctggacagaccaaagacagacaggacctacttgaaaagatggctcagaggagcctgactaaagtttggtcaagggcagagtcttggttagcgttcctgacctgagacccagatgatgaaagggctcaattcgtgcagatctcaggggcagaattccagaaatggaggcaggggagcaaatgcaaaggccctgaggtgctaagacggggtttgtgctcggagccacgaagaaggccagggattgggggctgcaggaccagtcagagctgtagtagggcccagagcacagcggcctgcaagggccaggaggggcttctcagtgcaatgaagtcactggaggatgttccttagaagaaaggcatgactcctgctctgtctgctgtgtagggaatgcagtgcagcagatcatgagaggaggcagggaaggggaaggtgtagtctggggctggatgggaatgctccatgtcacaatggggaccggcgtcacacaggtgaacacattcgccaaaacatacctggctgaactcccaagattggtgcttttcactctgcacattatgcttcaatacaaattgtaaaatataaaacgtaagctttatgaaaaagtccatgagatctagaaaatgaaaattaacaagtcagagggaggagggagtcaagggtcac

SEQ ID NO: 14663 - DNA, 1845 bp, Artificial sequence
  DNA replication origin
cgcgtcctccccgtcctcgcagtcctcgggctgtgcgcttcccccctccagcaacagccgtagcctcttctcttcgggagggacgtcgtcctcctccctcctgggccggccatccctgcctcggggcttgccagtggcttcggagctgccggaagggctggccatggctccaggggctctgcctgcacttgggaagaagaagcacccggcgcgagcggcctctcggcggagctggggcgtctgagcgcgggctcgttgggtccgcgcggcgcggagctgggcatccggctggcgcgggctcctccgcgggccgctcctggctctctggcgccctctgctggcctctcccgcgcagcgcggacacgccgggcccgggactgcgccgctctcacctgtcctggcccaggcggtcgctgtcccttgcccgtggccaggcccgctctggccaggccctgcacctcctccccgccccagccaggttgcaccccgatagtctccctgcccaaggaggagagaagacaagggacgcccggatagggtggatatcggccacagccaccttgtctttgctcttaccctgtttcttccatgatttggagggggtgggaaacccgaggctgctcaaaactcgtggagaattccgcctgcaggatgacatgaatgcaccttcgcattgcctaccaacagatcttttttgagcatcactgtggaccaggcgtggtgatgggggaggggatattgcggtgaacatgacaggcattgccttcatccagtggggctcagcgctgggtgagaaggcattgagaatggacattgtcaattcggccaaaggaggccaaggagaagtgctgggggcatgggaactgaaaaagacaggaggctcagccggtcttgcagctgggagagggacagcagcagcggctgttccaaaggaagcaacagctgagagaggtctcagagagttgttctcagcccagtggagggtgttcaggcagagggaacagcgtgtgcaaaagcccagaggctgggaaagaagcagaaagaggactgtggggctggagcgtggtgggcaaggggcgacaggcgtggtgggcggacagattgcctgggacccagccgtgcaggggcagaggagataggggatccttgcagaccctcagccagggctcaggcacagagacagtgcaggtgggcaaagggaggagacgtggagaaatattttggaggcatgccctgatgaatgagcccaggatgcacccttagtgtcagtgtggagctccttccttggctgtgtgatgagctgaacccgggcgtattttctggacatcgaagtgctacacccagagtccaggacaggctaagtgagcaccagcagctcctggcccatctcaaaagcaggagagacaggggagactggggaggccagggaggaaggggaagccaggaagtcaggagaggccagggatgcagaggaggccagggagtaaggggaagccaggaagtcaggagaggccagggatgcagaggaggccagggaggcagcggaggcaggacaggctggggaggctgtgtcctttccatgattctgcccaggatcctaggcccctgtactccctgagcttccccaccgcaagcgctggaaccatgttgcacaatggtctccccactgagctcctgatggcagcccctacactgctgtgctccctatttcaaccctaacagctctcacagtgggcagcacatagtaggtgctcaggaaacactggtgggagagcacgtgggtctgctcaactctttcctctctcctccagctctcccctgtcacgaaataattctgataacgac

SEQ ID NO: 14664 - DNA, 1166 bp, Artificial sequence
  DNA replication origin
ggaggacgacgtccctcccgaagagaagaggctacggctgttgctggaggggggaagcgcacagcccgaggactgcgaggacggggaggacgcgctgcggccgggcagggaggagaccggcacctagacaggtggcgacggcagaggagtaagtgacgcgggcgcgggggtccggggctgccgggggcgcggaggtgccggggacgcggggtagaggcggcgggaggctccgtggccggtcccgggttgaagttggtaattgagcggcaagtccggcgggcgcggagtgacagctcgtgacggcctccgagacgccagctgccccttctcggctgtgtggcttcgacttcctgattctcccacgaggtccctggctgggatacccgctggactctgtggctggccaaaaggggaggggcagccccgtgtcctgggggcccccagcaggggaagtggcgggtgttgcgctgggcatcctgtctgggacatctgtctgggagtctgtcggtgcctctcacctggcgaggggcatgtggtgggggcaggggggaagtccctggcgccaggcttggccaagccctgctctgctgggctgcgggctggtggcgctcacccagctcctcacctgtcccgcatcttcctgtttttttttccctttctagttgggcagccagagttgagaggaggcagatggcttccatcccagaaattgttctctttccatccctacagagagggacagagaggcaaagttccttgcatcccccggggcgctgtccctatgagctcccggtgtcctgcacacgtgggcccctgagtcaccgggcctgtgtgtgtgggatggggctccgtggccagcctggcctcctggggttcactttctgctttcctaccccaactcttcctgtgtggctttgctggccttccactggggaggcacgtgagtttggagggcagatgaaggcctgctggagagctgtacccctcagtgagtgctgcccccttgatggtttttgatggataatggggttgacctctttgttccttccacatgtttttatgtttgaccatttacttaactgagcttgtcttaataattggattcgtggttaatgagccccacatgggagagagggcggcctgcattctgaacccatttaggcagc

SEQ ID NO: 14665 - DNA, 1147 bp, Artificial sequence
  DNA replication origin
aaagttccttgcatcccccggggcgctgtccctatgagctcccggtgtcctgcacacgtgggcccctgagtcaccgggcctgtgtgtgtgggatggggctccgtggccagcctggcctcctggggttcactttctgctttcctaccccaactcttcctgtgtggctttgctggccttccactggggaggcacgtgagtttggagggcagatgaaggcctgctggagagctgtacccctcagtgagtgctgcccccttgatggtttttgatggataatggggttgacctctttgttccttccacatgtttttatgtttgaccatttacttaactgagcttgtcttaataattggattcgtggttaatgagccccacatgggagagagggcggcctgcattctgaacccatttaggcagcacgggcagccctcctcgccgtgggctgcatcagagcccccctgcccagtcttggggttgctcctggatgctgtctgggaggcttgctcatggtgacatcctcatctccctgtgcacgttaccgcattcagagcttgggtcacctggacactgaactcaggtgaattttctctgagatcccgggagaaggaggacagttctctggaaggttttccagggccgatcacggaaaggatgagaagggagaggtactggtcgggaacacaattacggtggcagtgtaacaccacgaaactttattgcgtaaagtccctgtcactccctctacctccttcttttacgtggactctgccaaagaccaggataccataatgcagtagggtgaccaagcgtagtgggaccttgggaacaggagtctggagccaggcggctggggtttggatcctggttctgcccctccttcgctggctgacatggcacaagccacttaccctctatgagccttactgtcttcagtggcaaatggatctgtctagagaccccagtgcctgcggttgttactgctgagattaagggaaactcgtccatagaagcacttagcgttgtgcctggcacatagtgtatggcggataaatgggacttaggactgaaactcatgccttagtgtgtttttgcagtgatgttttgttctggggtgcatcacaagagacaaggtccttggcctggcgtg

SEQ ID NO: 14666 - DNA, 1610 bp, Artificial sequence
  DNA replication origin
acagccgcagcctcttctcttccggagggacgtcgtcctcctccctcctgggccggccatccctgcctcggggcttgccagtggcttcggagctgccggaagggctggccatggctcgggggctctgcctgcacctggagaagaggaaggatacggcgcgagcggcctctcggcggagctggggcgtctgagcgcgggctcggtgggtccgcgcggcgcggagctgggtataggggccggcgcgggctcctccgcgggccgcgcctggctctctggcgccctcttctggccgctctcgcgcacctccgccacgccgggcccaggcctgcgcagctctcacatgtcctggcccaggaggtcgctgtcccttgcccatggacaggccctctctggcaatgccctgcacctcctccccaccccggccaggttggaccccgatggtctccctgctcaaggaggagagaagagaagggacgccacgagagggtggacatcggccaaagccaccttgtctttgctcttaccctgtgtcttccatgatttggaggtggtgggaaacccgaggctgctcaaaactcgtggagaattcctcctgcaggatgacatgaatgcaccttcccattgcctaccaacagatcttttttgagcatcactgtggaccagtcgtggtgatgggggaggggatattgtggagaacatgacaggcattgccttcacccagtgaggctcagctctgggtgggaaggcattgagaatggacattgtcaactgggccaaaggaggccaaggagaagtgctgggggcatgggaactgaaaaagagaggaggctcagcacgtctttgagctgggagagggacagcagcagcggcttttccaaaggaagcaacagctgagagaggtctcagagagttgttctcagcccagtggagggtgttcaggcagagggaacagcgtgtgcaaaagcccagaggctgggaaagaagcagaaagaggactgtggggctggagcatggtgggcaaggggaggaaggtgtggtgggcagacagattgcctgggacccagccgtgcaggggcagaggagatacgggatccttgcaggcccccagccggggctcaggcacagagacagtgcaggtgggcaaagggaggagacgtggagaaatattttggaggcatgccctgatgaatgagcccaggatgcacccttagtgtcagtgtggagctccttccttgactgtgtgatgagctgaactcgggggtattttctggacattgaggtgctacaccaagagcccaggacaggctaagtgagcactagcagctcctggcccacctcaaaagcaggagagacaggggagactgaggaggccggggcggaaggggaagccaggaaggtaggagaggccagggaagcagaggaggcccgggaggcaatggaggcaggagaggctggggaggttatgtcctttccatgattctgccctcgatcctaggcccctgaactccctgagcttccccaccccaagcgctggaaccatgttgcacaatggtctccccactaagctcctgatggcagcccctaccctgctgtgctccctgtttcaaccc

SEQ ID NO: 14667 - DNA, 1355 bp, Artificial sequence
  DNA replication origin
cccgctctggcaatgccctgcacctcctccccgccccggccaggttgcaccccgatggtctccctgctcaaggaggagagaagagaagggacgccacgagagggtggacatcggccaaagccaccttgtctttgctcttaccctgtgtcttccatgatttggaggtggtgggaaacccgaggctgctcaaaactcgtggagaattcctcctgcaggatgacatgaatgcaccttcccattgcctaccaacagatcttttttgagcatcactgtggaccagtcgtggtgatgggggaggggatattgtggagaacatgacaggcattgccttcacccagtgaggctcagctctgggtgggaaggcattgagaatggacattgtcaactgggccaaaggaggccaaggagaagtgctgggggcatgggaactgaaaaagagaggaggctcagcacgtctttgagctgggagagggacagaagcagcggcttttccaaaggaagcaacagctgagagaggtctcagagagttgttctcagcccagtggagggtgttcaggcagagggaacagcgtgtgcaaaagcccagaggctgggaaagaagcagaaagaggactgtggggctggagcgtggtgggcaacaggagagaggtgtggtgggcagacagattgtctgagacccagccgtgcaggggcagaggagatagaggatccttgcaggcccccagctggggctgaggcacagagacaatgcaggtgggcaaagggaggagacatggagaaatattttggaggcatgtcctgatgaatgagcccaggatgcacccttagtgtcagtgtggagctcctttcttggctgtgtgataagctgaacccgggggtattttctggacatcgaagtgctacacccagagtccaggacagactaagtgagcaccagcagctcctggcccacctcaaaagcaggaaagacaggggagactggggaggccggggcggaaggggaagccaggaaggcaggagaggccagggaacagaggaggtcagggaggcaggggaggcaggggaggctggggcggctgtgtcctttccatgattctgccctggatcctaggcccccgtactccctgaccttccccaccccaagcactgtaaccatgttgcacaacggtttccccactaagctcctaatggcagctcctatcctgctgtgctccctatttcaaccctaacagctctcacagtgggcagcacatagtaggtgctcaggaaacactggtgggagagcacgtgggtctgctcagcaccttcctctctcctccagctctccccatcatgaaataattctgataacgaca

SEQ ID NO: 14668 - DNA, 1294 bp, Artificial sequence
  DNA replication origin
aacctcactctccctagctccctggctctctggttctcttttggcctctctttttctccttatgccctggcttcacatctacattcacaagaagagaatgaagaagcccccttcccaataagagcacgccttacactgggactccaaaatctaagcacaccctgacaggcacagccagtggaatgagatctgggacagaagatcacagggcgtcacaggactgtggccggtgatgtccaagccgagggggttcaggggcctccccgagtctgtgactaaggaaaggcctgagggcagcagggcagtgtcccaagagacgcgaggatgaaggaggggtgcgggcagggtggagggccttagaagactactgatgtctaagaaatcccaaagccagcgggaggttgtggccttcctcctcctggctttgcccacaaagggccgcgaggggtgagaatccacttccgagtggggacttagacggggcactgggtggggaggggagagggtgaaaagacaaaagacacaaaagcatggcggggcaccaacctcccagtgtctgacagcgacgtagggctactgcggctgagacacgtaggtgcggggattgtgacgtcggcagtgacaccagacgccagatcctaggtgtggaggatggtgacacggagttgtgaacagaaaatatcaaagtccactccaggaaaggggcctttcatccggaaaacctgcatccgggtccgccggaacctgcggtctcaggatggggtagtgggccagaaagagggcagagccagtgtggaccaggcctcagcatccctgctctgtccccagggcgtatcgggatctgtccccacttccggccagtgcagccttggtctccgcgtttgccacaacgcgagtgttttacgtgcagtggggctaggctgcttccaccagttgcaagttgagtgtttccgacattttatggtcagggtagtcagaccacttacagtggttgatgacccggttcattctgcacaaattaaaaacagtttaggaggctgggtgcggtggctcgcacctggaatcccagcactttgggaggctgaggtgggcggagtttgagacgagcctgggcaacagagcgagaccttgtttctacaaaaatacaaaaacttagccaggtgtggtggtgggtgcctgtggccccagctcctccagaggctgaagcatgagaatcactcgagcccaggaggtcgaggctgcagtgagccgtgatggggccactgcactccaggcggagcaacagaacgagacc

SEQ ID NO: 14669 - DNA, 1663 bp, Artificial sequence
  DNA replication origin
gcctggcagcggcgggtcctccccgtcctcgcagtcctcgggctgtgcgcttcccccctccagctacagccccagcctcttctcttcgggagggacgtcctcctcccccatcctgggactgccatccctgcctcggggcttgccagtggcttcggagctgctggaagggctggccatggctccgcgggctctgcctgaacttggggaagaagaaggacccggctcaagcggcttctcggcggagctggggcgtctgagcacgggctcggtgggtccgcgcggcgcggagctgggtatcggggccggcccgggctcctccgcgggccgcgcctggctctctggcgccctcttctggccgctctcgcgcacctctgccacgccgggcccaggcctgcgcagctgtcacatgtcctggcccaggaggtcgctgtcccttgcccatggacaggcccgctctggcaatgccctgcaccacctccccgccccagccaggttgcaccccgatggtctccctgcccaaggaggagagaagagaagggacgccacgagagggtggacatcggccacagccaccttgtctttgctcttaccgtgtgtcttccatgatttggaggtggtgggaaacccgaggctgctcaaaactcgtggagaattccgcctgcaggatgacatgaatgcaccttcccattgcctaccaacagatcttttttgagcatcactgtggaccagtcgtggtgatgggggaggggatattgtggtgaacatgacaggcattgccttcaccaagtggggctcagcgctgggtgggaaggcattgagaatggacattgtcagttgggccaaaggaggccaaggagaagtgctgggggcatgggaactgaaaaagacaggaggctcagcaggtcttggagctgggagagggacagcagcagcggcttttccaaaggaagcaacagctgagagaggtctcagagagttgttctcagcccagtggagggtgttcaggcagaaggaacagcgtgtgcaaaagcccagaggctgggaaagaagcagaaagaggactgtggggctggagcgtggtgggcaacaggagagaggtgtggtgggcagacagattgcctgggacccagccgtgcaggggcagaggagatagaggatccttgcaggcccccagctggggctgaggcacagagacaatgcaggtgggcaaagggaggagacgtggagaaatattttggaggcatgccctgatgaatgagcccaggatgcacccttagtgtcagtgtggagctcctttcttggctgtgtgataagctgaacccgggggtattttctggacaccgaagtgctacacccagagtccaggacaggctaagtgagcaccagcagctcctggcccacctcaaaagcaggaaagacaggggagactggggaggccggggtggaaggggaagccaggaaggcaggagaggccagggaacagaggaggtcagggaggcaggggaggcaggggaggctggggcggctgtgtcctttccatgattctgccctggatcctaggcccctgtagtccctgggcttccccacccccaagcactgtaaccatgttgcacaacggtctccccactaagctcctgatggcaacccctatcctgctgttctc

SEQ ID NO: 14670 - DNA, 826 bp, Artificial sequence
  DNA replication origin
aagccccgaggcagggatggcagtcccaggatgggggaggaggacgtccctcccgaagagaagaggctggggctgtagctggaggggggaagcgcacagcccgaggactgcgaggacggggaggacccgccgctgccaggcaggaaggagaccggcacccagacaggtggcgacggcaaaggagtaagtgatgcgggcgcgggggtccgggagtgccgggggctcgggggtgccggggacgcgacgaaggggcgtcgggaggctccgtggccgtccccgggttgaagttgggagtgcagccttcattctgaacccatttaggcagcatgggcagccctcctcgccatgggcaggatcagagcccccccgcccagtcttggggttgctcctggatgctgtctgggaggcttgctcatggtgacatcctcatctccccgtccacgttaccgcattcagagcttgggtcacctggacactgaactcaggtgaattttctctgagatcccgggagaaggaggacagttctttggaaggttttccagggccgatcacggaaaggatgagaagggagaggtcctggtcggggacacaattatggtgtcagtgtaacgccgggaaactttattgcatgaagtccctctcactccctctacctccctcttttacgtggactctgccaaagaccaggataccagaatgcggtggagaggccaagtgtagtgagaccttgggaatgcgattctggagccaggcggctggggtttgcatcctggttctgcccctccttagctggctgacatggcacaagccacttaccctgtctgag

SEQ ID NO: 14671 - DNA, 1740 bp, Artificial sequence
  DNA replication origin
  misc_feature (1)..(531): n is a, c, g, or t
nnnnnnnnnnnnnnnnnnnnnnnnnnnnnnnnnnnnnnnnnnnnnnnnnnnnnnnnnnnnnnnnnnnnnnnnnnnnnnnnnnnnnnnnnnnnnnnnnnnnnnnnnnnnnnnnnnnnnnnnnnnnnnnnnnnnnnnnnnnnnnnnnnnnnnnnnnnnnnnnnnnnnnnnnnnnnnnnnnnnnnnnnnnnnnnnnnnnnnnnnnnnnnnnnnnnnnnnnnnnnnnnnnnnnnnnnnnnnnnnnnnnnnnnnnnnnnnnnnnnnnnnnnnnnnnnnnnnnnnnnnnnnnnnnnnnnnnnnnnnnnnnnnnnnnnnnnnnnnnnnnnnnnnnnnnnnnnnnnnnnnnnnnnnnnnnnnnnnnnnnnnnnnnnnnnnnnnnnnnnnnnnnnnnnnnnnnnnnnnnnnnnnnnnnnnnnnnnnnnnnnnnnnnnnnnnnnnnnnnnnnnnnnnnnnnnnnnnnnnnnnnnnnnnnnnnnnnnnnnnnnnnnnnnnnnnnnnnnnnnnnnnnnnnnnnnnnnnnnnnnnnnnnnnnnngaattccgcctgcaggatgacatgaatgcaccttcccattgcctaccaacagaccttttttgagcatcactgtggaccaggtgtggtgatgggggaggggatattgtggagaacatgacaggcattgccttcaccaagtggggctcagcgctgggtgggaaggcattgagaatggacattgtcaattgggccaaaggaggccaaggagaagtgctgggggcatgggaactgaaaaagacaggaggctcagcaggtcttggagctgggaaagtgacagcagcagcggctgttccaaaggaagcaacagctgagagaggtctcggagagttgttctcagcccagtggagggtgttcaggcagagggaacagcgtgtgcaaaagcccagaggctgggaaagaagcagaaagaggactgtggggctggagcatggtgggcaaggggaggaaggtgtggtgggcagacagattgactgggacccagctgtgcaggggcagaggagataggggatccttgcaggcccccagccggggctcaggcacagagacaatgcaggtgggcaaagggaggagacgtggagaaatattttggaggcatgccctgatgaatgagcccaggatgcacccttagtgtcagtgtggagctccttccttgactgtgtgatgagttgaactcgggggtattttctggacattgaggtgctacaccaagagcccaggacaggctaagtgagcactagcagctcctggcccacctcaaaagcaggagagacaggggagactggggaggccggggtggaaggggaagccaggaaggtaggagaggccagggaagcagaggaggccagggaggcaatggaggcaggagaggctggggaggttatgtcctttccatgattctgccctggatcctaggcccctgaactccctgagcttccccaccccaagcgctggaaccaggttgcacaatggtctccccactaagctcctgatggcagcccctaccctgctgtgctccctatttcaaccctaacagctctcacagtgggcagcacatagtaggtgctcaggaaacactggtgggagagcacgtgggtctgctcagcaccttcctctctcctccagctctccccatcatgaaataattctgataacgacacatggactttgagaccctcttctattactttccatatgctaatgcatctatac

SEQ ID NO: 14672 - DNA, 1549 bp, Artificial sequence
  DNA replication origin
tgggcccggcgtggcggaggtgcgcgagagcggccagaagagggcgccagagagccaggcgcggcccgcggaggagcccgcgccggcccctatacccagctccgcgccgcgcggacccaccgagcccgcgctcagacgccccagctccaccgagaggccgctcgggccgtgtccttcctcttctccaggtgcaggcagagcccccgagccatggccagcccttccggcagctccgaagccactggcaagccccgaggcagggatggccggcccaggagggaggaggacgacgtccctcccgaagagaagaggctggggctgtagctggaggggggaagcgcacagcccgaggactgcgagaacggggaggacgcgccgcggccaggcagggaggagaccggcacccagacaggtggcgaccgcagaggagtaagtgacgcgggcgctggggtccgggggtgccgggggcgccggtaggggcggcgggaggctccgtggccggccccgggttgaagttggtattttagcggcaactccgaagggcgcggagtgacagcgcgtgacggcctccgagacgccagctgccgcttctcggctgtgtggctttgacttcctgattctcccacgacgtcgctggctgggagacccactggactctgcggctggccaaaaagagaggggcagccccgcgtcctgggggcccctagcaggggaagtggcgggtgttgcgctgggcatcctgtctggggcatctgtctgggaccctgttggtgcctctcacctggcgaggggccagtggtgggggtaggggggaagtccctggcgccaggcttggccaagccctgcttggctggactgcgggctggcggcgctcacccagctcctcacctgtcccgcatcttcctgtttttcttccctttctggttgggcagcaagagttgagaggaggcagatggcttccatcccagaaatcgctctcctctttccatccctacagagaaggacagagaggcaaagttccttgcatccccggggcgctgtccctgtgagctcccggtgtcctgcaaacgttggcccctgaatcaccgggccagtgtgtgtgggatggggctgcgtagccaggctggcctcctggggttcactttctgctttcctaccccaactcttcctgtgtggctttgctggccttccactggggaggcatgtgggtttggagggcagatgagggcccgctggagaactgtacccctcagtgagggccgccaccttgatggtttttaatggataatggggttgacctctttgttccttccacatgtttttatgtttgaccatttgctcagctgagcttgtcttaataattggattcgtggttaatgagccccacatgggagagagggcggtcttcattctgaacccatttaggcagcatgggcagccctcctcgccgtgggcggcatcagagcccccccgcccagtcttggggttgctcctggatgctgtctgggaggcttgctcatggtgacatcctcttctccccgtccacgtt

SEQ ID NO: 14673 - DNA, 1626 bp, Artificial sequence
  DNA replication origin
tcccccctccagctacagccccagcctcttctcttcgggagggacgtcgtcctcctccctcctgggccggccatccctgcctcggggcttgccagtggcttcggagctgccggaagggctggccatggctcgggggctctgcctgcacctggagaagaggaaggacacggcccgagcggcctctcggtggagctggggcgtctgagcgcgggctcggtgggtccgcgcggcgcggagctgggtataggggccggcgcgggctcctccgcgggccgcgcctggctctctggcgccctcttctggccgctctcgcgcacctccgccacgccgggcccaggcctgcgcagctctcacatgtcctggcccaggaggtcgctgtcccttgcccatggacaggcccgctctggcaatgccctgcacctcctccccgccccggccaggttgcaccccgatggtctccctgctcaaggaggagagaagagaagggacgccactagagggtggacatcggccacagccaccttgtctttgctcttaccctgtgtcttccaagatttggaggtggtgggaaacccgaggctgctcaaaactcgtggagaattcctcctgcaggatgacatgaatgcaccttcccattgcctaccaacagatcttttttgagcatcactgtggaccagtcgtggtgatgggggaggggatattgtggagaacatgacaggcattgccttcacccagtggggctcagctctgggtgggaaggcattgagaatggacattgtcaactgggccaaaggaggccaaggagaagtgctgggggcatgggaactgaaaaagagaggaggctcagcacgtctttgagctgggagagggacagcagcagcggcttttccaaaggaagcaacagctgagagaggtctcagagagttgttctcagcccagtggagggtgttcaggcagagggaacagcgtgtgcaaaagcccagaggctgggaaagaagcagaaagaggactgtggggctggagcatggtgggcaaggggaggaaggtgtggtgggcagacagattgcctgggacccagccgtgcaggggcagaggagatacgggatccttgcaggcccccagccggggctcaggcacagagacagtgcaggtgggcaaagggaggagacgtggagaaatattttggaggcatgccctgatgaatgagcccaggatgcacccttagtgtcagtgtggagctccttccttgactgtgtgatgagctgaactcgggggtattttctggacattgaggtgctacaccaagagcccaggacaggctaagtgagcactagcagctcctggcccacctcaaaagcaggagagacaggggagactgaggaggccggggcggaaggggaagccaggaaggtaggagaggccagggaagcagaggaggcccgggaggcaatggaggcaggagaggctggggaggttatgtcctttccatgattctgccctcgatcctaggcccctgaactccctgagcttccccaccccaagcgctggaaccatgttgcacaatggtctccccactaagctcctgatggcagcccctaccctgctgtgctccctgtttcaacccta

SEQ ID NO: 14674 - DNA, 1710 bp, Artificial sequence
  DNA replication origin
ccccagcctcttctcttcgggagggacgtcctcctcctcctcccttctgggccggccatccctgcctcggggcttgccagtggcttcggagctgctggaagggctggccatggctccgggggctctgcctgaacttggggaagaagaaggacacggcgcgagcggcctctcggcggagctggggcgtctgagcacgggctcggtgggtccgcgcggcgcggagctgggtatcggggccggtgcgggctcctccgcgggcggctcctggcactctggcgccctcttctggccgctctcgcgcacctccgccacgccgggcccaggcctgcgtagctctcacatgtcctggcccaggaggtcgctatcccttgcccatggacaggcccgctctggcaatgccctgcacctcctccccgccccggccaggttgcaccccgatggtctccctgctcaaggaggagagaagagaagggacgccacgagagggtggacatcggccaaagccaccttgtctttgctcttaccctgtgtcttccatgatttggaggtggtgggaaacccgaggctgctcaaaactcgtggagaattcctcctgcaggatgacatgaatgcaccttcccattgcctaccaacagatcttttttgagcatcactgtggaccagtcgtggtgatgggggaggggatattgtggagaacatgacaggcattgccttcacccagtggggctcagctctgggtgggaaggcattgagaatggacattgtcaactgggccaaaggaggccaaggagaagtgctgggggcatgggaactgaaaaagacaggaggctcagcacgtctttgagctgggagagggacagaagcagcggcttttccaaaggaagcaacagctgagagaggtctcagagagttgttctcagcccagtggagggtgttcaggcagagggaacagcgtgtgcaaaagcccagaggctgggaaagaagcagaaagaggactgtggggctggagcgtggtgggcaacaggagagaggtgtggtgggcagacagattgtctgagacccagccgtgcaggggcagaggagatagaggatccttgcaggcccccagctggggctgacgcacagagacaatgcaggtgggcaaagggaggagacatggagaaatattttggaggcatgtcctgatgaatgagcccaggatgcacccttagtgtcagtgtggagctcctttcttggctgtgtgataagctgaacccgggggtattttctggacatcgaagtgctacacccagagtccaggacagactaagtgagcaccagcagctcctggcccacctcaaaagcaggaaagacaggggagactggggaggccggggcggaaggggaagccaggaaggcaggagaggccagggaagagaggaggtcagggaggcaggggaggcaggggaggctggggcggctgtgtcctttccatgattctgccctggatcctaggcccccgtactccctgaccttccccaccccaagcactgtaaccatgttgcacaacggtttccccactaagctcctaatggcagctcctatcctgctgtgctccctatttcaaccctaacagctctcacagtgggcagcacatagtaggtgctcaggaaacactggtgggagagcacgtgggtctgctcagcaccttcctctctcctccagctctcc

SEQ ID NO: 14675 - DNA, 1291 bp, Artificial sequence
  DNA replication origin
accttctttttcaacctcactctccctagctccctggctctctggttctcttttggcctctctttttctccttatgccctggcttcacatctacattcacaagaagagaatgaagaagcccccttcccaataagagcacgccttacactgggactccaaaatctaagcacaccctgacaggcacagccagtggaatgagatctgggacagaagatcacagggcgtcacaggactgtggccggtgatgtccaagccgagggggttcaggggcctccccgagtctgtgactaaggaaaggcctgagggcagcagggcagtgtcccaagagacgcgaggatgaaggaggggtgcgggcagggtggagggccttagaagactactgatgtctaagaaatcccaaagccagcgggaggttgtggccttcctcctcctggctttgcccacaaagggccgcgaggggtgagaatccacttccgagtggggacttagacggggcactgggtggggaggggagagggtgaaaagacaaaagacacaaaagcatggcggggcaccaacctcccagtgtctgacagcgacgtagggctactgcggctgagacacgtaggtgcggggattgtgacgtcggcagtgacaccagacgccagatcctaggtgtggaggatggtgacacggagttgtgaacagaaaatatcaaagtccactccaggaaaggggcctttcatccggaaaacctgcatccgggtccgccggaacctgcggtctcaggatggggtagtgggccagaaagagggcagagccagtgtggaccaggcctcagcatccctgctctgtccccagggcgtatcgggatctgtccccacttccggccagtgcagccttggtctccgcgtttgccacaacgcgagtgttttacgtgcagtggggctaggctgcttccaccagttgcaagttgagtgtttccgacactttatggtcagggtagtcagaccacttacagtggttgatgacccggttcattctgcacaaattaaaaacagtttaggaggctgggtgcggtggctcgcacctggaatcccagcactttgggaggctgaggtgggcggagtttgagacgagcctgggcaacagagcgagaccttgtttctacaaaaatacaaaaacttagccaggtgtggtggtgggtgcctgtggccccagctcctccagaggctgaagcatgagaatcactcgagcccaggaggtcgaggctgcagtgagccgtgatggggccactgcactccaggcggag

SEQ ID NO: 14676 - DNA, 1647 bp, Artificial sequence
  DNA replication origin
cagcggcgggtcctccccgtcctcgcagtcctcgggctgtgcgcttcccccctccagctacagccccagcctcttctcttcgggagggacgtcctcccccatcctgggactgccatccctgcctcggggcttgccagtggcttcggagctgctggaagggctggccatggctccgggggctctgcctgaacttggggaagaagaaggacccggctcaagcggcttctcggcggagctggggcgtctgagcacgggctcggtgggtccgcgcggcgcggagctgggtatcggggccggcccgggctcctccgcgggccgcgcctggctctctggcgccctcttctggccgctctcgcgcacctctgccacgccgggcccaggcctgcgcagctgtcacatgtcctggcccaggaggtcgctgtcccttgcccatggacaggcccgctctggcaatgccctgcaccacctccccgccccagccaggttgcaccccgatggtctccctgctcaaggaggagagaagagaagggacgccacgagagggtggacatcggccacagccaccttgtctttgctcttaccctgtgtcttccatgatttggaggtggtgggaaacccgaggctgctcaaaactcgtggagaattccgcctgcaggatgacatgaatgcaccttcgcattgcctaccaacagatcttttttgagcatcactgtggaccagtcgtggtgatgggggaggggatattgtggtgaacatgacaggcattgccttcaccaagtggggctcagcgctgggtgggaaggcattgagaatggacattgtcaattgggccaaaggaggccaaggagaagtgctgggggcatgggaactgaaaaagacaggaggctcagcaggtctttgagctgggagagggacagcagcagcggcttttccaaaggaagcaacagctgagagaggtctcagagagttgttctcagcccagtggagggtgttcaggcagaaggaatagcgtgtgcaaaagcccagaggctgggaaagaagcagaaagaggactgtggggctggagcgtggtgggcaacaggagagaggtgttgtgggcagacagattgcctgggacccagccgtgcaggggcagaggagatagaggatccttgcaggcccccagctggggctgaggcacagagacaatgcaggtgggcaaagggaggagacgtggagaaatattttggaggcatgccctgatgaatgagcccaggatgcacccttagtgtcagtgtggagctcctttcttggctgtgtgataagctgaacccgggggtattttctggacatcgaagtgctacacccagagtccaggacaggctaagtgagcaccagcagctcctggcccacctcaaaagcaggaaagacaggggagactggggaggccggggcggaaggggaagccaggaaggcaggagaggccagggaacagaggaggtcagggaggcaggggaggcaggggaggctggggcggctgtgtcctttccatgattctgccctggatcctaggcccctgtagtccctgggcttccccaccccaagcactgtaaccatgttgcacaacggtctccccactaagctcctgatggcagcccctatcctgct

SEQ ID NO: 14677 - DNA, 986 bp, Artificial sequence
  DNA replication origin
gggaggacgtccctcccgaagagaagaggctggggctgtagctggaggggggaagcgcacagcccgaggactgcgaggacggggaggacccgccgctgccgggcaggaaggagaccggcacccagacaggtggcgacggcaaaggagtaagtgatgcgggcgcgggggtccgggagtgccgggggctcgggggtgccggggacgcgacgaaggggcgtcgggaggctccgtggccgtccccgggttgaagttgggagtgcagccttcattctgaacccatttaggcagcatgggcagccctcctcgccatgggcagaatcagagcccccccgcccagtcttggggttgctcctggatgctgtctgggaggctggctcatggtgacatcctcatctccccgtccacgttaccgcattcagagcttgggtcacctggacactgaactcaggtgaattttctctgagatcccgggagaaggaggacagttgtttggaaggttttccagggccgatcacggaaaggatgagaagggagaggtcctggtcggggacacaattatggtggcagtgtaacgccgggaaactttattgcatgaagtccctctcactccctctacctccctcttttacgtggattctgccaaagaccaggataccagaatgcggtggagtgaccaagtgtagtgagaccttgggaatgtgattctggagccaggcggctggggtttgcatcctggttctgcccctccttagctggctgacatggcacaagccacttaccctctctgagccttactgtcttcagtggcaaatggatctgtcaacaggccccattgcctggggttgttgctgctgagattaagggaagctcgtccatagaagcacttagcgttgtgcctggcacatagtgtatggtggataagtgggacttagtactaaaactcatgccttggtgtctttttgcagtgatgttttgttctggagtac

SEQ ID NO: 14678 - DNA, 849 bp, Artificial sequence
  DNA replication origin
tcggagagttgttctcagcccagtggagggtgttcaggcagagggaacagcgtgtgcaaaagcccagaggctgggaaagaagcagaaagaggactgtggggttggagcatggtgggcaaggggaggaaggtgtggtgggcagacagattgactgggacccagctgtgcaggggcagaggagataggggatccttgcaggcccccagccggggctcaggcacagagacaatgcaggtgggcaaagggaggagacgtggagaaatattttggaggcatgccctgatgaatgagcccaggatgcacccttagtgtcagtgtggagctccttccttgactgtgtgatgagctgaactcgggggtattttctggacattgaggtgctacaccaagagcccaggacaggctaagtgagcactagcagctcctggcccacctcaaaagcaggaaagacaggggagactggggaggccggggtggaaggggaagccaggaaggtaggaaaggccagggaagcagaggaggccagggaggcaatggaggcaggagaggctggggaggttatgtcctttccatgattctgccctggatcctaggcccctgaactccctgagcttccccaccccaagcgctggaaccaggttgcacaatggtctccccactaagctcctgatggcagcccctaccctgctgtgctccctatttcaaccctaacagctctcacagtgggcagcacatagtaggtgctcaggaaacactggtgggagagcacgtgggtctgctcagcaccttcctctctcctccagctctccccatcatgaaataattctgataacgacacatggactttga

SEQ ID NO: 14679 - DNA, 1404 bp, Artificial sequence
  DNA replication origin
tcctccctgcctggccgcggcgcgtcctccccgtcctcgcagtcctcgggttctgcgcttcccccctccagctacagccgcagcctcttctcttcgggagggacgtcgtcctcctccctcctgggccggccatccctgcctcggggcttgccagtggcttcggagctgccggaagggctggccacggctggggggctctgcctgcacctggagaagaggaaggatacggcgcgagcggcctctcggcggagctggggcgtctgagcgcgggctcggtgggtccgccgggcgcggggctgggcatagcggccggcgcgggctcctacgcgggccgctcctggctctcgcgccctctgctggccgctcgcgcgcaccgcggacaagccgggccctggcctgcgctgcactcacctgcccccgcccaggcagtcgctgtcccctgcctgtggccagacccgctctggccaggccctgcacctcctccccaccccagccaggttgcaccccgatggtctccctgcccaaggaggagagaagagaagggaagccccgagagggtggacatcggccacagccaccttgtctttgctcttaccgtgtatcttccatgatttggaggtggtgggaaacccgaggctgctcaaaactcgtggagaattccgcctgcaggatgacatgaatgcaccttcccattgcctaccaacagaccttttttgagcatcactgtggaccaggtgtggtgatgggggaggggatattgtggagaacatgacaggcattgccttcacccagtggggctcagcgctgggtgggaaggcattgagaatggacattgtcaattgggccaaaggaggccaaggagaagtgctgggggcatgggaactgaaaaagacaggaggctcagcaggtcttggagctgggaaagtgacagcagcagcggctgttccaaaggaagcaacagctgagagaggtctcggagagttgttctcagcccagtggagggtgttcaggcagagggaacagcgtgtgcaaaagcccagaggctgggaaagaagcagaaagaggactgtggggttggagcatggtgggcaaggggaggaaggtgtggtgggcagacagattgactgggacccagctgtgcaggggcagaggagataggggatccttgcaggcccccagccggggctcaggcacagagacaatgcaggtgggcaaagggaggagacgtggagaaatattttggaggcatgccctgatgaatgagcccaggatgcacccttagtgtcagtgtggagctccttccttgactgtgtgatgagctgaactcgggggtattttctggacattgaggtgctacaccaagagcccaggacaggctaagtgagcactagcagctcctggccc

SEQ ID NO: 14680 - DNA, 1421 bp, Artificial sequence
  DNA replication origin
cttgtccgcggtgcgcgcgagcggccagcagagggcgcgagagccaggagcggcccgcgtaggagcccgcgccggccgctatgcccagccccgcgcccggcggacccaccgagcccgcgctcagacgccccagctccgccgagaggccgctcgcgccgtatccttcctcttctccaggtgcaggcagagccccccagccgtggccagcccttccggcagctccgaagccactggcaagccccgaggcagggatggccggcccaggagggaggaggacgacgtccctcccgaagagaagaggctgcggctgtagctggaggggggaagcgcagaacccgaggactgcgaggacggggaggacgcgccgcggccaggcagggaggagaccggcacccagacaggtggcgaaggcagaggagtaagtgacgcgggcgccggggtccgggggtgccgggggcgccggtaggggcggcgggaggctcagtggccggcctcgggttgaagttggtattttagcggcaactccgaagggcgcggagtgacagcgcgtgacggcctccgagacgccagctgccgcttctcggctgtgtggctttgacttcctgattctcccacgacgtccctggctgggagacccgctggactctgcggctggccaaaaagagaggggcagccccgcgtcctgggggcccctagcaggggaagtggcggttgttgcgctgggcatcctgtctggggcatctgtctgggaccctgtcggtgcctctcacctggcgaggggcctgtggtggggtaggggggaagtccctggcgccaggcttggccaagccctgctctgctggactgcgggctggcggcactcacccagctcctcacccgtcccgcatcttcctgtttttcttccctttctggttgggcagcaagagttgagaggaggcagatggcttccatcccagaaatcgctctcctctttccatccctacagagagggacagagaggcaaagttccttgcatccccggggcgctgtccctgtgagctcctggtgtcctgcaaacgttggcccctgaatcaccgggccagtgtgtgtgggatggggctgcgtagccaggctggcctcctggggttcactttcggctttcctaccccaactcttcctgtgtggctttgctggccttccactggggaggcatgtgggtttggagggcagatgagggcccgctggagaactgtacccctcagtgagggccgccaccttgatggtttttaatggataatggggttgacctctttgttccttccacatgtttttatgtttgaccatttgctcagctgagcttgtcttaataattggattcatggttaatgagccccacatgggagagagggcggtcttcattctgaacccatttaggcagcatg

SEQ ID NO: 14681 - DNA, 1001 bp, Artificial sequence
  DNA replication origin
atggggctgcgtagccaggctggcctcctggggttcactttcggctttcctaccccaactcttcctgtgtggctttgctggccttccactggggaggcatgtgggtttggagggcagatgagggcccgctggagaactgtacccctcagtgagggccgccaccttgatggtttttaatggataatggggttgacctctttgttccttccacatgtttttatgtttgaccatttgctcagctgagcttgtcttaataattggattcatggttaatgagccccacatgggagagagggcggtcttcattctgaacccatttaggcagcatgggcagccctcctcgccgtgggcggcatcagagcccccctgcccagtcttggggttgctcctggatgctgtctgggaggcttgctcatggtgacatcctcatctccccgtccacgttaccgcattcagagcttgggtcacctggacactgaactcaggtgaattttctctgagatcccgggagaaggaggacagttctttggaaggttttccagggccgatcacggaaaggatgagaagggagaggtcctggttggggacacaattacggtggcagtgtaacgccgggaaactttattgcatgaagtccctctcactccctctacctccctcttttacgtggactctgccaaagaccaggataccagaatgcggtggagtgaccaactgtagtgagacctttggaacgcgattctggagccaggcggctggggtttgcatcctggttctgcccctccttagctggctgacatggcacaagccacttaccctctctgagccttactgtcttcagtggcaaatggatctgtcaacaggctccattgcctggggttgttgctgctgagattaagggaagctcgtccatagaagcacttagcgttgtgcctggcacatagtgtatggtggataagtgggacttaggactaaaactcatgccttggtgtgtttttcag

SEQ ID NO: 14682 - DNA, 1046 bp, Artificial sequence
  DNA replication origin
aagggctcaggaggcggggccggggcagggcgttgactatgtcgtaccacatggccaggcggtgcgcggactctgggaggcggaacttaggacgggcccacttggggaggggtccagggtccgggaggcggggccgagtccgggctgcaggctgcgctcaggaggcgggccctgggaggcggagcttagggaggggccggtgtcgggagggacccagggactgggaggccggtcggggctgggctcaggggccgagacctagctgggcttggggcggggccgagacggagcgaggggtccagggcgtgggaaacggggaggggtttgaggaggggatcggaatgtggctcaagttcgggaggcgttacctgcggagggtttgaggcaggtccaggagcgagcccacggtccgccgacgcgggaccaggggcgggccccaggatccggagcttcgggcggggccgagtccgggtttggggcccggaaggcggggccagttagggcgagggtccctgggatcgtcaggtcaggccttgggctaacgtaggcactctcgcagttcctccgccttcaggaaagtctttttagcaggggccttacgggttcgcgctttggtcctggaggccttatcctagcctcctctgtatcagcgccaccagtctggggcccgaaaggagggagctttccctctgtcccccagcctttggactgtcaccaaacaagccattcgttcaccaaatacttattaagcgcctaccatgtgcctgacaagggagatgtaacggtgagaaaaactaggtgtggtccatgtcctccaggggctcaggggctcgtggaagaagtggacattgaagtatttatcacacaaatgagtataaaagtacaatagcgatatctgccacgaaggtgagcagacagagctagcggggcttgcaggaggagttttgatcttgcagggacaggaaggaggagttagctcctgcggggtgggattgggggtggtggtgatatagacgtggggacagactggaaaacaacaaaaatat

SEQ ID NO: 14683 - DNA, 1235 bp, Artificial sequence
  DNA replication origin
gcccccagcttccgccgccagctcgcggggcaggatgggtgagagcgactctggccaggccccagggacggggaccgggtctcgcggccctgaccagggagagcccaggaactcacgtggcaggagcgccgggggtttcagcacggagacccatcccgtctgcccctggactccgcgagccccgcgggcctctccgctcgccccgccgcccacctgccaggggaaggagcgcagtgtgcgcgccactaggaagcggctctcaaaaccctgcagcaagagtttggtacccgcgttctcctcgggcgtcatgatgtgggcggggccgcagcgttgccaggagatcgggcggaagccgggcctggattgaaaagggagcgggcccagggtagtgcgcgggggcagagagggggcggggcctgggggcagggtcaggaggagcgtcctgggggcggactctagggcggggccaagatgagcttataggagggcggggcctggggtggggccaggatgagcgtcatgagggcgaggcctggggtagggccaggataagcgtcgttggggcaggtgctgggtagagtccaggttggcgggtcctggggcggggtcagcatagggcgatcctggaagctggtcttcggaagcgtccaggttggtcgcgtcctggaggcgctgccttgcgtgggggcaggataagagtcctggaggcgggcattagggcggggataaacgccattgggttcaggaggcgggactcggagcagagcccaggagacaggtcctagggcggggctaaggccagacccagagaagggctcaggaggcggggccggggcagggcgttgactatgtcgtaccacatggccaggcggtgcgcggactctgggaggcggaacttaggacgggcccacttggggaggggtccagggtccgggaggcggggccgagtccgggctgcaggctgcgctcaggaggcgggccctgggaggcggagcttagggaggggccggtgtcgggagggacccagggactgggaggccggtcggggctgggctcaggggccgagacctagctgggcttggggcggggccgagacggagcgaggggtccagggcgtgggaaacggggaggggtttgaggaggggatcggaatgtggctcaagttcgggaggcgttacctgcggagggtttgaggcaggtccaggagcgagcccacggtccgccgacgcgggacc

SEQ ID NO: 14684 - DNA, 785 bp, Artificial sequence
  DNA replication origin
tataaatatgaaccactgtgcccggccatgtcattggtgccttaaccaagcctcttttaatttttcaaatggaagagcccctgtcccacagttactgctgctgagccctttcaagatgactcagtgaggagggagaaaagcggaagtggtgtaggaagaggcggggtctgggccagctgctggtcctgctctcctccctcctctggcctctaggctcccaggagtggtttggaaagcgcgccatgtgctctggaggctgtggcagggcaggcgcggattggaacccgcaccatgtgctctgggggctgcggcagggcagggggagtcctcgtgtcccctgtgcacaacacagacagaaggctgggtccacccagtgggtggtcaggtgccaggccagtgcttaccccaccatgtttgcagcccgaggccagctggctgcaggtgcagggctatgcatcaggggtcagggtgcacacacccctgcaggtctcggggctcctgggttgcttctggaagggcccagatggggcctgactggagctgccgaggggtggagcttctgggaaaaggatccctcctagggggagtgtcttgggcctggggccatgtggcagggacagagacgggtccatggcagtgtctgctcttctctgtgaaggcaaagggcctctgagggagtattacagccgcctcatccaccagaagcatttccagcacatccaggtctgcacccactggctggagggccgaggactacccccgcttctaggtgagaggccagcagg

SEQ ID NO: 14685 - DNA, 2077 bp, Artificial sequence
  DNA replication origin
ttggcctcgccgatgcggatacgcttgatggggtcggcctccagtagcagatgtgccagctgctgcaggccgggtgagtagagggacagcgcgggcagcggcggcaggtcctcctgccggtagtctctctcccgcagctgggcgcgcacctcgaacgggttgggttggtgcagcagctcgtagatgaggatgcctgtctggaactcatcgaacttgcggtactgggaagcagacacgatctcgggggccagccgggcctggctcttcttctgctgcaggtttggggtgccgcccggcttctgcttggccttcaaaaagttgctgatgatgagccggggcagctgcttctcccggggcccttccggggaggcggggccggctgcggggctgagagtgccaccagcaggcggggcggcagaggagcagggaggcgcggcggcggcgggggcgggagccggggcgggggcgggggcgggcccggggccggcctggagggtgcagtgcaccagcagcaggttctccaggcacaggtcccggtggatgatcccgtgctccttcaggtgctccagcccgttgcagagttgcagaagcaggaagcacacgcgccgctcgtacgcctcgggctccgcctggtggctggccgccgagtcccgcacgaagtcggaggcggtctgatgtggcacctctcgggtgatgaccaccacgcagtcctgctcctgggcaggggggtgtgtgggcagggcaggcacagggtccttgggcgcgtcgggggagctgagcatgctggacggcaccgaggcgacgaagtggccgcagtcctgctggatgttaaagtgcacgggcacggacgggctgcagtaggagactgttttgggctcaggggctttgcagatctgtggagagaagaagaagtgaaatcaagagtggggcccatggttccgcccagcaaagagtgtggaaacatttgagtatctacgtgcaataagcctatccacataggcttaagggtaagagcaatccatacacatgctagaagaaaacatgggacagaatctttgaggccttgggttgggcaaagatttcttaaatatcacaccaatagcatagttcacaaaagaaaagaaaaatcacaaacttaacctcaaagttctaaacttttgtgcttcaaaagacaccattaagaaagtggaaagacaagtaatagactgggagaaaatatctgccaaaatgtatgtaataaaggacttgtttctggaatttgtattaaaaaacactcttttacaactcagtaagacaaacagcccaattaaaaaaggatacagaatcatggcatggaggaaaaaacaaacaaacaaacaaaaaaacgtgggcaagagatatgaataggtaattcaccaaaaaaatttgtaaatggccacaagcatgtgaaaagatgctggacatcattattcatcaggcaagtgcaaatcaaaaccacagtgagatatcagttcacgcccactagaatgggttctaataaaagacaattccaagtgtctatgaggatgagcagaaatgggaaacctcagacattgctgatgggaatgtaaaatggggcagaccccttggagcagtttgttagtttcttaaaaagttaaacataaaatgaccatatgacccagtgagtggggtccctgccgagcaacacacagtgtggtcgggaggtattggtaggaagacatccctctgtgcacagtatggacaaattctcaagaaggcaaatagtgtttataagaaagcagcctcacttcccacatacttttccttcaaggtgagtcacagcagctgaaagaaaccagaaagctctccaaggaagaaggaaccagaaggaaccctcagaggaaccccagggcaccatctgagatgaaggtaggaaaaacaagatggaaggtctcaggcttctctgtgggaagcatagctggggatccacacaactctgtctttctcgcctcctccatttcttcttgtacaaatggcagtgccagccacctggggatctctagcaatcctagtcctcatctggctgccactcaactag

SEQ ID NO: 14686 - DNA, 1121 bp, Artificial sequence
  DNA replication origin
ggtaggagaccgccgggtgggagcggcaggcgcaagccgggcggcggggcgcgcgggccaggcggggccgggcggcggcagggactgcggaggtgcggcgtgagctggggcgggcggcgtcaccggaggcggagggggcggagccgcgctcacagctgccacccggccgccgggcccaggcagaagccacccgcccgcggccgggcacgcaccgcgcgcagaccttctgcgaacaatgctccggccgggcggctggcggctcggagaccgacggaggggccgggggagcgcagcccagaggtgagcccgcgacgcgctctccaaattcggcctctttttgtctggcgagcgtggtcgcagaggggagctttggaggggcgctgcgatcgccgagcgggctacccccggggtgacaggcgaccgctcgggaagtgggcagtgccggggccgcgtgagccccgggtggtgcccgaggtgcagggaggcgcccggccgggaggaccgaggagctggagggtgtttttgattcattcgagaatcgcgctctttaaaacggggaaactttcctacgagttccaggagggaggaccgactgttaggatggtttctctggtcttgctgctctgtctgcggccggaggctgaagcgctttgaggactgctttccaccgctagagtattgtcaagggggagagacggaaggccgcctggctgctgggaccaggacccggggggatggtttgggggtgcagggtatgcagcagcggggctccagaggcaacgagatgatgcccttttccccgagccctggctgagccctctgaaacgcatgctgtgagcacgttattaacctttgctggtatccggggacacacacacttagaacatagaatcctctgctgggcatggaggcggccgggcattcgcagcggagagcgccagctcacggtgtgtgcgtttctctcaggtaagctctccctgcacatggttttgcagagccgatagcaaagcccaatggtctaggggcgaggagttttggcgatgcattcagtgcggagtcaggctcagaaggctttcctgatcactggcctgaactattcttaacaactcctctccccttcc

SEQ ID NO: 14687 - DNA, 1536 bp, Artificial sequence
  DNA replication origin
gagcgcgtcgcgggctcacctctgggctgcgctcccccggcccctccgtcggtctccgagccgccagccgcccggccggagcattgttcgcagaaggtctgcgcgcggtgcgtgcccggccgcgggcgggtggcttctgcctgggcccggcggccgggtggcagctgtgagcgcggctccgccccctccgcctccggtgacgccgcccgccccagctcacgccgcacctccgcagtccctgccgccgcccggccccgcctggcccgcgcgccccgccgcccggcttgcgcctgccgctcccacccggcggtctcctacccccagggccccgactcctccaaagtctccaggccccgggactccctctcttgcccaccctcccgccccggaccggcaggctccgcccccagccccagacttggcgcgggctgacccccgagcccagcacccgtttgcaccccctcctcggtggggaccctgcacagctctggaggggcgagctctggcgttgcaatcctccttttgccatcatgcgtgtataggtgcccggcatcacttcatccagccggccctgcgggaccctgggaagagagggagaaggaaggggaaacgaggaagtgtggggtcgggagtggaatacaggtcagggtccgaggcgggctctgaaagccacgtgagcacagcgagcctcagctctccctacctctgggaagagggtggcgccggagggagcagggctggaagtcccggtggcggattccaggttccgctcagtccctggactgcaggattctggcaaattgcttaacctctttgaactttagttttctggatgtagaatgcaagcgttgcactgcagggacctggccttctaccatgctgggacatccaagtcttccgcaggccagtaatacacctgtgtttacaccgtttccagtgagtcattcactgagatagaacgagttcgagatagtcctcgggctaaaaaaatcttttcactgggagtataatagcttaagacccagtcagtcctgtagcttgacctgggtgtttactcggggagccagggctatggtcacctcccagggccatgccgggtgggaagaattcagtgaaatggaataggaagaggacccccctcccccacaaaacaatacctgcggcttctctcgccctctatcccctccccaggaaggcagtttattttgactccagtgaaggtcctctgccagtcagcctgcgagcccccacccactgagaggaggaagatgggcccccacccccacccccagatccctggctctcctctttgctgctgtgggtgtggacagagagggaagatgtgtatttgaggtttggcttctgtgtgaggaaagggaaaaaaggatccagggaattcttcctcatgttccagtgacacccatgcctcctaagaggacagaatctgggggaagctgtagagggatgggagtgcaatggacattccttaaggacctacccagcgctaagcaatcctatgaggagagcatcattatc

SEQ ID NO: 14688 - DNA, 1189 bp, Artificial sequence
  DNA replication origin
aacctccctgaggcctccccagaagccgaccagatgctggcaccatactcgtacagcctacagaactgtgagccaattgaacctcttttccttatgaattacctggtattcattggtatttctttatagcaatgcaataatggcctaataaaaagagtattaaccttttggagaatctcatcattttattacagttttatatgctgcttttttttttcctcctagtaagtattttgtgggaatcttccaaggacattgcaaaatctgcaaaatcatgtttttttaaaaagcagttgattagtacttcactgacgggtaaaatataatttatttaagcatttccgcatgctgggcactaaggctgctttctttcccgttacacaagaaaagctccaatgtacacctttgtacacacattgtgtttgtgcaaatacataattattttttgaaaatgtgttcttagaagaattattaaactaattcttgattctcttccaaatcctagcaggcagaagtgttttggagaacagccttagcattacccagaggggctctaacagctcagctttggaacagagggcatctcatgtgcttctcaggctcacttgagtgtaggtgtgtgtgtgtgctgtgtgtttgtgtgtgctgtgtgttttgtgtgtgtgctgtgtgtttgtggtatgtatgtatgatgtagtgtgtgatgtgtggtgtatgtgtgtgcatggtgcatggtgtgtttggtgtgtgtggtttgtgtgtgtggtgtgtgtatttggtgtgtctgtgtggtgtgcaaggtgtgtttttgtggtgtgtgtatagtgtgtgtagtatgtagtgtatgtggtatgtgtgtttatgtgtgtgtgtgatgtgtgtatatcatatgtgtggtatgtggtgtgtgtactgtgtgtggtgtgtatgtgtgtgtggtgtgtgtatatggtgtgtgtggtgtgtggcatgtgtggtatgtgtgcatttgtgttgctacgtgttgtgtgtgtggtatatgtgtatttgtgtgtggtttgtgtggtgtgtgtggtttgtgtgtggtgcgtgtgatatgtgtgtttgatgtgtgtgtatgtggtgcatatgtgtgttttttgtgtgtgtgctagtgtgtgtttgggtaggaaagaagaaggtgctgtagccttgcatcaggtggtccctt

SEQ ID NO: 14689 - DNA, 1094 bp, Artificial sequence
  DNA replication origin
tccctcagcttgcagggaggtgtggagggagaggcgcgagcgggaacccgggctgcgcgcggcgcttgcgggccagctggagttccgggtgggcgtgggcttggcgggccccgcactaggagcagccggccggccctgccggccccgggcaatgaggggcttagcacccgggccagcggctgcagagggtgtactgggtgccccagcagtgccagcccaccggcgctgcgctcgatttctcaccgggccttagctgccttcccgcggggcagggctcgggacctgcagcccgccatgcctgaacctcccaccccctccgtgggctcctgtgcggcccaagcctccccgatgagcgccgccccctgctccacggcgcccagtcccatcgaccacccaacggctgaggagtgcgggcgcacggcgcgcgactggcaggcagctccacctgcagccccggtgcgggatccactgggtgaagccagctgggctcctgagtctggtagggacgtggagaacctttatgtctagctcagggattgtaaatacaccgatcagcaccctgtgtctagctcagggtttgtgaacgcaccaattgacactctgtatctagctattctggtggggccttggagaacctttgtgtctagctcagggattgtaaacgcaccaataagcgccctgtcaaaacagaccacttggctctaccaatcagcaggatgtgggtggggccggataagagaataaaagcgggccgcccgagccagcattggcaacctgctcgggtctccttccacgttgtggaagcgttgttccttcgctgtttgtagtaaatcctgctgctgctcactcttggggtccacactgcctttatgagctgtaacattcacctcaaaggtctgcatcttcactgctgcctgagccagcgagaccaccaacccaccagaaggaagaaactcccaacacatccaaacatcaggaggaacaaagaaactccagacgcgccaccttaagagttgtaacactcaccacgagagtccgcggcttcattcttgaagtcagtgagaccaagaactcaccatttccggacacacagc

SEQ ID NO: 14690 - DNA, 1366 bp, Artificial sequence
  DNA replication origin
agtctaggtgcctaatagtaacttttccaactatgtgcaaaagacagctgggtttagtcaccgtaggagcatgtggacatctgaggaaatcactgattaactgtggataagcccgcgtcaaaaggagaacagcgcagcgctggctttggggtctggctccagctctgccatctcctagcagcgggtcgctcgacaaatggctctgacagctctaggcctgagtgcacacgtctaagggcaaggtcaccgcatgcctcgtaagactgtggtgaagcctgcacgagatgctatacgcaagtgtgtagcatgaggccttgagaccctggccacacacaagacgaggactctccacccggccacgggcagccaattcctctgtgcggcagcaccaggcaggctgagaggagctgaagcaggcagatcagacagctccctggggatttgaaattggggtgagagatagaattagtctgtggtgggggactgaagccaagagaggctggggcggtcatttgcatcgtgcgcagctgcagagcaagctggtctgaggggagaggaaaatggagcgagtcctcagggagagggtgagatggcactgagacgtgaccatgcctgatgcagagggacagagatgggggcaggggatggagcgggagacaggggaccacgccaggggcactgagatggggacagggaccaagtcaggggggattgagatggagacagggacccaagtcagggggactgagatggggacagggatcacgtcagggggattgagatggagacagtgacccaagtcagggggcctgaggtgaggacagggaccaaatcagggggaatgagatggagacagggacccaagtcagggggactgagatggagacagggacccaagtcagggggactgagacggggacagggaccaagtcagggggactgagatgggggcagggaccaagtcagggagactgagatgaggacagggaaccaagtcagggggactgagatggtgacagggaaccaagccagggggatttagaaggggacagggaccaagtcagggggactgacacagggacaggaaccaagtcagggggactgagacgggcacagggaccaagtcagggaaactgagaaggggttggaatgactgaaaaccagaaaatcaggacaggaggtaccgacaggctggtggcgggaagggagggtaacagagccaggcatgggatcccgcacagaggacacagacagaagaccgggaaggagagacagagggacacaggacagtctcgaattctagtccatacagagattctcttccccatccttggaatctggggatagctctcctcctgccagaatc

SEQ ID NO: 14691 - DNA, 1069 bp, Artificial sequence
  DNA replication origin
ctgtagcgtgcaaacaacccaagtggaaaagtaaaaggaaagctatattcaatctgcaactgctcagccacaaaagactgcccagctaggttggtcccattaatccaggcttctgcatggggcacctcgttctgcacatagcatgggaacttgtaccaagctgtggacccattcaaaggcttgcccttgggtttattgaggcagtaacagagtcccatcttctccagcagctccagcaacagctgcaagtcctgctgggcctggacatgaggcttaagcagcaaccgaatgacatgagctggcaagagcccatgcaacagaaagccctccacatactgatggagctgggtggcccggagcagttcctggctgggggtggaccgcgccatgggcggggagctttccccctccgccttgccctctccactggtccctaggagcagcttatgcagcagcaaagagggatccctctggaagaagacattgaggatgtcgatgaggcgggtgaggttgtggaagacgtgctccttgagagccggactgtcctcaaagtagagtagcttgccgctctcatgcaggtaggagagggcactctgcagtcggtcctcggtcagacccgcctgcaggcccaagcgcgccgagtcccaccagcttagccacagtcgctgggcctgaggtggctggaaatgcagttcctccagcacctgccaggatcgaggcagtactctgtgtaagttggggaagatctctcggtgctcagcaactgacagcaacttgtcccgaaggcgtcgtaagtggcgcgggtccctgcagctaacaggcaacacgggggagaggatctgcagccggtggttgagcaggtattgaaaatgggccttgcgccgtcgaaggttcttgtccgaaacgccatagtaggctgcgtgggggctggcagagcgcagctcgaagtcccgggccagtgcctcgtccaccaccttggccaagcggctcagtccctccgcgtcgtgcttctcctgcagggcgatctggcggtgaatgtccagacatttctcctccagctcacgctctc

SEQ ID NO: 14692 - DNA, 1217 bp, Artificial sequence
  DNA replication origin
accttggccaagcggctcagtccctccgcgtcgtgcttctcctgcagggcgatctggcggtgaatgtccagacatttctcctccagctcacgctctccgcacaggtctgcgtgggtgcccacgatgcacaccaccgcgtggggcactctcgccccgacccgatgcaagaaggagcccacggtggtaggaaagtggcgaggctcataggtggccaagttgaccaccagcacgtatagggcccctggggacaggaagaagggctggatcacctcataactttcatccccagctaagtcatacacgatgaaccgcaggccccgggaggcatcggccgtccagctggtcacctcgatgcccttgctcacagggggaggtgacggtgggtagcacttctccttgtcccctcctcctgggcatccctccactctctcctcggtgaggcagtggcgcagcaaagtctttcctgcagccttatgccccatcaggagcagcttgagccggggctgcaccgccggctgggaatgagccagttccttctggtaggctgcgatgtaggggatccccttcatgcagacctcgtaggggggctggatcagtgggttgtctttgatcttccacaaacccacccgggagagctggccaaagtggtcgggcagcaccgcgatctggttcccctgcagcacgagctcctccaggccggtcagctccacgatggagtccggcaggtagcggatgcggttattatccagccacaaggtgagaagccggcccaggcccgagataagggatggcaccgaggtgagctggttgcgactaaggtagagctcctccagaccagccaggggcagcagcgcggcagggaactcctcgaagaggttggaggagaggttgagcattttgagccgctgcaggcagctgaactgggcgggcagagcctgcagcccgttgttgtctagcatgaggctctccaaactggccagctcgcagaagccggcgggcagcgtgccaagctcggccccactcagccagaggatcttgagggcacgcagggcactgatatcctcaggcaggccccgcagccggttgctggacacgtccagctcctccagggccaccagctgcagcagctgccgggggaaggcagtgagctggttgtgatccacgtccagggtgcgcaggcgggagaggcaggagagggagtcaggcaggtgcgccag

SEQ ID NO: 14693 - DNA, 1418 bp, Artificial sequence
  DNA replication origin
ccatgggcgcgccgggcagcagggccgccgcccgcgcgccgcggaggatgcctgctcctcctccctctccgcccgccgcgcggcgcctcggggggcccggctccggccccgctaccctcgcagccgcggtcccgcggccggcagcggcgtcgcctcctcgagctcctgggggagggcggcgctcggcccggcggcgggcatgctgcgggcgcagggctggggcgcagccgcggggagggggcggcggcgcctccttgtctccgtttccccgggctcgggcgggagcgcgggcgccgcgtccccggcgctgggagggcgcgattgggaagcggcagcgccgcccgccggagcggcccccacgtgaccggcggaggcgccgcgttttcccggcaccgccccgggggcgggagctgcggagggcgccgggtgcggggccgggggcgcctggcgcggggccgggtccgcgccccggaccatgctgggcggggaggtcgtcccagcggcggatgtggggctccggggcccccctggtgggttcgcccgcgcctggctctttgttggcccccagtctctaaggatttctttttcttgttctctaatgcgtcggatccgccggcttcccttactcatcctttacctgctcccctgccgctcgccttgcatccacgccgtagtggaactggcacaactcgggggccctgggtatcatcatagaagcttaggacaagagtgtggttaaacaaaattagaacaggcaaccattcattcatttggtaaatatttcctgaggccctatttcgtgttgaacatgggacaggagtaatgcaggctggtcagaggagaataaaaaataccaggcagcagtttcacttgactggaggctatgggctgataagaccctgaaaaccagggtgtgtaccaagctggctaagaccggctggacccgacgtggtcctggatttgacctaggtttctcctaggcctccattatacgctctttaacatcctaagtcacaccagtgccatgacaattccggggacacccatatttgaagtaaaaatgggtggcaccacagtcccgaaaaatctccacacttttccaggaattttcatgaatatttcaccccttggttaaagaaacccataaaggtagcagccccaagccccgttgtgagtgaccctctccacaatcccttttcctgggtgtgtacttttccctttgcaataaatctgcatattgtcactattttctgagttgtccttgaactcattctctggatgtgtcaagagcctggacattggctggggtcaaggtcgcactggctttagaggatctcccccagcccacccgtaccagaactactaaaagacggttttaacccccctggggaaggcttttgagcaggtggcccgccagc

SEQ ID NO: 14694 - DNA, 938 bp, Artificial sequence
  DNA replication origin
atttgatgaaaaagagcctaaacactaactgatttgggagaggtcagataaagaaaaagcattaaccttgactatgcctttagctccagccacctttttaagaggaaattgctgggcaggtgggggagggctagtcatggaatgaaactgtaagccagaccgggtgtgaggaggggaggtgataaaaggattatagggtggaggagcggaggctgaggaagaatcgggacctagctcggcctggcaaggaggggagaggtcagatgggtctgtagaaaaggaagattagaaagactcagcgatgcttggggttgggactgaggggacaggcgggagggaaagaaggaagatttgggatgagttgcatggggaacagagactagggagggtccaatgtgtaaaagaatgcctggacatcgggcatctcagaccatttgcccattttacaacaagaattatttagatcttgtaggatggaaaaattgaaagtgccgttttctggctatttggaaccactgtagagtttatactggggtcaagtggcattgcagaagaaaataaggcatttaggttttaggtcaggtgtaagttgaagaggttttaagttcttgagaacacaggctaagggagaagaagggggaatggagggtggaaggttgcccatagtgaaggaggcaagcccagagaaaagagagagtagagacacggagggaaggggttcaggggttcttaccctccagaaaagcaggaaaggggttggggtgtgtaaataaggggttggggcacagagataagaggttggagtgtggaaataaggggtcagggtgcagagataagaggtcggggcatggaaataagggattggggcacagagataagagatcggggcatggaaataagggatcggggggttcttgccccctagagaagcgatactt

SEQ ID NO: 14695 - DNA, 1444 bp, Artificial sequence
  DNA replication origin
ccacctgttgttctggcttcgaaactagcacaagttcccagccccgggtcccgagaggtctggagacttctccaaagttgggtagtggggtttggagcttaaggacaagccgcttcgtctctctccgggccttattttccctataaaacgcgaggaaatacacttggtaggctctcaggccaccgagggcgacgggacctagcacgatccccgtcccgggctggcggaggccaggcggccgcgcgggggtgctggtgtcgcgctgcttgctccggccggggttgcccctttgccggccccgcccgggtgcgataacgggctcctcctcctcgtcgtcttcctcccaccgccgacatctccgggaacccagcccaggccctgcctcccggacacaccgacgctcacgtagtcgcgcttgccacaaccctgcgggctctccgatgcggcgagcgagctggggagggggcttctccgcggcccaaaaggtgggtgcggcgcgaggccaaggaggcttgtagggaggttgggggcggagtgcagccctggtcaaactggacggaggggacagagtcggagagtaacttgtgggatcctccagcctggagagcactggcctgctcctgcgtctctttggaatccagaaaaaggggtgtggaaggcacagtagctgcaaaagagggagtgggggccggtaatgacttactggaagatttggggcctgtcagagcactgttttctgaaaaagaggagaaaacagaggaaagactggacttgggaacttggagacttggaaggtgttggaacctgtggtctgagtggcgggggcctgcctgggagacccagggtgcagcagaagagacaattagagctttggtctgggaggaagaggaggagaggaggaaatgtttccttgggcagagttgtccaggagccaaaactaaagtgaagacagctggaggacttacacaaaagtacagttgaggtatttaggaaaaaaagttagtgggaagagaagcggcaccaggggtgggtcgcaacatacaatgtcagggccagcagggaccttggaggggacctcaagcccagagcagctgagtgactcgctcaagtagcaaagcaaggtgcgggcattcttagcctagtactctgttttccctcgtacgtttttagacggcaggggctgtgtcatttgaacttgcctctttcctagaatatgcaactgtattcacaaatgtcagtctccaagatgctttggatgatggggacaggatcaaggggtacaaggagcctttaaggctgtgaataggcccccatggtctgagtacaaaggggaaagacatgcactctcttcatgctggatcagtgaaaccttttggaagggaacacagaattgttggagggaggtagatggccatgtctttaaaaatgaaaattataacctggt

SEQ ID NO: 14696 - DNA, 946 bp, Artificial sequence
  DNA replication origin
catcgtctgggatgtgaggagcccctctgcctggctgcccagtctggaaagtgaggagcgtctccgcccggccgccatcccacctaggaagtgaggagcacctcttcccggccgccatcacatctaggaagtgaggagagtctctgccctgccgcccatcgtctgagatgtggggagcgcctctgccccgccgccccgtctgggatgtgaggagcacctctgcccggctgcgaccctgtctgggaggtgaggagcatctctgcccggctgccccgtctgagaagtgaggagcccctctgcctggcaaccgccccgtctgagaagtgaggagcccctccgcccggcagccgccccgtctgagaagtgaggagcctctccgcccgacagccacccagtctgggaagtgaggagcgtctcctcccggcagccgccccgtccgggaggtgaggggcacctctgcccggccgcccctactgggaagtgaggagcccctctgcccggccaccaccccgtctgggaggtgtgcccaacagctcattgagaacgggccaggatgacaatggcggctttgtggaatagaaaggcgggaaaggtggggaaaagattgagaaatcggatggctgccgtgtctgtgtggaaagaagtagacatgggagacttctcattttgttctgtactaagaaaacttcttctgccgtgggatcctgttgatctgtgaccttacccccaaccctgtgctctctgaaacatgtgctgtgtccactcagggttaaatggattaagggcggtgcaagatgtgctttgttaaacagatgcttgaaggcagcatgctcgttaagagtcatcgccactccctaatctcaagtacccagggacacaaacactgcggaaggccgcagggtcctctgcctaggaaaaccagagacctttgttcacttgtttatct

SEQ ID NO: 14697 - DNA, 1852 bp, Artificial sequence
  DNA replication origin
agtgtttgtgtccctgggtacttgagattagggagtggcgatgactcttaacgagcatgctgccttcaagcatctgtttaacaaagcacatcttgcaccgcccttaatccatttaaccctgagtggacacagcacatgtttcagagagcacagggttgggggtaaggtcacagatcaacaggatcccacggcagaagaagttttcttagtacagaacaaaatgagaagtctcccatgtctacttctttccacacagacacggcagccatccgatttctcaatcttttccccacctttcccgcctttctattccacaaagccgccattgtcatcctggcccgttctcaatgagctgttgggcacacctcccagacggggtggtggccgggcagaggggctcctcacttcccagtaggggcggccgggcagaggtgcccctcacctcccggacggggcggctgccgggaggagacgctcctcacttcccagactgggtggctgtcgggcggagaggctcctcacttctcagacggggcggctgccgggcggaggggctcctcacttctcagacggggcggttgccaggcagaggggctcctcacttctcagacggggcagccgggcagagatgctcctcacctcccagacagggtcgcagccgggcagaggtgctcctcacatcccagacggggcggcggggcagaggcgctccccacatctcagacgatgggcggcagggcagagactctcctcacttcctagatgtgatggcggccgggaagaggtgctcctcacttcctaggtgggatggcggccgggcggagacgctcctcactttccagactgggcagccaggcagaggggctcctcacatcccagacgatgggcggccaggcagagacgctcctcacttcccagacggggtggcggccgggcagaggctgcaatctcggcactttgggaggccaaggcaggcggctgggaggtggaggttgtagcgagccgagatcacgccactgcactccagcctgggcaccattgagcactgagtgaacgagactccgtctgcaatcccggcacctcgggaggccaaggctggcggatcacttgcggtcaggggctggagaccggcccggccaacacagcgaaaccccgtctccaccaaaaccagtcaggcgtggaggcgcgagcttgcaattgcaggcactcggcaggctgagccaggagaatcaggcagggaggttgcagtgagccgagatggcagcagtacagtccagcttcggctcagcatgagagggagaccgtggaaagagagggagacgggagagggggagggggagggggagaaactgttctttttcatggctgttagtggtagcactgtccatctttttccttgcatttaggctcatgtgtggcttcttcagtcctctcttcattcactcatgtattcatttattcaacgacatattactaaggaacctccttaagccgggatgctgaacgtggaaaaataggtgaaatataattttacccctgagaagctcataggctaaaaaaaatattgatttgggataaatgtatgttaaggtaagtctctgtgttaggggagttaagaggaagaccttgtgtgtttagcagcagagttggggggggaatggggatgaccagaggctgatcctatagatgtgatcattgggatcctggaggaggagttagagttaaagggtcatgtcagggaacatggcaggaattggcaaagacgcagagttcggtaagtacccagagaatttccactgtgctgattaaaagttaggtcctctttctggcttaaatattaaacagtgttcct

SEQ ID NO: 14698 - DNA, 902 bp, Artificial sequence
  DNA replication origin
gccccgccgccccatctgggatgtgaggagcgcctctgcccggccgcgaccccgtctgggaggtgaggagcgtctctgcccggccaccccgtctgagaagtgaggagaccctctgcccagcagccaccccgtctgagaagtgaggagcccctccgcccagcagccaccccgtctgagaagtgaggagcctctccgcccggcagccaccccgtctgggaagtgaggtgggggggtcagccccccgcccggccagccgccccatccgggaggtgaggggcgcctctgcccagccgcccctcctgggaagtgaggagcccctctgcccggccagccgccccgtccgggagggaggtggggggtcagacccccgcccggccagccgccccgtccgggaggtgaggggcgcctctgcccggccgcctctactgggaagtggggagcccctctgcccggccaccaccccgtctgggaggtgtgcccaacagctcattgagaatgggccaggatgacaatggcggttttgtggaatagaaagggaggaaaggtggggaaaagattgagaaatcggatggttgccgtgtctgtgtagaaagaggtagacatgggagacttttcattttgttctgtactaagaaaaattcttctgccttgggatcctgttgatctgtgaccttgcccccagccctgtgctctctgaaacatgtgctgtgtccactcagggttaaatggattaagggcggtgcaagacgtgctttgttaaacagatgcttgaaggcagcatgctcgttaagagtcgtcgccactccctaatctcaagtacccagggacacaaacactgcggaaggccgcagggtcctctgcctaggaaagccagagacctttgttcacttgtttatctgctg

SEQ ID NO: 14699 - DNA, 1165 bp, Artificial sequence
  DNA replication origin
caccagcctctttacccgggacacgtccccattgcgacaggcctccagcagttcccgtagggccccgctcactgctgggacccctgtcccaggtcctgctgccccaggccccagtggtgctgtgctgctaactccggccgcctcggggctctccgccaagctcgatccaggggaggatggagaggaagatgaggaagaagtcggggaagaagaggacgacggtgaattgttactgccactgccggctgggttgggagcgaccccagcggcagatgaagtagaaaccgctgggaccacgggagcggcggcgacggtacagattgtgctggtggtactgcaacagctggtaccgtcaaccgggtccggggatcggggcctgtcgggcggatcccgactgccatccccctccggcagcgctaggccgtgccgcggggaggcgaagggggccaggccgctggccgtgggagaggctggggtggtccccggggccaggccagggctgagtgggggaggaggtggcggcggcggcgctgaagcccctggggcgggctggagctgttgttgatgatggtggtgatgatgctgagagcgacgcgacgccgccatcttcggactcccctagcactgtcactgcggcaacggcccccaccgcccgccctcacttccgactgtcggaccaatcagcatccagcgcacaggaaatgatgctaggcggggtagcaggggccaaagagaaggagggaagtattgggagctcagagaacagccaagggaacggggcggggctttgtcactgagaggcgggctttgtgacgtggtggcgggccggctggagagatttgaatgctggaaccagcttctgcctagatgggaaacatttcctgcatttctcactttcagtcggctttctttgccctgctccgctctgtttcccttagtctccctttgcttgctccagagccagctgttgagatgcagatcagagcaagcagggaatgtgtccgttatcatctattaagcgtccttgtctgaaaaatggaacttatagtaccaacctcacagaattattagcgggattaaaagagctaacagacaaagcgctctgccagtaaaacacaagtataattagcccgttggtaattttttaaattatagtatttctttt

SEQ ID NO: 14700 - DNA, 1078 bp, Artificial sequence
  DNA replication origin
caccaccatcatcaacaacagctccagcccgccccaggggcttcagcgccgccgccgccacctcctcccccactcagccctggcctggccccggggaccaccccagcctctcccacggccagcggcctggcccccttcgcctccccgcggcacggcctagcgctgccggagggggatggcagtcgggatccgcccgacaggccccgatccccggacccggttgacggtaccagctgttgcagtaccaccagcacaatctgtaccgtcgccgccgctcccgtggtcccagcggtttctacttcatctgccgctggggtcgctcccaacccagccggcagtggcagtaacaattcaccgtcgtcctcttcttccccgacttcttcctcatcttcctctccatcctcccctggatcgagcttggcggagagccccgaggcggccggagttagcagcacagcaccactggggcctggggcagcaggacctgggacaggggtcccagcagtgagcggggccctacgggaactgctggaggcctgtcgcaatggggacgtgtcccgggtaaagaggctggtggacgcggcaaacgtaaatgcaaaggacatggccggccggaagtcttctcccctgcacttcgctgcaggtcagagacttttgaattgtttattaagggttatgggtttgggtgcagggtccggttaggacaagaaaacaggttattgtgatgggacaaagtgggggcgtggttatggttcttcatcacctcaccagaagactggaggttcctttcttttggtggtgcctgggtgatgggggcgtggttgggggggataagtgaatccaaggaattcttcagtggttgcacagtactcattacaaaactcactgtagttggtagtctctgcatatggatatatttacactttagtttttggtgtgcaggaatacagttagatttggacagctttagagtagttttgtcgtttgtgtgctagtttattttgtttttacaagggtatgtcctttgaggacagtccagaccaaaagaggtttaatacaacccaacacatgtttgagg

SEQ ID NO: 14701 - DNA, 953 bp, Artificial sequence
  DNA replication origin
ccgtccaggagggaggtaggggggtcagccctccgcccggccagccgccccgtctgggaggtgaggggcgcctctgcccagccgcccctactgggaagtgaggagcccctctgcccggccagccgccccgtccgggagggaggtgggggggtcagccccccgcccggccagccgccctgtccgggagggaggtgggggggtcagccctccgcccggccagccgccccgtctgggaggtgaggggcgcctctgcccggccgcccctactgggaagtgaggagcccctctgcccggccagccgccccgtctgggagggaggtgggggggtcggccccccgcccggccagccgccccgtccgggagggaggtgggggggtcggccccccgcccggccagccgccccgtccgggaggtgaggggcacctctgcccggccgcccctactgggaagtgaggagcccctctgcccggccaccaccccgtctgggaggtgtgcccaacagctcattgagaacgggccaggatgacaatggcggctttgtggaatagaaaggcgggaaaggtggggaaaagattgagaaatcggatggttgccgtgtctgtgtagaaagaagtagacatgggagacttttcattttgttctgcactaagaaaaattcctctgccttgggatcctgttgatctgtgaccttacccccaaccctgtgctctctgaaacatgtgctgtgtccactcagggttaaatggattaagggcggtgcaagatgtgctttgttaaacagatgcttgaaggcagcatgctcgttaagagtcgtcaccactccctaatctcaagtacccagggacacaaacactgcggaaggccgtggggtcctctgcctaggaaaaccagagacctttgttcacttgtttatctgctgaccttccctccactattgtcccatgaccctgcca

SEQ ID NO: 14702 - DNA, 2175 bp, Artificial sequence
  DNA replication origin
agtattttatactgtgccttcagtcatgggcagggtagggaatgctgttgggggaagactgacaaaggaatcctgaactccttttagtaaatgtgttgatggagataccgtgggcaaaacagtgaaactcttaagcatattataggattgagcacatgagcggatgtgttgatgtattgatttgaggagccaaaattctcatggtagaagaagggacatacaaatatggaatggagaaggtaagaaagactctaagggtggactgaaattggaagtattactatgatctcatggtttctaacgtgtgtgtacacccatgtaaatttatgggtaagtagtaatataagcatgtgtgtgtatatgagagaaagagaaaccaaggaagggagggaaggagagagagagagacagacaggaaggaaaggagggagagaagagaggaaggaaggaagtgagggaggaagagagagaggaagggagggagagagcgaggaaaggagggagggaggaaggaagtgagggaggaagagagagcgaggaagggagggaggagagaggaaggaaggaagagagaagaaaggagggagagagaggaagggaagcagggagggagagagagaggaagggagggagggaaagagagaaagggagggaaagaaagggagacagatactaaggaagggagggacagaggaaaggaaaagagagagaagaagggagggagagaagaaggaagggggaaagagataaagggaaggaaagaacgggagagagaggaagggagggagaaagactgagagaggaagcaagggagaaagcgagagaggaaggaagagagaaagggagaggaaagaaagaagggaggaagagaggaaggaaagagggagggaaagagagagagggatgaatggaggggagaggcaggaagggagggagagagagagagagagagaggaagggagaaagcgagagaggaaggaacagggagtgagaaaggaaggattggaggaaggagagagaaaaaaaggaaggcaggagagagaggagaagggaagtgggggaggaagggagaagggggaatgaagcggggagagaggggagggagggagagagagctagagagcggaacggagggagaaagtgagggagagcagaaggaagggatggggagagagggaggaagagggagggagggggagagggagggagtgggagggagtgagagggagaaagaggtgggagggaagaagggataggcagagggatgggggagggagaaagggagggagtgagaggagacagaggtagggagggatggagggggagagagggagagagaaggagggagggagaaacagggaaggacgggtggagggagggatgacatgggactcatcatgtacccattattagaccaggcaagaattattaatggatgctaaatatggggattgtttcactaaggagaagaatatttgcgtggttttcttattacagacttactttcaaagggggctggggggaggagtaattatatattggagaaaggggacaatgccttgaccagataatcaaaatcaacatcaccaatgagggacagataggcttatattatctctctaggtggatactctaaaggcacgacatctctgcagcattccagccaaaaatacatgatgtaagtctaatcaaaatgaggaatgttttactttttttaatgttgaaagattgtattcttcaaaaatgttaatattataaaagaaaggctgtgctaactttccagattacatgaggcccaagagacatgaaaacgaagttaaccttctgcccccaactgcatccagtattggaagagaaagtacattattagatcaactgacagaattggaatatggacattaaataaaaggattgtatcaatgtaaaattataaggttgattctgtacttacgtaaggcaatatgtctatgcttagaaaatatatactggcatatttagggataaaggaccatgatgatgtatataacttgtaaacgttttggggagaatgtgtgtgtgtgtgtttgtgtgtgtgtgtgtgtgtgtctgtgtgtgtgtgtgtgtgtgtgtgtgtgtagtgcgtatgtgtgggtgtgggtgtatctagtatacagggatagggaaggggcaaatgat

SEQ ID NO: 14703 - DNA, 1115 bp, Artificial sequence
  DNA replication origin
cgctgcactgtgggagcccctttctgggctggccaaggccggagccgcctccctcagcttgcggggaggtgtggagggagaggcgcgggcgggaacctgggctgcgcaaggtgtttgcgggccagtgcgagttccgggtgggcgtgggctgggcagtccccgcacttggagccaccggccggccgcgctggccccgggcagtgaggggcttagcacctgggccagcagctgctgtgctcaatttttcgcagggccttagctgccttcctgcagggcagggctcgggacgtgcagcctgccatgcctgagcctcccccaccctcgtgggctcctgcttggcccaagcctccccgacgagcgccgctccctgctccgtggcacccagtcccatcgaccacccaagcgctgaggagtgcaggcgcagggcgcgggactggcaggcagctccatctgcggccctggtgcgggatccactgggtgaagccagctgggctcctgagtctggtggggacgtggagaacctttaggtctagctcagggattgtaaatacaccaatcagcaccctgtgtctagctcagggtttgtgaatgcaccaatctacactctgtatctagttactctggtggggacttggagaacctttgtgtggacactctgtatctagctaatctagtggggaggtggagaacctttgtgtctagctcagggattataaacgcaccaatcagcgccctgtcaaaacagatcactccgctctctgtaaaatggaccaatcagcaggatgtgggtagggccagataagagaataaaagcaggctgcccgagccagcagtggcaacccgcttgggtccccttccacaatgtggaagctttgttctttggctctttgcaataaatcttgctgctgctcactctttgggtccacactgcctttatgagctgtaacactcaccgagaaggtctgcagcttcactcctgaagccagcgagaccatgaacccaccgggaggaaagaacaactccagatgcactgccttaagagctataacactcatcacgagggtccgcggcttcattcttgaagtcagtgagaccaagaacccaccaattccggg

SEQ ID NO: 14704 - DNA, 947 bp, Artificial sequence
  DNA replication origin
gttgcgggggtggggaaggacggtgtttggggatggcgaggacacgtctctgggtcctgggggaagatgcccgctccctggccgggtcactgggggtatccgggagaggaggctggatgtatgggcggggcgtcctaatggggaatccaggaggatgcactgagacggaccccccactccagcaaataaaacccaacccccaagcgctttcgcggcggggtcctcttcccaggctgcacctgccagcccctctttcttgcaagttctgaggctttccgggatgcacggtggggtcctcgaggccgcaggtactgaagtggatcagagagaggcccggagccgcactgcgggcgccgggcgcacaggctgaccggctgcacggccgggagggcgcggcttctaggcccaggcctgcggctggggagcgctgtgggtggccaggggaggacgtgacctcccgcccaggccttcggtctggctcggccacccttggaagcaaaggatgtaccctcgtctcaattcgtcccgcttcctgcccccgactccggaaaaatctctaacgttgaccgtcgagtgtccatctggcgctagagtgaaatcgatgtgcatggaaaatggaaaaatgacctctccggggacagtccctggcgtttgtagccctgacctcttcgcctccccctcgccttagaacttgggcttggggctcatcctagaaagaccctgagactaacccgcatctacccacacctcggatggatccaaagctttgggaactgcaggaggacccgaatcttaggagttccaggtctgcatgattcgggagagagagagaaagggaaaaaaaaaatcaagactgggaaatgggagcaaaaaagaaaagggaaaccagcgcctgctcatcttctccttgcttcatggagaagtctcgggtgcattcgaagagaaag

SEQ ID NO: 14705 - DNA, 935 bp, Artificial sequence
  DNA replication origin
gaccaccagcgccggctcgcctcctgcgccttccccagcgaaggcagcaagcagttcgggcttggccgtggcggccgctcccaggatgcttcctgcacctccagcatccccccccttattcatctgcctgtgtattatctcgatccttttcatttcagtagatccactgcctttggttgggccggctgaatcgctggggactgcggccagtctcttaaaaaaggagaacaaaaagccgaagaccttgtgtggccgccgggacaaagcaccttgggttcggcgagaagggacgcgcaggagcgctgaacccagaacacgcgtggccgctgcggaagggcgtccgcccggcgtgcggaacgctgagggtattcggattgtcttttatttgtccctgtggcttgctttcacagtgtctacgtaggagaggggtcggggttgttggggtctctttttttttctgggaggggtagctgaattgtgggagacctaggtggacttgacttggctttcctgctactctgcgtctccttctcaagatgcgggggttggaaaggggacaggggactcaaggcttagaaaagagaaggagccctctgctgcctggagggctaagggagtagagagtggagatggaggtgagtagggatgggccagcccgaagagcactgaggaggagaaggggtcttctcctccctcgggtccagtggatgagttttgctgggaatgagaattcgggtgtctgtcgataggagcgctgagaaattgatgagaaattgacatgtccgtgcacatgcatgaggcggcgacaggatttgtgtgtaaacagtgtggagaggtggaggagggcatgggggtgggggcttaaaatgatgtcttattgtccttttggctttagggactctcatcctctgtctcgccccctttttttgacccgg

SEQ ID NO: 14706 - DNA, 1283 bp, Artificial sequence
  DNA replication origin
cgtcaaatcgacacctgactccacagctcccttccctctcctcttcttccacctccccgggggtccaggcaccgccgtgcgtccactcccggtctccacggcttaggcagacggagtgggggactccggggacccgcgcgtcctctcctcctcggccctggcgggaggagccgggctggggtttccgcgggccgcggcgcgttttagggctgccggggactgcggcggatgcggttgacatcactgcggcggctgccgggccgctgcggcgacctgagcgccggtgcagcctcccccaccccgcctgggcgggcgtctgggcaggacagctgcggggggttgggagaggagtcggggagagggggacgatcgccccatcccccgcccccccgcagtcaaggtgaacatgaaggagagccggcgcgcgtgcccgcgcctgggaggcgcgcggccccgcccctcccggagccctccagcgcgcccgggccagatggacgcccgagattagaggcgcagaagtgcgctccacgacgggcccacccgtcccgcggacatcagacctacttcggggaggcgccttttgttgtggtggccgtggcggtgtttgtgtctttccgggagcacagggtgagcttggccttcaggaatgactcagaatgaatccgcctataagagccaaactaaagacgaccccccgccccagccccccaaccataacccaacgcctgccatgagaaaccttcggactttccaaggggtcagtgcctcagccacgaggggcagccctgacccgcgcggttcacgcacacgcagggcccatctgcttcccctactccggcttttcttctctgatgacttaaaagagagtgagtgagggagagagggagagagagagagaggtctaagtgtttcttgggcactgctggattcagggcaactagagatggggagaacaagccccgccagctaaaagcagccctgctgaaaccacacagcccgcgagggtcgcagcagaggcgcccacccagcaggagtggctgcacgaagggtgacccgggcgaggcccttctcgcttcgaggccatttcggctcttgtcaattattgggtgtttgtcccaatataagtagaatggcgatctcaaaccctttcagcactagcctttgcttccaacaatgcaccactagaagcttagaaaagaagcagtttttgtgaatttcaagaagcagaaagctttggtttaatcagagagagaaggaaaaaagaggaagaggaggaggagggg

SEQ ID NO: 14707 - DNA, 840 bp, Artificial sequence
  DNA replication origin
tggggtggccctggacaccggctttctctctggccagccctctgttgtcttgcattccctctgtcctcattttcccaaagcatcccatattgtactttaggacttggtggtgtggcctgagcatgcagcaggccagtggagtgcccagtgagtttaaagtgtttcttttgagggcaggacaaaggcagaggggatggagacagagaaggtggtgagggcagttgtgcagagttgagggcgctgcccagcaagcagcttcagtcctgttgtagctgcagcactaggggcctttgagggagcaagggtgaatgtgggatcctgggttagactgcaatatcagcaaccgcaggcgttgagagggcataaggtgttattgaggggctgcatggggggatgtaaatgggttgctgaggccagttcatgttgaacatcgtctttctgggtctttgtcctgggaggttttgaggcccaggagagggagaggcagagtcaggagcattgtgtatagttctgtgtccaaggcggtgaggggctggaatttagcctcagctttgctgcccaagccctgtgccttgatctgctgcaggaaggtaccaagtccccattgtgcttgtggaggtcctggggtgcatacaggcttggaactggaatagcaggtattgggagaaggtcaaaggtctgtggccagggagggcagtgttccagtatctgaccatggagtctagggggctaggggatgtgatcagaagtgttctagagaacatggtgaaacaggggaggatgagtaagtagaaatttagatcaagtgaaagaaaaggttttgagagtactggagttagg

SEQ ID NO: 14708 - DNA, 1259 bp, Artificial sequence
  DNA replication origin
cttggggtggggcggggagggggggtggcagcagaggaaccatctgtaacccagaggtgacagtcttcgtcccctatctccccctgctcctgcaccaccccactctccctgcagaagagcaaatgggctttttcaggagccgtggatgacagagaggcattcttctgtgctccctgcaaggacacagcaccacagggccaccatctaaagactgaacctgcccatggaactggccaggactctgtgacacggaaagtggctgcctgagtccgtcgtccccttctccctcccaccattccttcccaggccctagaggaggtgctgggtcttgaggtagcaacagggacccaggtggaatccagaagcagagagaatctccaggagatcccaagaatccatagttcattttctcattcattcattcattcattcattaattgcacacagtgcacaaagccccgagatgagggagagacacagacagtcctgggtagtggaagtggcttggagaacagaagggtttttgtaatgcagcgtcatcagcgctgtcgggcattgcgatgccacgcgaacatagtatgtggagcagcttctgccttcaagaagcgggcaggtttcatagaggtggggacatttggtctgggtcctcagagatggataggagttcctgcgatggaaaagaggaaaggacattccttggagatcgtgtgcaagggaatggaacattcgggaaacaggtaaaaatgaacaacaccaaagaaaatagtgcgcagaggggaaggaaaggctgaaaaggtagaagatggtgagggagacgatgctgaggggtgaatcagggagaagggcctggggtggagcgggaatggggagaaggcccggggtggagtgggatggagagaaggacccggaatggaataggatcggggagaagggcctggggtggagcaggaatggggagaaggcccggggtggagtgggacgggaagaaggactcgggatggaataggatcggggagaagggcctggggtggagtgggatggggagaaggactcgggatagagtgggattcgggagaagggcctggggtggagagggacagggagaaggggccagggtggagtgggatcagggagaagggtctgcggcggagctaaactggacggggagaagggcccggggtgggttggatcggagagaaaggcctggggtgttctgattcggggccagggagaggccccctcctgggttaggggaggtg

SEQ ID NO: 14709 - DNA, 1373 bp, Artificial sequence
  DNA replication origin
ggaactgcaccccactccagccaggcccacctgagcgctcgctgcctgagccccctctccaaagcccgccccagctccctaaggaagcctgttcattctgcaaagctctgggaatctctgttctggaaaggcccagagatccccgagacactctttcacacggagcagtcctgtcctgagcctcctgtcctccaggtctctgctctcatccgggccttccctgtgacctggggtaggaaggagtccctcctccgcccacactccttcttccctgttctcctctgtgcctctccaccagtcatgttcagtaaagctgtgtgtttacggtgtctgttcccctagagtgtcggcttctgagggcgtgacatgttgttccctgctcttccccgtgactggaacagcaacggcacataaaagactctcggcaaatgtttgatgagtgaatgagcaacaccagatccggaacaagccaccaagactggggcggggcggggcggggggtgggggaaggggagagggaggaaggaagggaaggaaagaaaaggaggaaaaaggagtgggaagggaagggaaaaggagggacgggaaggggaaggtgccagcttgggatttcgagcctgggtagtgcctgctaacggggttggccggagcagcagagcaccgggaggcccagggatgtggcgaggcagccgcggtgtcagaaagaggaaggcaggaggctgaggccgagggccctggaatctcgcacattccagggttcagaaagatcacggtggggtccacctctggagtccacaaaaggtaagtgcggggtggggataagtctagaagcagctctgcaaaacagtgcaggcttccagtccaccggaagctcaaagaggagagaaaagacatgggctctcggggagggagggggcgttgttggaggcccggtctttgggtgaggggtgatgcccctgtgtcagaggccaccggctggcgcacgcctggaccactacgctcacccctcggcggctcactctggaaagagtgttgcaagagaggttgtcgagtgacaagggtggcgggaattgcggagctataaataggagcggtgactgcagtagctgagatgtgtggtttggggatgtcatggctccgtgaagccagagcgtggtcttccagcctgcccactgccatctgctgggctacagcgaggctgatgtggctcagcataggattctgtactcttggtcaaagctgagggctgggtcggacaccgtggctcacacctgtaatcccagcactttgagaggcttgaggtgggaggatcatttgagcccaggagtacaaggccagcctgggaaacatagggggaacttgtatctacaaaa

SEQ ID NO: 14710 - DNA, 1187 bp, Artificial sequence
  DNA replication origin
tgctgccaaacgagccatgaacggggatggatttttatatttgatgaaaaagagcctaaacactatctgatttgggataaagaaaaaagagcattaaccttgactgtggctttggctccagccacctttttaggaggaaattgctgggcaggtgggggagggctagtcacggaatgaaactgtaagccggactggatgtgtggaggggaggtgataaaaggattatagggtggaggagcggaggctgaggaagaattgggacctagctcagcctggcaaggaggggagaggtcagatgggtctgtagaaaaggaagattagaaagacttagcgatgcttggggttgggactgaggggacaggtgggagggaaagaaggaagatttgggaagagttgcatggggaacagagactaggtagcgactgatgtgtaaaagaatgcctgaacgtcaagcactccagaccatttgtccattttacagcaagcattatttagatcttgtaggatggaaaaaatggaagtgctgttttttggctatttggaactactgtcgagtttgtattggggtcaagcggcattgtagaagaaaataaggcatttaggttttaggtcacgtgtgagttgaagaggttttaagttcttgagaacacaggctaagggagaagaaggaggaatggaggatggaagattgcctatagtgaaggaagcaagcccagacaaaaaagagagtagagacacggagggaaggggttcaggggttcttaccctccagaaaagtgggaaaggggtcggggtgtggaaataaggggttggggtgcagagataagacgtcagggtgcagaaataagggatgagggtgcagagataagaggtcggggcgtggaaataaaggatcagggtgcagagataagaggtcggggcgtggaaataagggattaataagggattagggcacagagctaagaggtcggggcgtggaaataagggatcggggtgcagagataagaggtcagggtgcggaaataagggattggggtgcagagataagaggttggttggggcacggaaataagggattggggtttcttgtcccctagaaaagtgggatttgccgctaaggggttgagaaggagaaggggttgaggggttcttgcccctcccccagaaaagtggagaaggggtagaga

SEQ ID NO: 14711 - DNA, 1488 bp, Artificial sequence
  DNA replication origin
agtgaacggcagctcctggtgcagccaggctggaacccctcggtgcaccccagagcctgccctccgcctccccggtgctgcctccaggacggggcctgggcagggtgcacctgagccaccctccttggaaagggagtcaggaggaaacctcctcctcgtccctgagcttcagtaaaatatcttagtaaaaatacatttttttttccaagtcattaacaataaggcttttggtaggcatctgtgatgtgcaggtcacggtcagcaggccggcagcaggaggggccgtgggcagccctgacctccaaggcagtggtgtgggcctgtgggcacactctgagcccaggaaggggctgggtgctccacagggcaaaggccctttagcccaggctggtgtgagcctgtgggtgctgtgcccaggacgggcatggagtactccctagagcaaaggccctgcaggcccaggcatctggtgctggagtggtggcttcctggacactgggagctgctatgctggggcaagaggaagatgggtgaagagggaggggacagcaggctaggacaggggaggggcgggaggagagagaaggaggaggaggggaggaagggaggtagggaaatggggtaagcagaacccaggctgaggggctggccctggctgggggtggtgagaggcccttgggcagttgcaggcagaagcagcatggcgagctttctcttttccagaggcaagtggtggcaagtggtgaggacagagtggcgtgggcaagtctagatgtggggacaccctgaggaggcaggtggaggggttgggaaggcaggaactgctgggcctggggcagctttagttgattcagggctgggagctgggggtggggatggataagcctgggatggctgggggccaggtctagccatggggacaagagcaggctgaggacgaggacagagggtgccttctgctgggtgtgtggctcccaggcaatgtggtgaagggagctgagagagatcctgggcctgagccatggacttgggagtcctctgctcaaaagcaggagcaggaacagcagagcacggatgggctcacccagggggctgagggcagaggcgggcagtgagtggaggatagggagacgccgacgttccccattcgaggtgccagaaatgggctagagagggccagagatggtcaccaagttgggatcagtgtcttaggagtgctggccaccaccgtctagggacatgatgactgagaacactccagcctttggaaaataggatcatagccagcagtgatttggggcccagcgggtggtgggggcggtgagcggagaggggaggagagaaagaggtgatggaggaggcgggcagggccggaggggagtatgctcctcactcacagggctgcaggggcctcacccacaatctgagtgcctggggccatgatcaccccaaccaggtctcaaaatgtgggacctaggagggcacagg

SEQ ID NO: 14712 - DNA, 2216 bp, Artificial sequence
  DNA replication origin
ccaacccacccagggggctgcagagaggagctcttcggtggcctgcagcgcggctctggactgcgaccccatctgggtgtccgtgttactgaagaagacggagaaggccttcctggcccaccttgccagtgcggtggctgagctccgagcacgctggggcctgcaggacaatgatctgctggaccagatggcggccgagctgcagcaggacgtggcccaacgcctccaggacagcaccaagagagagctccagaagctccagggccgggcgggtaggatggtgctggagcctccaagggaggccctcaccggggagctgctcctgcagacccagcagcgcagacaccgtctccggggcctgcgaaacctctcggccttctctgagcggaccctgggcctggggcccctctccttcaccctggaggacgagccagccctcagcacagccctggggagccagctgggcgaggaggcggagggggaggagttctgtccctgcgaggcctgcgtgaggaagaaagtgagccctatgtcccccaaggccacaatgggggcaaccagaggtcccatcaaagaggcctttgacctgcagcagattctgcagaggaagaggggagaacacactgatggggaggcagcagaggtggcccctggcaagacccacacggaccccacgagcactaggactgtccagggagctgagggagggctggggccggggctgagccaggggcctggagtggacgagggtgaggatggcgaggggagccagagactcaacagagacaaagatcccaaactcggggaggcagagggagatgcaatggctcaggagagagaagggaaaacccacaacagtgaaaccagtgcgggcagtgagttgggggaagctgagcaggagggagagggcataagtgaaaggggagaaactgggggtcaaggctctgggcatgaggacaacttgcagggtgaagctgcggcaggaggtgaccaagatccaggacagagtgatggggccgaaggcatagaggccccggaggctgaaggggaggcccagccagagtcagaaggtgtagaggccccagaggcagaaggggatgcccaggaggctgaaggggaggcccagccagagtcagaagatgtagaggccccagaggcagaaggagaggcccagccagagtcagaagatgtagagaccccagaggcagaatgggaggtccagccagagtcagaaggtgcagaagccccggaggcagaaaaggaggcccagccagagacagaaagtgtagaggccctggagactgaaggggaggacgagccagagtcagaaggtgcagaggcccaagaggcagaagaggcggcccaggaggcagaagggcagacccagccagagtcagaagttatagagtcccaggaggcagaagaggaagcccagccagagtcagaagatgtagaggccctggaggttgaagtggagacccaggaggcagaaggggaggcccagccagagtcagaagatgtagaggccccagaggctgaaggggagatgcaagaggcagaagaggaggcccagccagagtcagacggtgtagaggcccagccaaagtcagaaggtgaagaggcccaggaggttgaaggggagacccagaagacagaaggggatgcccagccagagtcagacggtgtagaggccccggaggcagaagaggaggcacaggaggctgaaggggaggtccaggaggcagaaggggaggcccacccagagtcagaagatgtagatgcccaggaggcagaaggggaggcccagccagaatcagaaggtgtagaggccccagaggcagaaggggaggcccagaaggcagaaggtatagaggccccagagactgaaggggaggcccagccagagtcagaaggtatagaggccccagaggctgaaggggaggcccagcctgagtcagaaggtgtagaggcccaggatgcagaaggggaggcccagccagagtcagaaggtatagaggcccaggaggctgaagaggaggcccaaccagagttagaaggtgtagaggccccagaggcagaaggggaggcccagccagagtcagaaggtatagaggccccagaggcagaaggggaggcccaaccagagttagaaggtgtagaggccccggaggctgaagaggaggcccagccagagccagaaggcgtagagaccccgg

SEQ ID NO: 14713 - DNA, 1088 bp, Artificial sequence
  DNA replication origin
aggcccatggccaggaggctcagctgctcagccggggccctcattacttgtctggccagtctgcagttatttgaggaagaccttgggtctcctgccagcaaagtgaggttcaaagactcccctcggtaccaggagctgctcagcatctcgaaggacctgtggccaggatgtgacgttggggaagaccagctggactcaggcctctgggagctcacatggagccaggctctgccagaccttgggtcccatgccatgacggagaacttcacgcccacatcctcctctggtgtggacatcagcagcggctctggaggctcaggggagagtagcgtaccctgtgccatggacggcaccctggtgacacaggggacagagctgcccctgaaaacctccaaccagaggcctgattcaagaacttatgagagcccaggggatctggaaaaccaacagcagtgttgtttcccaaccttcttgaacgcccgagcctgcgcttgtgccaccaatgaggatgaagcagaaagagacagtgaggagcagagggcgagctcgaacctggagcagttagctgaaaacacagtgcaagaagaggtgcaattagaggaaactaaagaaggaacagaaggagaagggctgcaagaagaggcggtgcagttagaggaaactaaaacagaagaagggctgcaagaagagggggtgcagttagaggaaactaaagaaacagaaggagaaggacagcaagaagaagaggcgcagttagaggaaattgaagaaacaggaggagaagggctgcaagaagagggggtgcagttagaggaagttaaagaagggccagaaggaggactgcaaggagaggctcttgaagagggtctcaaagaggaaggacttccagaagaaggaagcgtccacgggcaggaattgtcagaggccagctctccggatgggaaaggctcccaggaagatgacccagtccaggaggaggaagcaggaagagcctctgcctctgcagagccgtgccccgcagagggcacagaggaacccacagagccccctagtcatctcagcgagacggacccaagtgccagcgagag

SEQ ID NO: 14714 - DNA, 1024 bp, Artificial sequence
  DNA replication origin
cgtggggcctggctggcgtgtcccctcctgcgggctcccacctggcccccgggcagtgctttggtggctgctgccggtgctcccacagctggaagagcgcctctgggggcagggccgccccctgggcggggtgggacagtacctgccacacagccagctagcctcaggggagggtccccgctgggcctcttgggccggctgcgtcccaggctgtgagcagcagtggcttcggtgggggcccaccgccccttgctcaggccgtccaacctgcagaaccaagggtgaggagggctgaggcgtgtccctggcctcttcccccaggctggcagccccagattttgagcaggagtcggatgtgtggggaggtatgggggccggcgagcatgtcctggaccccgcgtcccctgcccacccggcagagggagcgttgtgcggggagactccagaaacaaaatccgagtggactgcaggggtgacagtggcactgctggttcccagaaggtcctgggaaggaagagagcccgaggagggaggtctcaggttcccagaggcctgtgtcctggtgctcgatgagcttccagaatatcgtggcactgagccatcctggcaggcccttcgccgctcaggaggcctcggcacttgcttggttacagaggagtccagtgggctgtgggtgtccttgcggtagtgagaatgcctgggatggcctctcggggccactcggccaaggccagggctgctgggtgaggacattgcactggcccggcttctgtgccttctctgcccctgctgggatgaagtgcaggtggaaggggtggaagaggctccttccgagtcccaggagcaggaaaggcccagaaccagaggctcccttgtcacagccgctcccgtggcctgctcggtgccctgtccttgcgtctctgcctgcaggtcgtcactccttaaagatgaaagactcagggctggagaagcggggtcgcctccctcgctggcctcctgctgagaggtctcggcccttgccttg

SEQ ID NO: 14715 - DNA, 1254 bp, Artificial sequence
  DNA replication origin
caagcaactctccaccatctcaggaatcaggccacctacagggtcacagaagctcccaggagggagaaggctcttcctccagtaccactcacctggggcgtgagtccaggaacctgggccttcgggatgcgaggaaatgctgggaggaaagacacagggaagagggggccaggctggagggtgcgtgtggggtgtggtccctgctctccactctgtgcccagctgggggtcaagtggggagcccatggggtgggggtggggtgtgggaggggaagcatctagatgaggtgtgagatgctccataggcggagggcttctgcccagccaagcctcatgactgagcgataaaggcgccccccaacccacctcccacacagggcagggcctcatcaggtgcgggcaggtagaatgcattggaggaggctccaacattttgcttctgaaccatccaggtgcccccggctgtggacaggaccacgcaggagcagagggcctggcaggaagcggggagctgtggtgggtggtctcagtgagcacagagaccgagggatccacccctggggctgattaggccccagcaaaccccagggtccacttgtaccgatcagagccaggggaggctgagtcagtgcaggtggggggcaggcagcgagggcagcattgtgggatggaaaaggagggggcggtgccggggattttgggaggaagcagggaaggaaagcagaggccttccagctgtgtgtgggagggggtagacggagcaaggaaaaacagattacggggcaaaaggagaaaaaatagaagtcacaggaaatgctccaagagttgacagcccctgtggaggaaggggcagggcggacctgcagggaggaaacagttttgttggcagccctgggagcagaagtgggctaggctgggtagggggctggcagcgggcgcaggcagcaggggcagtggattcaggaacagagtgaatagcgggaggatgggggaggctgggctttgcaggagagaatgcaagtggcaggaacccaagctaggccccagagggctgagcagggagagggacagggctgctgcgagaccttgaagggctgatcaatatcacacgcggatcaccgaaagaagccgagcatgatgggaagctcacatgtccccagagaaaaacacgtggggcatgcagcccccggagagaacaagagctgcaggcatgcagcagggagctgggtcctttgcacgctctccaccatcaca

SEQ ID NO: 14716 - DNA, 1498 bp, Artificial sequence
  DNA replication origin
atttgcagtcaggcagaccaatgaagactcagtgaggatgtttgggaaggctgagtagagaccttatttttaagcatgtgaggaggcccaatgccagggaagggcaggaaggggccctggctcctccaaggctgctggggctgtggacggcaggggagttctatgtgtacccaccccatcccgccagcctctgctgactcctgccctggacacaccatacctttggtttcccttagcagctcttctgtgaacttgaccacctgggccacctccacccatgggaagcctttgcccactgcaaagatgatgctctcgtagagggtgtccagcaggatgctcctccgggagtctctctgttcgtcaaactcctcccagttcagaagcctccgcaggcgctcccgaccttgtggtctctgcagggaatgacatgggaactgcagggtatgatgtgggggttgcagggcatgatataggggctacggggtgtgatatgggggctatagggtgtgatatgggggctgtggggtgtgatatgggggttgcagggcatgatatgggggctgcatggtgtgatatgggggttgcagggcatgatatgggggctacagggtgtgctatgggggttgcaggatatgatatgggggctacagggtgtgatatgggggctgcggggtgtgatatgggggttgcagggcatgatatgggggctacagggtgtgctatgggggttgcaggatatgatatgggggctacagggtgtgatatgggggctgcggggtgtgatatgggggctgcagggtatgatatgagggttgtggggtatgatatggggttgtggggcatgatatgagggctacagggtgtgatatgggggctgcaggctgtgatatgggggctgcagggtgtgatgtgtggtctgtgggatgtgatatgggggctgcagggtatgatatgggggttgcagggtatgacatgatggttgtggggtatgatatgggggttgcggggtatgatatgaaggttgtggggtatgatatgggggttgcggggtatgatgtgaaggttgtggggtatgatatgggggttgtgggatatgatatgggggtcggagggtatgatatggggctgcagggtatgatatcgaggttgcagggtatgatatggaggctggagagtgtgatatgggggttgcagggtataatatggggttgaggagttgagaagccatctctactgggtaagacacttttggggtccccacagtggtgctccagagccctgaagagtaactaggtatgtgggtacccctgggaagagctgtgctttggtttctgggcagcactccctcctcctgggacttgctcttcttctaggactttctttcctctgagagttctcatgctggccactgcagcccaggttttgtgtacctccagcaggcctcaggttctgaaatacgatccctatccccctgcctaaaataaaatttgactttcct

SEQ ID NO: 14717 - DNA, 717 bp, Artificial sequence
  DNA replication origin
ggcttagaaaattggtcactttattcatgaagactccatggaccagcctttttccacctggtcagttgctgtctctgtggtcaccttggaaggacatcctctgagctgaggttgtgggctttggatgcaggctggcacagagaaaaggcaggggctggcatcccaggaccccaacgccaccctggctctgccctgagctgtgtggcctggatgagttcccacccctccctgagcctcgctgcccgtctgttactggaagggctgagccacatgggagctcagggtctccctccctcccagaagcatcaggaatgatgaggggtgctggccactcccaagggcagcccagagtcccgattcccgctgaggaagagggcggcggctggagggagaactcccccttttcagtgtcatcttgggctgaccctctggtttttccactctctgtcctgcccctctagggccagtctcctgccctgggggattgggatgtgtggctccagcttggggatgggaggtgcacaagatggagggacaagagaggaggtggtcaggaggcctgtgtccgggagagatgcctgcagcatctgccaagtgccctagctgtgaaataaggaccgaggtcctgggagactagaagcctgctcagaggcactgtcgcagatgtgagcttccccaggcctgcgccagctctcagacaagcctcctgccgcagca

SEQ ID NO: 14718 - DNA, 1308 bp, Artificial sequence
  DNA replication origin
tacccttggcccgagggtctcgagtgcccggccctggacgccgagctgtcggatggacaatcgccgccggccgtcccccggcccccgggggacaagggctccgagagccgtatccggcggcccatgaacgccttcatggtttgggccaaggacgagaggaaacggctggcagtgcagaacccggacctgcacaacgccgagctcagcaagatgctgggtgagtgagcgcgcggccgagcgggctgggggccgggggcgggcggcgggcggctggcggcactgcagggcgggtgcgagcgcggagcctggggaagacccggcacgcgggacgagggccctcttcgtgcccgcgtggctggccatctgcgcgagcgtgggtgctcgcggtgcccaggattcagagcgggggcacttggcgcggtccaaagtgaaaccgcgcggcgggcagggaggctcctctgctgggacaggagcggagatcggcgccccagggggcggggagacggggcagcggccaggccaggacgcctggcgacagggaccggcgtgcatggacagggcagggacggaaacgtttgaggctgggtggaacaggcgtttactaggaataccgaagcgggaaaagccagcattccctggaccttacaattgggccatctcagaggaaggctgtcacagatgaaattataattaacgaatattcccgaagagagaccctgaggaacgaatccttgctttaactaaacaattaagaggaaaacaaaacaaaagaaaaagcttacccaaatagactcgattcgttcatctattgctcagtctcgaaggtgtagataacttgattcggatgcttgggctgtcctggaacccgctctcttcctgagctgtccccgcagggactggggacacggactcaccaggtccaagaggtccagagtgaggctgttaggacacacccgaacaaccggagttcctatgggggtttcttttttctccggtgtcgagctgagtacttttcaaccctgccttctttgcctttcgacgaggtttttattcgttttaatccgcgaaaaactttcaaagcacttggtgcacgcagcgggagacaggccctgtaagaagggcacccgaggccggctctacccttcccaaaccccacccggtccggaacagagcccttccttttttcgtcggagttcagagctcagggctctttcccgaggcggaactttggggataggactgacgcccctctttctgctggctaaagccgcaggcccgcagagggggtcccaggccgagccctcctgc

SEQ ID NO: 14719 - DNA, 1131 bp, Artificial sequence
  DNA replication origin
gcatgcaaggcatcggtcgctgcgcgcggggacattgaaatccggactcaggctcacgggcttcatgcctagagttatattaacatcaagcatcacaggcagggttggagctttctctgcatttatctcaccgaatcttcacaacagccccggaaagtcagtcttatcattgtcccgtgttaggattaggaaaagagatccagagagatgtgacttgtccagagtcgcgcgttcagtcacctgaacactaaggttctgactccggaccccacggcacccccgcacccccacaacgctgcctccttccaggatcacctctgtggagccccgcacatgggtggcgctcagtaaattttaaattccaggatctagtcaaacctgccgactttcattcagtaggtgtctgagctatatttgctcactcattctgcaggccttgagcgcctactgtgtgccggcgcttatatgagagcgcgggaacagagctcctcacagggggccgggtgacaggggagctgcggtgagcgcggccgagagatggccgtgagctcccagcctgcagtccccaggctgcacgtgggcccggcgcgcacggtcggtctacaccagggtgtgcagatgagggaaactgggggagttcgcaggtcgcagcgcagccagggggggacgcgagagggcgggagcgactccactcggagaagcgggactgccaatcggaggaagaaagaaaaaatataaggagaaaattcagggtgagaagagccagaagtgagggagctggaggcctggacccggagactgggtgcgggtggagtgagaggagaaatcaatcaggtggctgagaaccagaacgacggcctcgccctcctgagagccaggggcggcgggggcgtcgaggggtcttgggtgagcactgcacagaacccgaggcgggatgcggcccccagccccggctccggccggcctctgtggcggcccaagttgactggggctgcggtggccgaagcccggtcattttcgaaaggaatggcagtcggagtattaagaacggctgctctgaggggttcatggtcaatgtctctcacacccaggcgggctcggcgaaacctggttgggttgattttctgaggc

SEQ ID NO: 14720 - DNA, 990 bp, Artificial sequence
  DNA replication origin
cacccagtctccgggtccaggcctccagctccctcacttctggctcttctcaccctgaattttctccttatattttttctttcttcctccgattggcagtcccgcttctccgagtggagtcgctcccgccctctcgcgtccccccctggctgcgctgcgacctgcgaactcccccagtttccctcatctgcacaccctggtgtagaccgaccgtgcgcgccgggcccacgtgcagcctggggactgcaggctgggagctcacggccatctctcggccgcgctcaccgcagctcccctgtcacccggccccctgtgaggagctctgttcccgcgctctcatataagcgccggcacacagtaggcgctcaaggcctgcagaatgagtgagcaaatatagctcagacacctactgaatgaaagtcggcaggtttgactagatcctggaatttaaaatttactgagcgccacccatgtgcggggctccacagaggtgatcctggaaggaggcagcgttgtgggggtgcgggggtgccgtggggtccggagtcagaaccttagtgttcaggtgactgaacgcgcgactctggacaagtcacatctctctggatctcttttcctaatcctaacacgggacaatgataagactgactttccggggctgttgtgaagattcggtgagataaatgcagagaaagctccaaccctgcctgtgatgcttgatgttaatataactctaggcatgaagcccgtgagcctgagtccggatttcaatgtccccgcgcgcagcgaccgatgccttgcatgcaacatgcaacgggcccgacggctaagacccggcaagtgtaaggtgaactgcagcgtctctgtgttcacgtcctaatttttacctctagagccggggacaattttcatccgagaattagctttccgcacaaaagagatggctgggtttgcccctcttttccagccaggattcagtagcagcaccct

SEQ ID NO: 14721 - DNA, 1412 bp, Artificial sequence
  DNA replication origin
ctgaacgcgcgactctggacaagtcacatctctctggatctcttttcctaatcctaacacgggacaatgataagactgactttccggggctgttgtgaagattcggtgagataaatgcagagaaagctccaaccctgcctgtgatgcttgatgttaatataactctaggcatgaagcccgtgagcctgagtccggatttcaatgtccccgcgcgcagcgaccgatgccttgcatgcaacatgcaacgggcccgacggctaagacccggcaagtgtaaggtgaactgcagcgtctctgtgttcacgtcctaatttttacctctagagccggggacaattttcatccgagaattagctttccgcacaaaagagatggctgggtttgcccctcttttccagccaggattcagtagcagcaccctaggccggtgcgccccaaccgctgcactggtgggccgggaatacaagggtgtggggcggggcgcgcgctgcgcagctcgagcagagaacagggtgcccaccgctggggcagcatcctggaaccagaggcgaagcggcgggggacccacctggggccgtttgcagagagtgcgtcctccatctaggcggacttcccaaccctgcaaagcccaggccatttccactggccaacccctttcccgcatatgcctccagcaaaacccttaggccagagtgcgcctcgtgggatccagggccgcgcccggccaggagaagggagctatttgagaaaggggagaaagagggtcccacggggggattgagcggcggcggaggatcccgggaagagctcgtccccgacactttctgaccctactgagctccagggcggtggcagtgctctgcagggtcggaggccacgaggggacagcgcccccttcccgacgacgggcgtccccactcccggccgcagcccgtagcaccctccctgcaaggccccagagcagagcgcgaaagccgtggggccgcgcccgggcaccaggttaggaagatgcgccctccccagggaacacggaatggtcaagttagatcccagacaccgatggcaacaacagagaaaacaacggggacggggccagagaatacgtgctgtgattattgtctgcacttgtttagtttcttgcttttcctctgcagcgagcttgcaagcctgggctgtccaggaggtgaacattaaccttcccagcgctgacgcgggcgccgcccggggcttggaaattgtcagcaccgcggtagccgggctcgctcgctccattccttcattcccttgcgtcgacgcatttatgcaccttggcaactgtaagcgagcgcgccctggtgcaggcgacgccaagggacgcggggtctccataacctcgccgattctctggtcactgcgaccttcagtcctagagc

SEQ ID NO: 14722 - DNA, 967 bp, Artificial sequence
  DNA replication origin
acgatcttggctcactgaaacctccgcctcccgggttcaagcagttctcctccctagcctcctgagtagctgggattacatgcgcgcgccaccacacctggctaatttttgtatttttagtagaggcggggttttaccgtgttggccaggctggtctcggactcctgacctcaggtgatccgaccgcctcggcctcccaaagtgctgggattacaggcgtgagccaccgtgcccggccaatccctgctgttttaatcacagttattctgaattaggaacttggtgggtttctcttcgatgactatggagagatttccgtgggttgaacaaggaactccactacagcgtcttgtagaaaacccgagctgcagattcctggaccccgcacggcgcgggaggcggggctggcaggcctggccgggtctcccctctctgcagcccgcacctcggccgtggccagcagggtttggccccttgcttttcacgttaccttgttcaggacacgccttaaactgaaggcaccctgtggatgaggaaaggcgcagtggaacttccagagaccaggctagagggggcgcaaagccaggaggcgtcgcagcggctggttagaagcacttccctcgagctggggcactaccggggcgcacaggaacctggtagtccaggcgtgaggtcaggagccgtgcgctggggtctgtgctctggcctttgtagccgcagcctcacccgccttgtatgggaaatggctcagtcctaaaactctgggccttctgcttcgagggttgtgtggaggcggggatgagccagtgaatgggaacctgctttgcaaagactgccaatcaagtacagacaaatcagcgtgatcaaagatggtgatgataatgacttcaacctctagcctggtgtgaggaactaaaagcaaccacagaacacttgcacccaacgcctgcgggcgctgccgcgggcc

SEQ ID NO: 14723 - DNA, 1689 bp, Artificial sequence
  DNA replication origin
gacaagaactgcctttggcataattctgagcactctcctctgatgttttcagagtaaaggctgaggcgggagtcagtgggtagggagaggtgccaggcagattaggaaacccaggtgggctggccccggggttggggggaggggtgggtattgctaagttatcagttatttaaccttatggagttttatttaaccgtttttgtttgacatgttttatatatatgtaattttatttattcttcacaaaatccctgtgaggggggtggtactattgtccccatttaaagatgagaacactgaggcatggagatattaacaagtttacagatagtgagagccaataataataataataatcaggaattgttataataataatcaggcattctgatcccagagctggaactctttgaataactgattattttggtacaacaaagtatatggctgcccctgtggagttgtggtctcccctaaaaggcgaggctatttgtggcatcagtcacgaggggaagaagaattagggttctgggaggcaacagaaaggggcagggaaacggcctggtgggattcgtctctcttggcctagttggaaaagccggcaagctattgagggaagaggctgagaaatggaggatttgggcacggtgtctggcggctgtgccaacccactgggcccagggcggaaatagctcagaacacgcgggagaaggcaggcagggggaaggccgggagaaggcaggcagggggaaggtccctggaggctcggctgtttgtatttccttgtctagtggttacttgtcacctgtgactcttgcctgatgctcagtgagggcacttgggaagatccagctcacctcacgcgtgcttgtggggttaaaagacaggagcgcgaggaagggaaggggagcgcggggaaggggaagggaaagggagcgcggggaagggaagcgttagctcggggaagggaaaggaagcacggggaagggaagggagcgcggggaagggaaggagatcacggggaagggaaggggagcatgagggaagggaaggagagggcggggaaaggaagggtcagtgcgaggaagggaagggtccgcgcagggaggggaaggggagggcagggaagagaagggtcagcacggggaagagaaggggagcgcggggaagggaagggtcagcgcggggaagggaagcagatcgcggggaggggacggacagcgcgcggaagggaagaccacattggtggtctcggaggttccagggaaggtgacccttggaggggcaatgctcgccccacatggaaattcacactccagccaaaacgcagctgacagtgaggatgttttccgctgagaggagccataattagacctaaacattaacagcaaatccaggaccatccctcaccaagtaggagaataagggagtctaggctgtaatcgggcctgatttcccaaaggaacatatatgttttcttaaccttatccaacagtattttatgattctaggcccttgattggggcctatacaggaccagctactcccagaaaacgaacagaaaagagaacattttccgagtgtgctctttcctcctcttggcttctgtgtctgtgttattcccaggcagagggtaggatccatcggattttccatattcctaggccagttttgaaagctcctccccag

SEQ ID NO: 14724 - DNA, 1825 bp, Artificial sequence
  DNA replication origin
aagctgctttacaaatggggcttacacatgagcttggtttgaagcaagagcaccacagtttaaagggtctgaaaccattagtgctgcccaatatgacggccccttgtggtcccacgctatctctggtctgtggcttcccctcccatagatgtgcaaatgcctggctcaggtcagcacccaaggacaggggccactgcccctgatggggagacccagagccctctacccggctggctctgctctgctcacatggacgaagtggcctggaggtgccaagccagcccacatacattcagaacatgcctgtgcagctcttgagtgtggtgtgggccccgtcagcactgcactgggggccgggcgtcctggggactcagggcaggatgggcaatgcccacagagcgtgccaggcacgaagtgtgtgggaggcggccgtggtccccaggtggagggcaggccggggtggcggggcgcggccggcgggcactcacagggcagggtctcggcgctgttcttctggagcatgatgtagagctgtagcaccagttggggcgcgctctccaggaaggtctccaggaggcgcagcatgttgacgtctgcatattcatacatcatagcccagtagaagcgtcgctggtgttccttccgccgctggctctgaatccccaggtacatggtgcggatatacctgcccagagagatggggagaacacagagagcatgggtgggtgcaggggctccagaggacccttgccatccccctaaaaccaagagactcagcatccccccaactccctatgctctgaagttcccagaggcttggacggggctctggggggctcccggcaaaaggacatgatgctgaggcatgggggaggggcggggcaggtcaggaaaggatttgacccctcgtggacccctaggcaggtcttcctcctcctggtctcccatttgctcatctggaagatgagactgtggggccagatgccctgccagggcctgcaggtaggcatctcaggtgagctccgggacaggggtgggctttcaggttcaggaccccggggggaaacaatccagcaaggttatcacctctgttgttctggaggaggaaaggaagggaagcgggtgaacatttctgaagctcctactacgtgccattcgctggctggccatgcccaggtggtaagtaggagggtatggttctcacatgatacagacaggaaacagcgtgggctcagaaaggtcacccccactgcacaggctcctgtcgccggatagtggaacaagtagggatcacatccaggccactggacaccctccctggacatcagggggacccagggcctgccatggagtctccgtcccagcagggcccaggacacaggagcagatccgctgcccgccctctcaggaccactcccgggctctgtgtgggagggctgaggggccaaggaagcaggtagggggaagagcaaggttcacaggtcaagcaggcctgactcatcacttgctaagtgggggatcttgaactagttattccagctctgtgtccttgtcactcatctttcatatggggacagaatgagagcatcgcagggtgcatgggaagattagtgagatgatatgcacagtcggcatctccccaggtcatataataaccccagcctcaatttcaccggaactctctggaactgtgtctccaaggcaagagaaggacttaaggcaccatccaaactcagccaacaggctccaagtctgggccagggtagaggttgtggacagggctcacccagaagcaagggccacagtgcacagctctgtgggccca

SEQ ID NO: 14725 - DNA, 770 bp, Artificial sequence
  DNA replication origin
ctgctatccttgagcagatacctcggtggtgggaaggagcacatcagatccaagaagccttccaggcaggagaccccaagcgcagctcccctggggtgggaacctgcttggagagtggaaggagcagcagggaagccagtttggttggagcagagggggtgaggggtctggggaaggggacagagaggcaggcggtggaaagaacattggattttatgctgaagtataagactaagcgttgaggggagggaacttagaggacgaatcaacaggtgcagcaaaccaccatggcacacgcatacctgtgcaacacgccaccgtggcacacgcgcacctctgtaacaaaccaccatggcatatgtatacctatgtaacaaacctgcacgttctgcacgtgtatcccgttttgtttgtttgggtttttttttgtttttgcttttttttagaagaaacacagaaaaaaaggctaagctattggagggctttcagcactggagggctgcagtcttatttcaacctcaaatccttcattctggctgctgtgtagggtggaggcagtggggaaaagctgctcgtgaatggagtcagttagtatcagccaaggagatgagaagggagaagccggcagatgcagacatacgttctgcaggtggggtaagaaggatcaggcatggggcgtgaggaaaagaggagccaaagatttgccttatttttttggcttgagcaactggataatgtgatggtgtcctttactccgctggggaagcccg

SEQ ID NO: 14726 - DNA, 1383 bp, Artificial sequence
  DNA replication origin
cggagaccttggggttgcttaatgcagagactttagagactttggaaataaaataagccccttgcccctagcccttgccatctatgttttttaagtagcaagatgactgaggcctggatgaggaagtgattcctccacaatggcacatggcagcctatagcggatcccagcctgctgctcctgcgcagtgtctgcggggctcagaaggaagcctgcggtcccttgggagtcattggctgcaccctgggtgcacagggtggcgcgtgggggggtcagctgggcttcagcccctcccacctaggctggaccccgcgcagtgctctctggcacccctgactgagcccctcagcactgtgaccaaacatgccagacacgcagcacaggccggggcttcagcggtgcaggtgcccaacagcccagaaggctttctgcaggtggccaggaagcctaggagagtttagcccctgctaggggtgcgggagtgggaggacggcgggcagcagaggaatcctaacgagccctctagaggtccccaagctttcccggagtgtgctgctctgggctcactcccggtgggcaaggccattccaactggaaacaggggtcggggtgggggtggggaagagaggagaggacaccagctttaactcaaggtgcgggcaatggggagagaaaaccagggggagagagaactgggctctgggctcccccacaggccagacagccaaagcctcacgtccaggaacggggctgaaggagatgcccccaccctcagcacacccatcccttcaccaactcacccattcaacagagccttacctcgcgccatctgcatgccagatgccagccagtgtcggtccgggagattccacagggaactggacacacaaatttcctatcttcgagtttgcattttcgtggggaaggccataaacaaacaaaagagacattttcatttcagatgacaagtgctctgggaaacaagagctgggggacagatagtgccttatgggatgggggtgttgttttagattcgggagtcaagggaggcccctctgagctgctatccttgagcagatacctcggtggtgggaaggagcacatcagatccaagaagccttccaggcaggagaccccaagcgcagctcccctggggtgggaacctgcttggagagtggaaggagcagcagggaagccagtttggttggagcagagggggtgaggggtctggggaaggggacagagaggcaggcggtggaaagaacattggattttatgctgaagtataagactaagcgttgaggggagggaacttagaggacgaatcaacaggtgcagcaaaccaccatggcacacgcatacctgtgcaacacgccaccgtgg

SEQ ID NO: 14727 - DNA, 1666 bp, Artificial sequence
  DNA replication origin
cactctgtcaccctgactggcatgcagtggcatgatcacaactcactgcatcctcagcctccccaggttcaggtgatcctcccacctcagcctccacagtagctgggactacaggtgcacaccatcacgcctggctaatttttgtatctttttgtagagatggggttttgccatgttgcccaggctgggctcaaactcctggggctcaagcaatcctctcacctgggcctcccaaagtgccaagattacaggtgtgagccaccacacccagccgattcagaattttgaaaacagcactctccaagtggacatctattctgctttagccccagcaaggaacctttgccattcatggtgctgtgtcccagctgtttcatccagagctggcagacgggccatctccaaccctcagccctaggtagacgttggcttcagaatacaggctttagacctggctccaaacccagccttggagatgttgggcaagttgtttctccttgttgagccattatctgtaaaatggggataggggataagaatatttacccttcatcagggtttgtatcaggatcaaaagaggtatttcccttatggcacacttgctatcactggaattattttgtctctcctcatctacgagacttgttctctgctgcatccacagagcccagtgcagggcaggatgtaataagtatttattggatgaattgccagagaaacaccaaactcagcatttggcgcctagtaggcaggcattgaatagcggtgattcctgtccactttgtcttccctgtcttccccttctagactgcgagctcctttgtgtacgggaagtgtaacctcctctttgtcaggactttgtaacctcttagtcccttgtatgcaggagaaaaacccaaacagaccaataatcatgtagaaacgagtccctgggcatccgaggatcaggtcagggtctcccacaactgtccccctgggagtacagggagcacccctagttcccggcgggtggcgccatcaaggcactgcggggctgcggaggaggcaggggctctaggtttagcatggtctagggaaggtctgcagtgcaggctggatgcggggaggcctggagaggtggaggcgtggaggcatggaggcagggaggcgggaggaagggaaagccctgctgctggctgtctcctccccacactagctgtctcaccaaagtctggctattagtcactgtccagatgtcacttccttttacctgctagcacccctaagcccagaacttggggttctctttatctccgcctgccaccctccccaagctctgatccaaccctgagcttgtggctgctgtggggagtggaggtaaaaatggtaacaccagaagtgcacttacatcagaatgctttaaaagaatggaattattactccctggaatgaattttaaaccagaccttattgcctgtatctggccactgtcaagaaggggaatcccctgagttgggcgagctattggacttagagattttgtgaaatgcctaacacccatcctgtcaccttcagggacactgcaggagcgttgttttttaggtgccaccctgcgcgccacctcccttcatcctgaacactcctggatcctggaaatgctcttgtccccgtggaccgcgctccagcg

SEQ ID NO: 14728 - DNA, 1211 bp, Artificial sequence
  DNA replication origin
gcgccgggggccgcgggaggctgcagcggctggtcccccccgtcggcggcggcgctgcggcgcggcttcctgcccaggagggagcgcaggcaggcggagcggcagccccagtagcacgaggaggtgttgcagcagtggcagatgtgcatcgagctgctctcgccgggctcgctgccgtcgccgccgccgccgcagccgcctcccccgggctccccgtcctcctcgccgccgctgcccaccgcctcgtccaggttgtgcagctgagcgaagcccacccccacgccaccgccatcggatttcgccgccatcttgactctcttcccagctccggaggttgggggggagggacggcggggggggggggaagaaggcagggaacggggagggggggaaacgaatggagaggaaggggggcggggaggaagcgggggagcaaacgaacgaggggggagtgggccagggaaccccctccgcttccgggtagttggcgtcacttccgggcgagccccccaatcgcacggcgcccgcagctccccagccctaccctcccggccaagatggccgccctcctgtgcctcagctgctgggcgggggaccggggggttctccccgccagggctccccttcccctcttccgttgaccccgaaacccatcaggttgacccctcggcgtttcagaatccggctggcccgagtgaggcggtccaaagtgatccctggagggggcagtgccagacgttttggggtccccttcctcagcgtcgcagctcacagctttcctcctggagaaacgccccctaacaccctcccggctgctggtggaggggcgggacctctgagggaaggggcggagctagtgcaaagcaggtgattacgtgtcacttccgggagatgggatgacctcattgtgtagttagacaacacccccccccaatcaaaatgtctatgtctcacctctttggctgtttctattttcttttaaatttctcttattcttctcttattttgagggtctttaaaaattacataagtcagattttcacaatcaagttactgattctcacttccatttagacacctctcctcttacctctgttgacctcctgattttcctgtcactgacaacttaaccaccttttgtaataaagtttccatcattaccttaaaaaagcttcaggcaaaattcaattggaaatcagcctggttgggtc

SEQ ID NO: 14729 - DNA, 1403 bp, Artificial sequence
  DNA replication origin
tcgatgtttgaatggaggagccacagctcctccgtattgtcctgccgggaggacaggatcaagtggtggcccgtcaggcacagggtgccctcgacagccgggtagaaaggccggtgcagcaccacattgtccacccgcggggtcttaatcagctccgcaaactccatgctcccccgcggccggagccagggaaccgagcccggtaggtgcgaggcggttaccccgccgcagggaagtagcggaaacacccggcgcggggctggcccgtggggcggggcgggccgggcggtgaggctgggcccgccccaggctgggtgggcgcggcgaggcctacagccgccggcaccggccgcggggagacaggggctggggctggacgaggcccaagcgcctctcccgcaccgcgcggttcaccaggcctaggactcggccacagagaacccctctccacaggcccaaggaccgccgctgccgttgggctccgggtcccgcgttggcaagcggagggcagtaggagaaagccgcctcagaatccgcttccacgccctggccgctagggactcctagcggaagtggctactcgctgctggagcccacaacaactccgggcggaagcagcaggtctcgaaactcggaagacgcggaagtcgcagccggaagttggtcctcgctaggtcctctggaaatgcctccggaaacacagccagaccagaagatgtgtgttcctacgagaaaaaaagcttgtctttgccttcacgccctcccgctgcctttcttaaccacctacaaatattccttatcagaagaggtccgggaagagggaggaggtccctgtcttgccttcctccgcttgagtagtatcccctccagaagctcttcagagcgtggggctgctgtaaattgtgataattgttatgcattagccctgaagacatggcaagtaggggatggaggcggtgactgtgaccttacggaatcctccaggggtcagggagggacacagggccactccacaggctctccgagagcgccgcgccacgaggtgtaacctggagcaagaaagaggaaaaacaggaatacctgtgagaggaacccaagtacatgcagtgcacagaagagcaagtcacttgacttgctggcggccaccccgttaatctgcagcagagcctggacttcagtctgcatctgtgaaacccagcgcatgggtgcgttggtcaccaccgcacagcctccccgtcagacacccacgtttcgccaaaaatttattcaaataattactcctttgcttgttcctttcccaccgcccacttctgacatttttattcaaaagtaggaaatagaagagaaatatgtttgagtgctggtctgctgtgacttcattgaccttttaaatcctcaccatc

SEQ ID NO: 14730 - DNA, 1454 bp, Artificial sequence
  DNA replication origin
ccagacggggtggtggccgggcagaggggctcctcacttcccagaaggggcagccgggcagaggcgccccccacctccctcccagacggggcagctggccgggtgggggctgaccccccacctccctcccggacagggcggctggccggtggggggctgaccctccacctccctcccggacggggcggctggccaggccgcggctgaccccccacctccctcccggacggggcggctggccgggcgggggctgatccccgacctccctcccggacggggctgctggccgggcgggggctgacctcccacctccctcccggatggggcggctgccaggcggagacgctcctcacttcccagacggggcggctgccgggcggggtgctcctcacttcccagacggggcagctgccaggcggaggggctcctcacttctcagacagggcggccgggcagagacgcttctcacctcccagacggggtcgcagccgggcagaggcgctccccacatctcagatgatgggcagctgggcagagacgctcctcacttcctagacgggatggcggccaggaagaggcgctcctcacttcccagactgggcagccgggcagaggggctcctcacatcccagacgatgggtggccaggcggagacgctcctcccttcccagacggggtggcggccgggcagaggctgcaatctcagcactttgggaggccaaggcaggcggctgggaggtggaggttgtagcgagccgagatcacgccactgcactccagcctgggcaacattgagcactgagtgaaccagactccgtctacaatcccggcacctcaggaggccgaggctggcggatcactcgcggttaggagctggataccagcccggccaacacagcgaaaccctgtctccaccaaaaaaatacgaaaaccagtcaggcgtggcggcgcgagcctgcaatggcaggcactcggcaggctgaggcaggagaatcaggcagggaggttgcagtgagccgagatggcagcagtacagtccagctttggctcggcatcagagggagaccatggaaagagagggagagggaactcctgggctcaagtgatcttcccactccagcttctgagtagcaaggactgcagatgagcaccatcatgcctggctaatttttttattttttgtaaagacaggatcttgttatgtttcccatgctggtctcgaactcctggccctatgtgatcctcctgcctcagccttccagtgattaacacagacatatacaccaatggaacacaatagagtgcacagaaatgaatatgcatatggtcaaataatcttcaacaaagataccaagaccacacaatgggaaaaggacagtctcttcaacaaagtgttgggaaaaactgaatatccatatgcaaataatgaaattgggcccttaccttacacggta

SEQ ID NO: 14731 - DNA, 833 bp, Artificial sequence
  DNA replication origin
tctctgcccggccgccctgtctgagaagtgaggagcccctccgcctggcagctgccccgtctgggaagtgaggagcaccccgcccggcagccgccccgtctgggaagtgaggagcgtctccgcctggcagccgccccatccgggagggaggtgggaggtcagcccccgcccggccagcagccccgtccgggagggaggtcggggatcagcccccgcccggccagccgccccgtccgggagggaggtggggggtcagccgcggcctggccagccgccccgtccgggagggaggtggagggtcagccccccaccggccagccgccctgtccgggagggaggtggggggtcagcccccacccggccagctgccccgtctgggagggaggtggggggcgcctctgcccggctgccccttctgggaagtgaggagcccctctgcccggccaccaccccgtctgggaggtgtacccaacagctcattgagaacgggccatgatgacgatggcggttttgtggaatagaaaagggggaaaggtggggaaaagatagagaaatcagattgttgctgtgtctgtgtagaaagaagtagacatgggagacttcattttgttctgtactgggaggggttcttctgccttgggatactgttgatctgtgaccttgaccccagccctgtgctctctggggcatgtgctgtgtccactcagggttaaatggattaagggcggtgcaagatgtgctttgttaaacagatacttgaagacagcatgctcgttaagagtcatcaccactccctaatctcaagtacccagggacacaaacactgcggaagg

SEQ ID NO: 14732 - DNA, 1459 bp, Artificial sequence
  DNA replication origin
cggggaccctgcgcgcgcccgggaatgcagagtctccagcgccgcgcagggctcgccccgacctcggccggccctgggcaacccgctccgcggccagtccccactccaagatgtggctcggctcccacctccgcgggggggaaatgtcgggcgacccccacactgaccttcctgcgcacccagcgcaaactacgaacccagagttggagctgcccgcagaccccgcgcagccagaccccgcgcctttatcccgccccgccccgccccgcccggcgcaccaatccccggccgaggaggggccgcgtggcgccgcggggggcgggccgcgcacgccccccgcagggaggactcagggacagtcagggccccgggagagtccgcgcgcatcgcccggctccgcggcgccagccatggcgtccgtgcgtggccccgccagggatggggcgacgcggtcagagccgcacgcgaccgaaatccgcactctggagccgcagagcgcgcggtcttgctgtttagcggctccctggcaagtgacgtggggaagaaacgcagggcgcaggagagacagctggaaaggtttgcggtgtagctggcccaggattgagggtctggaggtcgggtgttggaagaccttgagcgaggcacttcttggcctccccagctgggaggcatcgctgaaaaattaggtgacccccaagacggtagaccagcagagtcagcgtcacctgggcgccggttggaaatgcagattggcaggtcccacccccaacccctcccgacttgctgagtcagcatctctgggggtggggctcgcgcgcccccagcgggacgccggtgcgcgcagtagcttaagaagctgggtccaaggcgctggttctcaaactccgctgcatattgcaatcacctgggagctttttaacctccaaacgcccaggctgcccccggaccaaatgacagaatctccggggctgggggggacggggatagagaagcccagacctaagtatttttttaagctcttaaagcgattccagtgtgctgtgaaggttggacccacggtgtggtctctggacaaagcagcccccactccagacctaccgaaccagggaatctgcattttaacaggatccccaagtgacttgcaggcgccttcggtttgggagaaacaactctaaggtgtcttctgacattaacaatctgtgattttgtgaaatctgtctcgttttgtttagcgggctagccaggccccgttttcttcagcttctcccttgacttgatccctgaagatggctctgcctctggcgcccttgaaatatgtcgactaggtcatgatcaccgtgcattctgctcagcgtagtctccccgcctgaagtgttattaatgcagtctaaaatgactacggttctgcggtctaccgaactgcccacggaggtaggggtttcagacttttggcatctca

SEQ ID NO: 14733 - DNA, 1000 bp, Artificial sequence
  DNA replication origin
tggcgccgcggagccgggcgatgcgcgcggactctcccggggccctgactgtccctgagtcctccctgcggggggcgtgcgcggcccgccccccgcggcgccacgcggcccctcctcggccggggattggtgcgccgggcggggcggggcggggcgggataaaggcgcggggtctggctgcgcggggtctgcgggcagctccaactctgggttcgtagtttgcgctgggtgcgcaggaaggtcagtgtgggggtcgcccgacatttcccccccgcggaggtgggagccgagccacatcttggagtggggactggccgcggagcgggttgcccagggccggccgaggtcggggcgagccctgcgcggcgctggagactctgcattcccgggcgcgcgcagggtccccggccgtggtcgcagagtcaggaggggcggctccggagcccggcgcggggagggcccaggcgcagtcggggttggcagggcgcgacactcgctcccctccacttttgaaagggcttcccacgccgagaagaggggcgggcatggccggcccggcgaaaccggtttgtacagactttgggaagccatcgcctgcggagggtgggaccccacagcttgtccacctgcccaggctgagacctcgtgtcctagtcctggatgccccacgggtttctcgtcccgggcagcggcgcacgggaggagaagactcccggtctgcagtcagacctccctctgagaccctccctagctcaggcttagagctttgggatttttctcgatcctttctagctttcagatcatccccacgtaaagttcagactttaccagcccagagagtttaaaaaaaaaaaaagagagagagagaaagcgaatgtggattgagcctttacactgaccgcgcagtttgcacagtgcttttcatagattgactgcttttattaaacgctctcaacagtctattaggatggcatggtgattgccccctttctgaggacgc

SEQ ID NO: 14734 - DNA, 875 bp, Artificial sequence
  DNA replication origin
cctggatgccccacgggtttctcgtcccgggcagcggcgcacgggaggagaagactcccggtctgcagtcagacctccctctgagaccctccctagctcaggcttagagctttgggatttttctcgatcctttctagctttcagatcatccccacgtaaagttcagactttaccagcccagagagtttaaaaaaaaaaaaagagagagagagaaagcgaatgtggattgagcctttacactgaccgcgcagtttgcacagtgcttttcatagattgactgcttttattaaacgctctcaacagtctattaggatggcatggtgattgccccctttctgaggacgcggaaacttgagatttggcgaggcaagaagccaggcgcacacagctaggcgggccgcgggccgcgaccccctggctggtccgtgctctccccctggggaggggtgcaggctgccaggaaaggtgccccctgcgtggccctgggggtgtttcttcctctttgtctcttcttaggcatctgatctcatctcttaagtgggaagagtcggggtggtggaagtagagggtatgggacacggtggacctacctcacttggtagttagtaactgcctcaccttgggcgggtcagtggattctgaacaatggggaaaaggtcccagcttcagggttgctgtgagggtttaagaagagttcaggaaagcagatgcttcaccaacgctccgtagttaccaggcgcctgatttttccttggatcattactattaagaggatgcattggtgatgatgatgatgtaatgagtcagaggttttaaagcccagactgccttgaaaatgcgtctggtaaaccttcttgctccttaaagcagaataa

SEQ ID NO: 14735 - DNA, 834 bp, Artificial sequence
  DNA replication origin
gcattcaagaagccagggcctttccaccctgccggtgggaccacacatgcacttttgcagcccacagggaaatgaatgtgacctccaaacaaatccaaccattctaagtgccacagagaagataaaatgtgagacggcgccaggtgtggagggggctgcttttcccaagtggtcaaagcttcctggagaagagctcttccagtggcagtggcaattgtgcagaggtcagggaaaagagtgctctaggaaggaaaagataatcccagaccccgaggtctgcagagggaggccagcgcagcaggcagctgcagaggctggcgggggctctccagcctggtagggcagagtcaggagctgggattgtattcgagtggcgcaggaggttttatagggtttttgaatgatacgtgatctgatttaaactttcataagatcgaagtagaaagtactgtgtagagagtaagtggggaggaggggcaaaggggagcccagagggcaattaggggcagggacagaggacgtgagtgtgatctagatggggcagcagctgcggaggggatgaggagtgatctgatgggtatttgcttagggacatctttggggacatactttggggacaatttggatgtggagtgtgaaggaaatggaggacctagagatggccctcctgctggcagttggatgaagaggcagaggggtggcagcagtggtgctggttcacggtatatttaaatgtcaatttaatacaagtggggagtgcgttggacacagggcctggaattcagggaaaaggcccatgttggagacacaaatttgggagtctggattcagatg

SEQ ID NO: 14736 - DNA, 2313 bp, Artificial sequence
  DNA replication origin
ttttccttttgttttctgaaaaggcaaatccctttgttctgggtgagtaagaggttaggaggtctgggacatggctccacagtcggcctagggaggcgagcctggggtgtgcaggcttttctgcccgggtttaatcagaaacccaacacttatctcacccagaggaccagacaggactgggctggcctctggctgggctcagcactgaccaggtggcagccgagaggacagggacacagccctgggccccacagagctgctgccgggagccaggctgccctagtggtcccctcctcctccggggttgccatggcaactgagcaggagggaccctgctgtctagccctggcgctcatctcttgcctttccagcctcatctgcattccaagccttggtcagagccggtgtcaggagccctgacatggagatgacatcctgccgagacctgaccccggccccagtgctgcacgtggcagggatgggttgctgggatatgtgtgtgtgcgtgtgtgtgtgtgtgactgtggtggggttgttgccttgctgagtgtgggtggtggttgccttgctctgtgtgtgtgtgtgactgtggtggggttgttgccttgctgtgtgagtgtgggtggtggttgccttgctctgtgtgtgtctggggggggtggttaccctcctgggtgtgtgtgagtgtggggggtggttgccttgctgtgtatgagtgtgaggagtgtgagtgtgggatggttgccttgcgtgagtgtgattgtgagtgtggggggtggctgctctgctgggtgtgtgtgagtgtggggggtggctgctctgctgggtatgtgtgagtgtggggagtggttgccctgatgggtgtgtgagtgtgagtgtgtggggtggttgccctgctgggtgtgtgagtctgagtgtggggggtggttgccttgctttgagtttgagtgtgggatggttgcctcacctgagtgtgagtgtgcagggtggttgctctgctgggtgtgagtgttgggggtggttgccttgctgtgtgtgaatgtgagtgtgggtgtgggggatggttgctctgcggggtgtatgagtgtgtgagtgtcgggggtggttgccttgctgtgcatgagtgtgagtgtattgggggtggttgccctgctggggttgtgtgagtgttgggtggttgccttgctgtgtatgagtgtgagtgtgagggttggttgccttatgggtatgagtgtgagtgtggggtggttgccttgcagagtgtgagtgtgagtgtgaggggtggttgccctgctgggtgtgcgtgaatgtggggtggttgccttgctgtgagtgagtgtggggggtggttgccttctgggtatgagtgggagtgtagggtggttgccctgctgggtatgagtgtgagtgtggggtggttgccttgctgtgtgtgagtgtgagtgtgggaggtggttgccttgctgtgtgtgtgtgtgaatgtgggaggtggttgccttgctgtgtgtgtgtgtgaatgtggggggtggttgccttgctgtgtgtgtgtgtgaatgtggggggtggttgccttgctgtgtgagtgtgagtgagtgtggggggtggttgccttgctgtgtgtgtgagtgtaagggttggttgccttgtgggtatcagtgtgagtgtgaggtggttgccctgctgggtgtgtatgggtgtgagtgtggggtggttgccctgctgggtgtgtgtgtggggtggttgccctgcctggtgtgtgtgtgagtgtggggggtggttgccttgctgggtgtatgagtgtgtgagtgtgggtacttgccctgctgtatgtgtgagtgcttggggggtggttgccctgatgggtgtgtgagtgtgagtgtgggggctggctgccctgctgggtgtgtgagtgtgagtgtggggggtggttgcattgctgggtggatgagtgtgagagtgtgggtagctgccctgctaggtgtgtgaatatacgagtgtgaggtggttgctctattgggtgtgtgctctgggtatggctagggctgagttagtgacatgtgcagagctgttagggatgtaggtgtggctgggtaagagacatgggcggggctgggtgaaggacgtgggtggtgctggattaggggagtgcggctggctaagggaagtgagtggggctgggttagggacgtgggtggggctgggttagggaagtgggcagggctgagttagggaagtgagttgggccctgggttagggaaatggggggattgggttcgggaagtgggtggggctggattaggggtatgagcgggg

SEQ ID NO: 14737 - DNA, 1390 bp, Artificial sequence
  DNA replication origin
gtcgccaggcaaccgccctgacgcaacgcagggggaaaaaaaaagtcctttccgaaaggagcagcgccgagaattcaccggagctcggggaggcgaggcgggagccctgagctgaggccgggcagcgcggacccgcgcaggaggaggcggcggggacaccggcgagtccccagcagggcccctgggctcccggaaggtgggttcgcgccggcggcggggactttcccagggactgggaggtgtggccgcggcgggcggcgcagtctgggcaggggctgaggcgtcgcaggtccccagcgcgagcactggcccggagcagcccgatcccaaagcgccctggaggggacgcgctcctaccgcccccccgggagaggccgctcatgcgctcccgcgggttcgctgccctcccagaggagccgggcagccagggctggacttcatctcctagctccctgctggccgtgtccgggctcggattctgggtggaggttcggggtctgccgtctgagagggagggccgcactcagcctctccgggtccactcccaggcggctggtgacctccaagcccagcctggctcctgtgtataggttcagtgagatggaagtttctgtccccacggatgcggtccctaactaatgggaggtggcccagggcacctggacccaagggtgctctaaggacccaagccagtgtgacctgagggaacggcacagccgcaggggcccccgggaatgagcaggtcagccgtgaaggtgggcaccctgagtcaccgagacaccggagcacagacggcgggggggagggtgtcttcttcagccaagttaggttggatgtataggttttctgcacacccgttactgcctggtttttattcccggcggggcttggagggaattctgaggactgggacctcctgggaagatctggaaggagggttgactctaggttgggggctggccactgccgtatgcctgcaagcaggttctcccaagtcaagtttccacaaactccccgtcattgctggagaatcccagaagatgagatcacgtcctatccacagggttttcaccaaggggcacatgctccaaagcagcttcccactgacacagtagacacagtcctgcccctcactaagctcgggatggagcgtggagagcgtggacaaagtcttgggaaagcagaggtgctgtggcgcctgttgcctgagggcgttggcaggataggaacttctgcagcgtgtttttaaggagcttggaaagcagccatgggctgtgcttggaatggataaagatgacagctcttctttcttgagtgcatttatggaccatgcactacttagaaacccttcgcatcccttggtcactccatcctccccatcagtcttcaa

SEQ ID NO: 14738 - DNA, 1827 bp, Artificial sequence
  DNA replication origin
ccatggaggaacagctttaggataaggtaggtttggagaaacagcagtccaccctactccctgtcttggagattcccagtgcacatcaacatattaaaggcactgagaagtcctgcagcaaagaaacagtttatgtttgcctcacctagtgcctcccaaactaatttgagctccaaatactattttttttttttttgagatggagtctctgtcacccaggctggagtgcagtggcacaatcttggctcactgcaacctccgcctcctgggttcaagcaattcttctgcctcagcctcccaagtagttgggattacaggcgtgtgccactacacctggctaatttttgtatgtttagtagagatggggtttcaccatgttggccaggctggtctcgaactcctgaatttaggtgatctgcctgccttgacctcccaaagcgctgggatgacaggtgtaagccatgcccaaatactatttttatatagtccctattaaccttccatggaattaggctttcacagagcacactgtgggaaacacagctctcatgtgcgatcagcaaaccaacctgtattagggtgtccacggagcactgttttactctgtgcatataactgaggtggaaatctacgtcacaagagaatctgaaggggtcacatatatttatcaagctagcaagcagtgtctgctgagcctatgagtcagatgacaagcagacaggatatggcttgttctctcgggaacttcaggctggctggggagaccgagaaatggaggccaggggaggctgtgaagtgccaagccctgaggtctgctccaaatgctggccggggctgcagccattgaggtgcttcacagggcagccggatgtgagttcttcctcatagcggccctcggaggtacaagtgtcaccatttccattttgcaggaagggactaacggaggcgcccgcaggtttaaatggcttgcccaggccatgtcttttaaattaaacaaggcccctgtaaggtgaaacaggccccttccatcccaggtggaaacgtggtggctgcccattgaggccatcgctctctttttaaagaaccaaagtgggtgactgtgtggtattggtgtccatatcgtctttctgtgctgctgatgtcgtgtctgcactcacctggtcatgtgtcctggtgtgcggtagtggctcccccgccatgcctggccgccccgccctgtgaggccccgcagtgggggcttgatggaaggacagcaggagcaggggtaggggtgaggatggagggtaggggccaccggccgtggcctcccaaagcttgcatggcttttcccacaggggccaagttccccatcaagtggacagccccggaagccatccacttcggggtcttcaccatcaaagcagacgtgtggtcgtttggagtcctcctgatggaagttgtcacttatgggcgggtgccatacccaggtaggtggctcaccccgcagctcgcggctccctgctttcccggccggccctgatggcaggtcgcctgtgcttggtgcctgtggctgccctgttcttttcagagtgagtcccagagcgaagacggagacccaggcatggcatctggggtggagctctgccccctgcatcactattgctctgggccacagggctgtgtctccttcctccagcagaggtcaaatgagtccctcaaactgaaatcaagacaaagggcacatccgaactcaagtttactcccagtggcttgttctcagttgaggacaggttgtgcctaccttggctttgcacccatagtggattccccaaagccccttcctgtgtg

SEQ ID NO: 14739 - DNA, 1099 bp, Artificial sequence
  DNA replication origin
gaggggctgcaggggccggggaggtggtgtcctggcatatggtccctgctcatgaggtgaaggaagggctcattcctcatcccgtgatcttagctccctcctcagccccaccccacaggagccccagcaggtcagcttggccctcccattcatgagtcccagtggcccccactagcaggagcccccactgaccttgttgtcccacgctcctgtttaccccccaccagccacgtcccctggcaccaggttcttggccaggcagtttcctccttccagcaccccggtgtgaccaggtcctgggggagatcagaggccccacaatttctggagccccactgtatgggacagagttccacctctaggttcctccacctccagcatcctggagcagctggggacacctgtccctctgggctcctcagcgaggccccaggtctgcccccccccagacctccttaaagtgctgtgctcccatccagtgcttgcccacggtcagtgggggctgtgagggccaagaactggctgagaggagcctggtggcatggagtctgtccgtttcatcatctgcagaaacagcttcgtggtagtaatggtgatgcacccaccccaggctgctggagaatccacacactgtaggtgatcacgctatgtgaaccgcatccttcctggctggtggctgtcctcacccagcacccctgcagcgactgccccctttctgggggttctcccaccaagtccccactctaatcctctgctgcccagacctgcagtttcccccacctacgcccccatcctaccgcttaagaggggtgtgtgtgagcactttctgcctcagtttccacctctgtactgcgggtgggtatagtcctacctcggggtgttctcacagtcagaggagtcaacactgacaagctgggtggcaagggttcaaggggaaggaagcgggtgcacaggtggagccagggggctttcaagtgggggacccagaacggtaggtacaagtctctgcactttcctctacacctacggcatgtacaacaggcagcgagaacctggatgcaaaaggtgggcttcggttaatgatattttatcagtattg

SEQ ID NO: 14740 - DNA, 826 bp, Artificial sequence
  DNA replication origin
aacccccagaaagggggcagtcgctgcaggggtgctgggtgaggacagccaccagccaggaaggatgcggttcacatagcgtgatcacctacagtgtgtggattctccagcagcctggggtgggtgcatcaccattactaccacgaagctgtttctgcagatgatgaaacggacagactccatgccaccaggctcctctcagccagttcttggccctcacagcccccactgaccgtgggcaagcactggatgggagcacagcactttaaggaggtctgggggggggcagacctggggcctcgctgaggagcccagagggacaggtgtccccagctgctccaggatgctggaggtggaggaacctagaggtggaactctgtcccatacagtggggctccagaaattgtggggcctctgatctcccccaggacctggtcacaccggggtgctggaaggaggaaactgcctggccaagaacctggtgccaggggacgtggctggtggggggtaaacaggagcgtgggacaacaaggtcagtgggggctcctgctagtgggggccactgggactcatgaatgggagggccaagctgacctgctggggctcctgtggggtggggctgaggagggagctaagatcacgggatgaggaatgagcccttccttcacctcatgagcagggaccatatgccaggacaccacctccccggcccctgcagcccctctgaagtggctgccatgactcgggagctatcctcgagttgcaaggcttgagactgtctcctcacctccctggaccccactgtcattccctaaacatgagtcac

SEQ ID NO: 14741 - DNA, 1134 bp, Artificial sequence
  DNA replication origin
atctgttcctagctccctccgggctctgatgccattaatgactgcaggaagctgttccaggcctcaatacagaaagaacccttagaccctcagagctggaggtgtgcagactggtctctgcctgggctcaacctctgtgatttctggcaagttactgaaattctctgtgcctcaggtttcttttatgaaaattataacagttttatctcctagggttatggtgaatacctagggcaggaccgggcacttagaaagctctcatccaatgtcccctaactcttggagacaataatcaagacttagaggaactgactgggggaaacgtcaacactttcttggttctctcagaggccggtggagacgctgctccattctgcctggatcatttcccagggcaggtaaaagtggtgggacccctcgccgggaggccaggaaagatgcaaagatggatggatgggtgtgttccccaggagtgagtgtgtcctggggtgggtgggtcacggggagtggggtgtcatgaaggcgggtggctatggtaccatgacgggggtggttatgggaagtgctgtagaagtgtgggtgtgttataagaagtggggtttcagagggctgggtgggctgtaggggtctgtccaagaggaataggactagagttgaggggagcaatcttccaagtccagagcaccctcaacccagcaagcctgaacaagtgtgtagggcctctggcaaaataatagccaggcagacgggcagaagagatggagcaggccaagcgtcggatggagagaggtgaacatggccaccacagtgtctggcagtggcctaggcatctctagggcccagcagtggagctggggtaggggtggctgatcccgaagtgttctgttctggccgtgcatcttcatggagactttctgagctgaactgggttctcggtgattccaactcactccccacagacttacccggcactgagtgcaggcctggagggagacacttcacttagatcctttcaccggatggcatgataatgctgtgggaaggtacagatgaggaaaccaaggctcatggaagttgcgtgaattgctccaggtcacaaggcttttgacctccagtccagcgtccttcctgcgt

SEQ ID NO: 14742 - DNA, 613 bp, Artificial sequence
  DNA replication origin
ccaggctccccgctgtcctccctgcttccgggccaatcccttccaaagcatcctgtagtttgtttagttccgttggacagactgtattgagcttccccaatgtgccaggcatggagctaggggacagggttgcaatgttgtataggaatgagttctgagtcccagtccttcagcccacaggctagtggggaaggtgaggctgtcatcaggtaacagcatcgcagtgcagtgtatgggtctttatatggggtgcactgaggacacctatgatggacgcttagtccagtctggggccagaaacctttccagaggagatgctccctgagattgtcttgaggggcagatgagactcatgcagccatagtggagggagggaagggcattccaggcagggggaacagcccagctgcaggcattggggcagggagcaacatgggtctcagggctctacaagcagctatgggttcccctggagtgtgactcggcatgaggctgtgccatggaggagcagatatgttccaccgaggaactgggactttacgttgtgagtgatgggggctcactgagaggtgtcaagaaggggcaggcacagtcaggtctgtatgtcaggagc

SEQ ID NO: 14743 - DNA, 1033 bp, Artificial sequence
  DNA replication origin
tagataaaagagcgacacaggagaatgtcagtggccctgaaggccctgcctcggatctccacggtcgcgcgaattcgggcaatttttctgaaggttctcagactcggggatgggggaggaaggggacgtttctagaagaaacttaaagggggctcgcgccgcacgactgtaggtggagggcgtgcgccgcgggacgccccagccgggtctgataaagccccgaagccgatctaaggtcaataaaccaggcggcgtcaggcttgggccgagggccgggaggagaggagagtggagccctctcaggctggcggcggaatgaaaaggaaccccgactgctggggtccgagccctgggccgcttgcggggcgcgcagccggggagaggagctgggcgcgcggcctgggccccccacctgcccgaccccagggcagccaagcacccgcggccttaaaagtatcccggcgagccctgagtgggccgggtgctgggcgaacagtcctagccctgcactgaggttggaaaagcgaacggaaagtgacatttttacaggggcgaggttgggatcgggagggagatggagacccccgaataatggaaacgcagaagcctcagagacaccagcaacagatagagaagtgtccctaagaggggaaaatgaggaagagggtaacagtattgttaactggccatgaattttaatccctgttgtgtgtcgccgaatagtttacaaactctttttgcactggggttttgtttctcccactccccgcatgatgagaagaaagaaagattgggagaagttaatcagctcaaagtcacatcgccggggtctcctgccagggggcttggaccagttgctaaaggacttcccgccggagaaggtcttcccaagagagattcccacccagagcgcgcagcccgcggggaaaacataacgcgcgcctgtaaatgacgccgctcccacctaggccgctctggggccgcttaacgtccggaatgtcccgacccccggctcaatctttggtgcaaagcc

SEQ ID NO: 14744 - DNA, 1311 bp, Artificial sequence
  DNA replication origin
tagccaagaggccggacctcagagcacccacccgctgccccccttcccagcggcctctggagcgagagagaagcctgggaacctagagaggcgccgataaacctcctccagccggcggcccagcgaggccttgaaatgctccccgctcctggcaacgcacagccaacctgcaggctcccgcttggcccaagggagggagggggcgagcggagagcgaaggaggaaaggagggaaaaggaaacacccccaaaaaagcaggccgtttgccaaccacccctggtttgtccttgagctgaggccttggggagaaagttggggcgctggacctagaggaaaaagccacaagaaacataattttctctgtcccaggcgacttccagagacagcgaatattcctgggtcaggggatcccaggtttcagtccactaggagtgccagcggaaggtgtgggtaaaggaccggggtggtggggggtggtgggaggtggtaggggtggcccagggttggcagaaagcggcggctcaggtaatctggggttccttgcaagcaagcacccagcaaaagcaggcgttcccacccagcggtgtggcagcggccatccacagtacagcctgttatagccccaccatccacagcacagcctgttatagccccaccagtgtacagagcagggggttgaagtttagggaggatggggagggcgagggtgaaggatcgccgcaaggcaccgcacctcccgctgcagcccatcccgcactactaggagaagccggcgtaggagcgccgcctgtgtccttggctgtggggaggacgtcagatggcaccccgccagacactaagccccaagcccctggcttgttgctaagaaaattcactgcccggtccagactcagcccttttcgccctttaagggtcgcgcgtgggaggcagctctgagaccccgggtagcgctggagccacagatttcctccgagaaaagaaaggccgggatagcttcccgctcgcccaagcccagattttccactctccaggaaggccttgcaggtccctgccgcaggccttggcttcgcgcctctctcgctcgccccccacgaagatgattgccggtttcaaaccgggagcagggagtctgcttccttctccgctgagtccgaaggatcgcagattggagcgtgctccggagaccgcttttccgcagcgccggcctccgagatccccagcaccccttcagccttaagttcccacgtttcgggtccgtggcgccaattctgctaagtagcaggctaggaattgggggaagtcggagaagaa

SEQ ID NO: 14745 - DNA, 1465 bp, Artificial sequence
  DNA replication origin
ggcggcggctgcggcccaggacgcgcccacgtcggccatgtaagccgggtaggggctggagtaggagcccgcgaagccggcgcgcccgtactgctcgcggcccgccaggcccgcacccgccgctccgccgccactgctgtaggccgcagcttcccgggccgcggcagcggcggcggcggccgccagggacccggtggtccccgggaaggagaagcgcggcgacaccggcggcggggtgtaagcggctccgtcggctcccgcctggctccatcccgggctgccctgctgggtcccgggccccgcaccagacgcggccccaccggagctgccgcccgaggcgcctccggacgcagagcccgcgcctccgccctggaggtaggacaggcccagcacggaggagggcacccgcggtgtgggcacgtagactggcgaggacgcggcgcccgcgccgtgcatgaaggcgccggggccgcccgcctcgtaggcaccggggggcggcccgtggttggcggccatggccaagctctgatacatggtccctgcgagctcccggcttcggtgtcctctctctccctcgcaggtcaaggagccacgcggggagagaaaacgacggcaacaacgataatatgcgtgggaggaactgtcgcgaagatcaaaaatcaaaggggaaaaaaccaactcgcttaaaaatatatacgtattaaatccagcattgagcaaagggctctaggctcttgtttactccggaaaatcccaatttgaatttttggtggttccggaagctgatgtaggagcagctgaattcaccccagggcctgaaggtccggcgcacctattgggggcagaagacggagggcagcgtccaggcctggaggtggcgcacgagccttcgggtcccccactcgtcacaccgagaggcctccaggacacccgcggccacaggcgcagaagctgctaggctggctccttcctcctcgccgcagccggggtcctaaaagaggaacgacagaaagagagagggtggttcatcccagagctttcagaacccactctccacttgcgtggttgcttcttccacgcttcaaatgaagtcgccacggggatttgggggtgcagctccggaggccgcgcggtgccgggaagcaggggcctttgttttgtccaggcgttgggtcaggcggcccaggcaagcctggggagaggcgccccagggaccaggggcttcccgggtctttggtgtgcagttattggttgtgatcttggtcaatgatttttgtattgcttgtcaggaaggactttaatgttaccttattctgcaagcatatttttgtaagtccaaaagtttggcgttaatgcagagtgcctgggacccaagaaatctctcatctcctctgttccccatctctccccaagaaagatggggagactggcctagaaagaactttagattgtccttggggggaca

SEQ ID NO: 14746 - DNA, 1093 bp, Artificial sequence
  DNA replication origin
ccgtgctgggcctgtcctacctccagggcggaggcgcgggctctgcgtccggaggcgcctcgggcggcagctccggtggggccgcgtctggtgcggggcccgggacccagcagggcagcccgggatggagccaggcgggagccgacggagccgcttacaccccgccgccggtgtcgccgcgcttctccttcccggggaccaccgggtccctggcggccgccgccgccgctgccgcggcccgggaagctgcggcctacagcagtggcggcggagcggcgggtgcgggcctggcgggccgcgagcagtacgggcgcgccggcttcgcgggctcctactccagcccctacccggcttacatggccgacgtgggcgcgtcctgggccgcagccgccgccgcctccgccggccccttcgacagcccggtcctgcacagcctgcccggccgggccaacccggccgcccgacaccccaatctcggtgagtaggagcgcgagggctggggcgcgtgagggccggggcaggggccgtcttgagccctgtcgagggcctcttgtttttccaccaacgccttcgttgggctggggatggtgcttcactacctcgagtttctagggaaggcagaagccagtgcggggctggcgacatcacagccccagaagaccggcttctgtggaaggggccgggcctgcccgccggggcctcttctgagatggtgtcagggtcggagtgcggcctccccgccatcccagacatcgaccgtggccgcgctgcgctgtgggtgacgcgggaggacagcgggctccctggagagccgggggcagcggcctgggatttcctcgtggaaggtgctggagattgctgagtttctgcgcccctttcctccccgcccgccctcgggcctccgcagggaactgattacaatggtttggaccgcagaccttctgggccatttggcggcccagctggaggatccctcggggtagctgatgattttcccgtcgggggtctcacaccgagaacaaaggagggatggacaaaggagacgccggggagatgcgcggaacaggagccggcactgtgcgggtgccacccg

SEQ ID NO: 14747 - DNA, 1088 bp, Artificial sequence
  DNA replication origin
gaagaccggcttctgtggaaggggccgggcctgcccgccggggcctcttctgagatggtgtcagggtcggagtgcggcctccccgccatcccagacatcgaccgtggccgcgctgcgctgtgggtgacgcgggaggacagcgggctccctggagagccgggggcagcggcctgggatttcctcgtggaaggtgctggagattgctgagtttctgcgcccctttcctccccgcccgccctcgggcctccgcagggaactgattacaatggtttggaccgcagaccttctgggccatttggcggcccagctggaggatccctcggggtagctgatgattttcccgtcgggggtctcacaccgagaacaaaggagggatggacaaaggagacgccggggagatgcgcggaacaggagccggcactgtgcgggtgccacccggccgagcgcgtgggcgcatcatgcgggcagcgggggggggggcgcacacgcccggtcagtgtccgggaacatagggacctcaaacgcgcttgttcatgacacccgagttaaatggagactttgcagtcgcttgcacgcgtggagcctcctcttctcgcgtgggccagggttggaaataaccgttgtggtaggttccatgcagtgtttccatcggatgtcagacggggagggacggcaaacctgtctcaacctccactgattcacaaataaacgcagcgggatctgagaaggggcctgagtacacgggccgggggagaaagggaagtggcaacccctagttcaaaatgcaaacgacctctggaatttcgggaagagacggaggagtgagtttggattgagcccaccctgtgggggaggggaagcccaggcttgagaagcaaagctcgcgtttattgaccacctactaagtgctaaatccttctgcatttgttctcactttgaagagtaaaggctacccctgccaggtttccagtcttgggctggctccgagaagggcctaggctttgaagcgcttttaaattgtcctctggccctgggtggccagggaaggttcccgggggtgcagccaaatacacatcgccggcaaactg

SEQ ID NO: 14748 - DNA, 1551 bp, Artificial sequence
  DNA replication origin
cacctactaagtgctaaatccttctgcatttgttctcactttgaagagtaaaggctacccctgccaggtttccagtcttgggctggctccgagaagggcctaggctttgaagcgcttttaaattgtcctctggccctgggtggccagggaaggttcccgggggtgcagccaaatacacatcgccggcaaactgattaaccctgaaagtggcgccgaggcccggtctgtggctcttggtgttcccctccccctcacccctcttgggggagccagacggccacccccaggggaggaggggcccggccgagcctcgccgcgacttttgcgagatagcgcggcgacatggccacacaatggagcccgcaggcgggagtgcggggcggggcgcggcgccctggccttgcgcgcttacggggtcctctccagggccctctggggcctctgacttaaaatagggaggactgggccaggagatcgagaccatcctggccaacctgttgaaaccccgcctctactaaaatacaaaaaaaaaaaaaaaaattagcggtcgtggtggcgcgcgcctgtagtctcagctactggggaagctgaggcaggagaatcgcttgaacccgggaggcagaagttgcagtgagccgagatcgcgccactgcactccagcctggtaacagaacaagactacgtctcaaaaaaaaaaaaaaaaaaaaaaaaaaggactggtccagggagagtttgctttgtaaccccgacaatcctggagggaatttggtgtttggttaaggaaaagagagaagttaaaagtcatgagttacatccagcagtgtaaaaacgaaatacccgccgggcgcggtgtctcacgcctgtaatcccagcactttgggaggccgaggcaggcggatcacaaggtcaggagttcctggccaacatggtgaaaccccatctctactaaaaatacaaaaattagctgggtttggtggtgtgtgcttatagtcccagttacttgggaggctgaggcaggagaatcggttgaacccgggaggcggaggttgagtgagattgctccactgcactccaggcctggcgacagagggagtatgtctcaaaacaaacaaacaaaaaaccgaaataccatgtgaatgcacacagtattcagattttgaaatgtcagccatgccatgtagaggttgctgatgaagtgatgtttcccaaattcccatgtcagcaaatggcaagctgacctccctgtgcgtctctctgccaagaactgccacctgccttctctgggctcttcccggatagcttatgaagtccacagcctttgaatctggcctagagggtggtttttctcttctgcacccagccaagtgttttaggagaggtgcggctctctgtgagggaacacagggcatgttgaacttgttggcattcatagcttcagcgtgttatgcaggtggcacttacataaaagcaactgaaattaaaagcagtgcatgtggccaggcgcagaggctcatgcctgtaatcccagcactttgggaggctgaggcagga

SEQ ID NO: 14749 - DNA, 1257 bp, Artificial sequence
  DNA replication origin
ccgctgcaccgtgggagcccttctctgggctggcctagtccggagccggctccctcggcttgcggggaggtgtggagtgagaggcactggcgggaaccagggctgcgcgcggcgcttgcgggccagcgcaagttccgggtgggcgtgggctcggcgggccgcacttggagcgggcggccggccccgccggccagggcagtgaggggcttagcacctgggccagcagccgccgtgcttgatttctcaacaggccttagctgcctccccgcggggcagggctcgggacctgcagcccgccatgcctgagcctcccccgcgccgccgccgtgggctcctgcgcggcccaagcctccccgacgagcgccaccccctgttccacggcgcccagtcccgtcgaccgcccaagagctgaggagtgcgggcggatggcacgggagtggcaggcagctccacctgcggccctgcgcgggatccactgggtgaagccagctgggctcctgagtctggtggggacttggagaatatttatgtctagctaagggattgtaaatacaccaatcagcactctgtatctagctcaaggtttgtaaacacaccaatcagcaccctgtgtctagctcagagtttgtaaatacaccaatggacactctgtatctagctaatctagtggggaggtggagaccttttatgtctagctcagggattgtaaccgcaccaatcagcaccctgtcaaaacggacaaatcagctctctgtaaaacagaccaatcggctttctgtaaaatggaccaatcagcagggtgtgggtggggccagataagagcataaaagcgggctgccttaaaaaaaacggtggcaacacgctgggtttgctttacaacgcttgggaagctttgttgtttgcaataaattttaatacttgtctgtttcggtctgcactgcctttatgagctgtaacactcacagggtaggtttgcagcttcactcctgaagccagtaagacaacgaacccactgggagaaacaaacaactccagacgcgccgacttaagagctgtaatactcgctgtgacggtctgcagcttcactcctgagccagcgagaccacgaacccaccagaaggaagaaactccgaacacatctgaacatcagaaggaacagactccggacacgccgcctttaagaactgtaacactcaccgcgagggtgggcggtttcattcctgaagtcagtgagaccaagaaccaaccaattccgga

SEQ ID NO: 14750 - DNA, 1417 bp, Artificial sequence
  DNA replication origin
agggggacgggaacacccaggcgtcggccctgctcgccgcgccccttgccccagatccgggcccggccgctcaggccctgaggccggcccagcgagctccttccccgccccgggcaagcagggaggctcggcccacctggtccatcttgggcatcaccttccgcttgcccccgatccggaagcgcaccaggttgtagaactcttcggggtggccaaggcatttcacgaactccatcctggcgcaggcggcggactcccgggcgcgactctcacctctgcggtccccaggcgctcaccggccggctggacctgtggagtaggtgcttcgaggggctggccggacagggggcaggcctagtacggcgacgccccgcccgccgctccgcccacttcaaccggcctcggccgccagcggggctagctgcggcctcgtggggtgggctgacgggcgctgattggccagggccgctcacactaggaagaccccggccaatcagtcgcggaaggagactggcgtgataacactctagaagctcattggaggccgagaaagaggccgacgagcgggattggtgccctgatggagccgggcctttgttttcttccgcttaccccggctgggagcgcgaacgctgtggggactggaggtgaggcggtggggcttaggatgcgcaggagcccaacggtggtccgcagtcgggagagcagtgcggggctgcttcctccccacttggtcaataagtcgcccacgtgtccggcctcggtggctcctgccagccgggtgagctctgcagccgctctctgtagagcctaaaaccgtgaaaaggccgggccagcgccaagctgggcgtctttactgtaacacacccgagcacagcccagctcgcctgcccgccaccgccatccagccccagggagccccacacactcctggagcttcagctgccccctctctagtgtttacttgagatccagcttagtcctagaaaaaggagctgaagccttagagagcctgtaacaggaatgtggaaacttctctcatcctagatctctccagccctagaaactactggctacccgtccaggcgtggtggctcacgcctgtaatcgcaacactttgggaggccaaggcgggtggatcacgaggtcaagagatcgagaccatcctggccaacatggtgaaacccgtctctactaaaaatacaaaaaagccgagtgtggtggtgggcgcctgtagtcccaactactccggaggctgaggcaggagaatcacttgaacccgggaagcggagtttgcagtgagccaagatgacaccgctgcactccagccaggccaacagagcaagactacgtctccaaaaaaaaaaaaaaacctactggctacctaagccatcctgcagtctgttttaacacagca

SEQ ID NO: 14751 - DNA, 924 bp, Artificial sequence
  DNA replication origin
gaggccggttgaagtgggcggagcggcgggcggggcgtcgccgtactaggcctgccccctgtccggccagcccctcgaagcacctactccacaggtccagccggccggtgagcgcctggggaccgcagaggtgagagtcgcgcccgggagtccgccgcctgcgccaggatggagttcgtgaaatgccttggccaccccgaagagttctacaacctggtgcgcttccggatcgggggcaagcggaaggtgatgcccaagatggaccaggtgggccgagcctccctgcttgcccggggcggggaaggagctcgctgggccggcctcagggcctgagcggccgggcccggatctggggcaaggggcgcggcgagcagggccgacgcctgggtgttcccgtccccctttcctcgagccttccccctgtagggcccgggtggacgcggccgtcctggctgacctgtccctgcccccgcaagccgccctgggcatgagcgacttttgcgtggttcccggtggttgcgctccccgtttcgtcccctccgtgagcatcggcgcttaccggtattttaacccgagggttacacatctgaggcaatgtgggtgggttacgcgggagaggacgagtgagttttttggtaagcggaatgaactatgcagataacatcacatgaaggccgtttctggaatgaagtctgactcctccagtttcaccacctcttccggagctctccccgccttgctgccttccatcgcttcatcctcggtgcttcctgagttttaaaatcgcctatctacgcttccaagttccaatgagttatctaacgtctatggattagctaggtggttggtggaaggtcagaacttggttttacttagatttttatctgcctcatgcctgtactatttgtttaatgaatgcatagg

SEQ ID NO: 14752 - DNA, 1506 bp, Artificial sequence
  DNA replication origin
ggccggggctggcccaggctacggcggctgcagggctccggcaaccgctccggcaacgccaaccgctccgctgcgcgcaggctgggctgcaggctctcggctgcagcgctgggtgagtgctggggacccggggccaccgcagcgtaagtgaccttggcggggacggtgctacccggccgccgagacgggttcctctgcgccctcagtcgggcccaggcgcggccccgcggcgtccctgggggccggcggggagccgggaccctcgggactgtccctgacgggcgggctggggtgggagtccgcgcgctccgaagcgtcggcgagaaaagcagaaaacagctccgcccgccagccctctgccctccgctcccctccccgggctgtgcgccggaccccggccctcggagcggggacgcggccaggaccgccgagggaggcgcctgcgaggaagagctcggccgggtccggagactgctgcctgggaccgcgctcccagcgcctgggcctcggtgtctccgggccaaactgccgacataatcgcatctgccggcatctattttcggtttatttccccctcattgcgaaggatttgcctggccaactttctgcgcaagatcccacgcaattcctgggaccccagaagacaggtcctgttgaagaacaggaatctggcactgggtgggctggggaggaagccgcacggtgttaaatccataaacaggaagagaaaccagacagcgaaaccaagaggcgaatgggcgattggatgccggtggggagaaggccgggggcgcaccctgctcctggactccagtaaagggaggccgggcagagtccctggggcgccacctccccctcggttagtagccctggaggccggggggagttggcctctggggagcagtgggtgctgggtgtggggcgttgcaggcaggctggggtgggcgacccaggtggaagtgaattgcacttggcttcctggtgggcctctgtcacccccttcccaggcgctgagaaagccagcaggctggcaaagaaaaggaccctagcgcaggccccacactcctcctcctaacggacgagagaccccccaaacccactggagaagtgacgctgtggggttcaaatgcagacctggcacctttttgtagcctggaaaaacattcccactgcctgctgccggaggagaggatagctgagatgcactctctttgaatccaaacgttcaggaacgtaaggcgaagaggcctaagagggcgttggctggctctgtctctcaggctggagcacagtggcgcgatctcggctcactacaacttccgcctcccaaattcaagctattctcctgcctcagcctcccgagtagctgggattacaggtgcccgccaccacgcccagctaatttttgtatttttagtagagatggggtttcaccatgttgaccaggcagatcttgacctcctgacctcaggtgatccgcctgtctcggcctcccggtgagtcacg

SEQ ID NO: 14753 - DNA, 1398 bp, Artificial sequence
  DNA replication origin
agcccgcccgtcagggacagtcccgagggtcccggctccccgccggcccccagggacgccgcggggccgcgcctgggcccgactgagggcgcagaggaacccgtctcggcggccgggtagcaccgtccccgccaaggtcacttacgctgcggtggccccgggtccccagcactcacccagcgctgcagccgagagcctgcagcccagcctgcgcgcagcggagcggttggcgttgccggagcggttgccggagccctgcagccgccgtagcctgggccagccccggccctaagtaccctcccggccccgccccacgtgaccaccgcgcagccccgcccgggccctcccgccgcccgcgcacggtgcttcccagcccccaccccctcccgccaccttccgccgcccgcgctccccgcttcccggccccgcacaccccccgcccccttccgctcggggtccggggccaccgccgggggcgggcgggggcctgagcgcgcgggctggggaagaagggcttggagccctgcgggccctgggtggcgaaacgctgcgaattggggccaggggatggggaaaaagcccctaaaggtggtcccaaggcccccaccccgcctagaaaagtccccccgcctcgcgggaccgcctccgccagaacccgcgcctgggatccctgcctgccgagttggcgggggtggggtggtggagagggcgccgtcgcttatttcattcattcagaagccgctgcagaggctgggggtggcgaggctgtggaccccacagaacagcctttagaagggccactttgttgttcagagaacgtacccacaaaacactacagctacgtacaaatagaaaagagtggctgtcactgcgaaggaacctaggagctgcgtcaggatttctaagaggagaaggaccttgggggcggaaatcggtttggcacaggagtacccggagacctgctccgagaggacggacaaagtgcacatttacttggggtttattaccgggaggccctggaagggagatgcaggggttggctcaagactcaccctcctccagacactccccaaacagctttaatccttaagacaaacctgcaaagcaggcatgaccccagttgtattcaagaggctcagaggggctgggttcggtggctcacgcctgtaatcccagcattttgggaggccgaggccggtgagtcacctgaggtcgggagttcgagaccatcctgaccaacatggagaaaccccgtctctactaaaaatacaaaactagccgggcgtggtggcgcgtgtcagtaatcccagctactcgggagactgaagcaggagaatcgcttgaacccgggaggcggaggttgcggtgaccagagatcgcactattgcactccagcct

SEQ ID NO: 14754 - DNA, 1245 bp, Artificial sequence
  DNA replication origin
caggagggaagaggacgacgtccctcccgaagagaagaggctgcggctgttgctggaggggggaagcgcagaacctgaggactgcgaggacggggaggacgtgccgcggccaggcagggaggagaccgggacccagacaggtggcgacggcagaggagtaagtgacgcgggcgcggaggtccaggggtgccaggggcgcggggtaggggcggcgggaggctccggggccggccctgggttgaagttggtaattgagcggcaagtccggcgggcgcggagtgacagctcgtgacggcctccgagacgccagctgccccttctcggctgtgtggcttcgacttcctgattctcccacgacatccctggccgggagatccgctggactctgtggctggccaaaaggagagggggagccccgcgtcctgggggcccctagcaggggaaggggcgggggttgccccgggcatcctgtctggggcatctgtctgggattctgtcggtgcctctcacctggcgaggggcctgtggtgggggtaggggggaagtccctggcgccaggcttggccaagccctgctctgctgggctgcaggctggtggcgctcacccagctcctcacctgtcccgcatcttcctgtttttcttccctttctggttgggcagcgagagttgagaggaggcagatggcttccatcccagaaatcgctctcctctttccatccctacagagagggacagagaggcaaagttccttccatcccccggggcgctgtccctgtgagctcccggtgtcctgcacacgtgggcccctgagtcaccgggcctgtgtgtgtgggatggggctgcgtagccaggctggcctcctggggttcactttgtgctttcctacgcctactcttcctgtgtggctttgctggccttccactggggaggcacatgggtttggagggcagatgaggacccactggagagccgtacccctcagtgagggctgccaccttgatggtttttgatggataatggggttgacctctttgttccttccacatgtttttatgtttgaccatttgctcagctgagcttgtcttaataattggattcgtggttaatgagccccacatgggagagagggcggccttcattctgaacccatttaggcagcacgggcagccctcctcgccgtgggctgcatcagagcccccctgcccagtcttggggttgctcccggatgctgtctgggaggcttg

SEQ ID NO: 14755 - DNA, 1816 bp, Artificial sequence
  DNA replication origin
gtctcctccctgcctggccgcggcacgtcctccccgtcctcgcagtcctcaggttctgcgcttcccccctccagcaacagccgcagcctcttctcttcgggagggacgtcgtcctcttccctcctgggccggccatccctgcctcggggcttgccagtggcttcggagctgccggaagggctggccatgactccgggggctctgcctgcacctggggaagaggaaggacccggcgcgagcggcctctcggcggagctggggcgtctgagcgagggctcggtgggtcagcgcggcgcggggctgggcatcccggcgggcgcgggctcctccgcgggccgctcctggctctctgacgccctctgccggccgcttgcgcgcaccgcggacacgccgggtactggcctgcccggctctcacctgcccaggcccaagcagtcgctgtcccctgcctgtggccaggcccgctctggccaggccctgcacctcctccccgccccagccaggttgcacccgatggtctccctgcccaaggaggagagaagagaaaggacgccccgagatggtggacatcggccacaaccaccttgtctttgctcttaccctgtgtcttccatgatttggaggtggtgggaaacccgaggctgctcaaaactcgtggagaattccgcctgcaggatgacatgaatgcaccttcccattgcctaccaacagatcttttttgagcatcactgtggaccaggcgtggtgatgggggaggggatattgtggagaacatgacaggcattgccttcacccagtggggctcagcgctgggtgggaaggcattgagaatggacattgtcaattgggcaaaaggaggccaagaagaagtgctgggggcatgggaactgaaaaagacaggaggctcagcaggtcttggagctgggagagggacagcagcagcggctgttccaaaggaagcaacagctgagagaggcctcagagagttgttctcagcccagtggagggtgttcaggcagagggaacagcctgtgcaaaagcccagaggctgggaaagaagcagaaagaggactgtggggctggagcgtggtgggcaagaggagaaaggtgtggtgggcagacagattgcctgggaccgagccgtgcaggggcagaggagataggggatccttgcaggcctccagctggggctgaggcacagagacaatgcaggtgggcaaagggaggagacgtggagaagtattttggaggcatgccctgatgaatgagcccaggatgcacccttagtgtcagtgtggagctccttcctaggttgtgtgatgggctgaactggggggtattttctggacatcgaagtgctacacccagagtccaggacaggctaagtgagcaccagcagctcctggcccacctcaaaagcaggagagacaggggagactggggaggccagggcggaaggggaagccaggaaggcaggagaggccagggaagcagaggaggccagggaggcaggggaggcaggagaggctggggcggctgtgtcctttccatgtttctgcccaggatcctaggccgctgtactccctgagcttccccaccccaagtgctggaaccatgttgcacaacggtctccccactaagctcctgatggcagcccctaccctgctgtgctccctatttcaaccctaacagctctcacagtgggcagcacatagtaggtgctcaggaaacactggtgggagagcacgtgggtctgctcagcaccttcctctctcctccagctctccccatcatgaaataattctgataacgacac

SEQ ID NO: 14756 - DNA, 724 bp, Artificial sequence
  DNA replication origin
ccttaaccaagcctcttttaatttttcaaacggaagagcccctgtccctcagttacggctgctgagccctttcaaggtgagtcagtgaggagggagaaaagcggaagtggtgtgggaagaggcggggtctgggccagctgctggtcctgctctcctccctcctttggcctctaggctcccaggagtggtttcgaacctgcgccgtgtgctctggaggctgtggcaaggcaggcgcggcttggaacccgcaccatgtgctctgggggctgtggcaaggcaggggcagcttggaacctgcgccatgtgctctgggggctgtgccagggcagggggagtcctcgtgtcccctgcgcacaacacagacagaaggctgggtccacccagtgggcggtcgggtgccaggccagtgcttaccccgccatgtttgcagcccgaggccagctggctgcaggtgcaggactaggcgtcaggggtcagggtgcacacatccctgcaggtctcggggctcctgggttgcttctggaagggcacagatggggcctgactggagctgccgaggggtggagcttctggggaaaggatccctcctagggggagtgtcttgggcctggggccacgtggcagggacagagacgggtccatggcagtgtctgctcttctctgtgaaggcaaaaggcctctgagggagtattacagccgcctcatccaccagaagcatttccag

SEQ ID NO: 14757 - DNA, 924 bp, Artificial sequence
  DNA replication origin
aaaaagtcgtgaaaatgatcgtgaaccgtaccccacacggagcgcgcgtctaccccctaaggcggtggagacgcccccagcttccgccgccagctcgcggggcagaaggggtgcgagcgactctggccaggccccagggacggggaccgggtctcgcggccctgaccgaggagagcccaggaactcacgtggccggagcgccgggggtttcagcacggagacccatcccgtctgcccctggactcccgcgacccccgcgggcctctccgctcgccccgccgcccacctgccaggggaaggagcgcagtgtgcgcaccgccaggaagcggcgctcaaaaccctgcagcaagagttcggtccccgcgttctcctcgggcgccataacgtgggcgaggccgcagccgttgccgggagacctggaggaagccgggcctggactgaagagggggcgggccgagggcagagcgcgggggcagagagggggcggggcctggggatagggtcaggaggtgcgtcctgggggcggactctagggcggggccaagatgagcgttaggagggcggggcctggggtagggccaggataagcgacatcggggcaggtcctgggtagagtccaggttggcggttcctggggcagggccaggatagggcgatcctggaagctgggcttcggaagcgtccaggttggtggcgtcctggaggcggtgccttgcgtgggggcaggataagagtcctggaggcgggcattagggcgcggataaacgccattggattcaggaggcgggacccagagcagagcccaggagacaggtcttagggcggggctaaggccaggcccagagaagggctcaggaggcggggcaggggcggggcgttgactatgtcgtagaacatggccaggcggtgcgcggactctgggag

SEQ ID NO: 14758 - DNA, 1398 bp, Artificial sequence
  DNA replication origin
cctgggggcggactctagggcggggccaagatgagcgttaggagggcggggcctggggtagggccaggataagcgacatcggggcaggtcctgggtagagtccaggttggcggttcctggggcagggccaggatagggcgatcctggaagctgggcttcggaagcgtccaggttggtggcgtcctggaggcggtgccttgcgtgggggcaggataagagtcctggaggcgggcattagggcgcggataaacgccattggattcaggaggcgggacccagagcagagcccaggagacaggtcttagggcggggctaaggccaggcccagagaagggctcaggaggcggggcaggggcggggcgttgactatgtcgtagaacatggccaggcggtgcgcggactctgggaggcgaagcttaggacgggcccacttggggaggggcccagtgcccgggaggcggggccgagtccgggctgggctgcgctcaggaggcgggccctgggaggcggagcttagggaggggccggtgttgggagggacccagggactgggaggccggttggggctgggctcaggggccgagacctagctgggcttggggcggggccgagacggagcgaggggtccagggtgtgggaaacggggaggggtttgaggaggggatcggaatgtggctcaagttcgggaggcgttacctgcggagggtttgaggcaggcccaggagcgagcccatggtcttccgacgcggggccaggggcggggcccaggatccggagcttcgtgcggggccgagtccaggtttggggcccgggaggcggggccagttagggcgagggtccctgggatcgtcgggtcaggccttgggctaacgtaggcactctcgcagttcctccgccttcaggaaggtcttttcagcaggggccttacgggtgcatgcttcggtcctggaggccttatcctagcctcctctccatcagcgccacccgtctggggcccgaaaggagggagctttccctctgtcccccagcctttggactgtcactaaacaagccattcgttcatcaaatactttttaagcgcctaccatgtgcctgacaagggagatgtaacggtgagaaaaactaggtgtggtccaggcccttcaggggctcaggtgctcgtggaagaagtggacattgaagtacttatcacacaaatgaggataaaagtacgataacgatatctaccacgaaggtgagcagacagagctagcggggcttgcaggaggagttttgatcttgcagggacaggaaggaggagttagctcctgcggggtgggattgggggtggtggtgatatagacgtggggacagagtggaaaacaacaaaaatataattattttagttcaaagttattg

SEQ ID NO: 14759 - DNA, 770 bp, Artificial sequence
  DNA replication origin
agacctggatctgctggaaatgcttctggtggatgaggcggctgtaatactccctcagaggctttttgccttcacagagaagagcagacactgccatggacccgtctctgtccctgccacgtggccccaggcccaagacactccccctaggagggatcctttccccagaagctccacccctctgcagctccagtcaggtcccatctgtgcccttccagaagcaacccaggagccccgagacctgcagggatgtgtgcaccctgacccctgacgcctagtcctgcacctgcagccagctggcctcgggctgcaaacatggcggggtaagcactggcctggcacccgaccgcccactgggtggacccagccttctgtctgtgttgtgcgcaggggacacgaggactccccctgccctggcacagcccccagagcacatggcgcaggttccaagctgcccctgccttgccacagcccccagagcacatggtgcgggttccaagccgcgcctgccttgccacagcctccagagcacatggcgcaggttcgaaaccactcctgggagcctagaggccaaaggagggaggagagcaggaccagcagctggcccagaccccgcctcttcccacaccacttccgcttttctccctcctcactgactcaccttgaaagggctcagcagccgtaactgagggacaggggctcttccgtttgaaaaattaaaagaggcttggttaaggcaccaatgacatgaccgggcccaatggctcata

SEQ ID NO: 14760 - DNA, 928 bp, Artificial sequence
  DNA replication origin
actgcctttaaaaagtcgtgaaaatgatcgtgaaccgtaccccacaccgagcgcgcgtctaccccctaaggcggtggagacgcccccagcttccgccgccagctcgcggggcagaaggggtgcgagcgactctggccaggccccagggacggggaccgggtctcgcggccctgaccgaggagagcccaggaactcacgtggccggagcgccgggggtttcagcacggagacccatcccgtctgcccctggactcccgcgacccccgcgggcctctccgctcgccccgccgcccacctgccaggggaaggagcgcagtgtgcgcaccgccaggaagcggcgctcaaaaccctgcagcaagagttcggtccccgcgttctcctcgggcgccataacgtgggcgaggccgcagccgttgccgggagacctggaggaagccgggcctggactgaagagggggcgggccgagggcagtgcgcgggggcagagagggggcggggcctggggatagggtcaggaggtgcgtcctgggggcggactctagggcggggccaagatgagcgttaggagggcggggcctggggtagggccaagataagcgacatcggggcaggtcctgggtagagtccaggttggcggttcctggggcagggccaggatagggcgatcctggaagctgggcttcggaagcgtccaggttggtggcgtcctggaggcgatgccttgcgtgggggcaggataagagtcctggaggcgggcattagggcgcggataaacgccattggattcaggaggcgggacccagagcagagcccaggagacaggtcttagggcggggctaaggccaggcccagagaagggctcaggaggcggggcaggggcggggcgttgactatgtcgtagcacatggccaggcggtgcgcggactct

SEQ ID NO: 14761 - DNA, 1081 bp, Artificial sequence
  DNA replication origin
cggggcaggggcggggcgttgactatgtcgtagcacatggccaggcggtgcgcggactctgggaggcgaagcttaggacgggcccacttggggaggggcccagggcccgggaggcggggccgagtccgggctgggctgcgctcaggaggcgggccctgggaggcggagcttagggaggggccggtgttgggagggacccagggactgggaggccggttggggctgggctcaggggccgagacctagctgggcttggggcggggccgagacggagcgaggggtccagggtgtgggaaacggggaggggtttgaggaggggatcggaatgtggctcaagttcgggaggcgttacctgcggagggtttgaggcaggcccaagagcgagcccatggtcttccgacgcggggccaggggcgggccccaggatccggagcttcgtgcggggccgagtccaggtttggggcccgggaggcggggccagttagggcgactgtccctgggatcgtcgggtcaggccttgggctaacgtaggcactctcgcagttcctccgccttcaggaaggtcttttcagcaggggccttacgggtgcatgcttcggtcctggaggccttatcctagcctcctctccatcagcgccacccgtctggggcccgaaaggagggagctttccctctgtcccccagcctttggactgtcaccaaacaagccattcgttcatcaaatactttttaagcgcctaccatgtgcctgacaagggagatgtaacggtgagaaaaactaggtgtggtccaggcccttcaggggctcaggtgctcgtggaagaagtggacattgaagtacttatcacacaaatgaggataaaagtacgatagcgatatctaccacgaaggtgagcagacagagctagcggggcttgcaggaggagttttgatcttgcagggacaggaaggaggagttaactcctgcggggtgggattgggggtggtggtgatatagacgtggggacagagtggaaaacaacaaaaatataattattttagttcaaagttattgtgtcttgagttgaaaggcagggcagtt

SEQ ID NO: 14762 - DNA, 1382 bp, Artificial sequence
  DNA replication origin
ggcccggcttgtccgcggtgcgcgcgagcggccagcagagggcgcgagagccaggagcggcccgcgtaggagcccgcgccggccgctatgcccagcccctcgccgggcggacccaccgagcccgcgctcagacgccccagctccgccgagaggccgctcgcgccgtatccttcctcttctccaggtgcaggcagagccccccagccgtggccagcccttccggcagctccgaagccactggcaagccccgaggcagggatggccggcccaggagggaggaggacgacgtccctcccgaagagaagaggctgcggctgtagctggaggggggaagcgcagaacccgaggactgcgaggacggggaggacgcgccgcggccaggcagggaggagaccggcacccagacaggtggcgaaggcagaggagtaagtgacgcgggcgccggggtccgggggtgccgggggcgccggtaggggcggcgggagtctcagtggccggccccgggttgaagttggtattttagcggcaactccgaagggcgcggagtgacagcgcgtgacggcctccgagacgccagctgccgcttctcggctgtgtggctttgacttcctgattctcccacgacgtccctggctgggagacccgctggactctgcggctggccaaaaagagaggggcagccccgcgtcctgggggcccctagcaggggaagtggcgggtgttgcgctgggcatcctgtctggggcatcagtctgggaccctgtcggtgcctctcacctggcgaggggcctgtggtggggtaggggggaagtccctggcgccaggcttggccaagccctgctctgctggactgcgggctggcggcgctcacccagctcctcacccgtcccgcatcttcctgtttttcttccctttctggttgggcagcaagagttgagaggaggcagatggcttccatcccagaaatcgctctcctctttccatccctacagagagggacagagaggcaaagttccttgcatccccggggcgctgtccctgtgagctcccggtgtcctgcaaacgttggcccctgaatcaccgggccagtgtgtgtgggatggggctgcatagccaggctggcctcctggggttcactttcggctttcctaccccaactcttcctgtgtggctttgctggccttccactggggaggcatgtgggtttggagggcagatgagagcccgctggagaactgtacccctcagtgagggccgccaccttgatggtttttaatggataatggggttgacctctttgttccttccacatgtttttatgtttgaccatttgctcagctgagcttgtcttaataattggattcatggttaatgagccccac

SEQ ID NO: 14763 - DNA, 1724 bp, Artificial sequence
  DNA replication origin
gccggtctcctccctgcctggccgcggcgcgtcctccccgtcctcgcagtcctcgggttctgcgcttcccccctccagctacagccgcagcctcttctcttcgggagggacgtcgtcctcctccctcctgggccggccatccctgcctcggggcttgccagtggcttcggagctgccggaagggctggccacggctggggggctctgcctgcacctggagaagaggaaggatacggcgcgagcggcctctcggcggagctggggcgtctgagcgcgggctcggtgggtccgcccggcgaggggctgggcatagcggccggcgcgggctcctacgcgggccgctcctggctctcgcgccctctgctggccgctcgcgcgcaccgcggacaagccgggccctggcctgcgctgcactcacctgcccccgcccaggcagtcgctgtcccctgcctgtggccagacccgctctggccaggccctgcacctcctccccaccccagccaggttgcaccccgatggtctccctgcccaaggaggagagaagagaagggaagccccgagagggtggacatcggccacagccaccttgtctttgctcttaccgtgtgtcttccatgatttggaggtggtgggaaacccgaggctgctcaaaactcgtggagaattccgcctgcaggatgacatgaatgcaccttcccattgcctaccaacagaccttttttgagcatcactgtggaccaggtgtggtgatgggggaggggatattgtggagaacatgacaggcattgccttcacccagtggggctcagcgctgggtgggaaggcattgagaatggacattgtcaattgggccaaaggaggccaaggagaagtgctgggggcatgggaactgaaaaagacaggaggctcagcaggtcttggagctgggaaagtgacagcagcagcggctgttccaaaggaagcaacagctgagagaggtctcggagagttgttctcagcccagtggagggtgttcaggcagagggaacagcgtgtgcaaaagcccagaggctgggaaagaagcagaaagaggactgtggggctggagcgtggtgggcaaggggaggaaggtgtggtgggcagacagattgactgggacccagctgtgcaggggcagaggagataggggatccttgcaggcccccagccggggctcaggcacagagacaatgcaggtgggcaaagggaggagacgtggagaaatattttggaggcatgccctgatgaatgagcccaggatgcacccttagtgtcagtgtggagctccttccttgactgtgtgatgagctgaactcgggggtattttctggacattgaggtgctacaccaagagcccaggacaggctaagtgagcactagcagctcctggcccacctcaaaagcaggagagacaggggagactggggaggccggggtggaaggggaagccaggaaggtaggagaggccagggaagcagaggaggccagggaggcaatggaggcaggagaggctggggaggttatgtcctttccatgattctgccctggatcctaggcccctgaactccctgagcttccccaccccaagcgctggaaccaggttgcacaatggtctccccactaagctcctgatggcagcccctaccctgctgtgctccctatttcaaccctaacagctctcacagtgggcagcacatagtaggtgc

SEQ ID NO: 14764 - DNA, 1698 bp, Artificial sequence
  DNA replication origin
tcctcgggctgtgcgcttcccccctccagctacagccccagcctcttctcttcgggagggacgtcctcctcccccatcctgggactgccatccctgcctcgcggcttgccagtggcttcggagctgctggaagggctggccatggctccgcgggctctgcctgaacttggggaagaagaaggacccggctcaagcggcttctcggcggagctggggcgtctgagcgcgggctcggtgggtccgcgcggcgcggagctgggtatcggggccggcccgggctcctccgcgggccgcgcctggctctctggcgccctcttctggccgctctcgcgcacctctgccacgccgggcccaggcctgcgcagctgtcacatgtcctggcccaggaggtcgctgtcccttgcccatggacaggcccgctctggcaatgccctgcaccacctccccgccccagccaggttgcaccccgatggtctccctgcccaaggaggagagaagagaagggacgccacgagagggtggacatcggccacagccaccttgtctttgctcttaccctgtgtcttccatgatttggaggtggtgggaaacccgaggctgctcaaaactcgtggagaattccgcctgcaggatgacatgaatgcaccttcgcattgcctaccaacagatcttttttgagcatcactgtggaccagtcgtggtgatgggggaggggatattgtggtgaacatgacaggcattgccttcaccaagtggggctcagcgctgggtgggaaggcattgagaatggacattgtcaattgggccaaaggaggccaaggagaagtgctgggggcatgggaactgaaaaagacaggaggctcagcaggtctttgagctgggagagggacagcagcagcggcttttccaaaggaagcaacagctgagagaggtctcagagagttgttctcagcacagtggagggcgttcaggcagaaggaacagcgtgtgcaaaagcccagaggctgggaaagaagcagaaagaggactgtggggctggagcgtggtgggcaacaggagagaggtgtggtgggcagacagattgcctgggacccagccgtgcaggggcagaggagatagaggatccttgcaggcccccagccggggctgaggcacagagacaatgcaggtgggcaaagggaggagacgtggagaaatattttggaggcatgccctgatgaatgagcccaggatgcacccttagtgtcagtgtggagctcctttcttggctgtgtgataagctgaacccgggggtattttctggacatcgaagtgctacacccagagtccaggacaggctaagtgagcaccagcagctcctggcccacctcaaaagcaggaaagacaggggagactggggaggccggggcggaaggggaagccagaaaggcaggagaggccagggaacagaggaggtcagggaggcaggggaggcaggggaggctggggcggctgtgtcctttccatgattctgccctggatcctaggcccctgtagtccctgggcttccccaccccaagcactgtaaccatgttgcacaacggtctccccactaagctcctgatggcagcccctatcctgctgttctccctatttcaaccctaacagctctcacagtgggcagcacatagtgggtgctcaggaaacactggtgggaga

SEQ ID NO: 14765 - DNA, 1013 bp, Artificial sequence
  DNA replication origin
acctgtatgtcactactggttcaaacatgtgtctttcgtatgctctccacgttatctgcagcatctgtcaagaataataatgaatggtaaaacctaatctctattgagtgtcgatgatgcacttttaatgtgacatcttatttaatcctcactatatctgcaagagtagaagctattaatagccaattttcagataagaaaatcaaagcacggtttctataacttacccaagcagctagctaggaggctgctcaatttgagcccagggaatcagattccagaaaccatgttctcaattactagaacagatacctccccagaatctagtaggtggttaatgagtctttgtggaataaatgaacagaaggacaagcagtggatggatacataggtgggtaggtggatagatgggtggatggaaagatgggtgggtgggcagatggatgaatgaatggatggttgactcggtgaagggatggctgagtgggtggagaaatggatgagtgggtgagggggtggagggatagataaatggatggaccggtgggtggatagatgggtagatgagtgaataggtggatagaggcatgggtgagtggatggatagatgggttggtgggtgggtaggtggatgatagctgggtgcataagagagtgggttggatggatagatgggtgggtgggtggatagataggtaggtgggtggatggatgtatgcgtgtctggatggatggatggatggatggatggatgcatgcatggatggatgcatggatggatggaatggtggatggatggatggacagatgaacaaatggacttgagcatttattcagggtcctccaaagaactgagtgatttcctagggtgtgtcatcacctgcaggtaggtgggcaaggcggcttacctctgtaatactcatgattatgggtagtgctcagccttagtcgccactctcagaacactttattgactaggaaagtcagaactggcactgacaactaatgcaaat

SEQ ID NO: 14766 - DNA, 1093 bp, Artificial sequence
  DNA replication origin
agaagaggctgcggctgttgctggaggggggaagagcacagcccgaggactgcgaggacggggaggacgcgctgcggccgggcaaggaggacaccggcacccagacaggtggcgacggcagaggagtaagtgacgcgggcgcgggggtccgggggcgcggaggtgccggggacgcggggtagaggcggcgggaggctccgtggccggttccgggttgaagttggttactgagcggcaactccggcggcacggagtgacagctggtgacggcctccgagacgccagctgccccttctcggctgtgtggcttcgacttcctgattctcccacgacgtccctggctgggatacccgctggactctgcagctggccaaaaggggagggggagccccgcgtcctggggcccccagcaggggaaggggcgggggttgccctgggcatcctgtctggggcatctgtctgggactctgtcggtgcctctcacctggcgaggggcctgtggtgggggcaggggggaagtccctggtgccaggcttggccaagccctgctctgctgggctgcgggctggtggcgctcacccagctcgtcacctgtcccgcatcttcctgttttttttttccctttctagttgggcagccagagttgagaggaggcagatggcttccatcccagaaatcgttctctttccatccctacagagagggacagagaggcaaagttccttgcattccctggggcgctgtccctatgagctcccggtgtcctgcacacgtgggcccctgagtcaccgggcctgtgtgtgtgggatggtgctccgtggccagcctggcctcctggggttcactttctgctttcctaccccaaatcttcctgtgtggctttgctggccttccactggggaggcacgtgagtttggagagcagatgaaggccagctggagagctgtacccctcagtgactgctgccaccttgatggtttttgatggataatggggttgacctctttgttccttccacatgtttttatgtttgaccatttacttaactgagcttgtcttaataattggattcgtggttaatgagccccacatg

SEQ ID NO: 14767 - DNA, 1748 bp, Artificial sequence
  DNA replication origin
cgcagcgcgtcctccccgtcctcgcagtcctcgggctgtgctcttcccccctccagcaacagccgcagcctcttctcttcaggagggacgtcgtcctcctccctcctgggccggccatccctgcctcggggcttgccagtggcttcggagctgccggaagggctggccatggctccaggggctctgcctgcacttggggaaaaagaagcacccggggcgagcgtcctctcggcggagctggggcgtctgagcgcgagcttgctgggtccgcgaggcgcggagctgggcatcggggcgggcgcgggctcctccgcgggccgctcctggctctctggcgccctctgctggcctctcccgcgcagcgcggacacgccgggcccgggcctgcgccgcgctcacctgtcctggcccaggaggtcgctgtcccttgcccgtggccaggcccgctctggccaggccctgcacctcctccccgccccagccaggttgcactccgatggtctccctgcccaaggaggagagaagacaagggacgccccgagagggtagacataggccacagccaccttgtctttgctcttaccctgtttcttccatgatttggagggggtgggaaaaccgaggctgctcaaaactcgtggagaattccgcctgcaggatgacatgaatgcactttcccattgcctaccaacagatcttttttgagcatcactgtggaccaggtgtggtgatgggggaggggatattgtggtgaacatgacaggcattgccttcacccagtggggctcagcgctgggtgggaaggcattgagaatggacattgtcaactcggccaaaggaggccaaggagaagggctgggggcatgggaactgaaaaagacaggaggctcagcaggtcttggaactgggaaagtgacagcagcagcggctgttccaaaggaagcaacagctgagagaggtctcagagagttgttctcagcccagtggagggtgttcaggcagagggaacagcgtgtgcaaaagcccagaggctgggaaagaagcagaaagaggactgtggggatggagcgtggtgggcaaggggaggaaggtgtggtgggcagaaagattgcctgggacccagccgtgcaggggcagaggagatagggaatccttgcaggcccccagccggggctcaggcacagagacagtgcaggtgggcaaagggaggagacgtggagaaatattttggaggcatgccctgatgaatgagcccaggatgcacccttagtgtcagtgtggagctctttccttgactgtgtgatgagctgaactcgggggtattttctggacattgaggtgctacaccaagagcccaggacaggctaagtgagcactagcagctcctggcccacctcaaaagcaggagagacaggggagactggggaggccggggcagaaggggaagccaggaaggtaggagaggccagggaagcagaggaggccagggaggcaatggaggcaggagaggctggggaggttatgtcctttccatgattctgccctggatcctaagcccctgaactccctgagcttccccaccccaagggctggaatcatgttgcacaatggtctccccactaagctcctgatggcagcccctaccctgctgtgctccctatttcaaccctaacagctctcacagtgggcagcacatagtaggtgctcaggaaacactggtgggagagcactcgggtctgctcagcacc

SEQ ID NO: 14768 - DNA, 1086 bp, Artificial sequence
  DNA replication origin
cggtgtgcgggagaggccagcagagggcgccagagagccaggagcggcccgcggaagagcccgcgccgcccggatgcccagctccgcgccgcgcggacccaacgagcccgcgctcagactccccagctccgccgagaggacgctcgcgctgggtccttcttcttccccaagtgcaggcagagcccccggagtcatggccagcccttccggcagctccgaagccactggcaagccctgaggtagggatggctggcccaggagggaggaggacgacgtccctcccgaagagaagaggctgcggctgttgctggaggggggaagcgcacagcccgaggactgcgaggacggggaggacgcgccgcggccgggcagggaggagaccggcacccagacaggtggcgacggcaaaggagtaagtgacgcgggcgcgggggtccgggggtgccgggggcgcgggggtgcctgcgacacggggtagaggtggcgggaggctccgtggccgaccccgggttgaagatgggagggcggccttcattctgaacccatttaggcagcacgggcagccctcctcgccgcgggctgcatcagagccccccctgccctgtcttggggttgctcccggttgctgtctgggaggcttgctcatggtgacatcctcatctccccgtgcacgttactgcattcagagcttgggtcacctggacactgaactcaggtgaattttctctgagatcccgggagaaggaggacagttctctggaaggttttccagggccgatcacggaaaggatgagaagggagaggtcctggtcgggaacacaattacggtggcagtgtaacaccaggaaactttattgcgtgaagtccctctcactccttccacctccttcttttacgtggactctgccaaagaccaggataccagaatgcagtggagtgaccaagtgtagtgggaccttgggaacgcgagtctggagccaggcggctggggtttgcatcctggttctgcccctccttagctggctgacatggcacaagcctcttatcctctctgagccttactgtcttcagtggcaaatggatctg

SEQ ID NO: 14769 - DNA, 1699 bp, Artificial sequence
  DNA replication origin
ccctgcccggccgcggcgcgtcctccccgtcctcgcagtcctcgggctgtgcgcttcccccctccagcaacagccgcagcctcttctcttcgggagggacgtcgtcctcctccctcctgggccagccatccctacctcagggcttgccagtggcttcggagctgccggaagggctggccatgactccgggggctctgcctgcacttggggaagaagaaggacccagcgcgagcgtcctctcggcggagctggggagtctgagcgcgggctcgttgggtccgcgcggcgcggagctgggcatccgggcggcgcgggctcttccgcgggccgctcctggctctctggcgccctctgctggcctctcccgcacaccgccgccacgccgggctcgggcctgcgccgctctcacctgtcctggcccaggaagtcgctgtcccttgcccgtggccaggcccgctctggccaggccctgcacctcctccccgccccagccaggttgcaccccgatagtctccctgccgaaggaggagagaagagaagggacgcccggagagggtggacatcggccacagccaccttgtctttgctcttaccctgtttcttccatgatttggaggtggtgggaaaaccgaggctgctcaaaactcgtggagaattccgcctgcaggatgacatgaatgcaccttcccattgcctaccaacagatcttttttgaacatcactgtggaccaggcgtggtgatgggggaggggatattgcggtggacatgacaggcattgccttcatccagtggggctcagcgctgggtgagaaggcattgagaatggacattgtcaactcggccaaaggaggccaaggagaagtgctaggggcatgggaactgaaaaagacaggaggctcagccggtcttgcagctgggagagggacagcagcagcggctgttccaaaggaagcaacagctgagagaggtctcagagagttgttctcagcccagtggagggtgttcaggcagagggaacagcgtgtgcaaaagcccagaggctgggaaagaagcagaaagaggactgtggggatggagcgtggtgggcaaggggcgacaggcgtggtgggcggacagattgcctgggacccagccgtgcaggggcagaggagataggggatccttccagacccccagccggggctcaggcacagagacaatgcaggtgggcaaagggaggagacgtggagaaatattttggaggcatgccctgatgaatgagcccaggatgcacccttagtgtcagtgtggagctccttccttggttgtgtgatgagctgaacccgggggtattttctggacatcgaagtgctacacccagagtccaggacaggctaagtgagcaccagcagctcctggcccacctcagaagcaggaaagacaggggagactggggaggccggggcagaaggggaagccaggaaggcaggagaggccagggaagcagaggaggccagggaggcaggggacgcaggagaggctggggaggctgtgtcctttccatgattctgcccaggatcctaggcccctgtactccctgagcttccccaccccaagcgctggaatcgtgttgcacaatggtctccccactaagctcctgatggcagcccctaccctgctgtgctccctatttcaaccctaacagctctcacagtggac

SEQ ID NO: 14770 - DNA, 1001 bp, Artificial sequence
  DNA replication origin
cccgggcggccggcaggctcggggagctactgcaccaggggcgctaccgggaggccctggccgccgcctgcgaggcgctgcgagcaggtgaccgcgcggggatgcggcggggccgggccgaccgcaccctcctggccccgagggccggggacccggagcttgtctgcgccccgagagtctcctctgcttccccggggccgctgggccgctggcgtgtcgggtctcggggtgctggggggtgtgggagggggcggcgccccggggtgcttcggtcataatggggatcgccctgggagccgactgtgacgcggcgcggggaggggcgctcggcgcggggttccctcggccgcggcctggctgtcgggcgcgcgctcccggcgcggagtgggtgacctggaccgaggccgccccggcgcgggatgggtggtagctgggctatcccgagcggccgctcgcttcctgccgcgcgctttccgggaattggctctcgggccgggcccgccgcggggaaacgactgccggggcggggagagaatcccccgcgagggcaactaggccgggcaggcggcgtctcccttcctcacccacaaaagtcaccgggacaattgggaaccgcgggagggcagaattgcataagctgggggcggggggcgttgtgtaacgggtgacgtccggtgggcgtggcgggagctccgcgcgggcgcccggccccgggaggccctgcaggccgccgggcttggggcttggggcggagctgcccagggtggtcccttgctacctggaaatgcctgaactggttcctcttgaaagtttcagctggcctgtttcagatcctgcttatttcctatgtactttgcagtgcacctagcttatggtaaagatgagaggggctgcctgatccatagttctctgccacgcttctcctggcctttccacttaggatcaggctgtggggaaaggccttataggtcttgagtgcatttcttagtctccaagaagca

SEQ ID NO: 14771 - DNA, 1300 bp, Artificial sequence
  DNA replication origin
ttgggtcttatgaaggcttctgtgtcatgtaaaacttattttaaataaatgtgtatgcatttctccagttaatctgtctttggtcaatttaatcctcaagcccagccaaaaaccctgaaggcagaagtacaattttgcctctccttcagtactgagcaaattatctgtgcattcataagtttgacattcccgttatgtatttttaagtgcacataaaacatattaactatatggatagaaagtgttcatctttgaactacttaaactcaactcccatgtgaatatacactgggtaaacagctggaataaagaaataaagaatatgatcacctaacaccttgcatagcagctgtctgccccacagtagtatctctctgaccaatagttcttgaccacagctgcaccctgcctcttccccagaccaagtgaataaggatccctgggagagtgggacccagatataagatttataaaagcttccagttgattttaattgcagccagagttgagaatcactgtgctaaaccatattgtgtccgcaattggtgggttcttggtctcgctgacttcaagaatgaagccgcggaccctcgtggtgagtgttacagctcttaaggtggcatgtctagagtttgttccttctgatgttcggatgtgttctgagtcttttccttctggtgggctcgtggtctcgctggctcaggagtgaagctgcagaccttggcggtgagtgttacagctcttaaggcggcgcgtctggagttgttccttcctcccagtggtctcatggtctcgctggcttcaggagtgaagctgcagaccttcgtggtgagtgttacagctcataaaagcagtgtggatccaaagagagcagtagcaagatttattgcaaagagcgaaagaacaaagcttccacagcgtggaaggggaccggaggggttgccactgctggcttgggcagcctgcttttattctgttatctggccccacccacatcctgcagatgactagagtccagtggtttgttttgacagggtgctggttggtgcgtttacaatccctgagcttgacacaaaggttctgcacctccccactagattagctagatacagagtgtccacacaaaggttctccaagtccccaccagagtagctagatacagagtgtggattggtgcattcacaaaccctgagctagagacagggtgctgattggtgtatttacaatccctgagctagacctaaaggttctccacgtccccaccagactcaggagcccagctgtcttcacccagtggatc

SEQ ID NO: 14772 - DNA, 1262 bp, Artificial sequence
  DNA replication origin
tgcgggccagtgcgagttccaggtgggcggctgtgggctcggcaggccccacactcagagcggccggctggccccgccagctggccccaccggccccgggcagtgaagggcttagcacccgggccagcagctgcggagggtgcaccaggtcccccagcagtgccggctccccggggctgtgctcaatttctccctgggtcttagctgcctcccagtggggcagggctcgggacctgcagcccgccatgcctgagcctccctcttccccatgggctctggtggcgtcggagcccccccagggagtcgccccctgctccacagcgccgggtcccatggatcgcccaagggctgaggagtgcaggcgcacggcttgggacttgcaggcaactccatctgccacaccagtgcgggatccactgggtgaagccagctgagctcctgagtctagtggggacttggagaatctttatgtctagctaagggattgtgaatgcaccaatcggcactctgtatctagctcaaggtttgtaaatacaccagtggacactctttatctagctaatctagtggggacatggagaacttttgtgtctggctcagggattgtaaacgcaccaatcagcaccctgtcaaaatggaccaatcagcaccttgtcaaaacaaaccaatcggctctctgtaacatggaccaatcagcaggatgtgggtggggctagataagagaataaaagcaggctgcctaagccagcagtggcaaccagctggggtccccttccacagtgtggagggtttgttctttcgctctttgcaataagtcttgatactgctcactctttgggtgcacactgtctttatgagctgtaacactcaccgtgaaggtctgcagcttcactcctgaaaccagggagaccacgaacccactgggaggaatgaacacctccagacgcaccaccttaagagctgtaacactcactgcgaaggtctgcagcttcactcctgagccagagagaccacgaatccaccagaaggaagaaactccgaacacatccaaacatcagaaggaaaaaactctggacatgccgcttttaagaactataacgctcaccgcgagggtccgcggctccattattgaagtcagtgagaccaagaacccaccaattctggacacaatatgatcaacctcctttcagtgttggtattaagaaactaaagaacctttgcaggcacatggatgaagctggaaaccatcatcctcagcaaac

SEQ ID NO: 14773 - DNA, 1561 bp, Artificial sequence
  DNA replication origin
tcttgatagtaccagaatatcagccccatgatttctttgtgttatatgggccagagattttcatctcttattttgctgctcaagccccattcctagaatagcctgtggtttttgggtacatcctagatgcttaataaatatttgttgaatatatgagcagataaggaggaacattttatacagcagtaataaaatacatacaacggacttgtggtaggagagacctggcatacaagaataatgggcaaaggttactcttcgtgagttaaagggctgtcagactaacctcaaggaagacaggagatagaagaaggtggattcaagagctattttataatatttgggagaagattatagtatgaagaggatgtatgagaggtaaatataaagattaacactagttttgggaagagatttgggagtagattggatgaggaggatgggtgaggtaaatatcaagggtaacactagttttgggggtagattgaaggaggaggatgggtggggggtaaatatcaagggtaacattggttttgggagtagatttgggagtagattggatgaggaggatgggcgagaggtaaatattgaggggaacactggttttgagagtagattgaatgaggaggatgggggaggggtaaatatcaagggtaacactagttttgggagtagattgaatgaggaggatgggggaggggtaaatatcaagggggaacactggttttgggagtagattgaatgaggaggatgggtggggggtaaatatcaagggtaacactcgttttgggagtagattgaacgaggaggatgggtggggggtaaatatcaagggtaacactggttttgggagtagatttgggagtatattggatgaggaggatgggtgaggggtaaatatcaatgccaacattagttttggagttgaatagttgagggtgagaggtaaatagcaagggtaacactggttttgggagtagatttgggagtagattggatgaggaggatgggtgagggataaatatcaatgccaacattagttttggagttgaatagttgagggtgagaggtaaatagcaagggtaacattggttttgggagtagatttgggagtagattggatgaggaggatgggtgaggggtaaatatcaatgccaacattagttttggagttgaatagttgagggtgagaggtaaatagcaagggtaacattggttttgggagtagatttgggagtagattggatgagaggtaaatatcaaggataacactagtttggggagtagattagatgaggatgatgggggagaggtaaacatcaagattaatactagctttgggaatagatttgggagtagattggatgaggaggatgggtgagaggtaaatatcaagggtaacattggttttgggagtagatttgggagtagattgaatgaggaggatgggtgaggggtaaatatcaatggcaatactagttttgggagtagattggatgaggaggatgggtgagaggtaaaattcaagggtaacactggttttgggagtatatttgggagt

SEQ ID NO: 14774 - DNA, 1569 bp, Artificial sequence
  DNA replication origin
cgggaggaaacactgcccgcgggcggtgggagggaaaaggggtctcacgaagttctgggataaaaacgggctgtcgttgcagatgcctctgtcacgcgaatctccgagcggaaatgcactgtccccgtgccgggctggggcacaggcgggatcggagccgggaagaggaggcaaagtggcggcgcagctcggacaactttgctgggaaagcaggcgacagcgggcagagctggtgccgctgccccccccggggagacgagccggcaagaggcgcagggtctgcaccccaaatgctgccgtcacggaccaggaggaggacggggtggccgctggcgggaggagcaggcggggagggcgcccagcccgggagtgcagcctggctcgggagaaccaccctccgtgtcctcggccccagcaggggcgcctgcgcccgggtgcgcgtccccccaacgccccctcgtcgtcccgcgggaccaccaactactccgcgccgctggaggagccgcgggaaggagaggggagagcagggagcgccgagaagcggccgcgaagcccgcccggacccgcacgtaccttgagctcctcaatgtccaggttcgttgatctgtccatggagcgcaactaaacgaagtggagaggaaccgggcgagtggcacccaaaaacaatctagtcttttagtttccagcttaaactcagctttatcctcctccaagccccggcagctcctctcagtctcattctccgtggtcacgccgcctccaccgggttaaaaataaggaaaataaataaataataatgataattcactttattttacttcctcaaagatttagtgacaggtgatctctaccgcggtgcaacacagctgagtcgattgaaacaggggccaaaagaaaaaaggaaaaaaaaatccactctatttaagattatttcttcttctgcaataagcttagaacccagcgaattgctgcatcccgagaaaaaaagctgcttccctggtcagcatcatgcggcaaatttcaagcaaatgtgttcaaactgaagagaagagtgtatgataaaaggcttcctccgtcaggcttactctggtaggtaatttagctccagtcccaggcattagcaatgatcagtttccccggcaagataacagaatccccgaagtcctgcatagacttaaaaaatgtcttgtagctgagaggtattttctcagtggggaaaagaagataatcaagtcagaagggaacgttctcctttgaaggttatgctaaaagagttgagggaataggaggtggatccaacggagagaaaaagagggagagaaagagagagggagagaaaaattttcctcctgcttcgctgttttactggccttcaccaccaggtgactgacttcgcttctctcttcccacagccaacactaaggggatttctctcatctgtcaaaaagcaacatttcctctccagacaaatactatcgctgggtcttaaagcctgccctgtgtccggaatccactaggtgacaatcattttaattcattgcgtacattgcttcatcttcctgcagatct

SEQ ID NO: 14775 - DNA, 941 bp, Artificial sequence
  DNA replication origin
tgggggtaaggttatagattaacagcatcccaaggcagaggaatttttcttagtacaaaacaaaatggagtctcctatgtctacttctttctacacagacacagtaacaatctgatctctgtttctttttaccacatttcccccttttctattcgacaaaaccaccatcgtcatcatggcctgttctcaatgagctgttgggtacacctcccagatggtagacggggtggcggccgggcagaggggctcctcacttcccagacggggcggccgggcggaggcgccccccaccttccggacggggcggctggccggacgggggctgccccccacctcgcggatggggcagctgcccggcggagacgctcctcacttcccagacgggccggctgccgggcggaggggctcctcacttctcagaaggggtggtggggcagagacgctcctcacctcccagacggggtggcggttgggcagagacactcctcagatcccagacggggtcgcggccgggcagaggcgctcctcacatcccagacggggcatcggggcagaggcgctccccacatctcagacgttgggtggccgggcagagaggctcctcacttcctagatgggatggcggccgggaagaggcgctcctcacttcccagactgggcagccaggcagagatgctccttacttcccagacggggtggcggccgggcagaggctgcaatctcggcactttgggaggccaaggcaggtggctgggaggtggaggttgtagcgagtcgagatcacgccactgcactccagcctgggcaacattgagcactgagtgagcgagactccgtctgcaatcccggcacctcaggaggcccaggcgggcagatcactcatggtcaggagctggagaccagcccggccaacacggcgaaaccccgtctccaccaaaaaa

SEQ ID NO: 14776 - DNA, 980 bp, Artificial sequence
  DNA replication origin
cgagatttcggcgacccccccccccgcccccgcccctccgttctctgccccctcccagctctggtgtgggcggcctccgctatggctgcgctgcgaaggctcttgtggccgccaccccgggtgtctcctccactctgcgctcaccagcccctccttgggccgtgggggcggcctgcggtgaccaccctgggccttcctggccggcccttctcctcccgagaggatgaggagagggctgtggcggaggcggcatggaggcggcggcggcgctggggggagctgagcgtggcggcggcggccggcggggggctggtcggcctggtatgctaccagctgtacggggaccccagggccggctcgccggcgaccgggcgaccctcaaagagcgcggccacggagcccgaggacccgccccgcggccgggggatgctgcccatcccagtggcggctgccaaggagacggtgagtgcgcgagcgcgcgtcacacctgcgcgggggatgtgaccttcgtgccgggtacgcaggaccctggaggctgtggggacggtgcaagcgctgtggccgcgggtgaggaacttcccgtgagcgaggctgacacctaggccggacagcctaggatccggtcacccacgtattgggaagaccagtgatgctgtccctgatgcatcaggaccttaaaggtggctgcagctaccaagtatcaatccaaacccaaaaccaacacccctccccctcttacaaaaaaagattcagaaatgaaggccatgacaggcagaaagtggaccgctgtaggtgtgggaaaaaggaactcctagattgcgcggggcgacagctaatgacccaggaggtctgttgcattagaatgagtttcgaagcagcggtctgagatctcaaaagccactactttagcatatgagaatttattagtcccaagaaaggaaatgctaaacctgcatgctaacgcccttatcatacccagg

SEQ ID NO: 14777 - DNA, 952 bp, Artificial sequence
  DNA replication origin
aggaggcggaggggggcggtgaggcggcggcgtcgggaggctgcgctccgcccccgccgttccccgccgcccggccgcctcccctggcgtggcaggctgcgccctcgggcgggctctgcggggatgcggggccctcgctcgggccacctcgcgggctcccaccgtggccccgccgcctccggctcggcctctggattccggggaggcgggggctgctgggcgcaggcccccggggcggagcgggcggtggcggcccctccctaggcgcccggcacccggggcagttaggtcgcgagcgcttccgcgcttggcgcagggcgggggtcggaggcgaggccggcggagcagctgctgcgctcgggactccgcgcctgccgcgacccaggcgccctgagaaagtctgcagcaccgaggcccgcgtccccgcagcccgcgtggaaccctcgcgcttcaacttgcgggtccctgggagcccgcgggggccgcaaggagcctccctttactactcgggctttcgggggaagcagaaatgcacagcgaagagggggtgccgagccggcgtctggcatgggaggggctgtggagagcgaggaagaagcatttttggctgtgaatccaggcacctctggagttagaaacacaagttctttgctctgagaatgttgatgctttggataaatgattgtgacaggggccgttcccactgtcccctccctcaagtacggtggttccttccaccaactatttattcttttcctcaacccgctcctcactacggtgtttactttcgtggtggcaattccaaacttagcagatagctgactccaaagcggttcccaaaaaacaccgtaagggaacctaaaggtagtcagcccaaacctctgattttatgattcacgaaatggaaaataaacaaatgcctcctttgcttttccttcatctgattatgaac

SEQ ID NO: 14778 - DNA, 1144 bp, Artificial sequence
  DNA replication origin
ggcccaagcgctggggaccgcgtcttctctaagcctgtcctgcctgcgctccccgagttctgggggacatgctacgaacggcgggcggctggagagggaaacttgcggcccggaacaggaggtcccaccttcacggcccagacgcccaaaccggccagccagggagcctggccgcccagcgctccaccacccgcgccgccgtcacttgcgtgccccgcccccgggggcgctctccgccccctctgcgtgtcgcgtcatcatctagcgcccccgtcaggacgtgcgaaaagcgacggcgcagcacggtgcggcgcagctcctgctcgcctttcccttcgctgggcgagaggtgtctatggggcacccgctgccgccgccgctaccgccaccgccaccgccaccgccgccgagtgctgtctctatggcgaggaggaggaggaggagcgcgagctcagcgacacaagtagatcttgcatccgctgcagccttacggggggaggggcgggttagggaagtagaaagggggcggggacgatgaacctgagagggtgcgcgatggcgccagctggagtgcggctggcggaggaaggagcctggcggcgggttgggggctgggtaactggggctgggggtttgtcaaggggttggcgcgtagtgatgacgcaaaggctttgtacctggggcttcgcagtgggacggaaattgggagtggagggcggtggcctagatcctcacctcttcgtattgtttcacgcggcagtgcttgggagtcagtgtagctccagtcagtgttatcagcaccttcgcactggcgctttgccagggaagagagttatctatggcttgaatacctcggtgccgtcctctcgtttctctgggaaactgcagtacggagatgctttctccagtaatgagaaggcctttggtgtctcttcggggcttctgggactgcagtagagagagaggtggaggaaaacaatgttagactacagggtctttccaagtctttgtgtttttgtgcttatgtgtgtgtgtgtgcctatcggggtgggagagttataaaggaggggtgtcctggatctcctttagtttctctacttggagaattggaagttacatttgtgactcttcagagtttagaaga

SEQ ID NO: 14779 - DNA, 1074 bp, Artificial sequence
  DNA replication origin
gacggcggcgcgggtggtggagcgctgggcggccaggctccctggctggccggtttgggcgtctgggccgtgaaggtgggacctcctgttccgggccgcaagtttccctctccagccgcccgccgttcgtagcatgtcccccagaactcggggagcgcaggcaggacaggcttagagaagacgcggtccccagcgcttgggccacggacgtcccaccccgctcctctgtcgctggagaaccgccgggccgagccactgggagaagcaggccagagccttccagggcctccggcccgtggacccgaggaggatgagctggctttttcccctgaccaagagcgcctcctcctccgcggctgggtcccccggtggcctcaccagcctccagcagcagaagcagcgcctgatcgagtccctccggaactcacactccaggtgactggtcgctgcctctccaccggaggaaaaagtagggtgggagggcgggcttgtcctaaccaccctcacagcgcctcagtctgctccccaccagctcctcatgtggtttacctcccttggttgtgggtcacacgcttgctctgccactcctgcccccttttactgttttcctccggaccctccctgcctcctgccgcaccactgctcagcgcttctaactcggatttcctcatccctcctgacacatagctgctgactgtaatctctcaatctctctcatagtctatttccagtatcccttgctgcccaggcttcgccactgatctttccctttgcccacctgattgccgcgtcagcagaattgttaaaatacaattgtgaagagtaatctccaggtttcacaaagaatggaaaatagaactgttgcaacatcaaaggaaagggaagccagagttttcatcagtgaatgcttctcgtctgagagtcacttatcacgtagtcagtcttcttgagtctctaagatttaccctgttggagcagtctctccccatctcacagcgaccagtgcatgtacatttctcacttctttcatagtcttgtccccacgctcaagaattactttatgttcatcttgat

SEQ ID NO: 14780 - DNA, 1273 bp, Artificial sequence
  DNA replication origin
agaaggaagcccagggacggtgtggagcagcctgtactccccatctctcttccaggaggccacacccaaaacaaggccctctttgtgtctcggagaacagtggccgtatagtgctccgccggctgcccctgttaagagagagcgagcagccctcgccccggcaaccccaggcagaggcgcgtcgcggcggcggcgcaggtgggcgcaggcgcggaggtgggctctctagggccgcgcgggagccccgggtccgcacgccgcgcgcggaacacctgggggcggagccaagaccgcgtcccgcccactcccgggcgcgaagccccctccccgcgcccctcccatcgcgccgcagaggcgcgcaggtgcgtgaggccgcgcccgcccgggaccctgcagacgtgggccagccatggagcacatccgtacgcccaaggttggtgacaccagcgcgggcggaggagggacgggaggagatgggggaggaggaggagggatgctgagcgcgcgggaggccgactgctttgaggggcaccggcggagcctggaccgcgggcgagggaggagcaggcattgcctgagcatcccggggtgcctgcgagcccggtcgttctcttgctgcctcccaggcctagccttagctgctgctgggtctgacctcttggttttgggggagcgcagtggacacaagggtgaacgggagggaacctcagttgtctgctagtaactgggtgtagatcaacccttctttctcctggcacgaggctttctcttttagctgttggccgctcagagtagttgaaagggaaataagcctttcggtgacaggtgcaaggaaaacgagctaaatgcagagggactcctgcgcttggaagcttgttaaatctagggtgtcaggcccacccggctcggccttcccagtcagcatcctcatcctgagcgtagcagctgcaaggggccttacacagaacggataatcaatattcattgtaggttgaatgatggtgtgttcttgccttttccagtccgttttgttcgttagagaaaaggatgcagcttacggattcgtcacgcactgttgtgttttaacaacaccagcttttgctaattaacaaaagcaaatggtccctgatcactccagtaaattaacattggaaacgttgatcgctgtaccaaatcttcctcctcagttgtactgataatctaatttagaatgaaaatgatgatcgacgttactgcatgataaaaaccctaaacgagtgaaagaatatgctta

SEQ ID NO: 14781 - DNA, 870 bp, Artificial sequence
  DNA replication origin
agggcagagacaatgctagcttgatcccttttttgcagtgaggatggagagaaacagtaggatttgaaagtgatttaatgaaaaaagtagaaaggatcgggaggaggagggaggttagcttggcttccagccgcaggcctgacccgtgggtgaaggtagtgccatcaccaaggcagaggaggaggaagaaccaggtccagggaggatggcactgaggccagggatggcacgcggaggatggaggaccccgaagcatctcattgcacacctgaggtggacggcggacacgtggacctgatgctcctagatccggccacttccgttcacttgggagttaccagtgtacagatgtgaagctggcccagggacagaacaaggagtgggaaagaagggtgcctgggggagcaccagcatttcaaagttgatagaaggctaagagctgaccaagaagagtgagaaagctgtgggggaggtgggggaagctgggaaaaatggagccagggcagaggctgttccctgcaggtgaggtggaatccaggaggacagggacagactttaatggcatgggggtccccgagtaccttggcaatagccgttttggtggaagtcaagggagaaggccagatgggagtgggcaaaggagtgtgtgggaggaaaggaagtggagagggacatggagagctctttcattcagggacttggttctagtggggaagagtggtgggctcagcaaaacactgggggaggtggagcagggctgtgagagggatttggtaacagggtgtaaggggcatggcctgctgaataagcaccatggctgagaacacgaggcatgacagaacccaaattctaacttcagagagcagctca

SEQ ID NO: 14782 - DNA, 852 bp, Artificial sequence
  DNA replication origin
atataaatagctacatgtatatgcttgttaatatacatatgtatatgtgtatcacacacacaaagtatgccactgtcaccactcctattcaacatagtactggacgttttggccaaagcaatcaggcaagggaaaaaaaataaaaggcatccaaataggattctatacctagaaaacctcatagtctctgcccaaagcttcctagagagaagagagagaagagagggaggagagaggggagagagaggaggagaggagaagagaccagaggggaggggaggggagagaggagtgagagagaggagagaggagaggagaggagacaggaaaggagagagaggagagagagaagagagaggggagagagggaagagagactggagagagagaagaaaaggagaggagaggggaggggaggggagaggaggggagggaggagagaggagaagagagagaagaggagagagaggagaggggaggggaggtgagaggaggagaggggagggaggagagaggagaagagagaggagaggagagagaggagaggagagagagaagggagagagactagagagagagaggagagacagcaggagaggagagaggagaagagaaagagagagagagaggggagagagatgaacaaacaagcaggaaagaattaatcaaaacaggtaacctgagtgagggcacccataacaatatccgaatgaataaaatttccctactaaaaagacaaagaccctgtaattggtgggaaattccaagagccactataaatcagagagacagtgattcaaaataaaaggatggacaaatacaaaccgaacaaataagattaagaagaaagtg

SEQ ID NO: 14783 - DNA, 1229 bp, Artificial sequence
  DNA replication origin
cagcggacggtccgggccgctcgagggctgcactgcgagggtctggatcgcctccagcctcccccggaggccccgcccctgccctggagaccccgcccccgcctcggaggcccagccacctcccccctccccgaggcgtcggccccgcctctccgccctccgccctccgcccccggggcccgccaccgccggcccgcctgcgccgccttcgctttgacgttactgggggccgggcgggcggctgccgcgggctcgcagcctcgccagcctccgccagggtgcgcgcgggccgccgcctctcggcagtcccgggagctcaacaaagagcacgcggcgctggccgccggcactcgcgccctgaggctgcggccccggagcgcccggcggcggtttcggcgcgcggccgggctggcgatggaagatggaaggaaggagcgcagcggtgagctccggggccggggcgcgggcgcggggtgcgcacgcggcgccgctgttcgacgtggggtttgtgttgctttgtcgccgctctgtcccccaggatcccggggccacctgggtttgtgctgtctggataggtgcagggtgcgatttttctcttcgcgcttgcttgctttgtgttttttaggagcccagcagggtcaactttgtggtgttaaggtttaggggttttagttcatacctcggctttgaaaacctcagactttggagaaaagctatcaaaagaaggcaacatgaaagaggacctcgtatgccgatctttctttgcccggtcagcttgtatttagggactatcacgtttctgtcagaaagaaagaaaaaaagactaaactaaacaaacttgaattgagcgagcaaacggacaagggaagattattcggtgcaattcccaggagcttttacagatgtttaagtcattctgttttacatgcatttaactttatccgccgttttcagctttccgttctggcgaatgatgttctgaattttttttttaaacacattaacaccgattagaggacgtgggtttagaatgttgttggtgacctaaataataaatgtttcgttttgccattcccctcgatgtcaaaggatgttaaacgcccactaggcagaggatggaatgggcaccacgatttcattttctagacactggttctcccgatagcgggatccaggatttccgctccagaataactcttgagtgggtccaggtgttggtgtagggaaga

SEQ ID NO: 14784 - DNA, 1454 bp, Artificial sequence
  DNA replication origin
cctcaaatgtataatttaacataaaaaaagacaactggagatcaggtatgcacgggacatgaagagggaggtaatttacttgtgcaaagttcactagagtgatgcttgaaagatctgaattctagtttttaatgtcctctaaattagcctggcaagtcattgcctttcttggtcctcattttctatatttgtcaaataaagggtttgagggattaatcctaataacggggctcaaatattcaaatgattccatgaaaaaaaaacaacagaaagaaaagcaggaaggaaggaagaaaaggtgggagggagaaaggaagagaggaagaaagggagtaaggaaagagggaaggaaaaaagaaaggaaggaaggaaggaagaaaggaaggaaagggaagggaggggaggggagggagggaggaaggaagagaagaagtgaatgaggaaggaaagaaggaaggaaggaagggagagagggtaggaggtagaaaggaagagaggaagggagggaggaaggaaagaagaggggaaggaaaggaagggaagaagggaaggaaggaaggaaggaaggatgagaggaaaggaatgaggaaggaaagaaggaagggggagagagggtagaaggtagaaaggaagagaggaagggagggaggaaggaacgaaggaaagaacagaggaaggaaaagaaggaaagaaggaatgaaaggaaggaaggaagggaagggaagggaagagggagggagggagggagggaagggaggagaagaataggcagatccctgcagaaagccccagagtagtttgtctaatttatgagttgtccagacactctacatctgcagaaaaaaatcatcccaggacaccagagaataaattcttgtaaaaaattgagcatcccagggcatgttgttcatatgctgagaattctatattagactgtctggtagactgttgcaccaacaggcctcaataaatcacacttttcagcatccatgtcattgtatggtcctctcctaattgactctagacttagcccacatggcttgcctcagccaagaggacattggtacatgtgttgcttcggggcttgtcctcctgaaatgctgccactacaatgtgaaaatataaaagagccagcctggactccttgagaatgaaagaccacgtgcagggagaggcctgataattccagcctgttccagcttctaggggagctagaatgggactgagaccaggcaagaccagcactcagctgacccacagactcatgagaaatagtgcagtattaccatttaaagccactaggttttgagtgtttgtaatgcagcaaacgatgacttatccaaattggaaagatcaggcagactactaaaaacttcttattaagagaatgttccccaaatcctagagccttaaaattttatgtgttcagcctcatgcacaatcccaactgtccc

SEQ ID NO: 14785 - DNA, 1608 bp, Artificial sequence
  DNA replication origin
aaccccgcacctgagcccgccccgggcgccgcgaaggggtggaggcgggggtgaggcttccgcccgcccgctctggcccctgcgcctcccatgcacccatgcaacctccgaggaaattcccttccccctactcccaccccacgcacactctccccaaagcctcgccccacccccagcacctaccagtgctgggcgcccctgggcagggtggctcgatcacccgccacatccacttggccgccagaagccgtcggggaagggagggagggaaaggcagaggcgtcccaagcggcgcaggcgggctgagcaaatactccggcccggacgcaaaacagctcttgtagccgtcccgcccgcgccgccccgccgcgcccacatgccggggtgactggcggggcgcaatcgcggccccacccgggcgcctggaggctctccagggccactcgtcggcgaggctgcgtggcctgcgcatctcgggccgcctggcccgcgcgctgtccccgagctgcggtagtccggggtaggcttgtcctctcctctcttagttcatgagacagggatctgcagtctgtgatctcttggggactgcaggacttagattaaatctgcagatctgggcctttccacgtttcagagctcggggttccttgctaggtgtagggtaggagggtgcgcaggccccacttgttcactctgcttgggtgctgcaggccaaggcgactctggagctttttttttttttcttttgttgacattaagtaaatgatcaaactctttggcacttgtcggtacacgtgtggctttgtaggacaagatgaaggaaggaaaaggctggaaggaaggagaccgcagtcaacacagacaggtggagaaaatgaaagaaaactgggggaaaagttaagatgctgaaaggagtcttgaggattgcaacaagaacaggttggcttggtgcctgaagacgtcagggaggagctggcagtccacagttagaggaaatcttggaggaaaattgagcagaagcacagtggaaaggcatttccactggagggcattttccatcctagaggagcatgtggaagaaaaccgcctgctttggtgaaccccagattttgtgtattgggagagatgtaataaacagtaaacaccagtagtcctctccacggactacctgacctctttaggagcctgacctgctggattcaaacacaaaatggcatttccctgcctctccaaactgcagaagctgtgcagagttacatcaagcctcggggcaggcggcattgtcaggaaataagacccagctatttaggaacaattccaggaatcccatcagggaggaatttctggtgtaaggcttagttcctactgcagtttaaatgatagcatatggggtgctttaggctggagtgggattggcccctggaaagctgctatgacgaggtcagaatgaatcctagccctgcatggatgcatcagttgaaccatacagggtggtttatcagttaggaaaaatcccacaggacactgtgacagcctaccttcctcacacccagtctctctccaggtcctggcaagtccttccttataacagctttatcactgtgctac

SEQ ID NO: 14786 - DNA, 1905 bp, Artificial sequence
  DNA replication origin
ccggccttggccgcccccgccggacctaccctgcggcggggcgccaggcttggccgctgttgcgcccgcccgcccgagccgccgccgccgccgctgctccccgcccccggggtccctggaggctccgcggctgccggagcgggaggtggagccgagtccgcggcggccgcgcaggagggaaagttcagcgacggcggcagcggccggagccgggccgggcagctagcagggcgcttcgggtgagtcgggtcccctcccgggccagccgggcgcggtgtgccgcgcgggggcgtcagtggcgccggcagatccccacagccccgcgcgcctagctcgcgcccgcccaccccgcgacctcggggtggctcgtgcagctgcggaggacggtgccgcgcctggcctccctccgccgctgcccgccgggggcccagggcacgggcaggggccggggaccggcttggcaggcggagggcgcggcgcctccaggtgggcgcgcggggacgcggagggagcttccagggagggtccggggccgctgcgctcccggggtcggtttggcttcaccagcgtttctcgtggccttccgctgtctgattgctttctgcaaaacccactgaaaagtagcctttccacgtgccgcgcgatgactgcggttattgtattattgtggctgggatggagagggtggagggggcgtgacgagggtggccggtgggcagcgcgctcgcctgcccgggaccgggctagtgggggatgtggctgagggtcaccgctgcccgaacatgcccaggggacgtgcgatcggtgggcagaagctgttcgagggcatgatcttggggtgggatgggggctagaagggcggggaggagaggaaagctgtaggaagcggaggcaaagttgtttgtttccgtcgcacttcctgcacctgcattcctgtcagagattttgaagttatcttttcatcgatgagcaaagaatggtgagaaaggaagagatgttaacagcactgtgcctgccaaaacagtgagcctcgggaaatactcataagtgaaatactaataaaaagcatggagtggttaaatttcacaaactccacttttcttctggtttcaaagccttggtgcagtttttacttaacgtcattagatacgtctagataataaaggtaatgaagtgttctttcacggtttttttttttaaactggaaatttaaatttaattctgtaggatttcgtcgacattgttcctacaagaaagtcaaattaccttggtgttacttgcaacagtgagcattaataagccctgtgcagtgctgaaatgttgctaattggagggagaaaggtccttcaaacttggaaatagacgcagaaaggcaagatgaatttttatgtaagccttaggcataaaaggcgacttgaacacgttttgtaatagtgcataatacacaggggactaggtgttgggctgccggaagatggtcaattcctagaaagcaagagacgggccatacccattgtaagatcaccgtacatatttaataattcgtctgccttgagctgccacaccatatgtactccacataatacaatatcaaaatactttaatcctgttcatctttgtgtgctaaatcttatatgtctatttgtaaaatgtattagtgggttttaaagcagaatctccgacatttggattcatccgtttacattacagtgcagtgagcttgtgtctttgctgttccagagacctgagctccaggcggcttcttccacttattaattgcatgaccttgggcaagttacttcccctttcctagccttggtgtcctaatttgtaaaatgccaatagtattcctcaccttatagagatgtttagcaggaggaaattacatttgggaacttatcctag

SEQ ID NO: 14787 - DNA, 1521 bp, Artificial sequence
  DNA replication origin
cccccggcgggcagcggcggagggaggccaggcgcggcaccgtcctccgcagctgcacgagccaccccgaggtcgcggggtgggcgggcgcgagctaggcgcgcggggctgtggggatctgccggcgccactgacgcccccgcgcggcacaccgcgcccggctggcccgggaggggacccgactcacccgaagcgccctgctagctgcccggcccggctccggccgctgccgccgtcgctgaactttccctcctgcgcggccgccgcggactcggctccacctcccgctccggcagccgcggagcctccagggaccccgggggcggggagcagcggcggcggcggcggctcgggcgggcgggcgcaacagcggccaagcctggcgccccgccgcagggtaggtccggcgggggcggccaaggccgggctggggtcgcggttggccgcgtacctccgcgtcacccacggcctctctgcagtgcgtccctgcgcccgtcggagcggcgccctggccgaagcctgtcactctcggaaggggccgcgctcggacaccaggggcggtttacgcgtgactggacaccaagagccggagaagtttagagactaggacactgtggcgtggcccgagttgcaggagagaggtgtccaatctccatggggtccttactcttgcaggacagagttccccatccccctgctccacccgctctgttcccttggctgccctccccgccgagcgccgacttccatgcaaaaactttgtaaatcgcacttcggggaattcacgctttagtcgcggtctctgctgccctggtcagctataacgcctcccctagagagcttttacttacagcgaaggtcaggaacccctgtaactctcacaccgcaccactgtgggtaagcgatgtctgcagggacccctgacggccactgggaggccaggagagaagagggagaggaaaggctaaaaaggcaagtggagtgttgggtaataaaagatccaccgccacctccagcacacacaggcaggcaccctccagggccacaggtcgccttttatctgtaagtgctccagcgcatctctgtgggagagggagttgggaaataggatcgccaattttcagtgtaattgagggggactcaggaggagtcagttagactggaagaggtcatcacctgcagatgcggttaagcaacttgcagaggccccagggctgagccaccgcagaaccggagctggaaaccagtcctatgactcctgaggcagtgctctttctactacctggccatggctccttctactgcctggctcagagtctccatctgggagattccggcgcaccagactttattgtgggcacagggtaggcagtcctgaggctataggcacagtcttgaagcagctcggtttccattaagctcctgcttacctgcaggaagcatccctgaagcaagttttgcttcccacctggactccccaggtggacctatccccaccccacaccctgagtgaactcttca

SEQ ID NO: 14788 - DNA, 1374 bp, Artificial sequence
  DNA replication origin
gccccagggacctaagcacacccgacctcaagcgggatcggccgtctctcaagtgctggggagagggctcctggaaggtgtaggagcaaggcgggtgaaaggtgtaggagcaaggtgtaggatgggaggggagagaggagggggtgggaggggagaaagcagggggccgggcaggaggcggcagcccccaggcaggcgcagctctgggccagggcagcccgggcgacgggagcgcgcacctccacgcagagcggccgcatgcacagccgggacctcacctggatgttaaagtctgccgggtagaggctgcgggccgtgatcagccacgccttggctgcccacaggtcttgcggcaccaactcccgggctcgctgcaccaggaactcgcagtccccctgggcagacatgacccgagcgctctccagccgccagcccgaagcggccggaacgtccggctctggactctcagccgccacggcagccaccgccgccgccgccgccaccgcgggggaggctactgcgcatgtctggaggcgcacggaggctggcagagtggatcgggaaagcttttccgggttttgcgagcagtctcctccccttggctcctcgttaccgcccggtcccctcctcttctgagaagccagagcagttgaaccgcttccaggtcacctcgaaaatgcggagaagtggattttcattcctgcgggctgcagcgtgaccttggtgaagtcagggagcatgcgcgggagcgggcaggcgccaggcctcttcgccatttccatcctctctgggtattgctcagtttgtcgggggcgggggcggaggcgggggcggggagacgggcggtcccggggaatgggcggtccctgggcgtccccccggcgtggaaggttgagaagaagtttgagaggaacagcagagggtcggggaggcggcgggaagcactctccacccgggccggcctgaaacaccttccccgggggccgctgcctgcgactcactccccgggcttcgatttacgcgaaaactcctggggctggtgggggtgatcgtgcaaagcgtgagctccggggttccttctctttccgaaatccgtccacgttttattatttcacctttatgcaccggtttctccaacaaacgtttattgagcaacgaagtacttggaaagcgctttggtggatgccgtccgtgggagctgcaaagatgactaaaaccctgacccagcaagggttttatatgttttaaatgttctggacgtgaaacccacagaaagataactacgctattattataattatctcctccagccacaatcaatgtccttttcaccaaaactccagatttgttttccatctaagagatgaaaaacat

SEQ ID NO: 14789 - DNA, 1098 bp, Artificial sequence
  DNA replication origin
agagagacgggaacacaccgggaaacactgggaaaaaaaaaaagtctcaagtgcgcccgaggcgcagggggcaggtaaggtgcggtggccggggatctcctcgcccctggagggtctgctgccctggctgcgggaaaccgctttcccctcgccgggccggaccgtccgtgcgtccgcgcgtccgtcggtctttgtctgtctgtgtccgtggctgtcgaggtgtctttgtctccgcgtggagctgtcagggtctcccctctgcagggtgggcgccgcttctccggcccggcccagaggaggtgactgtgcgtctgtcctcctgtctttgtcttcgtgtctcctgcagacggggttcgtctattcccagcaccgatgctgatcctggcggggacgtcagtgttaggtgacactggtgtcggaggtgaagaagtgggaggtggggacgcgaggccgcaggagcaggggccgcaggaagagggtccggcggtcggtccgggccgctgaacttcgccgcctggaactttgcagatgagctgtgtccacaccggtggggaggacaccggtgcgttgcagccagagatttgaaaggtttccctcaaggaataagtcacacgggcggaggtggttagagaggaaggtggtaaatcgaagtgtctaagtggctccctggggctgcagcttcctggggtcggtcctggatgtgcaattcaggaatttagtcaaagcaccatgcacacacagacagccccacactaccttcacttcttccaccgccaccctaggcagccagacctcacccctccaccctgccacaggctttgctctggctggaggggcttcagaggtcgcagcttggcagcaacaggcatccccgagacaccaagggccaggtgatgtctctttttcgtgctccaagtggaaaggtttgaactgtggagcaaatgagccttgtgctcgcccacgagtatgtcaggcctgggaaagtgctccagacttgttagcttcgcagtcttcaatttcccaggaataagaagtgcttagggatctggcctcctaaagtgtttcctgtctcacttattccctccacaccgtcccgct

SEQ ID NO: 14790 - DNA, 1339 bp, Artificial sequence
  DNA replication origin
gaccctccaggggcgaggagatccccggccaccgcaccttacctgccccctgcgcctcgggcgcacttgagactttttttttttcccagtgtttcccggtgtgttcccgtctctctttttccagagctgctgagcgggccgggccggtcccactgcgcgggatgcagctcccggctcccactcactggccgaggcgggcagagaaactttcggcctccccgcccggccgctgccaacccgccagctccaggcgcgccggcctctgcgcgggtcccggagccggggcggggcggggcggggcggggcggggcggggccggcccggggcggggccagagccggcgccgctgattggcagcgagctgccggcagcctggtctgtgccgctcggcggcctttgttccgggctgacagctggggctgctcgcgacctcgcggctccttcgcgcccgcggcctgcgcggggtcccgggtcccgtctctctgctctcacttccatcagccccattgggcgaccctgccccctcagtcttcctttcttgcctggccccctttctccgattgttcctgtcttgctcttgtcgcatccttttttccctttcattacctgaaattcttactccagttttgtttaaaatccattccttctcccgttctgtgtatgttcccctttcttcattaccccttcctcttaatcgccagtttatttttcttaataccgtctctcccgctcccgactcgcactaaagggcgtgtgttttgttcaaggactggactagcacccaagtgaggggcattgcgaaccacaccaggattacaggctagagtccagagcaccgggactcccactcccaaaacatgtcaaaagcaaacttttccagctctgagggagctgagtttcaggtgacagcagaggcctgtttcaagtttatagctattagtctcacccagtccccttataatactatcattttctcaaccaccctcacttttaacttctagcaactgagccaggagaggattcaagcttacaaggttttgtaggacaaagggtcagttaaccggagtgctaggtgcagcatgaggcttgggggcttgagggtgcactgaggctaatcctctaaaaccaggcttggcgggaagatggcagctctgcccaaggagtgttagcctcatcttgaaagaagcctgtgtgtgtgtgtgtgtgtgtgtgtgtgtgtgtgtgtgtgtgttggggggtgggggatagatgtaatggattaggattgacatagccgatctgattataaatagcatgggggccggacgcggtggctcatgcctgtaatctcagcactttg

SEQ ID NO: 14791 - DNA, 1159 bp, Artificial sequence
  DNA replication origin
tctcagctccaaaatagtaatgatagcaatgccaatgacatttgtggtgggaggtcaagcacctagggggtattggactgaatggtagcaccgtccttttcactttgctgtttttctggggtggcctcagcagccccggccacactgcagcctgccactgcacccagagccaggttgtgtgaattttgtacttcccctttaatcattctcccctagctcagccttcttcctggctggccctgagtcttaggcctcctggtcaggaaatacgatgccagcagcagagaagttcggtccttaaataactgcctcccctgcaaggttagccgctgccgctcccccgcccctccccgctgcctgtcactggctgggctgccggctgcggggacagtgtgccccctgctggccacctggccctggaaagctgcgggccatggccaggcagtctccaggctgaagggctggaggagttggaggtcggcctcctgcaggggctgaagtggggagagatctaggacgaggggggtgggcagagctgcggtcacattcctaggtagtgctagtgttggggggaagcggagctcctggtggccggcctgcagatcccctgtcccccacatattatccagctgaaaagaaccccaggggcggtgtggtaccctgggagaggggagaggggagagggcggggaagtggaggccaaggtgaagggcggtggcaggagaggccaaggtttacatcagggtctcaggctcataggctttgggtgtgtgtgtgtgtgcatgagagagggggagagacagagacagagatgagagacagagatgagatacagagacagaggcagagacagagacaaaaagacagagaggcagagatagagacaaaaagagagaggcagacagagacagagagataaaaagatacagatagagacagagatgagggagggagagacagacaagttgagacagagacaaagacagaaacagagatagagacagagacaaaaagagacagagacagagacaaaaagaggcagagacagagacaaagagacagatgtagagagacagaagagacagagttagaaacaggcagagacagagatagagaagcagagacagtgagaggcagagttagaaacagaggcagagac

SEQ ID NO: 14792 - DNA, 873 bp, Artificial sequence
  DNA replication origin
aggaggaggaggaggggaaaaggaggaggaggagaagaagggaataaggaagaggagaggaggaggaagagaaaaagaaggtggggaggagaggagaatggggaagagggagaggaggagaggaaggggaggaggaagaaaatgaggggaggaagggaggagaggagaaaaaggaagaggggaagagggagagaaggaggaggaggaaggagaggaggaggaaaaggggaagggaggagggggaggaggaggaagaggaggggaggagaggagaagtgtaggggaggaggaggaccggaggaggagggagagtcaatgaccatctctgattttttggcgagcctgaagcttctaggattggttgacttctttgtggggagagccatccagtctctttttatgaatgtcatgtgggaaactcatgactctttaaatttctaggtcagggaatttttatttctgttaacaaatacagtgaaaataataggaagtccagaaagggggccaggtggaatctctcgggttcacagtgcagggaagataaaagcttgccagaacacctaatcaccatgtcagaatggctgccctacacctataccattagattaggtttcctcaggcccaaggagaagagcaacagcaaacattcatcgggctaatcactttacatggattatctcaattaatcctcacaacaaccctacaaggtaggtgttcataccagtcacactgtaccagaggagaaaagcttcattcattcgtccttgtcatccagtctgtaatcactcggggtctacctgggaacagtgaagctggttgtgcagctctgctcacagtcaactcctgttttatgcagagagaagggaacagtgg

SEQ ID NO: 14793 - DNA, 1579 bp, Artificial sequence
  DNA replication origin
tgaaacctgagtttgtaggaatagatgctcttcgtgaaatcagttttgctaacaattacagctacgtgaagtcagtgcatgagtgaagacttggagggaatccaagaattgctaatgattttgttaggctgggaagagtacgttaggtttaaggtgatattacaggtgagagttttggtgtttatcctgtcttgacttttagagtgcacaatgttgtttttatggtaaataagtatagacaaagttctggtgccgtaagaaaatttagggggaaaatatcagtttctagggaccagtttctctgctgagagaaacttacagtttatgtgcatttcaaatagttaatctgttggggaggagaaatgcttttctctcttgttcataaagaggaaacattttttcccaaataattaaaaaaatcggtcatgaagaatccaggctgggtgagatgagggagggagggagagggagagtgagagctggggggagagggagagtgagagctggggggagagggaaagaggggaagagggagagggagacagagagaagggagagggagggagagagggggaaagaaggggggaagagaaagggaaataaagtggagggaaaaagggagaggagagaaaaaggggggagatacagacagggaaagaaagaggggagagaaaggagaaattagaggagagagaaggagagaaaggagcggggagagatacaaaggagagagggagagaggagcgggggaaagaaagcgggtagagagagagggaaatagagagcagggagaaagggagagaaggagatagactggggagagacccagaggagagatgagagaaaggggattaggagagggaggaggagagggaaaggaaagaaagaagggggaaaaaccgggagaaaaagggaaagagaagggataggggaaagaggagagaaagagccggggggagaggggagggagagagaaaaagtgaggaaggaaagagacacaggagagaggagagggaaagaaggaaagaaacggggaagagaaggaggaagagtggggggagggagaaggagaaaaatgatgagtaggggagtgagaaggtgaaaaaaaggagagtgagagagggcaggtgaacaccaggccagggaatggggggcaacacgaagacagcagagaggggccaggggagcacccaggtcgcagcctttaattgccgcccctccccaccttgggccagggcagaggagggcggcagcaggaagctgtgcagagcccagcaggaggaacctggatgcccccaggcactggggcagcggctatccccacctggaacacacttcttcatctccgcctgttggcgtcccaagggtccggtaaggctcgccccaaatggtagcttttctataaaatctttattgatcagccctccccaacacacacacatgtagtttgcaagtttcttaaatatttattctattctggcctgtatgtgcctccctctttccttagcctctcctttcagaccctctgcaggcttctagtgttgccttttacaatcgttcagggcaacaaatgtatgca

SEQ ID NO: 14794 - DNA, 1165 bp, Artificial sequence
  DNA replication origin
tcccctgagagtggcacccacagccacagcacattgtgcaggccccaccctggggcccttcttgtcggttgttttctcaagccttattttgttaagcagtagactattatccaaacaattttatgcgtacctccaatatacaaataagctaagactccaatatacaaaacagctaagactccaatatacaaaacaaataaaaatggagctgttatggtggatgggggtgaggatcttgagtgcagggagcttctgcctctgtgattccccatgggctccactggtttagtgaggaaaggggaggggacagaggagaggggagaggacagagggagagggagaggggaggggagaaagagggaaaggggacagagggagaggggacagagggagaggggaggggacaggaaaggaggaggggacagaggagggggaggggagagaggggggaggggacacaggagatggggaggggacaaaggagagggctcccaatggtttagtgagctctgttgggggtagggatgtagggataagacatggactcccagaaagggcggggactggcctgccacacctgaaacaatgagagtaggaagtgacgctgggtgtccgtaggtgtcaggccacaggcacagactccaacaagccataggatgtcacaagtagggactgaggtgactgagcaaggattggccaagggactcgggaggacagatgcgaggccattatgacagcacagcctctgagggggtgggcgtgttctttttccctgacacccttccccgtggcctcacagtcttagctggaacagcaccaagtcctggggagtggagtccaggccttgggtctggaagagttgtcgagcacgtgcccttctgcagagggcaacagctggggagttggctgggcatcaccttggcacctggggacactcctggttccattctcgctgtgctaatcatcaccgtggtcctatctccaccattggcagtgactctactcttggccagcgtctccatgtgacagctggggtcttgtttagctgaccagatgccctgggtggtagattgcctgtgatgtccaaggggttattgatacttctggccgagggcagtgattgcggcataatttcttgggcttcccagttgcttttggtggccag

SEQ ID NO: 14795 - DNA, 1139 bp, Artificial sequence
  DNA replication origin
cccatggggaatcacagaggcagaagctccctgcactcaagatcctcacccccatccaccataacagctccatttttatttgttttgtatattggagtcttagctgttttgtatattggagtcttagcttatttgtatattggaggtacgcataaaattgtttggataatagtctactgcttaacaaaataaggcttgagaaaacaaccgacaagaagggccccagggtggggcctgcacaatgtgctgtggctgtgggtgccactctcaggggagccccggacctagacactctgcagggttacacccgaggtcagcccatgcagagcagctggcaaagcaaccagcacacaccaagtgcattttccctggcctgggagcttggccaggtgtggagagagaggatctaaaggccgacgctccagagagcaaagggggcctgcaactggactttgctcctcggagtgagcagaacttgacaagttcctcttaaataggatagagtggaggggacactggcaagtattacacaggaaaaatgacagagaagaggagagtgaagaaaggggtggaaggaagagaggaaaccaggtgaagggagaagcagagaaatggaaacaggaaagaggaagagggggaggggacagagtgagaggagaggggacatagtagagggaaggggacagaggaagggggaggggacagaggaaaggggaagggacaaaggagagggcaggggagagaagagagaggggacagagggagagatgaagggacagaggagaggggaggagacagaggagagggaaggggaccgaggagggtagatgggacagaggaaaggggaagggacagaggagaggggaggggagagaagggggaggggacagagggagaggggaagggacagaggataggggaggggacagaggagagggagaggggacaaacggaaaggggaggggagggcatggtaaggggaggaagctgagggagaaagatagcaggaggggaggggacagaggaacagaagacagagggaagaaatagaggaaggaggcaacagagggcaggggagagaataaagggggaggcaagagggctgaggacaaccactgtaccctctcatctgatgctga

SEQ ID NO: 14796 - DNA, 800 bp, Artificial sequence
  DNA replication origin
gactagcgcctgggccagaccagcgaggctctgggaatgccggcctgcgcttcgggggtaggcaggaggtgggcaaggaagaggaggaagacaatgatttccttctcgcttcctgggcaacagagcatccctgggagaaagctatggaaggatgaagcatgcctttcccactgtccttcttctttctgcgtccttcccccagtgccatctgcaagggccagttctttgatgcttctggggcacccacagcacagccctcaggggtcagctcttcccacagtccctgtgctgcctccatggtggaggatttgctgttagcagccttgtgtcctgccatccttgcagcctaggcctgtgtgcttttggactggagccacagatgcctctaggggatgagaagctctgggtagggatggagtaagctccaggctatttccctagacccacaggcaggcttctctcccctctgtgtattcgtctgctgtgaaggtggttgtattagtctgttctcacgctgctaataaagacatacctgagactgggtaattcataaaggaaagaggtttagtggactcacagttccacatggccggggaggcctcacaatcatggcagaagatgaagagcaaagggacgtcttacatggtgactgggaaagagagagtgtgtgcaggggaattcccatctataaaaccatcagatctcatgggacttactcactaccacgagaacagcatggaagagacccacgcccatgattcagttatctcccactggttccctcccacaacacatgggaa

SEQ ID NO: 14797 - DNA, 1063 bp, Artificial sequence
  DNA replication origin
catctgtttaacaaagcacatcttgcactgcccgtaatccatttaaccctgagtggacacagcacatgtttcagagagcacagggttgggggtaaggtcacagatcaacaggatcccaaggaagaagaatttttcttagtacagaacaaaatgaaaagtctcccatgtctacttctttctacacagacacagcaaccatccaatttctcaatcttttccccacctttcccccttttctattccacaaaaccgccattgtcatcatggcccattctcaatgagctgttgggtacacctcccagacggggtggctgccgggcggaggggctcctcacttctcagacggggcggctgccaggcagagggtctcctcacttcgcagacagggcggccgggcagagatgctcctcacctcccagacggggtcgcggccgggcagaggcgctcctcacatcccagacggggcggcggggcagaggcgctccccacatctcagacgatgggcggccgggcagagacgctcctcacttcctagatgggatggtggccgggaagaggcgctcctcacttcctagatgggatggcgggcgggcagagacgctcctcactttccagactgggcagccaggcagaggggctcctcacatcccagacgatgggcggccaggcagagacgctcctcacttcccagacggggtggcggccgggcagaggctgcaatcttggcactttgggaggccaaggcaggcggctgggaggtggaggttgtagtgagccgagatcacgccactgcactccagcctgggcaccattgagcactgagtgaacgagactccgtctgcaatcacggcacctcgggaggccgaggctggcggatcactcgcggttaggagctggagaccagcccggccaacacagcgaaaccccatctccaccaaaaaaatacgaaaaccagtcaggcgtggcggtgcacgcctgcaatcgcaggcactcggcaggctgaggcaggagaatcaggcagggaggttgcagtgagccgagatggcagcagtacagtccagct

SEQ ID NO: 14798 - DNA, 1338 bp, Artificial sequence
  DNA replication origin
agacggtggggagccatgaagtattttaagcaagagatagacatgattcaactagtgttttagaaagatccctttggccgctgtgtgcagatgagttggaggagagcaaggctggagacagagactcccttaaggaagctgaaatgtgatggagtctgagataggaccaaggcagagggcagagggcagacggtacgtgctcagagaccttcagaggtcagctcccagggcctcactggatgcagacagtgaacgggggagcttgggatggtgctaaggtctgtggcctggtggccagctggctggtgatgttgtcacctgagaaaagggggtggggaagaggggaggaggaggagggggaggaggaggagggggaggaggaggaacgggggagggggatgaggagggggagggggatgaggagggggagatggtggtccttgtctggcatggagggacaatgtttgggtttcagacttatttgaaagcctttggaacatgcaagaggaaatgtcaaatccaaaaagtgtttgtgtgtctgcgagtttgggagagaggcaggggcttgggatggagattatgggattaagggaaataatgcatgaaaagcagcgagcatccggcccggcacacaggcacatggtaaacatcattccttcaaagagtgtttcagctcgtttggggagacagggctcacccgtgtgaaccactgttaactatgaagaggaggccctgtttgattaggtgttgtaaggattaaactgctcgatgtaggcattctgagaagggaagctgtgaggctgggagagccagggagagtggtgtggagacagggtcctgcggcggggaccagagggagggaggctgtcttgggcggaggcttctgggagaagaggacaggagggggaggcaggactgagcctcctggacggcgggactgtactgctcagggctgaaggtgccggctgagggaggagagtctgtgcgcgtaaggttggagctttgggatgtcctggaagacactgaacaggcaggggctcccctgttcctcccaggcaccacacctaccagtcctcaattccagccagctcagggttctctaaaggtgttgcttgataagagcatgaagtagagtcaggtggagggggtcctagattaggagttacactaaatcctcacaccacccctttttttttttgagacggagtctcactctgtcgtccaggctggactgcaatggcgtgatcttggctgactgcaacctccacctcccaggttcaagcgattctccagcctcagcctcccaagtagctgagactataggcacgcgctaccaat

SEQ ID NO: 14799 - DNA, 1520 bp, Artificial sequence
  DNA replication origin
cccgtgtagctgggtgtagtccaccacatgtcaccacgcccagctaatttttatatttttagtagagacggggttttgccatgttggccagtctggcctcgaactcctgacctcagatgatctgcctgcctcggcctcccaaagtgctgggattacaggcgtgaaccaccgtgtccagcctacataatttttttcttattacattttcaaaatctggtgtgtgtttcaaggccttgtgtgaacatgtgaaatgacccagccacatttcaggttcagcagccgtgtgtggtgagcggacagcatttcagaaagcacaaattgttctgtcacagcaaatcagacagcacacatatagaggtgtgtaggtcatgctgaagcccccgaatgagctggggaatccaaggggggctttggagcctaggagcaatggctgtctgctgtaggttctagaaggttctctccagctgctgtgatgagagaagattgtcatggggtggggtatgggggcacagggcaaagcaggaggctgggagaaggaggctcttaacaggcacagtgtcggtggctcagatccaggtggcagcagtggcggtggtgagaagtgtctggattctggctgtattttgaaggtggagctgccagggtttggcagtgtatgaataagagtcaaagaagcgccgagagttttggcatgggctactggaaggatgcagttgtttccagcagggtgaggaagactgtcataagtggagggaagccccaggttttggggggaaatacggggttgggtttggatgtgtcaagtgtgagatttgggtattaggcttgcagctagaggtgttgagttggcaggtagacagataagtctggggctcagggcagaggtctcgtccgggggtataaatctgggggttggaagcacagtgatggtgtttcaggccatgagatgagtcccagggagcaggtgcatgtagagaaaaggagactgagccctgggtatggaagacgggaccagcaaagcaggctgaggaggagactgtggggaggtggcagggagcccagcagagagtggaaggaggcaggagggaggaattggctgtgtccagtgctgctgatgggctgagggagatgaggcctgtggattcctgagcatccatcagacaggtggggccaaacaccaggctgaagcaggtctaagagagaatgggaggagagcaagggacaggtggtgtagacaactcgattgaggggttttgctttcaaggggagcagaaaaatggagtggtagcttaagaggggtgtgtggtcacgaggaggtctttttttaattgaagatgggtgatgtaatagctgatgggaatggtctagaagacagcaaaatcatgatgtaggggagagagaaaaaaatgagctgtctcattcatgcttacaaaggccctatgtggtagataccagtttgcagacaaggaaactgaggcagaggttcagccatttgtcccaggtcacagagccagtaagta

SEQ ID NO: 14800 - DNA, 1087 bp, Artificial sequence
  DNA replication origin
gtgattaggacatgagagtggagcccttatgaatgggattagtgtgcttctaaaggagaccctggagagctcacttgccccttctaacaagtgaggacacagccagaagatggctgtctgtgaacaagcaagtgagtcctcaccagacaccaaatccaccagcacctcgatgttggactttgcagccttgagaaccatgagaaataaatttctgtgatttatttatacgccactcagtctgtggtatttgttatagcagcccgaacagaccaagacacaaggtaatcagcttaaacaggggaaggtgagaaatggctgctttaagccatttggagcttgagattgggacctcaaagtgagaccagtcagctggtgtgtgtgtgtgtgtgtgtgtgtgtgtgtgtgtgtgtgtgtgtgtgtgtgtgtgtgtgttacctagtgacctttggctgctcaggagccagcatggagtgggggtggctgggtttcactgggtttattggtttgtgactatgatggaggaagagaggaggagaggggctgaggagctcagggggtttcatgcaggctgggaagtgtaggctgggtagggaggaattgaggacagggtagggggacggatgagggagagcaagtgtttgggtcagggggtcagggtctgggagaggttgagggtttgctggagtgggaattccagagagggagctggaaggtgaggagagggtggcttgaggttgggatgtgatgtcaacctttcagcagggatttggatgttgatgaaggtcaaggtcaaggatatgactacggcagtggggagctaagggtaggaggagatcactggaggcagatagagtgttgtgcagacagaccgcccctgttgagtggaagcctctaggaatggtgcccaggaagggatgaaccggagatggtgagccaggtgtgaggtcattcctgagagaggggaatggcagggttggtgagtgacagcctccaggggagtaggggcagctgatgacatgaacttcccaggaggacagatggggcagaaatgatgaggagaaaggaggcccccagccatccatgagct

SEQ ID NO: 14801 - DNA, 1116 bp, Artificial sequence
  DNA replication origin
ggtgttggtgacttcatctgtggttgcctttgtgtccaaggaagaaattgctatgaaaaagacgaggagggaacaaaatttagtgccccctcccacaaccaaagcctctttcatggtggtatttcaggtgctgtggttgaagtgagatttttttggatgaaggtattttctgggtaccctccaaataacatcttccagggagccacctgcctgcttctccttccgtgtgtgaggcaggctctgccagtggctggggtgtggggcggctcttggccggacgcccctgctctgtgctgctcttgagatggcgctggtggggctccgggctccctgagcacgccctggcttcgccatcaactgcaatcactccggctcagaaaacaggttgtgagcacgtgccctgggcattcccctcccacccatgcctgcacgctcctgtaacccccgtgcacggtgaggaacagcgggagaggggtcattgtgtgacgggaacacgtgtgtgtgcctggtgtgtggagagtgtaagtacgcatggcatatgcatggtaggatgtgtgtgtgtgagagaggtggggtgtgtgtgtggaggcggtagatatgtataggcagtggtgtgtgtgtatgtggtggtggtgtgtgtatgtgatgtgtgtgaggtggtgtgtgtgtgtgtttgggcatggtggatatgtgtaggcggtgatgtgtgggtgtttgtggtggtgtgtgtatatgtgatgcatgtgtgtggtggtgtgaggtggtgtgtgtgtatgtgatgtatggtggtgtgtgtggggtgtgtgtgagatagtgtatggggtgcctgtgatgcgtgtgtggtggttttgtgcatggcagtgtgtgtaatatatgtgctggtgtatgtaggttgtgtgtggtatgtagtaagtgtatgaggtaatgtatgtgtgtcggtggtggagtgtgtgtaggtgtttgtgtgtgtaggtatgtgttagcgtgtgtgtggatgtggggtgatgtacgtgtgcgggtgtgtgtgggacagggtgtgcataggtgtgatgtgcatgaggtgtgtggagcgtgtgggtgggcggtttgtgtgtgtgggtctttggcagtggcctt

SEQ ID NO: 14802 - DNA, 911 bp, Artificial sequence
  DNA replication origin
agagctggctgcccctactctgtccttctggctcctgcctccctgcttccaggacaccagcccttcatgtggcttctggaccccatggctgacctatcaccttctacagggcttggggcagtgtgcaggcagcaggccccacatcccttggcaaaccagcctccgagtcacaaagtagaacctataagtccccccgccaataacacaccttcacatcccctccccctccagacctgggtgtggaggatttgcatctgtttaggaggtgggccactgtaaccagatgttcatttattaattgaatgcatgtttattgagagcgtactgtctgctacactctaggtgttgtaggaacagttgagggcaagctgatgcagcctctgccctcctgaagccgagtctggggaggtgcggataaataagggggcttctgtcatttgatggtgtaagtgctgtgagagggaagacacagggtgcgatggtagcagcttggagggggcatccacgtctttgctgtaaaatctaaagcgtcttcctggaagagacaggctccaagctggggctgaagggtgagtcagagtcacgaaatggaacataggtgaagggaggcaggaagagtgtgggaggtggagggaacagcatggaaaggcccactgtgagaatggaacctgtttacagagctgcaagtggcttagagtggtggtgggtggcaggtggtgtgtcgtgggtggtggtggaagtggggaggagaattaggggcacagggagggatccctgaagggttttaagggcgatgatcagatctgtgcttcagcaaaatgcttctgtggttccagtggagagagtagattagaggactgtccagaagctgctgctgtgatacaggccaggaacagttgtggcggaaccag

SEQ ID NO: 14803 - DNA, 950 bp, Artificial sequence
  DNA replication origin
ccacagagtcgccttggtgtgctttggcgaaatgggtgtgacgttcccagcagggcccaagcccccaggcctgcatcttgggtgggagattgtggcggccgtcattcatgcttgtcttccctccccaccacccagacgagaccctccgctctttggccagcccttcctccctgcagggccccgagctccacggctggcgccccccagtggactgtgtccgggccaatgagctgtgtgccgccgaatccaactgcagctctcgctaccgcactctgcggcagtgcctggcaggccgcgaccgcaacaccatgctggccaacaaggagtgccaggcggccttggaggtcttgcaggagagcccgctgtacgactgccgctgcaagcggggcatgaagaaggagctgcagtgtctgcagatctactggagcatccacctggggctgaccgagggtaagcctgggcggggcttgcccaaggggagggggtgtggcgcaggcagagaggacgtgtggcgggccaggggttcaggagggaggactaggtggtggcgcaaactggccagctctctatgtctacctgctaggggaacctagaacccagagaagtcgccgccccacctaggagggtggcattgtttggaaaaggccaggagagacaaagaggaggcagaagcaacagctggaggaggagagagggaggtggtgggaggaggagaacaggcgctggaggaaggggggtgagtggggtgggggaggtgagcaggggttgggtaggagcaagaccacgtgattcaagcaaggacggtgtgaagtggttccaagagaaggtgaggcaagagtgaccaggcagatggagaagtgagaaccaggagagagaaggggcaggctgggtgcaggctgagaaaccagccacttccgctgccacggctgctgccctgctatggctgctgc

SEQ ID NO: 14804 - DNA, 995 bp, Artificial sequence
  DNA replication origin
tggaggacagctctccagccagtgccgggcctcaaactccggtctgatttcttctctggtcttgtctcagcctggccacatccatcagccttcctgttctgtggcagaggtctggtcagtgggagaagggcacgtcttttgctctgggccccgaagaagccttctgtaccccaggcccatccctgctgttcttctctgttgtcccctagggatgggtctcctggctggtcccaccgggagtggatggattcctgttctctgggggctctcgggagcgaaggcccgctgtgcagcgcgctgcctttaggtgtcgctgtctccctgcggtagcgctcccctgagcagggcctcccgggggatggcctgagagtggctgttctgggtagggatggggaattctgcggtattgaggaggggacttctggcctaggattttattatgttctgaggcgagatggagtcgaggaagcctcccaaattactctttcggtccaggaaagggcagtcatggctctgggccatggtgcgggcttttcctggtggcaggatctcgagttaggggcttatcagaggacagggggactgggaagacgatgtctgtgtctggaggaaaccattttaggagcttggctttgaaaggatcaggcgagcctgtccctgccgttcacctacctctctttttccctgtcccctccctcctgaggcactgtgggtgtggacatgggggccaggatgggaaggtggcctgatgggggattgcacattggtggaggagcaaggttccatttgcaaggctggggtccgaggaggggagcttttcccttttgcaattatttggcttttggaaggaagaacaaaataagagatagaggggaagggagtttcagaggagggtggagaggaaagaaagagaggagctgagagagaaaaaaacaaggccattgaaagacaagaggtaaaaggtgatgaagaaacacacctcttgggaggccatc

SEQ ID NO: 14805 - DNA, 1590 bp, Artificial sequence
  DNA replication origin
catcgcgcggggagcgctggcagtcactccccacctgccagccgcgcctggcaaacggagcccgcgtccccacgccctgagcccctaaccggcggctccactccccggaacacttttcaagtttctccccaccgagccccgagccagatgggtgggcgggagcggagggttgtgagcagccgttcccggccttccctcctccacctctgggggccgcggacccccgtggctggtgggaagaggcgggagggaggccaaagtttgctttctccgttgaagagggtgggaggcgagggaggaaaaacgggtctgaacaaagaccactgctccttctgcaaaccccccccactgccccccccgccgcctccaagacagggaggagaggctgcctggcgccactgagccccacgcagtttcttttccacacagaattcccagctcctctctccctttaaagctaggtgaaatcgcagctgcttgggaaatggcaatctccggagggaggtgaggaaaggcggttgtttgcaaggctgtgcaccaccgggagtcccaggcagggctgctgccagggagtagacgctcccatagagggagccgggtaactactgtgtatgtgtgtgtgtgtgtgagtgtgtttgtaaggagcacacgtctgcttcagtgagggtgtagttctaccaccttggcttgctgtgtagccagtgttgagccaggctgcccagcggggtcatgatctcaccctctccctcctgcagtaggggatctgggaaggccacgagtggggaggtaggagctggttacaggaggatgtgcgtggtctaagaagtgctcgccagactaggataggggaccggagtcattgggtgtccacacaggctctggactctctgcctgtcccctctgcttcccgccaggtgcgagtccccaagggggcaagtccctgctctagggtgtggcctcagaggtcctacctccctcagccagaggcagcttctctctggggtgggaggggctcctctaggaagctggaagttgctctgggcccgctgtgatcccgaagcccttcctgtcaaccctggcaagtggactctcattctgaaggggctactataaaatctgacctttttctcccactgctagcttgaaaacccagccttctgggtccaagcatgatcagggccaaggtgaaaaaaaaattgtatttcaggcaaaacagccagattgcctactgctgagctgcataccccagcatgggcagggctcccaggtgtgggcaccatctgtggtcgggggctggagaagagcagtgtgggcccctggtcattgcaggcaggctttctccagccgggcaggctaaggagtccacctttctccttttcagaagtggctggggttcctgctcgtggtgggtgtgtatgtgtgtgcatgggagatgaccagagaggcccaacccaatgtctgcaaccctggaggctgagtgttgagaggcgggggtgagagcagaagagcagcaggctcagcatccccttgctccacagcccttcagtttccttccctcgagaagtccccttctaaagctgggctgagtgg

SEQ ID NO: 14806 - DNA, 793 bp, Artificial sequence
  DNA replication origin
ggcttagaaagccgatacacagatacgcgtatatttgattgtagcgggcaaggggggcgtcgagaggcagcagcccatcgcccgcctctcaccccaccccctccagccagaggcgagaatcgcaggactcgggatcttcatcgggtggactagctgggatctccgcattggatttggggctgattaccactgcttgcctattattattgttgttgttactactattatttttttttacccaagggagaaagacaaaaaaacggtgggatttatttaacatgatcttggcaaacgtcttctgcctcttcttctttctaggtgagtacctgcgggcggcgagctcgagggggaggcgagaagccggggaggcggggggcgagcggagcgccggtggggggctggcgggaggtcggcggggagagcgcgccgcggagctagccgggcccggtgctggcgaaccgagcggggccgggcggcagggacgcggacgagggaccggagccgcggctggctggcgacgcagggggatcgggagggagactcaacatccgaaccagccccgcagacactgtgcacgcacacacacacccgcgctcgctcacacgccagtatagcgcgcatctcccccgaaataatgggttcgaattgcggcaacttaagaaaaaaaaatatccaactcttgatctgcaagaagggagggagagagaggctcctaggcggggagagaacagtcctgcggggtccgcctttcctggtctgctccccgagtcggtcgtggtggagggcgcgggtt

SEQ ID NO: 14807 - DNA, 1279 bp, Artificial sequence
  DNA replication origin
gagcccccggatggctcgggccccacggactccgcgccctccagcctcagctcagctccccaggcttcccagacccagcggcgcagggggcgggggcaggggcagtgggggttggagggcgcagccggtccccagggtggggagagctgcggggggaggaggaggagggtgccgacgcttgagtgggttcgagcccgagccgtagccgggggagccagtcagtttccggccaaggcagcaggtcagtcccaggaagggcgggcgattgagccgagggagccggcggctgggctctcctctcggcccgcgatccccggcgccgccgccgccgccaccgccaccgccaccgccttcgccttgtcgccgccgccgctgcagagcatcgtagctccgccgcgctcccgcgccccgcgccccgcgccgccagccgcctgggagcccgagcgccgagcccggggcggaggagaggggcgctggcgcgagagcccgggcgagggagccgcgaagggagaagggggcgggcggagggaggagcagggagagtgggagaagggggagggagagaggagagcgagggagagctggagagagcgagagcaaagagcgagcgagggagaggagagagagagagaggagagagaaagacacacgcacgcagagacacacggtcactggaattccattagaaaaaagtgagccgagcaagggttagcgggagaagatttttttgaatcttgtcttcgtcttggtgcgaaagaagcgactccagtctctcgtcctcgaagctccgactggattgttcttgggcgctgacacccgtctgtggatttcttttctatttgcattttattccgaccccctccctcgccgcttccttccagcccttcactcgcaaatcgcctctctccccacctccccaggcccctcctgggaagcgcaggggaattggacccgcggggactcacgccttcccggacgattggaggggagggctgaccccaggactgggctgttggcttagaaagccgatacacagatacgcgtatatttgattgtagcgggcaaggggggcgtcgagaggcagcagcccatcgcccgcctctcaccccaccccctccagccagaggcgagaatcgcaggactcgggatcttcatcgggtggactagctgggatctccgcattggatttggggctgattaccactgcttgcctattattattgttgttgttactactattatttttttttacccaagggagaaagacaaaaaaacggtg

SEQ ID NO: 14808 - DNA, 1286 bp, Artificial sequence
  DNA replication origin
gcctgctgggccagggcgccctgaccacctcctcggaggccggcaaacctgcctgaaccgccccagaggaatcgggcaggggctcgcaccccaccccggcaggagggccccgagaccgacccgggccggggctccgcagccggctgggctccgaggagctcgtcccgaggcagctcccggctccctaggctccggggttggggggttcctcctcccctagccgggaagggggcgattgatccatctgtcggtgggccgggctcaccggcgtgttttagtcgcagaatttacaataaacgcccagaaggacctaaaaggaagcgtctggctgggaaagggctggaggagaggtgcggctgcggtcacgttccggcgagagcgggagaggcgcggggtcgcggtcgcgcgagggctcacacccacgcagcccggcatcccccggccctcgcgccacgttcctcgcactcagctcggcgcgcacacacggtgtcctggggtggggtacacgcagcgcctcagaaacttttcgtgctgcccaaaacaatctgggctgcacgtaacatgaatttgatagtaccgtttaagatgcattcttaaataacaagactctggaatccagtaaatgctagaaatcgacttggacgagaagggaggggtcactaacaaaaccagcagccttagctattgggaaagctagagggagcaacttccatcttgaggatttaggcgggaaggcggctgctcccggccttggaagcacagagagcgagtctcctgtgaacgcctctttcctgtggtccgtcctggggcatcgaccttcctccctccatcttctcccccagccatccagttgtgcctgcttcgagcctaggccctagctgggtagtgacgagtctgggacagagggcttagggattggagttggggaaagcccccttcaggcctgccctccctgtcattcctccaagcctctcatgttctaggaagtgacttcgcatctgacaaggtctcttggctttttttccaaaaattggggagcataaggaaccggctttggataagtgtaggttaaaagataaaacttgacaggaattacactgccaggcaggcttggcctggaggcccgaggctgggagcctggcctaaatgaatgtcccccctctcatctcctcgacttccagggtcttctggttgtccaaatactccccaccaccacccatttcggaatctcacgcaggccttcccccttccaaggaccctgctccaaactccagaatttctgctca

SEQ ID NO: 14809 - DNA, 1127 bp, Artificial sequence
  DNA replication origin
aatgagaggccccgagatccaattccataatgattacggtgagagggacaaactccagaggccaattgttgggtgtaattggagtgaacagcaaatcgcaattggccaagagccctgaggtcagacaggctgggcccatccaggtccaggaggaccctgtggtcggccaggcagaagaagatctctctccattaggtcctggcaggggagggtgagcaggctggtctgtatcatctgggtggagcggctgagtggatgtgacataattgaatgaggcctctgcgtcttccacccagagcgggggaattagcaggcccgaccctcgcctcgggagaccgcactccccctcatctgcctgcattgctccactccacaccgcctgctcagggtggggtgggagtgccaggaaacggctcaggccaggtctgttgtgggaaagagggggcacaggaagacgggcacaaggagccgggctcaggcgggaaagtcccgggggtctgtggggagggggtgatagtgatgggccgggggcgggggtccataggactagcgtttgccagacagatggcaaggagaaacccagagcaaggagggaggatgggatggaggcggggagagatggagccaggcacacagcagagatgggaacaagatagacagggagataacatgacagcggccagacacacaggacgagctgagcgatggcgaagaagaggggcagataaagagaggcttattaagaaagactgatcagcagcccgaggaataggcagacagggagacaggagcttcatggaacataggcctgaaccctccctgaccggggcagccacaccttctctgcacttacggggcactattctgaatatgccacattgtctcactgaatctgcccagcacccttacggaattggtaatgatttcttacagatggagaaactgaggctggagaggataagtcacctgcccagggccacccagctagaaaacaaaggagacagaaggtgagccccactggagctggtttcctggccccacccttgccctgcaccagcaaagtctttcttggtttagctgcagaggaatctctcagcctagccgcctccctaggatgaatggataca

SEQ ID NO: 14810 - DNA, 746 bp, Artificial sequence
  DNA replication origin
gccgaggagggttgatcatgaggtcgggagttcaacaccagcctgtccaagatggtgaaaccccatctgtactaaaaatacaaaaattagctgggcatggtggtgggcacatgtaatcccagctacttgggaggctgaggcaggagaattgcttgcagtgagctgagattgcaccactgcaccctactgggtgacagagcaggactccgtctcaaaaaaaaaaaaaaaagaaaaagaaaaagaaaaagaaaaggggaaattcatctgggcaccgtggctcacacctgtgatcccagcaacttgggaggccaaagtgggaggatcacttgagcccaggaattcgaaaccaacctgggcaacatagtgatgagaccgcgtctctataaaaacaaacaaaccaacaaacaaacttagccaggtgtggcggtgcatacttgtagtcccagctacttgggaggctgaggctggagaatcatttagcctgtgcaacagagcaagaccctggctcaagaaaagtgggaaagggagaagttcagaaaggactggattcaaaagatggtgtagagctagcacctgtggatcttggactcatagtggatgtggaacacagagaaagagggtttctagagagactcgggtttttttttgtttgtttgtttttcctcctgagatagaatctcactctgtcacctacgctggactgtagtggtgtgatctcggctcactgaaatctcagcctcccgggt

SEQ ID NO: 14811 - DNA, 1340 bp, Artificial sequence
  DNA replication origin
ccctgccttgagtctctcccttggttcacctcatcttacctagggcctgctggtgggagaggggaaggctgggggcccaggtgagggtgctgcttttttctatttttgagacggagttttgctcttgtcgctcaggctggagtgcaatggcacaatctcggctcactgcaaccgccgcttcccgggttcaagcgattctcctgcctcagcctcctgagcagctgggattacaggcgtcggccaccacgcctggctaattttttgtatttttagtagagtcggggtttcaccatgttggccaggctggtctcaaactcctgacatcaggtgatccacctgcctcagcctcccaaagtgttgggattacaggcatgagccactgcgcctggccccaggtgttgcttttgaggagctggtggagggaggagaaactttcatctgccttccatctaagcttcacccccagggccccggcagtgggagggcagggccaaggcttcacctgcagctgtgaccgtagggactagggtggtggctggtttggggtgagagatggggtggggaagacaagactgtggctctggcgacaggggcaggaaggatgtgggcacgaggttggggtggatgtgggtaggggcgtgatgcctactagggtagggggtggaggtacctggccttttggggagtatgacctggcacagagcagctcagcctccaagacccaggcagggggccataagtgtgtggataatactttctagaaaagttctggtacgctcatttagaactgggcagtggtgaggcaggccagctgtttcccattaactgccttcgccttctctctcttcttctccccagtcggcccccacaaggaatttgctgtgaccatgagacctacagaagccagtgagaggtgccacctgcgggggtcctataccctccgggctggggagagtgccctggagctgtggggtgggcccgagccagggacccagctgtacgactggccctacaggtttctgcggcgctttgggcgggacaaggtgagtgggaagctgcatcagggcaggttgagagaaaggataagctacgaacaaagaggggtgagaagcagcgaggggatgggagagaccaggagagggagatggagtgaagcaaagaatagagtgacaagatggcagaagtggagtagaaggaaggagaatgagaagaggtggagagaccgtagaggggtaaacagcgtctgaactagtgcctagctccatccttgaaatggtggcagtgagcaggaagggcctggagaggggagaggagagagccaagtctctgcctgtagggga

SEQ ID NO: 14812 - DNA, 1874 bp, Artificial sequence
  DNA replication origin
ggccttctttcaggccacctcaacctgctggctctgtctgcacactgggttcgggtccccccacatggaggaagcaccccatcaccctgaccttgacacctgtaacacttgcccacaggaagtatctaacaccctcggcctgcacgcccccttgccctttccgcaccccgcgcgactcacggggaaggccaggaggcagatggcctgcacccagtcgccgcgctccgctgcaggggccgccaggaggtacaggcgctccttggtctccaggaagaaggcactggtgtcccgggggctgctggcctctccgccggcctcggccacccgcaggcagtcactgaggcggatgaccttccgggcagcctcacaccgacgaggcttctccgggccctcctgcagctccagccgggccaaggcgcagtccgaccctccatacagtgaggcgccgaagcggcgccatttctgtgccagaggcgtgggaggcgggggcgggagggagccacccagagacggggagatcgtgagccaaggggagaagaggaaccgtgggagggggactggggcagccacttggagatggggagagagaggtgaagatcacatgagacccagggaggcagagaagaggacagtgactgcaggaattagaaaatcggagatcagccgccagccccgagaaggaggcccacgagcaagagcagagactgcccaggcagaaagcaacgccgggatgagcccaaagcaggctgcaagaaggccaaacaggcccaccgcagtggactccagtctggggaggaaagcggggcagtggccgaggcccagaggagggagtgaggagggcggcgtgtgacccgggctggagacctcattctccttctgtgcgaaatcctgaaggagaacttctctccaccctcctgaaccttgctgcctcattccttgataggttgggccatgagagagagacaggtgtgccccccagtgttggttaggggacgaggacttcctggttcaaggaggccagggaaggggaaagaggatggacagccggctggggtccaggcccccagaggccccagcccaagctgaacaccagccacatgcaccccactggggttgggaaggaacctctattgtcatcctaaactgtccctccagctgccccttccattcccttccaaggtgtccggtgaaaagaagtcaacatagagcaagagagcaaaagaggcaagagatgaaagcagcacatcccccacccccacccagggcaaacagccctcagtaaggagcacagtttgggacctggttggggcctggttcaggagacagcgtcgggtaggaaaagagccctcccaaagttgagctctgggtctaacttggtgggtgcacagtcagacctataagggttttgaatatgaaactccctctccaacccaggaattctagcagcctcccaggccccctgcccaaccccagcccagcctcactcctacctttccaaacgtctgctgctgctgaagatacaagaagccttgtttcactgccccgtctcccatcctctgaccatctcggagccccaggcttcagctctctccttcactcctgcccttgcctctctcttcttagccgtgtgtttcccttctctgaagttcatttcctctctgcctagggttttctatactattctagtctgctcgatgacgacaggctgataggccctgcggtttcttctgagtgtgtgttcttttttttcttttttttttttttttctgagtgagttttatactcaagcttcctgcatttccagtgagttagagacaatttccaaaaagctaaatgccagctcttcagtgagcaacaattcaggtacagaagtt

SEQ ID NO: 14813 - DNA, 1473 bp, Artificial sequence
  DNA replication origin
gtccctgcagccccgcgcgcgaggtgtgggaccgggtgggaggggacggagaaggcccccggcccgggaggcgggaaaggccccggggctccgggacgggcggcggctccagagccccgagtggcggcggcgcgggcctgccgagtcccgagccggctggcgccctgtgggccgtgtgcacccccgactccactcgccgctcttcgtggtcgccccctcccccccgcggctcctctcacctgcacatgatccgccattttgctccattcatgctcctctccggccccccctcccccccagcgcgcacctcggccggagccgctgccgccgccgccgccgacgccgtcgccgctgcgcctgcgcgctggggactcgtcgcgctgcgctcgtggcgtagcgccgctcagctgcgcaggccccggcggcccgggccgtggttggagaatgcgcagcaccgctgggacggcgtaaaggcgcgggcaacgtcagcggcccggagacgccgggtgggaggaaggagcgggccgggggagcgcgaaggaggggcagctgggggaacaaagctttgtttacatggtttttaaaggggccgcgctcgctccggcaggcgggcgctggagtgggagttggcgctgccttctgctcgtttgcgtggtgagggctcctggatgggggccgaggtctgtcgccgccccgggacccctgcacccagtggcttcctctcttcccaaccgtcttcccccttgactcgcccctggacgtctcccacccccacccccaccccaccctgcagctacggggaccccccacaccccacctaggctgcctgcgagattccttactttccaatgccctctactcaacgggggccgattctgtgcttgtgtctgtctagctttctggaccagggccatcgctctctggtctggatttcaccagcaaccccagtggttgatctcgtgtttttcatttctgtcctttcgtccttgataaacattcatggaaataaccaccgaatggtggtgatgatcaaaacatacgaaggcacagttctggcttcccaaagacattgtcctcgttgccaatactctagactgcctcccgagagggtcagatgctggaagaggcagcggggctggtggttaggacccctaggctcggtcttgtggaggtatgagtgggaaagccatctctctgggtcagataaggtcagcccctgcatgctgaggccaattccagtcttcctcactaggaattatctgttagataatgccggttcctgttttccattggattccactgtggcttccttttaaggcccccaggttagatcatagctggattctgagagcactgattgtttgaagtttgtatttacaggggactaccatcatatgcaaatgatggtggtagtgaattacacacccttggtggatgtagtggaccggtgctcagcattcatttcgacttccg

SEQ ID NO: 14814 - DNA, 1028 bp, Artificial sequence
  DNA replication origin
gagcgcagcgcgacgagtccccagcgcgcaggcgcagcggcgacggcgtcggcggcggcggcggcagcggctccggccgaggtgcgcgctgggggggagggggggccggagaggagcatgaatggagcaaaatggcggatcatgtgcaggtgagaggagccgcgggggggagggggcgaccacgaagagcggcgagtggagtcgggggtgcacacggcccacagggcgccagccggctcgggactcggcaggcccgcgccgccgccactcggggctctggagccgccgcccgtcccggagccccggggcctttcccgcctcccgggccgggggccttctccgtcccctcccacccggtcccacacctcgcgcgcggggctgcagggacaggaacgggcatcccggcgcgcgcagcccacaacgttcgtcagtcactgtcttcgtccccgggggaggcctccgtcaagtcctcgggcccccccgcccgccccccggtgaagcgagggggacccccttgctgactttactgagggggacgcccccatgacgcccgccatccctcagcagataacaaaaaggaaacctcgcgctgataaacctcgctctccggagtctttcccgccgccttcctctcacgccccggaatacgagagaccccccagcaaccccggcctccttccccctcccacggatgcgcccttccctccgacactccaaatcgtacagcccggagggccgagctccccggtcttccaaaatgggtgctcaggcctcggcccgcctcccctcgcgtccccctagccacagtgaaggagttgagcgcccacacctcctatgaaacacggggtggaggggggtgtgtctgaaatgagagatgcagggttgggtgcagacgttgctcgggagggtcttgatccggctcaagagctgctcctagcgtgctgtggggccaggccactctcctcaaagacaggcacaggccctagaaagggacagcccataccaaacccagtagcagatggaggact

SEQ ID NO: 14815 - DNA, 1664 bp, Artificial sequence
  DNA replication origin
gcagaatcacctggagggctgttaaggggcgcattgccgcgccccactccacagctgcccttggcgtcggtctgggtggggccgagggaatttgtagttctaaccagttcccaggtgaggctgatgatgccggcccaggacctttcgtgagaagctgtcccggccaattgcggacccgccgaggcctcctggcgccccctccccagcccatggagaggaagcctcagctcagcttaggaagggaggcctgcagccggcaggaagctgcagttggaagccctccttcttgttcgttgcctttcttcctttcctttccccatgccttatacagcatgggcctttcctaaggcccagacagcccgttcttccagcctaccgtgagagcgagcgagccctgtctccagaacggtgagatctcccgcggagagccgcagcgggcaggtggggtggggaggtgagccgggaggcgaggcgccgcggcagggggcggggagcacactgaggagcacggctagcgacgctacagggccaagcacgtgaccagcagctggtcccaggctcagtgggcagtgaagaggaagtggggtttcagcggatataccctggagacacctcagataaccagggatctcccgcacacccctgggacaggggctcattgccacggagaggtcagaatcttttattcctggaagctggggtcagcctccctgtgaattggccaggacaacccaggagaggcttgggggcctgccagggccccctaggctccctatccccagctgagcagttccagtctccttggctgtccctgagctctctgtccctggcaaggcgcctattgaaggtgacagccattgcagccaagtgtgtggtaaagatgagcaaatggcaggcacatgcatgccatgcacagacgttcaagaattcactcaacaaacggtgattccgccaattgggcgggacctgggcatcccgcggtgaatacgacagcccctcaaagggcttccagcctcattggagagcagtgctcaaagcaaaccggccttcagtggccccaggctacccaccccgtgaataatcacactgatgtcaggctgcagctgggggtcacagtgaaggctaaatggaggcaggggagggggatgaccctgaggtcatgacctagagctgggacactggaactggacagtctgggttcaagtctggactgtgctctgtgatttcaggtgtgttaattcatagctcagtgcctcagtttcctcatctgctaaatgaggctataatattggtaccatcgtcattaactttttaaactgatacatattaattgtacatatttatggggtacatatgatatttttatacttgcacacaatgtgtaatgagcaaatcagggtaactggggtaccttcaacattatttcttttcttttttttttttttttggagatggcgtttcactctcatcacccaggctggagtgcggtggtgccatctcagctcactataacctctgcctcccatgttcaagcgattctcctgcctcagcctcccaagtagctgggtttataggtgcttaccaccatgcccagctaattttcatatttttactagagatggggtttcaccatgttggccaggttggtctcgaactcctgacct

SEQ ID NO: 14816 - DNA, 1355 bp, Artificial sequence
  DNA replication origin
tccctctcccgtgagtcccgctgtcctgtacgcgcccggtcgagccccgggctgcgcaccccgctaggaggtgggtactcgtcctccaggagttgccggtgagcccttgaccgtggcaggtcccctccagccgcgagcgacccctcagtacctgccgatgcctgctggtctctggcatcctccagtcgagggtcagggtcagggagcaaggcctcacgcgggcgccctccttgcagctgcccggccagcccgcttctctgcccggagccatgaatctcagtagcgccagtagcacggaggaaaaggcagtgacgaccgtgctctggggtgagtggggactcaggctccttcccagagacacgccccacctccggtgcgcggcagcttggggcgcaggtgagcccctcctttgggaacgaatggagggccccacttccctccctttctcctccgcaggctgcgagctcagtcaggagaggcggacttggaccttcagaccccagctggaggggaagcagagctgcaggctgttgcttcatacggtaggtgttcccaaaagaggggaggaagatggtgtccgggaactttctggtcccaacggagggctatggatttctcccgtcggccctcagggtgatgaggggcctctattttcaaccccgctcagatttgcttgggggagaaagccaaagaggagatgcatcgcgtggagatcctgcccccagcaaaccaggaggacaagaagatgcagccggtcaccattgcctcactccaggcctcagtcctccccatggtgcgcatttccctgctggctggaagactgctgtcagcctcaccctcacccttgggtggggatggacacacacgagggtgcattcaccctacagaaatgagccatgctagggaggtagcacagcccatgcagaaagccggggtccagcccagctcaccccttcctagagctgtgtgaccttgggccagttaagctgtctgcaaaaattacactttaaaccaggggtccccaactgccgggtcaaggaccagaactcgtcctgttaggaaccaggcagcacagcaggaggtgagcagccagctagccagcattacccctgagccctgcctcccgtcagatcagagcggcattagattctcagaggagcatgaaccctatggtaagctgtgcgtgcgaggggtctaggttgcatgcttcttatgagaatcgaatgcctgatctgaggtggagcagtttcatcccaaaaccaccccccactcccaccccatccatgcaaaaattgtcttccaggaaaccattccctggttccacaatgattggagactgctgctttaaaccattc

SEQ ID NO: 14817 - DNA, 1147 bp, Artificial sequence
  DNA replication origin
tgccagctgcaagcctagggtgcacccaggcccccgcccccgccctgccagccccgtgcacgcacgcgtgggagtcccgggaagaggagggctgccctgaggctggaaatggcaacgaaactccagtgggagaggtagcacacttacagagtgaggttgggcagcaggcgggcggctcccatcgctggagaggttcctcaggcggttgcccccctgcccccaagctcaggagcagatgtgggaagtccccaggggtagagtcccagagaagccaaggtctctccgagccacaggttttcaggggggcgaggaggagagaaaggggaggaggaggagagaaaagagggaggaggagggggaggaggagggcgtaattgggagactgaggtatgaggtgtccaccttcctggccagtgaggctgcaaagcagatgcgggtgggggcgtgcgcgctgtgccctctgggctgccagtctctcctgggccacccagtgcagggatggagcggtgggggccttctgaaggaggtggccctgctgtctcctgctctattcctgaccctcacagactggccaaactcgacgcagacaaactcgatgtgtggcaggtcagggagggggagcccttccaggtctgcgtctcctgcactcaggtctggcgccccacctccccaagggtgagccgcaggtgtcaagtggggctggggtctctggttctggctctggagtggaaattcccagaagcagccttaaaaggagccgcctccctccagggggcaggggtgggcttggcttggagcagctgattgcccgggaaggaggggttaaggctgtcctgatcggcagcaaatactgggcgcaacaggttgggggtcagaggtgggttggcaggtacagatggagatctaggaagaatcccaatggagagttgcaaaagctagcctgagacagacacttggagaagagctgggtgtcctggcctaagccccttttccttgggcctctgtagttccatctgagaaatgaggacagtaatgcctcagggtgttggggggtcaagtgtgaaatcagcacatagcagacttcaagatgtctgtgttctgagacccagctccactcaccattctgcatccccttccttccagtgcc

SEQ ID NO: 14818 - DNA, 1225 bp, Artificial sequence
  DNA replication origin
aggggaactagcacaatggtgcggctggccgggcgtttatggcctggctgaggccccattcaggactcagggaaggtggcaaagcggtcctttcccccttgaagtgccccctcacccccctgggagggggggccagcaggccggaccacagccatgcttgaggggctgtctgacaagcagctgtctgcagtggtggaaggggaggtcctcccgcagcgggaacatgaaagggacaggctaggtcccgcggggagagggacttgtgggttgtgggctgtgggggggcgtggggctgcttttgtgaaaagcttgaagggggacgaggaaaggagggggcttcgggggggcgctttctgctcctgacctggaacagactgccagaggaggccgtcggccaagaggggcggagggcctgaacctgggccaggaggcggggctgggataggcaggaccccaccccctggaagggaggccagcgtggggcaggctgggcaggtcccccaccccaaatgctccagggtggggcgaggggcaggtcttgcagaggctaggcagaggctgctctatggggaggtgcaattggaaatgagcaacggtgcacagtaagtgttaaccccgcgcaggttaaatgtccagctctgagagctgctccctcactccccctgcctcaaaggtgatatttcccaccccctccctaggagagagtagcccctaacagatgctaatctgggtctagctctgtccagatggctgaggttgggcctgggataaaggtggaattagggatttggggcaggggctgagaaaagctgtcccagcacaggcagcggcatccaggtggagacaaaaccagcaaaaaaggtacattctcatgctagagctgaggctgttgccaggagccaggaaacctagcccgggtcgcaccttgcaggatggaggggaagaagtactcagtctctcccactcagccttacagatgggtaacgagagacctagctgggaggcggtactcctcctggctttgcacagtgcgtggggggaaatggttcctctcccccaacccaaaggggaagcaggtgggcgggcgcatcccaccaactggccaggagcctctgttacattgtggctaaggagctgcctgccaggggcagccattgggccaccgctgatagtgcctgtcctcttggtactgcctctgcctccctccgctaaggaggcaccttgc

SEQ ID NO: 14819 - DNA, 1385 bp, Artificial sequence
  DNA replication origin
tcaggagcccggctgggaggccggcagaggctggtggcctgagatcagggtgacactcagttcctctccagggcctgccacccgtccgggaagggggcactgtgccagccgcccctggggcaccggcctgccccttcccagctgggggctcggatgcttcgcggccctcagggtcctccctcggggatctggctcccctcccgccaccccagcccagtccttggattaagaagggaaaggggtggggaggcggcccaggggctgctgccccctgcctcccagactacgtgaggggctggggccgccgtgtgcgcttggtccggcgggtgggggcggagcccacaaactcgaactgcttctgcttctcggcgtggttggggaagggcagctggccttggtagaggcgcttgatgaagtgggcctcgcgctggttctggcggctgcgggaagcctggcggggccgcccctgccgcgtgaaggccatgaaccagccctcgtgccgggcgttctggaaggccgtatagttgttctccagcacgatctccgtgaacacgcagtctttgctcttcccgctgggctgcgggagaagcaaggacaggaagggcatttgtccacctaccctggtctggggtgtcgcccttacggcctattttggacgactgaggagggacaacgggaacaacggggccgtgagcccagggaactctgcctggtgagatggcatcctatttagagaggcaacagtggccaacaagaacacgctttgtggatctgagttgcaggcttgtcgtttagcggtcctgaaccaggctgggcctcagcttcctgagatgtaggtgaagatcaaggacctgcggcatttcccagcatgcacgggcccttagcactgaaatgctcatgcagcctaggtgaggggtgctgctgggcatgggagaggaggcagcagcctccaatgagaagaaagaagggtgccagtgcagccacccatcccactctgtctgcaatcaggggtctgtgcccatttctacagacaagaagcctgaggcttgacaaagataagcaaaccaaaggttatttggtcagcgacagccgaatgggaagctgggattgcctggtttcaaacgaagtggaattctcccacccagcagggcccggcctaccgtgtgctttggtcacaggggcagctgcttagtgtctatcttgctagctggagcccactggccccactgaacttgggggagttcctgtcttacatctgtgccccactttccaccctcaacagctcttagtcctccacccagaggctgcagtgtcaggtagatgctaagctcttactgatgcctgctggagaaatactcctgacatcagccccacagatcccagtg

SEQ ID NO: 14820 - DNA, 795 bp, Artificial sequence
  DNA replication origin
ggacgccttctcgccccctccccccttccggccgcccaaccccgcttcccgcccccgccctcctcaccggaaaaaaagcaatctcgctgcccgaggaggctcctggcgtccgcgggccgcccgggctccgccgggctccgcagggccctcgcctgcgcctcgggcctggggcctggggcccggggcccggctggatgcacgtcccggccccggccccggcccctccgggggctcgggttttcttccccaacaggtagcacgggccgcgccgcgcgagcccaggaaacccgagcccgcgccagggaggggccgcccggcctggacgcgcccgcctcccgcggggccgagcccgcggcctcctgggggccccagcgctgcgggccgcgcctgcacctgccgtggccacgcccggccggggacgggcaggctcgtttccaggggtgttcggtggtcggatcccccgccccgcttcagataacccatttgcaggaaaatggttttattccggggctgggagttgggggtggggtgcaggcctgggtcgtggaatgtgaggagtggacaaccctctattttcctctctctccctttcttttttcctgaaacaaacaaacaaacaaaagtcccttcctacagtctagccaggaggagtttgggggctgggggcagactgagggagatccgagaagcagattttgaggacagccacctccagacggttgtctgcaaggccttcagtcgctgacctttcagcgggcttcaggagcccggctgggaggccggcagaggctggtg

SEQ ID NO: 14821 - DNA, 1654 bp, Artificial sequence
  DNA replication origin
aatctcctctgaagtgccatcattagggatctattcttgtggcttcttccttttagcatcttcgaagtcaccaccagttcagggggaatgagctgaacagacttccagagcctgaagacccacctggggaatggcagtgcctggacactgggcagaggcgccgagaggtgtggtgaggagaaggctcagtcagagaccagccagggacccagggacccagggacccagagacccagagacccagggcgggagcaggcgctggatacctcggggatggggtgggatgagggcactccctgggacagcacaggcctctggagcggccctccctctccctctcccttctctgtccctccctgccaggtctcacctcaaaaagcaagaaagaaaacagtgagggctttctggagccagcccccagaggcctgtcggtaccggggaggtcaaagagagggagggagggaggggccggagaaaggccgagaagaaagcggaggcaagacaaagggccccgtccacctttgaagccgtctctaacccgagcgagggaggggcaggggtgggccggagagccgggctagcggggaggcagtctagagttttaaagaatgtctcaaattcctgcggaaatcagagggattttaagagccccctccccaacacacctccttcccagcctcctccccagccaccccccaaagtccagtcttctacacctggggggcccccaaccctttgtcctcaagtaattgctgggtgttgcccccgttaagtcccattgaactcgccagttatcagctgtggctccagaccaccctcccgacacacatcccagaaaactacccccaacacggcgcggtcttcactgggattaaggctctttgtgatgggggagagaaaaaagtaacctggtgaaaagcaattatgacgagcagtagggagaatgtctgtcccagggccggggacctccctcttggctgccgctgtccccaccttctaaattgccccgtggtgggggtgtcagactctgcgccggcgctcgccatcaactgagactgtagctgcacccacctcccattttcactggacgagggcccttccccacttcctctctcatttttaggccattctagggagcagagaggagaagggatgtgtttcatccttctctctccataatccccctcctcaaggtagtctcagaaagaagagggagaggaggagaaacaggctggaaggggtacatcctcagaagagaggactcagtgagggaaggggaaactgaggctgggggacatcctcagaagagagggctccgtgagggtaggggaaactgaggctggggccccacccccagaagagagcgctcactgagggtgttccccctgaagagctgacctggtggggtggcggggggggggggttgtccctgcgaggaagacctccccctcgacaagattaaaagccagcgcactgaagaggcgggttttatggcccccgagttccactccccacacgcacacctggaggaccctgggaaagcccaccggagaagctggggtgggggcaaggccgccccttcctccccgcccctctcgccccctaccccccgggccatccgggccgggccgctgcctctaattgagatttgccc

SEQ ID NO: 14822 - DNA, 1097 bp, Artificial sequence
  DNA replication origin
caaaagtcccaccaaagaacaaataattgcctttttatgggtttatccctccaattaaatttcaagtgccttgagagctctatcttgtccatgttttttattaacagaaggattagcacaggacttgaatgttgtggggggaaaataaacactgggactaactgcttaagcccccgccccacccacgtctgcctaaagaaggaaggagaaggcaggattctggcctctctcctgcctctgcctagagggatggtggggtgttgggccaatgacttctttctagggcttcaagtggtttatttcctcaataaacatttaccctgtgcaacatactgtgctgggcactgtcggggaggaaaagatggactatttctacatctggggcacttgctatttagcggaatcatgacaagcacatacatcatgacagttctggacaagctgtgacatgtaccacaaggcaagggcaagtgaatggctggcaagaccagtggcagtggagacagtcgctcatcccggggtagtgccaagagcctatggagcagaggaggagcctgcggtctgggtgtgtgtgtgtgtgctagagcaggacacgccaggtggcggggacccttcaaatgagaatggggacatgcttgcttgatagagttccagttttccagtattcttaaaggggagttgtggggctagggccgaatagggagactggacagggctggacaggagtcttaaagatgacgctaaggagtttggccgggatagtgtggcgtgggtagagctgtggttgatggtagggaaggtaagtggagcaaactcggatgtactggactggagggcagtgttgagaggcacagagatgatgtagggagcgagtggatatttagatagatcccagtgaggtctggccacggtgcagagccccagggtttggcagagagcagtcacgcgcaaggaggcggtggctgagatgctgaggttgctcagaggggcagctggcagacagagagcagagcgggagggaatcttgggtgagggtcctctgtgaggagctgggaaagagaagccaggcaggacagctgagggcaggccgagggggg

SEQ ID NO: 14823 - DNA, 910 bp, Artificial sequence
  DNA replication origin
aaccctagaggcagaatgtgcaaagcaggactggatctggggtgcccatgaaggaggctgcaagtctgagagactgggagaaggggaaaggaggaagtcactttgacaggtggaggttgtagtgggtgcatcaggggaacaggtaggaatgtccaggaggaaaggaacctacggaagaggccaggctggaaccagagatgtgggtgccatttgcctagaggtggtagttcaaacatgagattgccaagggagaaagaaggttaaaaacagcatcctgggaacctggggaactgaaaagaaatagccagagatggcacagtcagagagaggaaaactagatggcagctcgcaggggccaggaagtctctagtgagtctttgtgttttcagcaaagggtctgatacacagtaaatgtgcaaaacatattgagagaaagaatgggagggagggagggatagagggaggggctgagagagtagaacatcatggaagccaagtgtcaccatggagaaggtgaggagaagtgcttttcctccagctcgaatgtcaggccatagtggcctcgtggttagggattgggggggtgatgggggtgctggccaggtggtacagccagggggaatggcccttccaagaagtgtgatagaaaggcagggtcgttttggaggagataagattggcctaaggcctttaatgtgtttgcagacagcagagagagaacggtagacaggaaagactgaggctgcagggggcagtgggcactaggtgggtggagcaagacggcagcaggagggaagggatcaagttcacagccaagtacaagactggctttgggaagaaaggctccccggaaacaaagatgagctgggcagtggcttatgcctataaccccaacactttgggacgcaga

SEQ ID NO: 14824 - DNA, 1104 bp, Artificial sequence
  DNA replication origin
tggtcagccacgacgctaccctgtcttggaggcagttgatgagtacctgccttgcactgtctcctgcaccttcactaccttgcgcgtggatgggcagaaaggtcacctctattttacacgagggtaagctgaggccacaacatcacatgggtccctccgctagactttcagcccccgctctcaatgcttctgaactgtttccacaaatcttgctctttgtgcctcttgtgtgttgctgccatccaaaggtgtccacccctctacatctgagccacatgccagcccagagaccgttctgcctgctctcttgaacaccggatggactgactggttggttcctgcgcacagttccctctcttgttttgccgaggcagacctccaggaaaggaagcacgggagggatcggtccccacccagtgtggctggggggggcctcccccggagtcctgcccaagaggagccccctcacctcgcggctgcgaggcagctccacgtgttccaggagggaataagtgaagtgaggctcgtagatcatgaggtcgggccgctcgatgtccaggatggccttgtccttggggatggcagccaggtccttgtagcccagcacctgattgtccatcttggcctgaagggaaaggtgcgcgtgaaactgctgtgccgaaagccccgcctaggacactggccctgctagctagacttacgtcaattaccaagaaaatggaccgccattgcagacgttaacaattctattattttaagaaattagtcaccttaaaacatgatagtcctttgcctagcacttcggattaacgaggccagaccagtggaagggggatatgggagcttctctgggtttctgggttctctctgcccgccagcaccggagggaccaccactggggaggctctgcgggaaggcacgctagcagccaggggtcccccaccctcccccctcccagccaggggttgctggtggccgagaggggtactcaccacgatgctggagggagagccaggcacactggaatctcgggaggggctcacgctcccgggggaggtaagtggttgctggggagagcgagaaggcgggcgggtgggcacgtgc

SEQ ID NO: 14825 - DNA, 1934 bp, Artificial sequence
  DNA replication origin
ccggtgctggcgggcagagagaacccagaaacccagagaagctcccatatcccccttccactggtctggcctcgttaatccgaagtgctaggcaaaggactatcatgttttaaggtgactaatttcttaaaataatagaattgttaacgtctgcaatggcggtccattttcttggtaattgacgtaagtctagctagcagggccagtgtcctaggcggggctttcggcacagcagtttcacgcgcacctttcccttcaggccaagatggacaatcaggtgctgggctacaaggacctggctgccatccccaaggacaaggccatcctggacatcgagcggcccgacctcatgatctacgagcctcacttcacttattccctcctggaacacgtggagctgcctcgcagccgcgaggtgagggggctcctcttgggcaggactccgggggaggccccccccagccacactgggtggggaccgatccctcccgtgcttcctttcctggaggtctgcctcggcaaaacaagagagggaactgtgcgcaggaaccaaccagtcagtccatccggtgttcaagagagcaggcagaacggtctctgggctggcatgtggctcagatgtagaggggtggacacctttggatggcagcaacacacaagaggcacaaagagcaagatttgtggaaacagttcagaagcattgagagcgggggctgaaagtctagcggagggacccatgtgatgttgtggcctcagcttaccctcgtgtaaaatagaggtgacctttctgcccatccacgcgcaaggtagtgaaggtgcaggagacagtgcaaggcaggtactcatcaactgcctccaagacagggtagcgtcgtggctgaccagtgacagggggctagatcatggggtgacttcagtacctgcgtgataaaccccgacctcatccttggatgcttcttggtcttgtctcttctatttgttttgaggctctgaggacaggacaaactattccccaactggttcccaggctaggcacggtggctcacacctataatcccagcacttttggaggccaaggtgggagggtcacttgaggccaggagtttgagaccagtccaggcaacacagggagacccccatctctacaaaaattagcaagatgtggtgctgtgcacctgtagtttcagctgctcaggaggctgaggtgggagaatcccttgaggctgggaaggggaggctgcagtgagctgtgatagagctactgcatttaggctgggcaacagagtgagactataagaaagaaagatgagagagggatagaggagaaagaataagagacaagagagaagaaagtggagagagagaggaaggaaagagggaaggaagggaggaaggcagggaaagaaagaaaaaggacaaaggaagtaggaaaaaattaaaagaaagatgagagcgggagagaggagaaaaggggaggagagaggaaggaaggaaggaaggaagaaaagagtgcccttggagccccaggagtactgagcaaggctcgcgtgcttctctgtgcctcctgtgggaaggctgaggactttgtgcagggaactgtgggaaggatccaagaaagcagaggtggcccagaagctggccaggaaagtgtgcggctttgggtgggggatgaggtggcctctctggaattctagggaagaggctgaatctgcccctgtagctctgaccagccccctctccattcacagcgctcgctgtcacccaaatccacatcccccccaccatccccagaggtgagtctgccccacacctgcaacttgccctgccctgccctgaaggggatcctaactccctcccctcacacatcagaccaagctctgcagagcccagggagtgcccgaatcagcggccccctggctgtcactggccagctc

SEQ ID NO: 14826 - DNA, 996 bp, Artificial sequence
  DNA replication origin
gactggttgagatcgagccccagaatgtgtgggaggctggccttcaaaggcctcccctgtgggatgggaacttggatccaggggcaggccagatgagaagccgaggttgtctgctgagcgttagagggtgagacttggtgagaatggcgagggtttggaactgccgtggaggggaggagaaacgtgcgaggcttggcctttgtagtgatgctcatctacattgtgtgggctgtatgtccacagctgggggcaggatgggagctgttgggttgaccctgggttagcgtttttaaggataggtgctgaggggccaggctgcaccatggaggagctgataaaagtagttgctgtgcccagccacagagccgaaactgagaaggtagtgacagaaggtgggaggtgggggaggtaggaggggaatgaagaaactggagttctccatgaggttgctgggctgggtggtggggatggagctgagccaaagccacaaagtgaatggtccaagctcacagtttctaggcagcgtggtgcagctgatgacaagatcctgggcatggctctttgaaagggttatctcatgtggagcagaggtgaaaaccactggaactggggaattcaaggttaacatgtggttaggacatctgagtgttccccagagctctcaggatgctgtctctgtgggtgggaagagctacagaggtttattagagaatgtggaataaagagttaaggcctaaagaatgatgtggagagaggatgcgtgaaggttggattcagtgtcagtgttctgccagaatcttctgttcagcccagattagctctttaacttccattttggcctcgtgaagttgaaatagccagatgcctacctctggatcatctttggcgtccctgaacttgtgggtgattaatgatcacatgactgcataggttactgtcatatttaaacaacctgaattctagaatcatgaacaggcatgtcattctgattaaatg

SEQ ID NO: 14827 - DNA, 862 bp, Artificial sequence
  DNA replication origin
acgtgggaggaacgtgcatgtggggtgctgagggactgagccacttgggcaccctcagggagcggggagacccccaaagtgaaggggaccaaaggtgaatatccccgactgcctctgattcctttgtgtcctttctagctacagtccacagagttcagcccatcagggagtgagactggaagcccaggtgagaagtggggcctggtgccggggtctggagaaggggcttacacaggtccctgggcagccggggtctgggctgtgggcaggggtctggtgaggtcaggcgtgttggcctgctgacctcagagctgcatctgacccatgccccttctctcccgcaggcctgcaggtgagtgcctcctggaggggaacaggcagagcagcagaagctgggtcctggcacccgaaagtgtcaggggaaggggggtgtggggccacagagttgcctggtgaagaagaagaagccggggtaaggctgggaaggtctccctgccccgctctggctcactgcggctttggtctccccagaacggagagggccagagggggaggatggaccgggggaactccctgccctgtgtgctggagcagaaggtgaggggcaggggacacaagcgcctgtagcggggcgggaggctggggagatgccaggcaagtggaatgtgctgcggggtcttcctggtgttgaagatgggagggatggcagggaagttgggggagacagagggcaagatggcatgaaccccagtggcctctgcaggttgatgtgggaggcctagggagtcgaaggacaggatattctgtgagcctaagattgcccctccccccacccccagatctatccctatgaaatgctagt

SEQ ID NO: 14828 - DNA, 1501 bp, Artificial sequence
  DNA replication origin
accatggcttatattgattacatattgaaatgactattaggtgtgttgggttaaataacgtatattgttaaaattaacttcacgtgttgctttttacttttttgacagggctatcagaaaatgtttatgggctgtgggcggtggctcacacctgtaatcccagcactttgggaggccaaggcggtttgatcacttgaggccaggagtttgagaccagcctggccaacatggtgaaaacccgtctctactaaaaatacaaaaaaattagccaagcgtggtggtatgtggaggctaaggtgggagaatcacttgaacccgagaggcagaggttgcagtgagccaagatcgtgccagtgcactccagcccgggcaacagagtgagaccgtctcaaaaaaaaaaaaaaaaaaaaaaaagtctgcagctgagtgtggtggctcaagcctgaaatcctagcactttaggaggccaaggctgttgaccagcctgggcaacatatgaagatcctgtcttgacaaaaaataaaaatacaaaataaccaggtgtggtggtatgtgcctgtagtccaagctgctcgggagactgaggtgggaggaggatcacttgaacccaggagttcgaggctgcaatgagctatgatcgtgcccctgcagtccagactgggtgacagcaaaatagtgtctctctaagaaacaaaaaccagtgtctctgcttatcactgacatcatattgtgtccggaattggtaggttcattggtctcactgacttcaagaatgaagctgtagacccttgcagggagtgttacagctcttaaggtggcacgtctggagtttgctctgatgttcggatgtgtttggactttcttccttctagtgggttcgatggtctcgctggcttaggggtgaagctgcagaccctcgcggtgagtgctacagctcttaaggcggcgcgtctggagtttttagttccgcctgttgggttcgtggtctcgctgacttcaggagtgaagctgcacacctttgccgtcagtgttacagctcacaaaagcagtgggaaacccaaagaacgaacagcagcaacttattgcaaaaagtgaaagaaaaaaacttccacagtgtggaaaggaacccaagcgagttgccactgctaccttgggcagcctgcttttattctcttatctggccccaccctcatcctgctgattggtagagcccagtggtctgttttgacagggcgctgattggtgcgtttacaatccctgagctagacacaaaggttctccacgtccccatcagattaactagatgcagagtgttgacacaaaggttctccaaggccccaccagagcagctagacacagagtgtcgattggtgcactcacaaaccctgagctagacacacggtgctgattggtgtgtttacaaaccttgagctagatacagagtgcccattggtgtatttacaatccctgggctagacataaaggttctccacgtccccac

SEQ ID NO: 14829 - DNA, 1211 bp, Artificial sequence
  DNA replication origin
gaaggacttttgtcttcttaaatattgaagcattcactgtaaacttccatttcccagttgccagcagctgtcttcccccacctctcccagacaggacctcccctttctgggctttggcaggagagggtgaagttttcaagccggggtgcccctctttaccctactcacccttgtttcccaaacatcattagatgaaagcacccccgccaagaagacagacattccctggcggctgaagcagatgctggatatcctggtgtatgaagagcagcagcaggcggccgcgggtgaggcagggccctgcctggagtacctgctgcagcacaagatcctggagactctctgcacgctgggcaaggccgaggtgggaggccctctgcgcgctgggccaggccgaggtgggaggcctctgcgcgcttggccaggccgaggtgggaggcctctgtgcgctgggccaggccgaggtgggagaccctctgagtgctgggccaggctgaggtgggcggtgggcagtgggcagcctggggctccctggattccaggcctttctgcctatgctcttcccagtcctgacactgaaagtggcagttcgggcgagaggagcaaacaggacgggcactgtggctgtctcacttagaacactccaccatcccagcgctcctgttcccagttcactccacaaagatgggcctgccatgtgccaggctctgctctagatgctggggacacagcagggattcatactgacaagagccaggcatggtgatgcgtgcctgtagccccagctacgtgggaggccgaggtgggtggattgcttgagcccaggagatggaggctgcagtgaactgttatcgtgagaccgcactcctgcctaggaggcagagcaagacactgtctcttaaaaaaaggaaagaaaactcgacaagaatcctagtgggagaggcaggaccatcctgtgatgggtcaataatgacccagtcatggagcacagtgatgcaggaaaaggggttgtgagtgccaggaaggctagtttcgaacaacgtggcaagggaagcaggcctgtgagaacgggccctctgagccggaactgagggaggagttgagcctggggctctctgggggtgcagtgttccaggtgggggacacagctctgacaggcgctctgtccctggcctcagtaccccccaggcatgcggcaggcaggggacacg

SEQ ID NO: 14830 - DNA, 1432 bp, Artificial sequence
  DNA replication origin
cttgctgggggagtgcaaaaatactcaccagccctgccagccctcggctctgtccaccatgttcctacagccatacagcctgaacctgcaggtgacctcggtcctgtcccggcttgccctcttcccccacccccatattcatgagtacctgctggatccgtacatcagcctggcccccggctgcaggagcctattctccgtgttggtgagggtgaggacgcctcggcccaagggagtgtgcctagtgaggtggaggggacatcagggaaagggaacggggcaggtggttgggggctggaggggtgggcacccttgccagtgccagggaaagcacagtctcccatgctctgcatggtgtggcagggccaggggactcactggtgttgctggccccatctgagtcccctgtgattcccgctgtaggtgatcggggacttgatgcagagaatccagagggtaccccagttcccaggcaagctgctcctggtgcgcaagcagttgacgggccaggctcctggggagcagtgagtaccaagggtgccaggtgaagccttggggtgggagagtggaaagcgcctctggaggagaggtggctggccacagggtcaagcctcgtggatgctgggctgtcatgctgggcacagtcctgcccccacccagccatgccccctgtgccatctcccctcaggctggaccaccagaccctcctccagggcgtggtggtgctggaggagttctgcaaggagctggctgccattgccttcgtcaagtttcccccacatgatcctcgccagaacgtctccccagccccggaagggcaggtctgagccagcaccagggcggtgggagactcctgtccacacctctgccccagagctgcctcctgcctggcactgccgccacactcccctcctgggatggggcttctgctcccgggctcactcaaggagactgcggcatgttgaccacaccagactgggtttcagggaatgggcatgccaggtgccaaggagccaaacagatggctttccaggcagcaaggtccttggggccttcttggaggagcttgggtgacagccaggtgagcacccagaccccagaccctcatgtgctgtgtgcctggccccttctgtactggccatttgtggccagggccaagcctgtgactcaactccaggggcaagatggggagtgagctgatggctccgagactggtcaggagcccaggccagtgagatggggcctggagccttgtctgtgtcacattaggtaccatgggagctgctgagacctgacattttgtcccctgcctacatggcttggcccatggagaaggagcagtgaatgggatcgtcggggaagcccctcttcctgctctgctcccctggaaactgttgcaaaactcccagccgcctcatggcaaatgcccaaa

SEQ ID NO: 14831 - DNA, 1879 bp, Artificial sequence
  DNA replication origin
ccccgggcggccccgccccctcggtgaatgccgcgggccggccaatccgggcaggccgcggcgccgcgcagcctatcagcggccagagctcgcgtgcgcttccgcgttcgcgtgcgcttccgcgttctcgtgagctcccggcccgctgccgcagggactgggagcgggctccgcagcgcactctagcccgcggctcggctcagtcggtctgcgaggatccggcccgccgccccccgggggacccgatggcctcggagggcctggcgggggcgctggcttccgtgctggctggccaggggtccagcgtgcacagctgcgactcggcgccggccggggagccgccggcgcccgtgcggctgcggaagaacgtgtgctacgtggtgctggccgtgttcctcagcgagcaggtgagcggccgcccccgggcccgccgggcctcgggagcgcgcagccagcccaggtggggacagaagacccaacggccacagccagcgctgccgcgtgcgtggcgcttcccagttttgcaaagcactcccactcccactcgcatctgtgtcctgcgttcgtcccgatatgcagaagaggaaactgaggcccggggcctgtttgtctcatccgactaggcctcattccttcccttccccagagtctagcggagtgcccagggcccctcagatagcagtggctcaatcccggcttaccttcaggcctttggtgctgatgcctgtagtgggcgatgtaatgacaactagacggggccagggccatagggcggggttgtacagagcggaggtgggggtcgtgtttcaagccagaccccagtgtgaggacccatcacagtttgtaaaccacgccgttggaggcgagagatacacagtggcaggtacagacgcaaatcaatccaagacagacagacacatggtgaccctcactctggggcctcatctccagcccctgaagcggcttccaggaatctcagcccttcctgaaatggaagtcttcctaaatccagagagagacgaattgcagagaggagagggctgcagcccccagcgacacgagggcaggtctcctggagcgctagctgggttgagagtgtccacccagaggggagtcttgggcgactgtgtttgagatgccccctggtcccggggcgagggaaggctgtggcaggaagtgaggatcctctctcctctcaggatgaggtgctactgatccaggaggccaagagggagtgccgggggtcgtggtacctgcctgcggggagaatggagccaggggagaccatcgtggaggcgctgcagcgggaggtgaaggaggaggcggggctgcactgtgagcccgagacactgctgtccgtggaggagcggggcccctcctgggtccgcttcgtgttcctcgctcgccccacaggtatggcccacctggaggcagtgtgaacagggccagttgacacctttcccccagctcctcggtgaggtgagcccctctacagccagtcctgttatggctggcacagcctggcatgggcagattccagcctttgggctgggggcctctctcctgggtcagggatgtctgttgactctgccagagctgcacttctctccacacagaccctccctgccccatcccccacatctcccccaggtggaattctcaagacttccaaggaggccgatgcggagtccctgcaggctgcctggtacccacggacctccctgcccactccgctgcgagcccatgacatcctgcacctggttgaactagccgcccagtatcgccagcaagccaggcaccctctcattctgccccaagagctaccctgtgatctggtctgccagcggctcgtggctacctttaccagcgcccagacagt

SEQ ID NO: 14832 - DNA, 1603 bp, Artificial sequence
  DNA replication origin
ggccctccgaggccatcgggtcccccggggggcggcgggccggatcctcgcagaccgactgagccgagccgcgggctagagtgcgctgcggagcccgctcccagtccctgcggcagcgggccgggagctcacgagaacgcggaagcgcacgcgaacgcggaagcgcacgcgagctctggccgctgataggctgcgcggcgccgcggcctgcccggattggccggcccgcggcattcaccgagggggcggggccgcccggggccgccctggaactgggggggcacgggtccggagcccagcggaccccgcccggcttctgccgcctgtcagtcccgtgcgctcgggacgtctcccagccgccacccgctcgccaactccccgagcgcgcactggtctgcaggagctccgacggtgacgtcatctttcctgcagggcgcgttgcgccgccggggtaggcgacggtgacgcgacaatccggtgacgtcacggaggcccggggccgccccctggaaccactgtcccgctgttgccgtaaacacacaatggcattgccggagttgatcatatcccaaatacctttcttctcattccaccaaagagttataaatgtcacatggcccgtggggtgggggacataaacccctgccttgaaggagattctgcaatagttggagagatggacggagtcctagatgaggagtcagctgagggttcgaggctaagtgctaaatgcttggtttgggcaggaagagtgacaggcgctggaaggagggagggggcagggctggggatggcgggaggggtccggggctgagagaaggctgccgtcagccggcccaccctcatcagtgtccctctgcctaccgcatttcccacgcagctcaaggccctctctgctgcagatggtgcgccctgggagggcgggggtggggccctgctcctccatccttgtcgtcaccctcccacccagcgtgcaggacctggcgcgtggagagcagggtgggggtggttgtggcgagcgcctgctcctctcccagctcggcctttcctccttcaccccacctcagcactggaaggcaaagccagctggaagggatctgcgaagcaggccgtctggctcctcacctggcagaggccacccctttcctctgcctctgatagttttgtgcgcctccctgctagggagactgtggcttggtggtgtggacaaagctcaggacctgcagccagatggccagccactgctgactggcttgctctgtgctcctgggtgagctgtgggcctcaattttcttatttgtagagcaggatcatagcaattcttcttttacaggggtgttgggaagccacaacaattggagaggagctgtgtggattgtccagcactgggcaccgtccccaggcagcccaccaaccctcaggggtggtccctctccaccatagctcttgctaccacacgcaaggcctgccctcatgaaatgtgacttttgttatcccctagagtcagggtttcactgtgttgctcagattggaggtgcagtggcgtgatcacagctcctactgcagacttgatctcttggattcgagtcatcctcctgcctca

SEQ ID NO: 14833 - DNA, 979 bp, Artificial sequence
  DNA replication origin
gtgagatcatgtctaggcagggatctgggagcttcagaggcagcctaaggtaaacaacagaaggcctcactgcccagagagcaaagaccgcagcaaaccgtggctccacgcctcccattatcccggggggtaaagccctcccccaaagcctcttgtaaactgtgaagggagtgctgagacaacaaagaggcaggagttcccaaggccttgggagagaacagcagtgagacagaggctggagaggccctgagacaagggaggcagctgagggaggacgggaggctagataggaaccaccagtgtccccatcaagtcaactgtgtgtcctccagtcacagagagggaagaaccctggccagtgtggcgggccgcacagtatggtgaatgggagtagcttaatgctcccagcacccttgggagccaagccagagccagccgtttcagggcatatgtgcgcatgtgcggtgggggtgggatggggggagcacaggagcaggaaggcctgggtaggcgaccatggggatggggatggggatagggacaggcagggcaaggttgtatcagggcatctgtgatgctagagccatggacagagcaacaaggcctgtgtcttgacaaggtaggaaggtgaggagggcaggaacccaagctacagcgggagagggagggctggccacaggctagctctctgagggaccctggggacgccacatctaccctccaggccatctgtcaaatgcaggcatggttggatcctggaacagaaaaagggcattcatgaaaaaactggtgaaatcctggtgaggcctgttgcttcgttcgtagtgtggtatcaatattaatgtcgtagttttgatcaaggcaccatggttatgtaagatgttcacaataggggaggctgggtgaaggataattgggaacttcctgtgctatctttgtgactcagctgtaaatctaaaattatttcaaaataaaaagc

SEQ ID NO: 14834 - DNA, 1061 bp, Artificial sequence
  DNA replication origin
tgggccatacttctggatctccaggtcagggtagacgggagagatggggcggactggagcttgctgggtggagtagggctcgggagtctctgcacagggaggtcacctcgtggctgtgccccaggactctgccttgcctgctcttgcactcaggagcatctttgggggacagccccccaccccacccaaagtctcctcagtgggaggcaaggccccaggccccagacgaagagcaggcagtggtgtcctgtcccttgggccccagctccgggctgccctactccatttgtctctaaggcagatttccatgtccccctccctccctggaccatgtggcctgcaggggcagggccaaccacactggcagcagtcacaaaacaacagactttaatggaaatcatgaaggagggaagcgggcggaccgggaaggggctgagtgacatcgcccatgccgctccctccgccaagcctgagcagctcctgatgccaccctctcctcacactccccagatcttttggcaggagggcagaaggttggaggccccttgttcagcatgcctgcagtgagcccagtgaggatgcggtggtagaaacggagctggggcagtagagtgggctcagcgggagtgagcagcaggaggaggtgttgtttaagccagaatgattcccaagtttccccaaggaagggctgtttgtctcctgggtctcggaggagtggggattggaggaagtcaattgcccccagtgcgggcctggtaccatgaaaaggggcacagggtgggggagatgccagcctgagaaggacaggtgtgagcttggtggcactgtggttgttggcttaagggggaggggaacagagtgccctgcttgtgcccagagtggtgcttgtggggttgaccagaaatccccaagtcccctagcgccatcccctgctgaagttgtgcctgggctgagcacctggtctacctgtccccaccccgatcccagacacctagcatccctctatttggcctcctgtaatgtccccacggccaccttcactgcttggaacacagcccagt

SEQ ID NO: 14835 - DNA, 997 bp, Artificial sequence
  DNA replication origin
caactgtagggccttgaatcccttccttctaagctccttccagccaaatgtgtgttctgccaacctgagctgccccagccccaaacaaactcagccatgccctccctgcctgcccttcaagacttgacccttcggctcttttctccacccctggcctctggaaagtccatgccccatcctcctgcagccctgcccttccctccccatctcgctcattcccccttctcttctttgaggtgtgcccggccggggcaggcgccctggagcctggcgccccaggcagctgctacctggatgcagggctgcggcggcgcctgcgggaggagtggggcgtgagctgctggaccctgctccaggcccccggagaggccgtgctggtgcctgcaggggctccccaccaggtgcttcccagcgggcaggggctctgcggggagatcaggatggcagaagcgacccaatcaaggccgcaggcatccaacatcccctcaatacccaagagccgggcagggcagggagccgcacgctgctgtggggaagagataacgggggagccaagaggccttgaagtcactgagcccaactgggactggcgccagagtccactcctggtctcctgggcatgctgatgtcagggggctcgcagggagactttagggtctctccagcagttctgagtcccggttttggccacaggctttgaggtgtccagtggtgcatccaggaatctgctctctgagagccaggggtcgggggtggttgtcattagaggaagcgaacctcagggaccagggggacagggagaggatgtgtgatcttgagcctcactgtccatgtccccccgacacaggtgcagggcctggtgagcacagtcagcgtcactcagcacttcctctcccctgagacctctgccctctctgctcagctctgccaccagggacccagccttccccctgactgccacctgctttatgcccaggtgagtgggatgtgggccagc

SEQ ID NO: 14836 - DNA, 1416 bp, Artificial sequence
  DNA replication origin
cactggacacctcaaagcctgtggccaaaaccgggactcagaactgctggagagaccctaaagtctccctgcgagccccctgacatcagcatgcccaggagaccaggagtggactctggcgccagtcccagttgggctcagtgacttcaaggcctcttggctcccccgttatctcttccccacagcagcgtgcggctccctgccctgcccggctcttgggtattgaggggatgttggatgcctgcggccttgattgggtcgcttctgccatcctgatctccccgcagagcccctgcccgctgggaagcacctggtggggagcccctgcaggcaccagcacggcctctccgggggcctggagcagggtccagcagctcacgccccactcctcccgcaggcgccgccgcagccctgcatccaggtagcagctgcctggggcgccaggctccagggcgcctgccccggccgggcacacctcaaagaagagaagggggaatgagcgagatggggagggaagggcagggctgcaggaggatggggcatggactttccagaggccaggggtggagaaaagagccgaagggtcaagtcttgaagggcaggcagggagggcatggctgagtttgtttggggctggggcagctcaggttggcagaacacacatttggctggaaggagcttagaaggaagggattcaaggccctacagttgggcagactgaatccctgcttttctggggctggaggcctttaacagcctctgtgacctcggcccctctcctccctctctcaatggtacccctttctgcaaatccgagggagacgtcctgcataatcccagttcataaactgtctaccaggacttcttcatctgaagtctttggaatggccagaattgtgtgctaagtggtggatgaggagagagctgtgtgtccctggggagacaactcaaagtgttcatcagggtctccctaagattccggatgcagaaaagggaaggaccactgcgaggctctgagtgccagcaggtgaacaggctttccggccaggctgaggcctctgcagcagccacagctacggggacctcacaagcctaaccagagcagggagctctctgggcaggcagggactcgcagaggacagaggtgcccagggaacatgtgcaaaggggacgccagcatcgtgctccaacccaccaccagcccaatccaccccctttggcaaggacctcagccattgcccctgggcttagggctgcaagatggggcgtgggggaagggaaggctggtgaagcaaattggaccctaggggagtcccagctgggtgccaagattcctttgcccttggagattcagctccatcctggagctgagcagtgtttcccaggccacccagggagactgtgcccctcagccct

SEQ ID NO: 14837 - DNA, 1224 bp, Artificial sequence
  DNA replication origin
attgccatgcaggtgtgagcccgcaccggggacacctggggaccaagaacctctgtgtggaggtggccgacctggtcagcatcctggtgcatgccgacacaccactgcctgcctggcaccgggcacagaaaggtaggtcctcggccagaggcaggagcggggacaagctacagaggtgagtgtttgtcgccaccagccctgggcctgcctgagcgctctttcctcctcagacttcctttcaggcctggacggggaggggctctggtctccgggcagccaggtcagcactgtgtggcacgtgttccgggcacaggacgcccagcgcatccgccgctttctccagatggtgaggaggcagccgggagccctccccttccccccgcccagccctagaagctcgtccagtcccaccccagtgtgcggtcccatgtgctcgctccctgccccacgccctcaggtgagctgcacagacccaactcgcacagacaggtgcagagaaggcagaggggacccggagttctgccgtggggctcagagaaggggcaggggctgcggcaggagagcctggacccgatgatgaaatgagagcaccagctgcccgaggctggacgtggtgctagggccttaggcacaattatctgttacccgtctcagccccccgccccatgaggcaggcactgctcctttcccattggcagatgagaacaccgaagctcagtggcagggctgggatctgagcttctgtctgtcatggccccaggtcactactctatgctcttcctggaggcaggcagcctcctctgccttctgagactccgtccggctgcccaccttttggtatttgcatcttgttaggggagactgcctggaggagatgctcccggaggggctagcaaggaagggggctgagggaagtggagggagagatgggtcaggtgaggagccagggaaggggaaggtgatggggtgggctggaggcaagaagcttgaggcgcaggggaggagagagtccaggggtaaggcgagggcagccccgtggttcccaagtccagctgagccctcattatcctggggaaaagacttccacctagtgtcacccctcgccaaggcacacacacacacggagacgtgcagaggccagcatggtgtgcacccctcctgcccacaggtacacacatgtgtagatacacacacagatgctgggacacgcagaggggagcagac

SEQ ID NO: 14838 - DNA, 978 bp, Artificial sequence
  DNA replication origin
gaaatggaatcagagagccaggcgcggttgctcacgcctgtaatcctggcactttgggaggcccaggcgggcagatcacctgaggtcaggagtttgagaccagcctcaacatggagaaaccccctctctactaaaaatagaaaaaattagccgggcgtggtggtgcatgcctgtaatcccagctactcgggaggctgaggcaggagaattgcttgaacctgggaggcggaggttgcggtgagccgagatagtgccattgcactccagcctgggcaacaagagcaaaactccgtctcaacaacaacaaaaaaaaaaaaaaagaaagaaagaaatggaatcagagaagcgcttcaggccccagggccttggcacagacgctcgtgtgccccgagatgacaggcagacaggcatgggagtagagactgggcaggagtggagggacactcaccataggctgcccagagctggggctccagtggacgcagggcaaggcccggtgggaggtaggaagccaggttgagttttccatggagggcgcagtactccggaagtggcagactggcagctaggttctccaccctgtcagggtagggggtcatgcccagcaggcccaacctgggcaccagagaccccatcaaagccccaccaccaccggggtaactcccagagggcaaacatgagagtaccagggaccacggggtgggggttgggggcagaggaggaggggagggctgaaccaggcggggcctgcggtggcggggaggtagggctggcccttggtgacatacacacctgctggtgtcctcatcccccaaagctcggtgcagcaggaggacagagccctcgtctgactttgggcgaactacaggaggagacagaacggccattggcctcctcagccctgaagcccctgccccggcggcagcaacacctgcttccagcccctcggggtcaccctgggactcctctgccacccga

SEQ ID NO: 14839 - DNA, 1623 bp, Artificial sequence
  DNA replication origin
ttagcccaggtcctgtcagccctccaggcccgggagcttcgcctgacccccaagccctcaggagctcccccacctcccagtgccttgcagatacttggcactcattcttgttttcccaacaagcccaaaaactcccagagaactgggctgtacccagtttgacaccttcctgatgtccccacccaggccaggggctcttctgaggttgccttaggtctaggagctggcagtgtgggtggggtcaggggagggacacctggggctccccacacagagaccccacgcagacccaggaggtcctgttcaccttcccgctgggcccaagccagggcctcccgctccctccgcagcaggcggcacagtcggtcccccaaaccactgagcaggtgcttggcgaggcctgtgctgagccggctgtcagggccggaccctgggccttcctcagagctggagttggtggctgtgtcttcctcctgctgcagctcccctcccagaggcgatctggagagagggcagggggaggtgagcagggagccctggcgagggggcactggaggtgtccaggggcaatggctcacctccgcacttgctgagagtggcaggcgtgccctcctccctctccagctgcctgggcacaactttggcattgagccagttttgcagggagagccaggcatggtatgtcctgaagtcccgggtcctggagactggcctggccatcttggggtcctgaggggacaatgcagaggtcaggaatctgggtttcttgggctgctgagaaccccattcctcaccttagcgcccaccccatccacactcagagccagcccagttcctcgccccaggtctctgaagcctaattcagaaccagcaagagtggaccaggcagctggaaggctcgcacgccaggctgagcagggagtctgaggatgccgtgacatggaccggcagccgagcgaagaggttgtctggtgtgttgagcccaaggctttgggcagctggggcgatcgtcctgacacaagtgcaggatccagccagtgtagactttggatagctccactgagggcttagtgataccactggctgcgtgacatgaggagacaatcccaacgtggacggagggcgccggaaggtgagaagggccagagagtttcgacacaggccacaggtgcagtaacccaagaaggcgaaggggccaacaaattcccagccagggcagaggcctgggcagagggcacagacaggcccatgccaggtgcagggcatttgggcaaggccacggagagagctgatccacacccagccgtccaggaagctgaaaaaaccgaagtgatcccaaagaactaaggctggagccggcagtgccagggtcctccgtggagggcacagtgtagcaagtgactccagggtgcgcccagagccctaacactggcagagtccaaactgagtctccagctccacctggccaagagagcagccattcctggcgcaggacaagggatccttcaggacaagcaatccccaaacagggatttgtggcacacgcagtcatcacggtgaacatttactgagtgttcactgggtgccaggaattcttccaagcccttgctatgaatcattcta

SEQ ID NO: 14840 - DNA, 875 bp, Artificial sequence
  DNA replication origin
ccgcttgtcccccaggccttgttcatactcttggcaacgtctgggctgggccaggcgatgggaaccttgggtaccagctggggccaccagcaacaccaaggtgcccctctcctgagccgcctgtcacccagcggggctgctgttcatcctacccacccactaaaggtgggggtcttggcccttgtgggaagtgccaggagggcctggaggggggtgccagtggagccagcgaacccagcgaggaagtgaacaaggcctctggccccagggcctgtccccccagccaccacaccaagctgaagaagacatggctcacacggcactcggagcagtttgaatgtccacgcggctgccctgaggtcgaggagaggccggttgctcggctccgggccctcaaaagggcaggcagccccgaggtccagggagcaatgggcagtccagcccccaagcggccaccggacccttttccaggcactgcagaacagggggctgggggttggcaggaggtgcgggacacatcgatagggaacaaggatgtggactcgggacagcatgatgagcagaaaggtaagggggccaggaggggctgcaggccctgcgtgggagggggcagccggggctggggcttcgcatggggcggggtctgtaggctttatgagtggaccacaaccagtggtcaggctcccacctggatcacgagggctctctgggagttcctcagcatctccaggccagagccttccagcaagtatcttctacctctgtctcctcccaagccctggtgtgttggtggcagtataatgacatagttcagagcatggctctggagccagagtgcctcgtccctgactttgctgattggtagctgtgtgacc

SEQ ID NO: 14841 - DNA, 958 bp, Artificial sequence
  DNA replication origin
tggactgcaccatgggccgctgtgcctgggagagcctgctcccttttggaggggcgtcctgagcaccccagactcctggcttccccctggcttcccccagggccccaaggacatgctcccacttgtggagggcgagggcccccagaatggggagaggaaggtcaactggctgggcagcaaagagggactgcgctggaaggaggccatgcttacccatccgctggcattctgcgggccagcgtgcccacctcgctgtggccccctgatgcctgagcatagtggtggccatctcaagagtgaccctgtggccttccggccctggcactgccctttccttctggagaccaagatcctggagcgagctcccttctgggtgcccacctgcttgccaccctacctagtgtctggcctgcccccagagcatccatgtgactggcccctgaccccgcacccctgggtatactccgggggccagcccaaagtgccctctgccttcagcttaggcagcaaggtgagtgcaggggcagagagggtacctgtggctctggcctagcaaagttgctcggtggtccccaagatgcccttccactgtgatgaaaagagaaggcagcaccgaggtagaggggtctatcagcttggagctgtcccaggccccacagtcaaccccaagcaagccctaccctgagcagctccatctctctaggcctcccctgccctcgggtcattgcagccactgactcacccattgtctgcctaggataaggtcctgggaactgtggccttggaatgtgtggcttgtcctgggaggagatgggtgggcagacaagggccctctatctgagactgggatgtgcaggggaccccatggcccatgtctagggtacctcctccatagatgactcccactcccagggatgagatgttaaaacacttaaaactcagtatggcacaggacacc

SEQ ID NO: 14842 - DNA, 1554 bp, Artificial sequence
  DNA replication origin
cgcctggggcttcgtcgctctggccgaagggaccgcgccaaggcagcgctgccgctctagtgccacctgtcatcctggtcccttgcacgcacgttcaattttccctcccttgcctctctctggggcccagcccgctttccccgcctccttccctctcccctccccgccaggctgaagtttccagcggcggtggcggctgccctggcactgctggctgggctagggcagcttgacccatccagctgaggcttcttaatccccctcccctgtgccggcgcgctcttcccgctgggggccagggcggggttcctagccccctgcagttgtcctgggactctgcttgagaagccgagaaactgcagggctctgggaagaggctgactcagggccgcccaggtgtagagagagacacagccagcggccctggctggcagcgttccccagcgactccagcctgccaggcctgcacttcccacggctacaagcctggctggggctgtaggctagggttgggctagcagcacccccaaaaccacggattgcaggatgggaagaatcctctgagccgacccaagcctcaagggcacactgaggcccagaggagtgacatgatttgcccaaggccatacagcataggacagagtcaggctcaggatccagcctttttcttcattcagtgccttccactttctgtcctccctcatgggtcgtgagcagattcctagcttggtgaggccaggacatgccctactagcaatggcagcctccgctgaggggcactggcccaggtggaatttggggaaggggtaacatccccacactggaggagcaagatgtgtctggctgcatgtggagaggcagcatggtgcccagttgtgggctggcacttgccttactggtttgagctgcctcagtgttgccagggcggtgcccactctgtgccaggctgtaaggtgcttgggacatgtgccccagaagctcatgctttgatggttatgctccagggacccccctctgggagagccccatgagggcaggagagtgatggagagtacgcccagcttcctgaagggcaccccaacctgggagaagacggccccagagaacggcatcgtgagacaggagcccggcagcccgcctcgagatggactgcaccatgggccgctgtgcctgggagagcctgctcccttttggaggggcgtcctgagcaccccagactcctggcttccccctggcttcccccagggccccaaggacatgctcccacttgtggagggcgagggcccccagaatggggagaggaaggtcaactggctgggcagcaaagagggactgcgctggaaggaggccatgcttacccatccgctggcattctgcgggccagcgtgcccacctcgctgtggccccctgatgcctgagcatagtggtggccatctcaagagtgaccctgtggccttccggccctggcactgccctttccttctggagaccaagatcctggagcgagctcccttctgggtgcccacctgcttgccaccctacctagtgtctggc

SEQ ID NO: 14843 - DNA, 960 bp, Artificial sequence
  DNA replication origin
gggcatgtcctggcctcaccaagctaggaatctgctcacgacccatgagggaggacagaaagtggaaggcactgaatgaagaaaaaggctggatcctgagcctgactctgtcctatgctgtatggccttgggcaaatcatgtcactcctctgggcctcagtgtgcccttgaggcttgggtcggctcagaggattcttcccatcctgcaatccgtggttttgggggtgctgctagcccaaccctagcctacagccccagccaggcttgtagccgtgggaagtgcaggcctggcaggctggagtcgctggggaacgctgccagccagggccgctggctgtgtctctctctacacctgggcggccctgagtcagcctcttcccagagccctgcagtttctcggcttctcaagcagagtcccaggacaactgcagggggctaggaaccccgccctggcccccagcgggaagagcgcgccggcacaggggagggggattaagaagcctcagctggatgggtcaagctgccctagcccagccagcagtgccagggcagccgccaccgccgctggaaacttcagcctggcggggaggggagagggaaggaggcggggaaagcgggctgggccccagagagaggcaagggagggaaaattgaacgtgcgtgcaagggaccaggatgacaggtggcactagagcggcagcgctgccttggcgcggtcccttcggccagagcgacgaagccccaggcgggaggtgacggcgcagtggcagagggcgcccaggttttctggagccaccgctccgccgtggtctggccgcgtcgggcttcctaactttcaggtgtcagaatgtgtggcccagcccacaggggcacggggaacacgctccgtacgggcaccgcaggctcggctcagaaatcccccgccacgagtgtccccagacggcgcgctcctggcgctta

SEQ ID NO: 14844 - DNA, 2395 bp, Artificial sequence
  DNA replication origin
cactgggaggtgcagactgagaagaggaattaggttagggatgtaggtgggtgggcgggaggggatggcggcatctgctttggagcttcctccgggttccaaacgcatccccacacttcccttcccctcctccccacaccctgcccccacccccgcgggtcccgggagaattcgcctggtattcccccttccccatcccccaccaggcgttgccacagggtggggggtggggtggggggaggccagcctcagctgtctgaaggatggaggggctggggaagcagggctaggtgcccagacggccgcgtgtgtgggaggggatgtcctcagatgccctccacccggcagtccccgctctgacgtgggtgccccccctctccccgcccggattagtggcagcttggcctgactctccggggctccttcccccgcccccgcctgctgccctcccctgggccgggggctgctccgcccggggggcactgtgcttgcccaggtaaggggctctggggatggcatgagggccgccggctcgtgagtgctgctgtgcccgtcagcacgagcgtgtgtcagcgagtgagtgtgtgtcagtgagccaggggtcggtgcggggctggggcttggcccctgaatggctgggggtgctggtcagcttgcctttgtccacaagtctggcattgtgtccacgcgccgtgtggcttttcttctgtgtttgtgtcttttgtgtgtctcctcagctctgctccgtcttcaggcacagaacagccggctacaaggactctgtgggcctgtggcatgggctccaaagcgggatggggagctgggcgagggtggggaaggggtccttcctcccatcccgcgagtccccacgagcccctgggcttttcaggagcctgtccccaagagccctgctactctagtccagggaccgtggcctgacaaagcagacatggcaactggggttgggggggatatctgccccactcccctgggatagtccccatcccctttggggatgtcagcgataggtcctcagggttctggacagcgcaggctcccatcttggcctctccgaggccccaagccgcaggaatctccccctggcactcccacaagcttcggctgctgaggagggagcacagagaacacagatgggggaccacagacacaccccagcccttaccttcacccctggagccagcctgggagtgggaggccgggcctcagggcctggggcctccagtccatgttagaccctctacaagcatctcccctggcacactcaggtcccagccaccctcaggggagctggggaggaagggagtgttactaactcagtcatgtaaacaacccctaccagcctgccttgccacagaactggcctctgggggcaggccaggggcagggtgaatggatgccaacatggcccaagtccggcccagtgcccgctcctttagacccccgctccccaggacccccactcttctcaaccggtagaaggctctaggccttgctcatcccttaggaggaaggctcctggctattcagggctcccctctgcagggatggtggtgtgacttgggaccaagctagaggcatccagaacccatcgcttgcaagggatgggaaagagggagtgcagcttctgtcccaggcaggccaaggttggcttccgcagggaggcaggggagccgagggtgggaggtgggtgcctgaggggaagggaagcgcccgttgggcgtgtgggtttctgtgtgagtctgaatctgtctgtgtgtgtttgaatctgtctgtttgtgtctgcactggaaccacccccgcagcggagccgggatgcttcctcgggtggagggtgccctgcttttccatttcctctcctcctctctgcactctcccgggagccactcccatgggcgcctctccagcccctggcctggaagcaccaggaaccctggggatggggcagaccctcacagcccggggtctggagccggtgtcggagctcatctgggcccatgacctctccagacatttggcaaaatcaaggcccttagaccagggacagacccaagcccaggccctcccagaggtcctaggacgcaaccctttgtgcccttgggctctggaagaggtttgggaagggtttggggtggaagatggcaaagagcagcttggccaggtgaggatgaggcagggcagacacaggccagtggggcgtgccatgtgccacagatggagaggaccaggagccagtggcccggcaggcacagcccggttggcgtgggccagagcgcccatcactgacccgtgagaactcgactgcccctgccagctctggcactgccccctcccagccgccccgccctagcaccctggggggcaccccgcccaaccg

SEQ ID NO: 14845 - DNA, 851 bp, Artificial sequence
  DNA replication origin
tggggatgcgtttggaacccggaggaagctccaaagcagatgccgccatcccctcccgcccacccacctacatccctaacctaattcctcttctcagtctgcacctcccagtgcgcttcctcctccccccacctcccctcccctccaggttacccccacaagctacccaccggggagaggaagccagctccactctgccctgggcttgagacctttgtgcctacccggaaacaccaactgtggcccccaggacttctccagcagcagagaatcctcctcctgcccaggcgtctgccccctacccagctcttgagacctctggtccctgatgctgggtagaggatggagccagaggctgagtgccacctccttaaccccctcaaggtggagggcagtgccaaccaggatgccccaacccagcctgggccagggctgtgtcagaactagaggctaatcagtgacagctaaaaatacagccagtgcgtgcggcgcacatggaggctggagacggggaaggggaccaggacacggagggccccaggcctagagggacagtgatgggggctgaagagtcagggagggagaggagccacctggaagggccaagggatggctgtgggtggagagcagagagaagagaggggcaagaacagagggcgatccgcacccagaaaccagggtggatatgcaggaacccctcaaaagcagacaagctgcaggggaggtgaggagtgagaccagggcacaaaccaagtggggcaggggccaggacccagcagaggtgtgcagctctaaggggactggctgtggcagctttgtgtccccaccagccctgatcctgctcgtggccc

SEQ ID NO: 14846 - DNA, 995 bp, Artificial sequence
  DNA replication origin
gctccttcagccttagacctaggctaggactgggctgtcccatttcaagggtgtgaggcgagcaacgggagtaagaatcaggagaaacagagcccctttatgtatttatttatcaaaacactcgcaaacctgacctcactcaccaacacacacacacacaaccaggacacatgtgccaggccttatgaaaggctatcaagtactttgaaggacaggaaggaatgaacacacccaggtggacgtttggtttcatttgcaggggttcagggagggttgcaggggttcagggagggctcttgtcccacaaccggggaagggagagggcagagcaaggcaataaatagaaccctgggcccagcctgctttggtacattgtgggtgcatccctgcatgtggccttggcagcatctgctcccggcccttaaccatcagcaggagtcaggagggtggggcccaggcagctggtgcaggcaggccagatgtgcagcccaaggtccctccaaatagccctggagccctgcagggcacgaggtaagaagggggcagatgcagcagaccctagctgtccacgtctgagggcacagtctttttcctcgtccgaaccttcagggagcgcgaggtgccctggggaaaggggaggcacagcatgagggtgtggggagcaccagccagcagagccctcctccctcctgtcgtcctcccacactgacctcccgcaccggtggcttcctcttgaccacacgcaggctctggctgcggattaggggcttctctcggggccgggctggcgcccgggggactgcctcagtatctgaccaacactcatcctcggtgtcgctgtcctgcaggcccccggcccggtaccctgtgtggaggaggaggtgaagctgaaagcctgcgaccaggccagcccttcctcgagccttgggggaagccatggtgtgagtgaaggaagccatccctcctggcatggctctgggcccctctgcccgctc

SEQ ID NO: 14847 - DNA, 1006 bp, Artificial sequence
  DNA replication origin
ggtgaagcttgttggaggcgggcataggaatgagcagcagtttctcagagctcctgtccagccatgtgtgggggaaagcagctatgcagccggacaggctccctggaatctctgggctgggctggcctgggttgggagttggtgctgcaggccccatgctgacctctgggcgctcaccccacaggtgcggtggatgatgtactggattgtttttgcactcttcatggcagcagagatcgttacagacatttttatctcctggtatggacgcagggtccgcaagccatgggtcaggggtggcccccccagccctgctccttggctcaccctgccccttgtgctgtgacaggttccctttctactatgagatcaagatggccttcgtgctgtggctgctctcaccctacaccaagggcgccagcctgctttaccgcaagtttgtccacccgtccctgtcccgccatgagaaggtaccccagggggaagcgggaagggaggcttaggggtgggtatgagggaaagagccctggacctgggatttaggatgctggggacaccggggttctatcccagtcctgctgctattgaggggcaggaccttgacagggcccagcctacctcatcttctgggataatcaggtgggggtacacatgaatgacctttgaggatggaaattggtttgggggtagtggtggcggcagctggagcatggccactcatggaggtgtgagcgggtggcagccctgctcttggtctgtgtttgtggcccggatttgtggctctgggcaccaggtggggctgggctgggctgggtggcgccacaaccagtggcttctcagaatctgcagaggaagagggactctggctgtccacctgagctctcctccccattgggtccacaggagatcgacgcgtacatcgtgcaggccaaggagcgcagctacgagaccgtgctcagcttcgggaagcggggcctcaacattgccgcctccgctgctgtgcagg

SEQ ID NO: 14848 - DNA, 1252 bp, Artificial sequence
  DNA replication origin
caagggttaacggacctgtgggcttgcacgcggtgtctggggcaccgcaggctacccgccccaccaagcctcgttggctgagaacgacccctgccgcacgccacacacactgcaaacagatgcgtggagccgagggccacaggcctaccttgctgccccttggcaaacacaaggtgatatggcacgttgtgggcggagaatccaggtgcctgcttgccatctgagcagtcacatgactcaccatcctattcctcacctttgagtatgccaacatctggctcacatagccctatctgcaacccagcagtgtcaggtctggtgaccctgggcctgattgcatgcccatgggaggggacagtctggtgttctcacccacttcgtggagtggctgtcctctcactccatcatgcacccatgggccaccggtgcaggcctgggcaggcttgggatgtttgtaaacagcagggtggggaggtggcctccagggctctgactcaggcacgggttgtacaagccaagcgagaaaaacagggcgggtactgccaccttgcaccccagtggggggaaatggccacttggcaaggtgggagtggggcatggtgcccctcacactccccatggctgctcttccaggctggtgtttgggatgctgtgtccagcttatgcttcctataaggctgtgaagaccaagaacattcgtgaatatgtgagcgtgggggtttgggtgtgtttaataggacttggtgaggtggggagggtctcagttggcctctccctcctccaggggcaaggctgtgtggcacatcctgagtggagtggggagggagagagaatgggccctgttcaagagggtgtagatagagggcaggccatcggggtgcctgtggaagatctggtgggtgaagcttgttggaggcgggcataggaatgagcagcagtttctcagagctcctgtccagccatgtgtgggggaaagcagctatgcagccggacaggctccctggaatctctgggctgggctggcctgggttgggagttggtgctgcaggccccatgctgacctctgggcgctcaccccacaggtgcggtggatgatgtactggattgtttttgcactcttcatggcagcagagatcgttacagacatttttatctcctggtatggacgcagggtccgcaagccatgggtcaggggtggcccccccagccctgctccttggctcaccctgccccttgtgctgtgacaggttcc

SEQ ID NO: 14849 - DNA, 960 bp, Artificial sequence
  DNA replication origin
cacgaggtcaggagattgagaccatcctggctaacacggtgaaaccctgtctctactaaaaatacaaaaaattagctgggcgtggtggcaggtgcctgtagtcccagctactcgggaggttgaggcaggagaatgtcatgaacctgggaggcagagcttgcagcgagccaagatcacaccactgcggtccagcctgggtgacagagcgagactccatctcaaaaaaaaaaaaaaaaaaaaaaaaatagaaggcttaaactgacacaagatgaaatagaaaacttacattgccctgtctccattaaggaacttgaagtcagtattaaagaaaaaaacaaaaacaaaaacaaaacaccttctcctaaaaaaacctcctggcccagagtgtttccctggtgaatgctatcaaacatttaaggaggaactaacaccaatctacatacacactattagaaagtagaagggaaggttgttgggacttggggactgatcagggaagggtgagtggaggagacaaaggtgttagggatgactgccaggtttctggattgggagactagtggagccacagctgaaatcaagaacagaggaggagcagggcaggctcagcgatgggtatggagctgaattgtgagttgtgagtcctgactgagttttaggtgcttgtgtgggtgtgtgggccaggagagtctgagggaagatcaggagctggggtgtggcatgggggtcattagcatctgggcagggcagaccaaaccccaaagaaggtatttaggcagtgactgccagagcctgaggctctgcataaatttctcttgggggaaaggtggggtcatagtgagaaggaaagaggggtgaactggggatgtcaaagtggagatgccgggcagcagctgaagaccctgggacaggtgagcagtgtatggtttcatgtgcttggtgcccgagaagggctccaat

SEQ ID NO: 14850 - DNA, 1091 bp, Artificial sequence
  DNA replication origin
ggggatgggcttggctgctctggaaaccccagagaattgggtgcgatagcctgggctagtgcccaaggtgggcactgtggggccatcttagagacaggtgatcccaggaatcagagttcccagaaagagctgggggctgaaagaaagggatggcaggagtgtctccaaccctacaagatgccgtccatgagggacagttgtccatgaggggctggaatgggacagaatgagggtgggggagagggagaggagatgccacccgggaggaccaggagctggcttgacaagagagctctgccttggcccatgtttaggatccaacagggaccctgggagcttctggggccagaacaggctcctgcctggccttgttgcccaggtggcccagggattccccatggggtccccaggggtagcagcagggcagtcatgtcttggggaagcccagggctgaggcagcgggctgggggctggggcagcaggcacacccttggaagctctaattccacctttgtctctgcaggttactcaactccaacaagtttacactgattggagacaacgccttcacaggactgtcgcacctgcagtatctgtgtgtgggagggaaaggggcaatgggaaagcagaagggagggggaccccaggcctgggaggccgagggactgggtagggagtggatgagaatgccgcaggaagggaaggtgatgggaggcgagagcccttgcatcccgtgatggcaggacctgagcagaaggtcgtttcattcattttgcctctaccctacctgatgctctatctctatggcttggtgatgccagactccatttggaaacctgtctcggggacacgggctgaaatctaggctggggcgtagggcgagtgctgctgggggtctggcatcctgtgtgagcactgaggcaagttcccgctttccccagcttcattgagaacaatgacatctgggcactatccaagttcaccttccgaggactcaagtccttgactcacctgtgagtacgtcacacatacacacactgcaccaaagccccacctctcctgtggcctttggccttgctcatgatcttcag

SEQ ID NO: 14851 - DNA, 2123 bp, Artificial sequence
  DNA replication origin
acgcatgcactcacgcgcagccccacacgcggatggccccagagaccgcccggtagagcacacagcggccacgcctccccttccgtgactcccaggccccgcgccgccccgcgcgcgcccccgccgcccgcgccgcagtccgcagccacccggcgcggtcagccccggctgcggctccagctccgcgctccgctcttctctcccgagccggatcgcgggagcgagcaggggaggggaccgcagccggcgcccgagggcaggaggagtccgcaggcgggcccctggctgcggtagcagctgccggtggcagggaggtgccagcccgcgcggggtggcccagccgcgggagcggtggggcgggggccgcggccgccggccccagggagagatcgcgggcagcatggcggggctgcgggccagggggggcccggggccggggctgctggcgctctccgcgctcggcttctgcctcatgctgcaagtcagcgctaagaggccccccaagacgcccccctgcccgcccagctgctcttgcaccagggacaccgccttctgcgtggactcaaaggcggtgcccaggaacctgccctcggaggtcatctccctgtgagtgtccagccctggccttgggggttggggagggagaggaggccgaggacagctctgggagaggacaggagaacccccgctccccctcttcagagtgcggggaccagggggactgcaggggtcctcagggctggagattccaggcaccagtcgggcagggagttctgcagttttgcaggctcagcggccatgggtggggaaagcaggagttcaccaccaagaatgaatcatcatcaccacgagcgacagtgagacctactgtgtgctgtgctccagacttgggggggttgcttacacgagcatgtgggcccctgcctgtgatgtcacaccaagggcaggagagtggcggccagagcaggatgagaatgagctatgccctcccagcaccctggcatggggcacatgcccgccactgaccagccacttggcactcagctcggccagcctgtcactcacaacagccagcctcaggggctcccccttgtctgtgggaccagagaggttgtgaggtccttggggaccaggatgccagcccccacccccatgccccatctctcaacagcacccagcccattgtgggtgtttggatgatgatgacaacggtgtgggtgatggaaccttttcttgcctgagagggaagctgagcctggggccatgggtgccccaagaggcaataggggaggaccctggtgaaggcaggcagtgaatttgggaggagaagggaaagacacacagatgggggctaaattaggtgaaatggggcatttccagggcaagtgagtacaaaagctactgccctccgtgttcacctctccctgcctcagcacagcccttgcagaccccacagtactgactcgggtgtccccgcaggaccctggtgaatgccgccttctcagagatccaggatggagcgttctcccacctcccgctgctgcagttcttgtatggatagggccttgtggaagggttgggggaactatggggtggtagcaggggacaaatcctgggctggggagagggagagtggacagaggcagcctctgcagacgaagatgcaggtgtcccttgcttttgttctgataggatgtacccaaaagacggggcagccttgagtcaggggagtcggggcagcaggaggacagctagggatggcacagagaagccaagcaagtgggatgcggggatgggcttggctgctctggaaaccccagagaattgggtgcgatagcctgggctagtgcccaaggtgggcactgtggggccatcttagagacaggtgatcccaggaatcagagttcccagaaagagctgggggctgaaagaaagggatggcaggagtgtctccaaccctacaagatgccgtccatgagggacagttgtccatgaggggctggaatgggacagaatgagggtgggggagagggagaggagatgccacccgggaggaccaggagctggcttgacaagagagctctgccttggcccatgtttaggatccaacagggaccctggga

SEQ ID NO: 14852 - DNA, 1254 bp, Artificial sequence
  DNA replication origin
tccgagggcaggttcctgggcaccgcctttgagtccacgcagaaggcggtgtccctggtgcaagagcagctgggcgggcaggggggcgtcttggggggcctcttagcgctgacttgcagcatgaggcagaagccgagcgcggagagcgccagcagccccggccccgggccccccctggcccgcagccccgccatgctgcccgcgatctctccctggggccggcggccgcggcccccgccccaccgctcccgcggctgggccaccccgcgcgggctggcacctccctgccaccggcagctgctaccgcagccaggggcccgcctgcggactcctcctgccctcgggcgccggctgcggtcccctcccctgctcgctcccgcgatccggctcgggagagaagagcggagcgcggagctggagccgcagccggggctgaccgcgccgggtggctgcggactgcggcgcgggcggcgggggcgcgcgcggggcggcgcggggcctgggagtcacggaaggggaggcgtggccgctgtgtgctctaccgggcggtctctggggccatccgcgtgtggggctgcgcgtgagtgcatgcgtgtgagcttgtgcttgtgcctctgctgggcacgactgtgcgcgccggtgctcacctgtctctgcacgggcacatgcactcactgccttgtggaggcgcttcggcgttagggatccctgtgcttctgtctacctgggtttctttgcatggggggacacatcccctaggcagcatcatgggcatgtcgtgagtgacagacgcatatctaagttagcatgcaagattagaagcacaagggcgtcctggaggagtctgaagtgcgcttctaaccggattcacatgtttttccacgcgccgctgaacagaatgtacctttgtgtcagcatgagctgaaaagggaaacgcagcctctggagctggagtgggactgtgtggaattctggaacatttctcacgctcaaccacagcctgttaaagctgggaagcgctttggatatttttcagtccagccctttgtctaacaaatgaggaaactgaggccccctaagcttgctatcgcaagtgctctgtactttccctacttaatcctctcaatcgtttgaggcaggtgatagtaattcccttttacagacaagaaaagtgaggcctgtcgcaccagaagaaaaaggtatcagcagggatttccgcccactctgcccagcttcaaggttcacggtcgtcct

SEQ ID NO: 14853 - DNA, 846 bp, Artificial sequence
  DNA replication origin
gagctcatttccctaaaaaggggggggggagtcggagggagggagggagggagagaaagaaagagagaaaaagaaggaaagggagagggagacggctggagcccgaggacgagcgcggagccgcggaccgagcggggggcgggagacaggaaggagggaggcgagcagagggaaggggaagaggtcggggagcgagggcgggagcggtcgcggtcgcgatcgagcaagcaagcgggcgagaggacgccctcccctggcctccagtgcgccgcttccctcgccgccgccccgccagcatgcccggcgtggcccgcctgccgctgctgctcgggctgctgctgctcccgcgtcccggccggccgctggacttggccgactacacctatgacctggcggaggaggacgactcggagcccctcaactacaaagacccctgcaaggcgggtgagcgccccccggccccccggcgacgggccaggcggggaggcgcgggcgggttcgggcttggggttgggggaggacagtccagtgtgggaagccgggagctgcctggttggcaatgcagtggggaacaaaagaacgagggggagagggagggggatttgggggacttttcggactgaagttttgccgctgttggtggaagctgctgccgctgcctctcatcttcccagaggattccagaggaagtctccttgcgtcccgggaaaaccggcgggcaaggcggcttttccttctgtaggaaacttttctggccaaactcctgtgcgtgcgtgtgtgtgtgtgtgtgtgtgtgtgtgtgtgtgtgtgtgtgtgttctttccccttctcccccatctctcctgc

SEQ ID NO: 14854 - DNA, 845 bp, Artificial sequence
  DNA replication origin
gcctggttggcaatgcagtggggaacaaaagaacgagggggagagggagggggatttgggggacttttcggactgaagttttgccgctgttggtggaagctgctgccgctgcctctcatcttcccagaggattccagaggaagtctccttgcgtcccgggaaaaccggcgggcaaggcggcttttccttctgtaggaaacttttctggccaaactcctgtgcgtgcgtgtgtgtgtgtgtgtgtgtgtgtgtgtgtgtgtgtgtgtgtgttctttccccttctcccccatctctcctgctccaggagctgggtgttttccagcctgtctgggctgccctggggctgcacatctgtctggcttggatctgggaggcctgagtctccaaggagcaggtcccccagccaccacccagcccaagtggaagaagaaagtttttccagggattccctgagatcgtgctctctgggtatcccgtagtttaaccagtagctgaagctttctgggacttaggagacagctgtcaaagtcagagaagccaacccagaagggggacttaactttgtccctatgtgcccagagacccccgccaaggccaagttggggtggaaagagggaaaatacaaagagaacccagatattgtatatcagctctgtcacccccgagacaccagaggctaattagctgaggtcaggaccccggagtgtgtgtttgcctgtatgtgtgtgtgttctttgtctctgaagactctatgtaaccccatcactcctgctgagcccagaagggtcctgcccctggagtgaccagatggccaggcactcgggccatttgcctgattggatgac

SEQ ID NO: 14855 - DNA, 1763 bp, Artificial sequence
  DNA replication origin
gatctgacacggaggaggaaatgcctcaagggcaggggctggctcaacccaggctgtgggcagcgctgcgggcccaggcgatgacggctggctggagcggctgccactgcccccaggggtcctggaggtgggggctggggcgggagccgcccaccaaggccgcaccgaggggcaggtacctacctggctggatgttctcacgaacgatggaaacgtggcggtcccggtctggccgagtgtgttcgtgccagaagccgacgacgtggcccagctcgtggaccacaatgccgaacttgtcacagttcttgccgatggagatggcctgggggcccccgccgcggcgacccacgtaggagcagcacctggagggcggggccagctcaggggggcggtcccgagctgggggagtgcatccactcaggggcggggccaggctgccgggggcggggcggcaggggagcgaaggggaggggtgggccctgagcaccgagtgcccaggctgtgtgctggaggtcacagccgcacagggggcagttcctgggtagatgccccatagcaggaggggataaagggacccaaggctgtgcccagctgggggcagtggcagggcccagggcagaacctgggttggggcaatggcggaaggtacagcgcctagggcttcctgctcacccgcaaggtcgataggtgaacacaatatagctgtcctcgtcagtgcgctccaggaaggtgacacaggtgtgcttctcccagtgcctcatggcctgccggaagactgccctctggctacctgccaggaggaaggaagccaggttgccacggtgtccaggcagtcccaccccctacccaccactgaagagtcacagccattctgagggcagactgcctggaaaggaatgtgtgggcactcgggctgcaggtggcacccacgcctccgtgcctggcagggctgccacaaggccaggcccggaagctggttacactctgggacccacaatagcacgctcaccagtgaagtttcccccaatgacaaaggggatgaccccatcgggccacacacgctctggtcgggacgtcgccgcccgccggctacgggatctacctctccatctcccacaggctcccctctgaggctgcccgttggtgctctggcagctgggggtagaagtgtttcctggaactgagagaggaagtcatggtgactagtgagtggagagaaagaggaggaaagcaaaagcatagtcaaacctcatttttcatggattctgtgcttgcaaatttgtctactggctaaaatttattcgtagtccccaaaatcaatactctcagggctttcacggtcatttgtggacatttgcagagcagtgaaaaatttcagtcacccaacatgcatgttcccagctgaggtggaataaggcaacgctccgctttctgctttcggctctcattgtgtaaccaagtgtcctttttgaggtctagttaaagtgccctgttttttgtgtttttgtgcgctttgttgagggtttcgctgtttaaaacagcccctgagcataatgctgaagtgctctctggtgttcccaagggcaagaaggctgtgatatgcctcacagagaacatacgtgtgctaggtaagcttcttcgaggcatgagttagagtgctgttggtcatgagttcaatgttaatgaatcagctccatattaagtaaggtgtctttaaaaagaaacactcataaaacaaggtgatgcactgatcagttgacaaa

SEQ ID NO: 14856 - DNA, 1175 bp, Artificial sequence
  DNA replication origin
tcccttcagcccaggagttcgagaccagcctgggcaatatagtgagaccccatctctaaaaaaaaaggcacggtggcgtgtgcctgtcatcctagctactcagtaggctgagacgggacgattccttgagcctaggagtttgaggctgcagtgagccatgactgtgccactgcactccagcctaggtgacagagcaagatcctgtctcaaacaaaaacaaaaacaaacaaatggcccacaaataaaagctcagcaccctttgggctgatagtttggggctaccccacactgctgggcttgcagagtggctgggttcagcctcctccgccaggtgccctgggtgcacacggtggtaaggccctgccacagacccacccgtggaagaggacaggagggcaggcaacatccacggaccctctgcttggaggccacagccccccagagggccactcttttcctgggtcactgccccagaagtgggaggcaggaggagaatagcctacagagggcagggtggggctgcccgagcagaggcccagccccaatcccgtctcccacctggagaatgtgttccgagcgtaatgcatgatgctgtcgaagtcataggtctcccccagggactccacctcctgaggctccatcttcaggaagttatactcctgccctgccaagatcaggaaaagggtgtggggggagaggagggggtgggtctgcctgggatgcaacgctcactttccagggcagggaatggagtccttcctgtatctgagagagtccccctacctgagggtccggggagcagccaaggggagcctggggaatggggagggtctcaggaagagtcctgtccagcagagggcctggtgaatggaggactcaagggaacatgggaaggaagcaccatttctagagccacagctgagaaggagcagtgaagagtggagaacgcctgggagagagggaggaggcgggaagggagggacagagacatcgagaaaatgagagaaaagccctcggagggcagaccaggcagagggcagatagtgggcaaaggtggggagaaaggcctgagcagtccccaggacggcccactatgcccatgccccaccctagaggctgcccgggctaccgctgtccaggaccaggacctggcccagcctcccagaggagctcca

SEQ ID NO: 14857 - DNA, 939 bp, Artificial sequence
  DNA replication origin
ggtcagggatgcaggtccagggtgcccttggacccactggtgctcccagctcaggctggccacaactcccagccccaggaaagctacaggcccctagcgggtcatctctctccagccccactgggcccctgcttctgcagcccctcatgctgctccagccctaactaaacttctcccaggactccccaggccagctcctcaccctgctggcacaggctgcatctgaaagcacctggaacaaggccaaaggcagattccactgcagccagaccaagccccggggacagccccaccagctcccaatctatcagtgtctcctgtcctggccattcctccctgctgaatcctgggtgtttgcactgggaggagcagagtgaaggggaggcaggcagccctccacctccccagggcccctgactcacacccagctgggtggatcgcagcagggggtggggtgggatgtggtgggaaatgtaaggccgggtctgtgggtgtggggggcagaatgacctcaccacccttccttggtctctgttcctgcaggtctgcaggcaggaagagcagatcgggtagaagcactgagaagagggggcagggccactgtctgggacacagacagaggatgagcaaagcaccaggcctgggaatggccaggccaggaaggagtttgaggaggagggaggtgccatttcccacactgctaaggagaatcttgggggaggggaggctgggccaccacctttgagggctctggttgtggcttctggggacctgggcctcagataaggaggatgtgcttcggagctgggcatgggggctagtccagggcaggggtcaggcttcgtgcaaactggccaattacaaaaaaagcagactaattaaaaaggaatggctgggcattggtggctcgcgcctgtaatctcagcgttttgggaggcc

SEQ ID NO: 14858 - DNA, 1032 bp, Artificial sequence
  DNA replication origin
ttctccaacccaggatcaggtaggttagacccctaggggccatgggaaccaggccaagaggtggagtccccaagtccttcccaaggtttcttgctcagttaacacatcagagggggcctgatcgagagccctccatgagctgcctttgaatcagccctgcagaaaatgtgggggtgaagggcaccctatgagccatcctggggttcactaaggacaacatctccagtgactgtgctagaagctttggggggcccagcttacggactgagcaaagccttcgctccaccccttcctcacatttgtgccctagaaacctagtccagtgcctggtacacagcaggggtaaaattacacctgccaaatgcgagtgaacgcgtaagtgaatggctggatgaatgagtgggggaaagtgagtcctgaggaaggctgcttcagtgtccggggcaggagtgggcagcctcacctgggagctggggggagcaggttgcaggggggtggggtggaggaggtgggcatgggcccaggcaaggagatggcactcaccctacagtgcccaaatgccccggaaggtggcaggggtcagactgaaggtcttcaggctctttcttctccttcttggcttagggtctcctcggtgggtgtcccaaaagtccaaatagctcccctcctggggggccagagtcagatgccccgggccctgagggctgagcctcgatgcccccagtgggggtcctctgcaggtttcttgtgcgatggggcaatgtgtgtgcacatgtgtgtgcgtgtgggcgtgtgtgtctccgtgcagggctgagggtggggcgggcacagtgtcgaccagggcatgggggcagagcagtaactccaggcctgatagatgtgagtgtcggtcccctgccccctccaagactggagcaacagaagggcaggaagagacgagagtaagcaggtaatggtttcccggggcagagcctgccccgagtgggtgttacatcctctcaaccctctggtgagcacctcttaggagtccca

SEQ ID NO: 14859 - DNA, 1228 bp, Artificial sequence
  DNA replication origin
acaggaaatgtcacagacaccatcaaaatgggagggggtagggcacggggaagggtccccggtccgcggacgggcacagtggggagaagagagcaccagttctgtccggccagagggaggtgggccggaatggcagagtggaggtggggggttggtgggcaccgaagcccccatcccattccgtccaaggtgaggttcctgagtaacaaggggtccgggaggcctggcaggcctcactggggggtccggtttcttttctgcactcggaatttgagctggtgggggcgtccccgagggggctgcagagctggcctcttttctgaaacgagagagagaaggagaaaagggaccaaggggtgggggtggagggcagggaccagggagggacagcagtgaaaaccagacccagggcctctgaggtggatctgaggggcagggtggggcgggagggcaggcggacacacatgcagggtggccatgtccgggcgcatccagggcacggagggctgggttagcaggggcaggaggcacagcgacgggacagagacagagcctgtggcaggagaaggcctggagggttggcacacgtagcccactaggcgtgcattgcatcagggaaggagagaactggggagtcgtcggtagaggggaacagtacttgggaagggctggggagagctctgctctggctctcattcaggcggcgacatctacagagtgtgttagacagacacacgcactcgcaaatacacctgcagacccagtgcatggatgtaccgtcacccaaatgtggcaacacaggtgctggtccacaggcacacacatacatgtgcacacggtacacactacccacacacgcacagacacacagctccaatctccaatacaccatgcaaatgcagatacagacacagccaaccacatacgcatcctcacttgcccgcccagcctgtgtacaggtgcatacaaagaatacacactctgcattcccacctatgtgtgaagaggcaggcacagatatcaacgcacacacaggcacagacacacccagggacaggacacatctgcacacacaggcgcatggacacctggacatggatacaaagtcacgcgtaaaggcagagatgtagctcatcagcagatggctcacagaggagcaacggccacgtgtcacagacccacacatgcactcacacgatgaacacacaatctgtgccccaatgcacag

SEQ ID NO: 14860 - DNA, 1373 bp, Artificial sequence
  DNA replication origin
gccgaccacagccagggccgcgaggcgcaggagggcgcaggctggccaggtccccagcctgccggccccacgtggcagccccggggcgagcggggcgggccgggggcgggtccggccgctgacgcgccgggtatatagccgggcatgcgcgcggtgccggggcccggacgcagtgaggggggtcggcgcgcgtgtctacgcggacgcaccggctaagctgcttctgccgccgccggccgcctgggaccttgcggtgaggctgcgcggggccgaggccgcctccgagcgccaggtgagggcggggacgccaagggccgcgggatgggcagcggcggaggagccccgcaccccaggctggggcagtgggtgggggcggggacagccctgcgccgaggaccgggcgccgctcccgggcaccggcacacgcccggacggctgggtggaggctgcacctggccgtggtgccgcgctggcgaggggagaggtcaaggcgcggcctgtccgcctggagggtgcgggatgctagagccgcagaagggtgcccagagcgtgggtcgccgcgccgaaggctgagccaggctcccggattccccgcgcggacacggacgcagaacgcagacagtaggtggccaatccgaggggcggctcttggggcggctctatggggctctggggtctggactttgcttttcaggagctgcgtccccgggcccccgccggtccatctcccctctgaaggtacatgtacccaatcttccggctgagcgaatctccaacctggcttgcccacgaggatggctttctggctatttttggtccttaatgaccaagttaggtggtcgggttcaggctgccccctcttggtgggtgagggcagtgggacaaagtcgccatccgagcagtttcatcatctgatcctgaggtccagttgagccgggaaaatttcgtcagctctggactaggggttcacttttgaggatctggtgcttgccagggcctgggttccagagacaggcttctctaaacagttaaagggctcggctgtacaggaggactccggacacaattggggagtggctaagtgctctcttgtggcccgaatggaagcgtggggttaggagcagctttgacctgacccttcttcctggagcaagcctggtttgggtttacgtctttagtggctctcccctaggagccccaggccattgggacggctgtgctcctgctgaggagtggcctgggagttagccctggcctctgtccctgctctgctcttaactggccctgtgaccttgggagggtcaggtcagtaccacggtcagactagatctccttaaccacagcatatacaattccgtaatccttccctcttt

SEQ ID NO: 14861 - DNA, 1301 bp, Artificial sequence
  DNA replication origin
ggaaatacataagtggttatgttgtcagggaagtcacttcttttgtgccatattttctggaaagtgccaccataccccctgccttgaagtttttaaacctgaggatagggggccttgtgtgagcgggtgttggatcgtctggccctgagtgagagctgggtgtgatatgagccagaagcctctgtcctggaacccatttgtgtgtgtgccctaggcagcctctcttcagagccctgggccaggttcctcctgcttcctttgtgtctctggcagggagctttaagaagacacctgtagccgggagcattggctcacgcctgtaatcccagcactttgggaggccaaggtgggcagatcacctgaggttgggagtttaagatcagcttgtccaacatggagaaaccccgtctctactaaaaataaaaaatttagccgggtgtggtggcgcatgcctgttcatgtctggaggcaggggtgaggatgtgtctgtctgtttatatatgcgtttgcacggtgagtgtgtgcatgtacacatttaagcagcaggtgcttattaagatcctaccaaccccacaggactgttaggaaacaatcagaaaaacctaaaatataagccctgtccttctaggaccatatgacactgaaactaagcaggaggtgagaatgtttcctggatggggatgggactggtgctggaggattggggtggatctgaggtggtgctatgtcctgcagtacaccctgttttcttcatccaggcccttcacaccttgtggagagagtgcatggggtgcgtgcaaaccactgacatgaatgggacttcctagtcctgtggcggggaggagtgtggagatagaaacgtgtagggatggaggggtaggacatttcagatgcagcccagggcaagagagcagtggcaggtgagggtgacagtgggtaggacgccagttggagagacccctgactcccaggcagaagggccatagcacattgctggagggacggagtgttgggaggttgtgctttgggtggggaggggcggtgatgaagtgggggcaggaggttctggaggggaggggctgggtggccaggagggaacagcaggggctggagtgtttctttctgttcaggagcctggaatcgtagggggatgctctgggttcgtggtgagccccacagggagaaagcagaggatgtgggaaggccttaacttcagtaatgggatggtggctgccagtgaccttgagccagaagaatgtgctgtgtgggaggtttggacagcccgagggagaatggaggaa

SEQ ID NO: 14862 - DNA, 1113 bp, Artificial sequence
  DNA replication origin
cctgttgaggttcttccagatgaattttagcctctgacccaggggtatgatttgataggcgtggagttctggttacttcttaaatgaagagtttccccaggatatctgaacaattctcttgggtggaagactcaaggatcatgaaaacgaaaaccaaattctagtcggctcctaaagtccttttgcctcctgcggttaccatcaaagagctatggtcaaaattccaagggataattcagggtctgattccactatatatccccagaccgcctatacataaatccatattattggagatttacgcttaatcctataatcttttacctaacagctgtccagtagaattttctggatgtccaataaggtagccgcgtgtagctcttgaacacttgaaatgtggctagtcccctagaggaacgggattaatttaaatttacatagctacaactacttatcggtcactgcggtaattgttaagactggttttgcctgtaacttgcatatgttttattggacatcagtttcaatatttcatttgcattgctaaaagtcaaaatccttttgactttgccagttactcagtgagaggacagttggagccagtttctgttctaggcttacagttttaaggacagataaaggttagtttttaacctcgagatgaacagactgttaagtttctacggacttgcccatggggttccacagtgagcctgggccggggaggcaggtactgtgtcagggggaagaaaaaaggggcttctagctgggcaggtgacacacagggcataggaagaggtcagttcttgtggccgaggaggtccggcccgggggtcccaggagcagagatctcccttctcttcgatgtggaaagtgaggagggagcagagccttgctcagaaacggagctcccccaatcccccaccgccctagctactggactggaactaggatggacacgaatgtccttctcattgtactaactgcactcaacaagcgggaaagatgaagcgagggggtttaaatgtgtgcgtttgttgaatgacccacaaaaactgaaggagcgcggccggactgatcacactccttgagacaaagcgggtgggagaccca

SEQ ID NO: 14863 - DNA, 1097 bp, Artificial sequence
  DNA replication origin
gagtgctctccgtccgtcggggcgcgcgcggggacactggtggccccctgccgaggaggcctggccggcggggaggcggcgccgggaggggccgccgagggtccccggggagccctctctggtttcccagctgccatcccggcccctaccgcagggctggcgtcggggaggggtcgggcggcccgacacgggccactcagagtttccagcgacatttccagagtgtgggaagcgagcggcctcgcagcggagccaggacaggggcaggagcgatgaaccgggcggagccaggacaagggggcaggagtggtgaactgggcaagccgggagagacggacaggccgggagcgagatgagggcgccccgcaggcagagtggcggagcggaccaggggaaggccccgccgcccctccgcgctgggggagagggtgtgcctgcggcggcgcgcggccggtcgtgtgcaaacaaacacgcgcgcgtacactgcaaacgtggggacgctcacacacgtgcaagcacagggaggaaatcagcccaagggagcggcccccccgggcgtgccgcgcccctaaagaggataagggtggggtccctttggcggggatgggattaggagggtcttggtgttcccagacactgtgtttgttttgatctgcctgcttttccgctgttctcgctgctctgagctgggtccccagagccccggcccttccggctccccatccattctggtcatcccctctccctgtctctgccccaagcctctgtatggcacttcagaaagtgggaatgcttaaggaacattgaaggaccgtggaaacactctggaatcctttctggcccttgagttggctcagggatccccaagccccaaaccagccaaccaaccaacagttactgatcaactttagctacgagctgggagtgatcaatgctaaattatgaaaactaacgtaatctcctgcattcctactgggtgtcagactggtgccagaggccacgaggagttttggagtgttttccaagctcaccactcaactcaaagtttggaaagaaagagagtagagaaaagactaagtgattttcagtccctacca

SEQ ID NO: 14864 - DNA, 2502 bp, Artificial sequence
  DNA replication origin
ggaggctgcggggtgggccctgcatgcttgggtcaaggtgggaggactccgggcaagccagctgctcctctgcgtgtcctctgtggggaaggaggaaggaagggaaagccctgctaggctaggctgcccatgccctcttggctcgaccctgggataggggaggaggggccggctgtgggagggggtcaggaccagctgggtactagctcaaggacccaggaaacaggccacgccaggcacccgcctgcaggctgcccgtgcctgccggctcccaggggcacaatggaccacttgttaggcccagggcaggagctccgggtgggagtgggggagggggagcttgggtgaggaggaggggaggggctggccaggagcccgtggggctctccctgcacgggtgcagctggcttccccactcccccggagggaaggcgcaggggaagtggggcagccggcagagagggggcctgggaacacaggactttgtttcagttccctctgcctcccccaggccgtgtgggcatctcttgcctgcgggcacaagggattactcagccacccgcccactgccctccaggaagcagtcagcagggccttaagcccaatagggccaaggggagcgtcgggggcatttccaggcagcaagacccactcttgcgagctcacagggagcatcgggcccttctttggcctccttcacagaatgaggactcagagggctccgggtgggtggagacagaagcggtgggtgagggcagagctgaacctgctcatgcccatggagagttggtgctgagtgccctggggtgttctgcatgtgggcaaatgtgcacgcacatacacgcgctccctggctccactttctcccgcccctccaggctgttttgtgagtgcagggtcttccctggcagcaccatgcctgcccacagccagcttcttctgcctcatcccaaggctggggaaggggaagggagccctaggcacccagggaatggaggggcaagaggggagcccagagtgggggtgcaagaggacaaaaaggggctcccagtttggggtgtccaagggggctttttgacccagagcacggtgctacggcgtccatccctccgcgtcttggctgctggactggaccagaaacagccaagctctgccactgcccaggactggatggaatcaggtttgcctgtgcctgtggggtccttgggggctctcagggagggctgcaaatgcatcgggaggagctgtgtgtatgtgtgtgttggaatctgggtgcagagctgcgaatatgacttctggggggaccaccggagggaccacatgagctgcatgggggttgtgggtacagaggggtgtcagctgaacagtggtgggaggtgcagtcatgtgagcagtggaagagttgggggcccagaggggatgaaggtagaataaggctgggatgactcagcccctggacccagctcctgcccagggctagcgagggtgtagccaaggctgggggcagctccttgtctctggtttgagtttgtggggactcctgacatttgagttgctgcgacacagctcttctgtgcccatgcctgactggggggagtggagggctgaggctggaggaggagcagctccccagctgggtccaattaggactcccaccaaagcaaaacaggcagacacaccccagtccccacactccacctccccttgcgggggggagttgaggcagggtggggtggaaggtcaggagacctggagctggtcggctcctcgcagcacccctccctgcccagctgactgcttcgggccaaattgcagctcagcagctgccgcctgggccatcagctgacagcgccttccttccctgacctccccgcccacctcgtgctcggtgagaactgctctcttggaggatgggtagggcaggaggtcccccacgacccgtagtcagaggttgcttacccttggtgcccccatctgccccttctcaaccctgccccttgtgtcgccccccaccacaggaacctccagggaagggtggtccgagtccttctcttggcagccaggtcaggagacttagggaggacttacaaggaagagggcagcatctggggactggtcccccatgtagcagagagcggaggggtcctcccagaattcagacctcccctccaggcaggcagccagccccgggagcggggagaggcccctggagcgggagaggggaggcggctctgctggggtgggcactggcctccctgctctgaacactgccctgaccttgggtgcctggccctaagagctttcccaggtatttctcagcgacaaggccacgtggacaaggacagcttttcttgaatttcgctttttctggtatgagggctggtgggaggtacttcccagagtttgggacgcggaccccggggaggggctaggtgcgattccctggggttgggcacggatccctcccgccggcctcgcctactccccgcccctccttgcccg

SEQ ID NO: 14865 - DNA, 1424 bp, Artificial sequence
  DNA replication origin
cccaggccccctctctgccggctgccccacttcccctgcgccttccctccgggggagtggggaagccagctgcacccgtgcagggagagccccacgggctcctggccagcccctcccctcctcctcacccaagctccccctcccccactcccacccggagctcctgccctgggcctaacaagtggtccattgtgcccctgggagccggcaggcacgggcagcctgcaggcgggtgcctggcgtggcctgtttcctgggtccttgagctagtacccagctggtcctgaccccctcccacagccggcccctcctcccctatcccagggtcgagccaagagggcatgggcagcctagcctagcagggctttcccttccttcctccttccccacagaggacacgcagaggagcagctggcttgcccggagtcctcccaccttgacccaagcatgcagggcccaccccgcagcctccgcgctgggctcagcctggacgacttcatccctggccacctccagtcccacatagggtcttcctcccgggggacacgggtgagtgagtcagtagggaggagggtgtcctgcgggcccggagttggttgggacgctagcaggtcaggtgggggcaggaggatgaaagggatggagggagggctgaagagagctctggggggcctcgctggtttcccacaaaatcgtcaggcgggcctgggactgtcaccgaggggtgtgggctgtgcctagtagccatccctccctcccgccctgctgggccctgagctgccgctcctggcccctccccgcaggtgcccgtgatccggaatggtggctccaacacccttaatttccagttccacgaccccgcgcccaggactgtgtgcaatgggggctacacaccaagacgagatgcttcccagcacccgggtaggtctgctcaggagcctcatgctggagatggagggtcagggccctgccatctggcactgccctgtgtcaagcgggaggggcagcagctggagatggggttctcaaggccatgaggaggttcctcagaggcctctgggctcactatgagcccctccctgcggagcctgctgactctgcaagagacacccgcttggggagagcaggctgatgcatcccttcccctgccctccagcctggtgccagggaaaggaagcgtgcaggagccctgggcgccggaggacctcccacagggactggggatggaagggtggaggtgatgtgggtatctgttggcttgggaaggggtggagactgtcccattcaggcccaacaggctacccagcaggaggttagagaggcagttctagatcccagtccagaggtcctgggaactcctgggtgcaggccagccctgaacatgtctctcctaaagtgacatcctttatcaagcattcccctaa

SEQ ID NO: 14866 - DNA, 2112 bp, Artificial sequence
  DNA replication origin
gaaacggcgcaatcagggcccgcgaccccgggacccagcggcagccgaggccgccgcctccggaaaagttcgcggctcgggaggggaggagagcgggcgggacgcggggtcctagaggcgcccgcgcggccgatcccgggagcggggcgggaactaggggaaggggcgggggtccccgaggctggggcccgggggccggacggggcgggcgcccggtcgtcgggctgacgtggagtccgcttagaaaggctcctcggggtcacttgcgaaagtcgacgccctgtattttatttatggaggagcgagcccgccagcgcccaggagggcccgaggccggtgcgcgccgctggaggccggacctcggctgcccgtcctccgcccagcccagccgccgaggctcccggctcgccccgaccctgcggtcgccggcgtgccccgcgggtgaaccctgggggctggtaccttgggggacggcagtcgggtctcaattgcccgcaggtccttgtccagctcggcgctcagctcggccagctctctctccagcagcacctgggggcggggagaggctgggcagtgaggggcagcgcaccgtgggggtgggaggcagcggtcaaagatcgactgtgaaaagcaaggccagcgcaccgggccggcgtaagggcaggcctcagcgcacgggccgggctcctgccaggaggtgtggcccagggtgccaagagggcatccccgccacggcctctcacctgcccagcacgccccgggagtgcctacgcgcttcctgatcccgcgattccgcagtcctgccagtttctgccaagttgtgtctctgttacagcaccaatggggttccccatttcctctcccatcttctcccgccctccaaggcctggcttcactgtgcccatccaggttcccccgccaccccagggaccggagcccccacccccacgctgcttcctgccagcctctgctatgggtcttcgccgaatcaggccctcggagcttctcaagggtccagctccacctccaagaatatttcctgataatcccagtgcgcactgaccactcccttttctgctcctgctttggccaacacatatttatttaacacatgtttactgagcgcctcctgtatgccagccactgtcctgagtgctggcattacagaaataaaccatgtgggactggagagagagctcttagttcgtggcctatgcccatggttactggggccaccaaaaccctaatctccctggtttatcaggctgctgtccccagcaccctgcagcactcacctcaatgggctgggagggcttctcaccagggtcgtccaccagcggtttcttgggctgaagggtagaaagggtgtgtcagagcaggtgaactcactttccaaaatgtatcagctgagggtgcgtgcacaccccgagagccagccagcactcaccctctgcccagtctctagttcctgcagaaactggttccaggactcttccgtccagacattgtctactttttcccggcgtctgagcacctgcgtggaggtgggtgggtgtcagcttgtgaagagggctactgggacactggccaggctcaaaatgcaggcttgcaggcccctgcccttcccctgggcccacggtgtcctccaagggattcaagctgaaaggacatcgtggcatagggtcttggccatacggcatacagctggggctgaccagggactatgctgggtgggctacctgatttgagggctgcagcacagtggagaatgctccaggtctgtagttgaaggtgcttctaggtaactcttcagagtggtcccagcttcttctaaagaaagggaaggacatctcttcagcttccttttagggagactgaggcagaagccagcacacagccctctcaccctgcccttgtccctgctgtggggtctactctgcctctgactgccctgccgttactctggaagcaagattaaactgtggaagtgtgtgagctccaagcttaaattccagctctactgtttagtggatgtgtaacctttgaacaagttactgatccctcagagcctcaggctcagaacctgtaatatagaaatgatttggtgagaga

SEQ ID NO: 14867 - DNA, 1883 bp, Artificial sequence
  DNA replication origin
ggcgcctctaggaccccgcgtcccgcccgctctcctcccctcccgagccgcgaacttttccggaggcggcggcctcggctgccgctgggtcccggggtcgcgggccctgattgcgccgtttccccgcgcagagctcgccggcgccccgacgggccccggagcagcggcccccggccgggtgagtgggagacgcgggaggaggaagggggctgtcccaggccgggcgggagggaacgtggcgcggccgggcggggcggacgggggcgatcgcggggcccagccgggggaggaaggaaccgcagagccgtgtccgggagggaccgcagcgccactctctgcggggcgccgttcccgcgccaccgagggcagctaactcctagcagaggaccggggtcgcggccgccgggggcgcagcgcggttagggcggccccgccacggcccaggcactcccgctgggccctgccgggcctcacccttccccgcgcagcgactcgggaagtaggacatcctgtggagagcccaggacccgggagacgccctgggaggaggtggcagggatgggggcgatggggggtcagagcggtctaggggtgaccagggtggggtgcggagccccaggctggaggctcagtctctgtgccccgtgcagcccggcctcagcctggagctccagctacccacatgcaccttacctgggttccgcccggtccctgagtccccacaaaatggctgatggaggaagccccttcctaggtcggagggactttgtctacccttcctcaacccgaggtaaggacccagccctgctctctttctcacggagatgcccacccaccaggcatgttggtgccccaggggtggcaggtcacagagccccttgcttctgccagtgcctgccctaggtgggggtgcaaccccatcccccaggtatggcctccccaagctgaggttgtgcttctccacagaccctagtgcctctaacggagggggcagcccagccaggagggaagagaagaaggtaaggaggggaccaggtgtgggggacctggagtggtcccaaggctgccatcctggatctgccacccgcccaactgagagagcccactctgtcctctcccctgcctagagaaaggccgccaggctcaagtttgacttccaggcgcagtcccccaagtaagcgccctcctccccctccccttccacccaaggcaatctctgccatcccagagggggatggggagggggactgggctgcagtgggcatccccaaggggtgagagaactggggtgtgttgggcagggtctgaagggaaggaggcttgggaaggcttcagcttaccctgcggtcctcgtccccacctgcagggagctgactctgcagaagggtgacattgtctacatccacaaggaggtggacaagaactggctggagggagagcaccacggccgcctgggcatcttccctgctaattatgtggaggtgagcaggagagacaagagcaagtggggctgggctgggagggcgcaggggttgggagagacttagtgcaaaccttgggtttcctaaagcaaaaaactgtgaggggctggggcgtgtctcggaactgtccttggcccccacagggcttggcccaatgctgtgcatgaccccaggaaatgtttgctaaatgagggtggagcctagcccaggggaggacccagcagccagctcctcaaccattcgtgtcccagactttcaccattcagatccgtctttctaaagctgtctttggaaatcatcctaatggcaactagcaagagtgggaagtgtgcgacagtttataaatcacgtatacacgcataacctctttcaggtgtattaccgccctggttcctctcactg

SEQ ID NO: 14868 - DNA, 2558 bp, Artificial sequence
  DNA replication origin
acctcggcctcccaaagtgctgggataacaagcgtgagccaccgcgcccaaccttgaacaaggttttatagtcctggagcttgcaggtccctgtggggtggcagtggtggcacagtccaggcatggccactctgccaagaaaggaagctccgtttctcggctgctgctgagaggtgagcagggcaccagggcctctccgtgtgttacctaacatgagcctcacgatggcaggtcatgattccattttacagggggagagacccagcctctgagaaattaagttgtctagctcacatcattattaaatgctgaagtcaggtccacctcacttcctgaaatctaccaaatgcccaggcagccctcgtccagggccctcgtccaggcccttggagaaggaaggtcatgtgtgaggtcagggacttctctagggcggcccaggttgggccgcttttatgttcttcctggcaatcctgtcttctaggcctgtcacctgagacaggtgtgaagaggtggtggctggagtgaaaggtggtggtgcccagttctgtcaggacagaggggaggggctcgtggttgacagggcagtggcctagccctggctggtttcttgaacctgggtgcggcctgacccagcaggggttcaacagcagctggaagaacgagtcctccatccacctccatcctcaccctggtttggttctaaatgggcaggtccagcccatcctggcctggaaacaaccattcctcagaacccactggcctggttgccattcccccatcccagctcttttttcatgaactccctgattccctcataaaacatatcagggctgaggcctcctctccctgggacagagaccaactccatgccctctctttgatggagcgctggcacttcccgcagctaacaaaccctccaaccctgggctgcctgcaccacggtcctgcctgaaagatgcttctgtgcctcgacttggcctgattggggaggtgaagggaggatcagaggctgctggagatggctcacccatgagagaggggagggcagtgatgtggcttacctagggccacagagaggctatgagcaggacatgtccccttctgtgccacagaggcgtgccctgcctgggttcgctgacttgtctttgtggtgggttttgtgaattcacaacccacccatcagaaagccctgccagatgaacctggggctatttgtagagtctgtccaaggcatgcaggaggggctctctgaggaaatgatgggcttgtgtttgattcactctccattcccagaggcaagcacggtgcctggcactcagtattcactgaatgaatgttattggaatgattgtgtggaagaattgaatggatgaacttcccttcctttgggtcccttcccagaagtccccaccccatttgaggcagggactctgtttgacacctctgtgccatccttggcttttgcttgtggccaagcaatttttacaacaagacggtaagcagcacattatccccattttccacatggggaaactgaggcccggaggagccgaggaggttgctgaaggtcacacagccggtgagacgcagctgtgcacttggggctaggtctgtgtgcccccggggctgtgctcaccctgcctgtagttgcctctcccctcaaggggcttccagtctagtcagggaggcagagcaggtacgtcaggccaggcggtcatgccgggaggccggagaccagcccgtgggagaggagtttacacacacccaggacggtctgtgggaggaggggggccagagtgtgaacgcaaggaggctgagacgcgggcacagacaggtgaggggcgtggggagggcactcttcacagagtgagcgtggagggaatgagtcacacctgaggcaggcgaggcacagctgcgcccacaggtgtgatcccctgaaaacacagcagcctggcagccagaggccaagtggagacccaacgagaggcggctctatggccttgaggtccccggagagagggttgccaggtacggcttctcctccccgagctggcaccggggtcccctccttggctgccctctcctcatccttatagcctgggcttcaggtgcttgaaagaggacaagggagggggcaggaagcggggtgaagacctgcagagaggatgaggtgagggcccacgggaacgggaaggtaccagcccaggggtgggggtgcccagtgaacccctagccaggaggctctctccatctcctagggcccctgcgggtccccctttgcgggcattccaggcagagaagttctgcgctgccgagaagccagcgttcaggaagggagttggcgggcaggagggtggccttggtttgggatttgtgggtgtcaaggccgcatctgcgccagcctcccagcctggagtgggtggaggagccaggcggaccgcagacacacccaggcagcccaccctgcccaggacctggggatgcggggcgggagagcgcggccggcgtgggagagctttatggggctgccccctcgatcgtctgcgaagtggggcgcg

SEQ ID NO: 14869 - DNA, 1943 bp, Artificial sequence
  DNA replication origin
gcggccccgggatcacatgggcggaggcaggtccgggagccccgggcgggctctccccagagtcgggtagacggcagcgggagcggtggcgtctccccgccttccctccctcccgggcctgggcgcccagccggacaggtgagcggcagccaggtgagcgcgcccacctgcgcctctccgcgcggcccgccctccccggcgccgggctcctctccgcgcccctgtcggcgcggaaccctggcctcgtccgcggcccagctccctggagcctcgcatcagcgggggcgcccccgcgagctgcgctctccccggccggagcgctcctcctccagcccccagcccgcagggtactttgccctcggagcgaaggaggctccagaactggtagagccgggccatcgggctgggcacctccccgcggcgcccgcagcgcggagtccactgaccggctcaaaggtctgggaatctcggggcggccgcgagccggcctcggggactggggtgggggcggtgctgggaacagaggctaggcctgggcccaaggggaaggcagccggggatggagcggacagaccgctggtgctcttgatagattctcgcagcacttgcgtccccagggcagccccaggatgggtgctgggcagggtggtgcccagcctggcaccgcggcttcctgcctggattggctcctggctccagagctagaggctcaggaaatcccacaggggtctgtctgcaagggcacttccttgcccagcggaggggctgtggatgggaggcctgtcaccccggctgtctgtcgggcagcatcaggaatctgggggtgggtgtgtccagcttgacagatgaaccctggcctccttgccctggcagccggcccctgggggaggtggggagcccggtcttgcccgtgtgatccactttgccaagaacgaggtgggcagctaggaggcccatgtgaagactcggcctcaccccaccagtccttcacctggccagtgacttacacagtctgtactggtgccagcctgttccttgacccgtcactcctgcttcctgagccctgctctccctaggccactcaccagccctcccccagagtggagaggaagtaccgtgtgctgtgggttttggggacaggaagcaagcgctagtgggactgagccctgatggtggaggaggggagactgagggggtgctggcatcccctccacttgccagcccctgccccccatgctccagcaagccccctgcctggcagcctgggcagccccctcctgggagtcgctccctgggctgaagactaaggaagggagaacccagaagcatggcttcccagggtggggggaagtgaaaccgggctgagggagggagttagccacttcctctacccaccccaaagcccctgagtagctgctccgggagctgtggtgccctctccttctccctttggctcctctcctgctgccttacagtgcccccagagccggctaggggcatggacttcacctcctggtcctctcttcctcaggtatggcgttgacggtggatgtggccgggccagcgccctggggcttccgtatcacagggggcagggatttccacacgcccatcatggtgactaaggtaaggatggtggctcaaagagatgagaaggtcctgccagaagcgaggtcggccctgttcaccccactctgcacagatggcttgctttttctgttctggagctagggatctgctgctgcctggcgtgctggctgtaagggagccgtggccctttgccacggggatgtggtggccacttcaggaacagaccttgggagtgaaagggagctgggaccaggacagggccggctcttgcctccccagttgctatccccacacttgcaggcagccatttggggtgattactagaacaagagccccggagttcttggcagtct

SEQ ID NO: 14870 - DNA, 1250 bp, Artificial sequence
  DNA replication origin
ttgggtagcagagtgggaagtcccttctccagctgggccacggtctgagcatgccagctcctcatccctacaggtggccgagcggggcaaagccaaggacgctgacctccggcctggagacataatcgtggccatcaacggggaaagcgcggagggcatgctgcatgccgaggcccagagcaagatccgccagagcccctcgcccctgcggctgcagctggaccggtagggcctcccgctctgcagagcctgtggcattccccctcctccaccaccccacgtattgagcagcccttgctcctgcccatgggctagagctcagccctaaagcggccttcttgggccctctccacaccttggtgagaaggtcctgggctctgcttcctgcagcagggtgggctgaggggtgttcccatgcctggttgggtaaaggtgggcgccaggctgggcgtgcagtcacaggctgggcagggcgagctggcaccagccaccttgaagcccgggtttgactggttcccaagagtgtgcagggcacagggcgtgggcatgaagtgggttgaagaggggaaccttctgggaaaggtatgcccgaggctgcatccccaggactcctgcttccaacagggcatggcctttgtttagttcccagctggaagtgaggacttggggggctcattcctcatagaggctgtctgttcctccccatcactgaaggcagatgcccgatcctgggttactcctagggttttgagcctataagccaaggtggggccagggtggggcctggaggccaagctatagggggaacaggtggctccctggggtggggcattgcagtgagtcacagatcgggaatgccaggagatccccgagccaggagagccctctgcacgggcctagaacctgagtcagacacctcttgcatcctggccacccccacattgtcctgctctcttcagccctaccaagcccctccttctccaactgccctgccctgtggtgtggcagaagccggctcccttcatgtcattcaggtccctgggtgtttgcaggagcgggaccccaagaaggagggtagagagcacctcatggcatctgggaatggggcagaaagctacaggaggctgagggtctggcagcggaagggcaggagcctcggactgtctcttcctctggggttctctggagggaccagggctcgggggaggtaggcctgggctgtaagtcaggcctctggttctgcaccaggc

SEQ ID NO: 14871 - DNA, 814 bp, Artificial sequence
  DNA replication origin
aggaggccatggctgcccaggtgggcctggccgcctgcagtcccggggcactggcaacccacaggaacgggaggtgcttctgttcctccagcctgtcctcccccagggagcctcacctgtcggcttccagggcggcctgagtaggacaggcggtcagcagcggggaggcccggggaacatgccagactctggaagctgaaagtgggaaagggacagtgtgtgccagggccacccccagcctgcccagggaggatgctgccccgggctcccaagcagagctcctgagactcagaggagccagcctggagctggcagcgcaggcgaccagggtacccactcacaggcacactcacctgcggctgatggctgcctctccagtgagggagctgctagagggtggtggtgagaaggggctgccggccctcgggctgagggaggttgggctggagtaggaggaccttaaggaggactgactctcagtgtatgtcctcacggagccctgtggagagagtgactgtgtcaggaaaggcagggctgccccgccaaggccgccctgccctcgggcctcactttcatgcaccagtgatcagggtgctgaggctgtcaggggagggcaccagcttacctggaagcgagtcgccagcacttccaaggagctgtccccattggtctgccctggagacgtagcctgagacctgagaaggcaacagagggagggaatgtcacaggggccctgcaccctgcaacccccaaaagaggccaaaactgttcccagatctagttctcaacaccagtaaaagctacagaaaatttg

SEQ ID NO: 14872 - DNA, 1621 bp, Artificial sequence
  DNA replication origin
gaaggggcagggggcccgctggtcggcgagggctgggagcccccgacaccttggctccaagggaaggggcaggggtccgctggtcggcgagggccgggggccccctggtgtcgggcctgggaacagccgggctaggccctcctgggtgtgttggcccaaggctctggccctgactcctccccggctgcctcctcccaacaggccggcctcggccgcgctggcgactcggcggtgctggtgctgccgccttccccgggccctcgttcctccaggcccaggtaccagcaggccccggagggtcgggttggggtcttggaaggctgggaggggcaggagggagacgggcttccccgagagggatggggtcccccaagcccagttggctcctccacctcccagattcctccccctcccccacgctcttctcctgccccccacccccttgcttgcctaagctccggcacgggaccctcattcctggctgcctcccaccctgcagcatggactcggaagggggaagcctcctcctggacgaggactcggaagtcttcaagatgctgcaggaaaatcgcgagggacgggcggccccccgacagtccagctcctttcggctcttgcaggaagccctggaggctgaggagagaggtgagggtctggggggctggggaggggaaggaggttcccttccgtaccccgggccctgactggatgggtcagtgaaccagtgttcttaagtgcctgtgaggtgctcaccccaggactaggcacggagccgagcagagcgcgaagccccagcccctgcccataaggagctgacggtccgggagggtccgggagggtcaccagcgtgctcccacagagtagtgggcagtagccagctgggatgggaaagtgtcattcgagtgataaaagcggtggcagggcctggggctgggcctccagggagggcttcttggaggaagagggatttgacttggcctcttggccttagaaaaaacatcaagacttaaacagcattaagagggtggcaggaagcactgtggaaggtggaggctggcggccagagggctttggggtgtgggagtgagagaatgggggcctgatagcatgaaagggcgccagtggaggccaagcccctgcagtgagggccctcgggaagggaatcaggctgaggagtgccctaacccaggaaagccattaaatactgatgccaggcgagcaagacatacggaggcttgccagagttccgttattcatgtgacagacactgactgtgcccatctgagggaccagatgtgtgcagagtttggggataggtggccatgaccccactcctgcccttggggagctccgttcattggggcagatgggcctggccagctcccatggaagtgagcgctgctgtgggagttactactcccacagcccctgtccttaaggtgctcagcaccaatgccctctagaacagtggggagaaggggagggagatgacaggacaggtaggagagtggccagagaggcttcataattcatctatgactttgaattttaaaatggagagaagctggtttcccaggaaatggtgcccctggccctgggcactggcccgcctggctgtctc

SEQ ID NO: 14873 - DNA, 1482 bp, Artificial sequence
  DNA replication origin
aggggcgaggaagaggagggcgaggggaggggagaggagagggtggggaggggagagggaggggagaggggaggggcgaggagagggtgggcagaggagagggaggggagaggggagaggggaggaaaggagaggggagaggggaggagaggagaggggagagggaaaggggagaggagagggaggggaggggagaggagagggaggggaggggagaggagaggggaggggcgagaggagggaggggaggggcgagaggagggaaggcaagggtgccaggtggggggcgcaggtggccgggtcgccaagaacgaggtcgaaggcacggactgggtggcgcccccaactgtggctgtggccaaaataagggtcccgatcagctgttctgcgaggacccggcccccgcctggggacgccgtctggctcggggcgccggtccgcccggccccgcgggttcacacgcagcgtccgtcttcctgccgcggacttagagccggggctggctggaggaccggacaagagccaggaaggaaatgggagccccacgtgctggcggtgggaagagcgctgaccaggacgcgggcacccggcgctccctagcagtgtggcttgggggccagtctcttggccgctcggaaacctgggcgatgggaggggaaacgatcctgcccaccgggaaatcttttacaactgcagaacgcgcgtgtgtcctcagctagatctgaaccccctcccggtcccctgcctctttctcatcccgggctccctaaagctggggactgggtaggtctcaaggtctggaaagatgcgagccagcggggagccgcctggagactgggccaaagtgtaaatgtccccctgttcccacctcaccctgcctttggcccgtgggattccacccctcagtccccaacctaaaaggagcccaagaagctactgaagatgagagagagcctggtgaccagactggggctggtgtcctctaaagaaggcacctcctccagagggagggggcagggctggaaaaatcccagcaggacccaaatcccccggaggcagataagggagctggaggacgtgcagactagcacctggacctctaggggaggggagaggctggagccagagccactggaaggaagtggctgtttaccgggaggggtaagacagtctgtgcatccccttccctttgctcctttctggaaccagtccccaaacacccactgcaggagcctttatcagagagccacaaactatcagattttaaaactttataaaatggggaaactgaggcccacagccaatctctgcgcaggccagccgaatgacagccaagtgccagaattgctggccatgtctcaacagagtcacattcaagcccaggcccttccctgctagccatgggtcctctgggttgcccccaccctgcccagtcctcctagacagtacccattccgcttctcacaggcagagagagaacca

SEQ ID NO: 14874 - DNA, 936 bp, Artificial sequence
  DNA replication origin
tggaagaagaggcggtgagtgctcactctcaggctgggtttaagagtgggatggacagcctagctcctctggttctccctggagctctctctgggtggggcactccctgcccctaattgatgggttgtgtcataggttctttctgcaccccagttccatttgtgcacggccacctctgcagaggaggtgggcagctacgggggcccttcctggcactatgccccgctgggcagtggggaagccggctgcgtgtgttcctcctcggggcccactctgctcccatctgctggctgagcccagcctggctgcttagggtagggcaggagccctactggctgaaatctcccctatctcacaatgtcccacaggtggggggcctggggcctggagcctgggcctgcctccccgggcagggtcttcgctatctggaacacctgtgcctggtgctggagcagatggcaaggctccagcagctctacctgcagctgcggatccagaggcccccaggggtgagtgagattcgagtgggggagggagaggacagatgggaccctgggaaccatggctgccctcagagcagcttcagccctctagccaggccctgatcacctgtctctcctgtgcataggatcccggcgaggaggagtcgacccgagcccctttaccgtccccgttacacaccccaggcaatcgggggcaggggccatgggagctgctaagccagacagagcacacaggtgaggggccatcgtgtctccctttgtcctgcctgcctggggtcccaccagcaggtcctctgagccgaagcttgatggggtgtcttctggccctggccaacctgactgtctttctgaaggagcaaaggctgcttcacccccaaaggtggaggtgcccagtgccaaccctcccaggctgccagaaaccccagtggagcca

SEQ ID NO: 14875 - DNA, 1049 bp, Artificial sequence
  DNA replication origin
gatgggaccctgggaaccatggctgccctcagagcagcttcagccctctagccaggccctgatcacctgtctctcctgtgcataggatcccggcgaggaggagtcgacccgagcccctttaccgtccccgttacacaccccaggcaatcgggggcaggggccatgggagctgctaagccagacagagcacacaggtgaggggccatcgtgtctccctttgtcctgcctgcctggggtcccaccagcaggtcctctgagccgaagcttgatggggtgtcttctggccctggccaacctgactgtctttctgaaggagcaaaggctgcttcacccccaaaggtggaggtgcccagtgccaaccctcccaggctgccagaaaccccagtggagccaacgtaccacttgccatcctcccagggacacaaggtaggggacaggtatatgtggggcaggtggtgggctggggtggggggaggggaggtgggggatgcatgggcaccctgggggccagcaactctggggaaatgacaggattgattcctgtttggagcaggcgacttgtcctggctgtggcgacagctgtctctgggagcttggtcgggggtctgagtgtggggagggctctgggtgacccctcatcctctgctcagcgggatatctcccactgggacaaggtcaaggtcctgctcaaccggatctgccggagaagccaccaccaccctgagccccctgcccctcctgatggctctgaccccaggtgagccccgtgcccagcccaggttagggcacggagaggagactgataagccaggatgctgagattgtcatgccagttgtcattattgtccccgcaaaacttgagaggcagtctgggaggggctgctagaagaaacagtagttaaaacaccccatttacagataaggaggcagggttctgggtggggttgggggtagttgcttttccaaagccgcacggtgagtcagtgacagctaggaccagaatgtgggaaatctgcctaccctagctcagcaacccctcaccctcaatg

SEQ ID NO: 14876 - DNA, 1256 bp, Artificial sequence
  DNA replication origin
cattgccaggaaaagctgctgacgcctgccctcctctcttgagtcgagggctgaatctttctcctctaagcagtctggtcaggaaccttggtttcttgagaggcccccaagatgccgcagctccagggctcttcctcctcaccagaaatccctgggcttccacaatgtgaactcactcattgtcaggtgtccgtggagtgtttttggcatggtgacctgtctgggcccagcatgttgcagatgtgtatttatgcgcaatggtatgcatatctctgtgtgactgtcagtgttgcaagctggctggatccaaccatctcttctgaaataatgcatccaaagggttgatattctgggggaggtcactgcagaaggatggaactgacctttattccccagtgggcagttactgagctttcctcctcagagccatgctggcagccctgggacagagaacggtgtggctttggctgcctctgcatggaatcttgccccggactcctgaagactgcacaaggaatgaggaagatcagggacaacctgggaactgaataactttcaaagccagtgctcagcttctctgctccgtactagcgtttacaggtcttaattcaaaccagatgcctgtactagtttttagaccccaagtcaacctttctgagccacagcttcccgctgggaataatgatgcctgccctatctacctcacagacttgttatgaggataaagtgagattaaactgcctcaaagtgctttgtaaacctcaggtgaataggaaaggggaaagtaaggctggagtgatgatggggaggtcggaggataagggggggctgggattgctaatggggactaaaatggccagtctcctggcaagattttgagcaggtcatttcattgaggcctcttagatttcatatttgagaattagggcactgattcctgactggctaggcatggtggtcactggcttgagtcagaccaggaatgtctcttagaaatggtcactgataggcatccttctcctccagtcaggaggggctggtttccttatctgttgcagtctcgactgccagagggaggcgagcgtggtaggcagtcgggggtcccttgtgtttggggggcccagctcccgcttcctttgagcccggaaccaatgatccgaagccttctttcctgatgggattctttagcgaggacactaccgaggcgcgacttcctgacgcgcatccgatccgggaaggcgcacttccgctcccca

SEQ ID NO: 14877 - DNA, 897 bp, Artificial sequence
  DNA replication origin
tcctccaagagtgacggggattcagtcatcggccacaatggagagggcccggagctcactgagtttggcctcgttctcccgctcccgctgctcatcggagtggcctggctggtcaagctgatgggacaggtctccaaagatcttgtgcatttccgagtagtacacaacctgggggaggcgacaggggttggcacgtgctggctccagggaaccgtgtgcttcagggggccagaggctcacacttctctgctaccccctgcccttacccatctggagctgtgcagcagcgtgcctttggggatatgcagggcacggaagggctctagctgagactgaaccaaaaggagccggggagcaacagggcctcagtggctggaggtggaggcgcccctgcttcgggctcctggttcccccagcagcaggtgcaggaaggcatgggcctcctagggcgactgtggaatgatgggcaccatgactggagttttactgctttttgtaagctaggggagaacccaaggcttttgtccatggcagaaagacagcatggtaggctgatggctcccaaagccctaagccagctttagaggcacaggcaagaaaggggatgcccgtctagccttctgttccctcccaacttgcatcccacccttgctcatggcccaagctgcgtggccagggggacagctcagaggccaggttcactgccagggtccctctagggaggcaccagaaatggtgtgggaggggacacagggttgagggtggggcaggtggaggaatggggaagcccgtcaattctcccagatggctgaggaccaggggcttttccacagacaataggggccacttctgcctcagtttctacctcatgacccaatgaaagcatgcagtttcctg

SEQ ID NO: 14878 - DNA, 1228 bp, Artificial sequence
  DNA replication origin
gccgcacgtccatggagaggccagggcgcggcccctacgcctccgtggctggctttcccgctgctttcaggctagcagccgggaggcactggaggggaaaagtggggatctgggggcccgatcctcaggcgcaggtggtgaccacgggggccagcgacacggggggcgccgaggatgcagagggtgcaccgcccttctccgccttcttctccttttgcttgaggtggatcttggcgtggcgcttgcgctcgtcgctgcgcgcaaacttgcgcccgcagaactcgcaggcaaagggcttctcgcccgtatgagtgcggatgtgagtggtgaggtggtcgctgcggctgaagctccgcatgcagatccggcactggaagggcttgtggcccgtgtggatgcgcaggtgccgggtcagctcgtccgaacggctgaaacggcggtcgcagccctcggccgggcacgcgtggggccgttcgtggagcggtgtcttgctaggccggttggggtacttgcggggccggatgggcttgagggtgagcggcggctggggcaggctgccaaagcccgggtggatctgcttgtctttgaatgccttgatggtctccagaggggtaatagggggcgggttgacccggatggggtccatgccctggaagggcttgtgctccggaatggagcccatgtcgttggggtggtggtagaggttgtagtcaggaatcatggggaagagattgctgtccaacgccggcttggccgattggtaatcctggggggaataggcgagcccgggattgccctgggggtcgtggaaagacacgggctctgagtagaggtcgccgcagttggagtaggggggtagcgcgggatacatggcctccacgtcaccctgcggtggctgcaccatgctggccgtggacgtctgcgtgctgagcgcccctgaagccgggggcacccccaagatgccggcgctcatgaggctaatgatgttgtcctggcaccagttggaaggggagtcgaaggcgaactttcccaagtaggtcacggtcttgttgccgggggctggctggaaggagccggagtaagagagttccgggttgggcttctcgttggtcagaccgatgtccattacattctctgcggagagcgggggagagaggggaggggtgagtgaagccgatccggctccgggccgcggcgcccaggtccttgcccaggtgcggagggtgcg

SEQ ID NO: 14879 - DNA, 1357 bp, Artificial sequence
  DNA replication origin
agctggtgcggtatgaggctgggtcgtggggggggtggggcgtgtgcggggggtggggtgggggctgggctggggggggatctcggctcaagggggtcggacgcggcctcagtattgatctcacaaacagacacgcgcccgccgcccccccgccccccgatctgccaccgccaccgccaccgccaccgccgccgccgccgccgccgccgccgccgcctctgccgccgctgccgccgctgctaccaccaccaccagccccgccgcttcctagcaagctcactgctgcccaaaagctcccagccagggaactccaccagcctatttatctgagccccgggaaagctccgtgacgtagctgcccatatatggacagacaaagcccagccgaaggggcgcgacgtcacaatggaagctcctcacaatggaacattagaaagcaggaagcgggccgcagccaacgtgcggcgcccgcaccgctcgcggctcttgaaaaaaagagaaggggagaagaaacaagaagaatgcgagaagagagaggaaagaaggatacagctgcatgcaaagcgcaaagcgcgtagcgtggagtcgaaacaccagtaactcattgtgtgtgtttatttgaggtttgcgttaggagagcgcattggggagaggtgggcggtggggtggggttgtttgcaagtggtctccaacaccccagcagttagaaagagagttgaaaacatctggcgaaatccctttgcagcccgggaactgctggggaacccggaaggcgtgcgttgcgcccctgctacctcagcggctccagcgttcgggatcctatccgagattaagagaaagggagtgcttccctttgtggggggaaggaggggtgcgcgcagggttgggggggtgtttcaacttgtcagaattccttggtccaatatcccaagaacttttgtgccaacttcactctgattcgccgcccctgcccctccctgggcccctgacccggcgctgactctaggctgagcgcagtggcgaggagattcggagcaccccagcagttgcgccaaagacaagagccccatccatatggggtcgaggatgtgcggttttcgtggtgaagaggaaagaatgaagttgaagggatagataaacacgtgcactgaatccccagtaaattccctaacggttccaagcagcctctgtggccacaggatggcaggagggcccagcaggcccgggcgcagtcgctgtctactgctgcctgcgaagggcccgccagagttccagaaggaggacgccgaacccacagtctctgagccactgggggcctcccctagtctctgccctccccctcgccttccacagggct

SEQ ID NO: 14880 - DNA, 896 bp, Artificial sequence
  DNA replication origin
ctggctaatttttcaggcccccacccccacccccaccgcctccctgggtgacgctacagcctgtgcggttcctttaaaggctgcgggttccgttcttctttccttttccactggatgccaaaatatgcaaatcttgggaccggaatctgcagccaaatcgagaaggagaaggggcgcggccggcgcgtcaccggatccgctccttgtatggctcttcccggcttggcccgccgccctgcgaccctccccgcagccgcccgggcccctcccgcacctagcccggctcacaccgccgcccacgccccccgaccggccgcgcgccccccctaagggagggagccgggggcgggaggcgcagcctgccctgattctgaccggagcgcgggaccgctgcagcgctctccctccctgagccgcgctggcggaggacagcccggggggcgctgtggctccctagtataggagtggggagcctggcgggagaggcggcgggggtggagagagggggctcgcgggaggcgggaatccctcctttcctaagaactggagaagatggggggaggccgggccctccggtccccagccctccactgagtggaggggaggggaggggagcgaggttgtcatccacctccaccacaacgtgcagctcgggagttcctcccacacgtccccggcccgcgtggccctcccacggcgtgaggcccggggatcctctcttcttccttgtcaacactcccactccccccgagaaatgcacgttcccccaaccccgactccccaggaggggacgagggattcaccgcgcccacgcggccaccgaggagggaatcctcccccgccaagccgatgtgatttggggtcgcacccccatgctcccgccctctcctccccct

SEQ ID NO: 14881 - DNA, 1257 bp, Artificial sequence
  DNA replication origin
ggggggcgcgcggccggtcggggggcgtgggcggcggtgtgagccgggctaggtgcgggaggggcccgggcggctgcggggagggtcgcagggcggcgggccaagccgggaagagccatacaaggagcggatccggtgacgcgccggccgcgccccttctccttctcgatttggctgcagattccggtcccaagatttgcatattttggcatccagtggaaaaggaaagaagaacggaacccgcagcctttaaaggaaccgcacaggctgtagcgtcacccagggaggcggtgggggtgggggtgggggcctgaaaaattagccagcggctctggcctctggccgtagagcccggcagcagggagggccagggaggggcggcaaccagcgagcttcgggcgcgccagtcccagacctggcccctccagagtgcttcctgctgcgcgtgcacccggaggctgcggagggtctccacgggttcctgcctggggccgggagacgctgtggggtccgcggtcctgggcgagctgcaggcccgaaggctgcagtgcccatgtctccccgcgcgaggcagagctcagcctgcgggggtggtgggaaggaagtgagaggcctccgggccgcccagctcaactccggaggaccccaccgtgatgcacccactttccacctgtcaggatctctccccaggaggggctgcagagtgaggagctagaagcccttatcctgttcgactggggcctgagttgggaaaggcagaggcagtggaagcatttgggatccttaagcttccagggccccagaggctgtggagtgcagccactcccaactggaggagacggcctctctcccaacacttttcggcacgctggacttgttgcttccaagtagaagagcatggggcaaggtttgctgacctgcaccagggcttgcttacccgtcagcaagattggataggagtctggggacacgattccttccctctcctttctactagttctttgcataaaacgggagccttcaattcaattaaagtcttcattaaagcttcactgtgaccttgggcaaacgtctgttttttttttcttagcctcagtttccttgtctgtaaattgggataatagtatctaccccttaggaataattaaattagataatcctcatagagtacttgccagtcccttaagcaagcacccgataaactgcaattgttgttaaactattcttccccacccagccttgtgacagatatgccct

SEQ ID NO: 14882 - DNA, 1540 bp, Artificial sequence
  DNA replication origin
gggacagagagctgcattttctgaggtctttcatagacttgagggtccagcgacactcctccctcacctggggaaccccttaggtaaaggctctttggctggatttggtaggtctggagtgtggggaaggggtctgactcactgctggtcccagcagggatgctggcccagttccctcattccccttcaattacctgtaggcagcggcccacccacctgggtgtttgtgaaggccccagatactcaggctcgtggtgcctcagagcaaagggtcagtcgcacatatccttgagtgagggagaggacttaatctcgttacccacctcttcccatttgcacaggaggattcaatcttctgcctgggtgcaaaccccggtcagagtgggaagttttgctttttgatctctgggtgaaatgtaggggtggggatggggggtttggggagggtggggatgggggaattggggagggtggggatgggggaattggggagggtggggatggggggacaggcatcagaagagtccctaacttgaaaggtgaggctcagaaaggtgtcatggagataagggagagtagagggagaaatgagcaaaacagagcacttgagggtgggaaggaagaaatgagaaaaaaagggaaaatgaaaacagagttccaagctctctgacactggcaccaaacaagaaagctccttgctgttttgcacagctgcctgcaggctgccaagtggcaaaggatccaggaaaaggcacaggactggaaagcgctacccagcaatctgtgtattcggcaattaacaaagggtaagtgagcggaaggcactgacagctcccaggctctgaggtccccaggggccgcctaacgccagcctagagaagacccagctctggagactactgcctgctgccagggagaggcttccagtcaattaaccccaatggccttctcttttgccctagggttggggagaggagggatggccactgaggtgggtggaatgaagcccgtgggaagtggaagaaggaggcgcagatctgagccctcctgggagctgagtacttctagactccagggtgtaggatggccaattattttgtggaccagtttccctccagaaatgtccatatcaaagacttggtaggccttttcctggcaccttcatgggcagtggggacagcttggtgaatatcatcttaggagatgccaatgggtgcatggcagatcctggtatcttggcacagtctggcaatgggactcctgggttttgattcctagtttggcttcaaatctggaattggttacttctctggatctccggctgccaaagttgggtgggcactattgaaaggaggctagattttggggccttgagggatgtgtaggagcttttcagttctccagtggataagacaagggaggggaagggcagcttaagctgagaaagctgtctaagccacgtatcaatgtgcggttgtgggagaatgatttgcttctaggagtaaggagtttacccaggatgggaggagcttcacccaga

SEQ ID NO: 14883 - DNA, 973 bp, Artificial sequence
  DNA replication origin
ttcagctccttcaccctgctggggctctgcatcttgaaatgcctctgcttttgctcatggctggttctgaactttgccccagctgcagggtaggaacaccacgtgccccagcctgcacatggcaggggatggggggcggagctcatgtcacaaggcccatggggtgggctccgcagaggctgtagtgttccaggagaggggtgccatgaaagcgcggttagtagcctgcaaagtgttgaagggtaaagctgcctgtgaagcaaagggaaggtgcaggttggaggatggactgagccaggcggtctgcgttgggctggcactgggaaggggccttcacagccacagggagagcaacgctggtgggactggccggggagcctgctgcgctttgctaagagccaggatggaggtttctctttccccagaaaagcctcctgttcacaggcaggcatctgcccggcttcaggaaaacagcagccgcgtgatggcctggaggagggtggtgtggggaggcatagagggggtgccttctggggacaggttccaggggtttatgtcactggggaggtgggtcacaagagggatttggtgagggaagagatgctggggttgggcaggggcaggagattgtagaatggaacctgcctccatgctgccaggaagcccttgggctacagccacgcagccaggcacatggcaggacattgccagacccaccagcagaagcagatttgggaagccagcaatggggggagtcagtgctcaggctgaactgctcctcggaatcacaccagtgtttccaagctgcagcaaatgggcagagagggctggtgtgtgtgtgtgtgtgtgtgtgtgtgtgtgtgtgtgtgtgtgtgtgtgtgtgtgtgtgtgtgtgtgtgtgtctgtgtgtctgtgtatgtaacggaatggaggaggcagagaaagaaagaggccaggagcttttgtctcccac

SEQ ID NO: 14884 - DNA, 930 bp, Artificial sequence
  DNA replication origin
cgggctgcggaggcagcgggcggcgcgcaggggcgccgggagaggggcgaggccgccgccgctacgcgcccgggcccgcggcgaaggcgctgccgcgaagacgcctggcgctgcagtcccaggtaccgctcgcgacctccttttttcattcacaaaaaaaggatagggaaaaaaaaaagaaaagaaaaaaacgggagggtaaaaaaaggaggagaaaaaaatcgcacccaagacgacagccgtgacgggccccgcccactgccgcgcgcagttggtggaaagcgttcggggggcggggagggggcgggcgggggaagaaggggattggacgccccgcagatcccgcctcgcagcaccgctcccgcccaccgcccgcgctcttccgcccctcccgcagcgacgccgcggggagggtctcggctcgcgggtctgggtggcgccggtccctccacctggcgaggcgcaaaggctctccggacgcccacggggttttcccctttccttcgggaggcgggggagaacctctgagaggcatcctagtgcaccctggaagggatgctagttggaggagaacgtgtggttgtaagcccaggcccccaccacttgcccacggggaggcgacggcaggggcagtcgggggggcggggggcgggggccgggtagggacgaataaccggcgtttccatacaagccctctgctgctttgggaattttcgtggcacttgagagccttcctccctccatggcccttaatgagttgtggggtgggtacctgtaccacgttacctgtctcccacctaggccttcttcagcgggtccccacctccatcccatccccctcctgttgcctcctggagttcagtaatagctgctaatctctgaaagaaacaccatgaagtgagtagcctcgaaaatcgtccctaagccttc

SEQ ID NO: 14885 - DNA, 994 bp, Artificial sequence
  DNA replication origin
tcctccaagcagttgtctcccgtcctgctttgggtctggggacctctgcaggtggttcccgttctgctccacagggctcagctcctctctggctgagccacggtggctggtaagaagagctccaccctctgggtcctggttacgtgggccccctggtccctgtaaggtggatggggtgatgcggaagagcagaggggtgaaggcggatggggacaacagcagcagggtcagaagagggtggcagcatctcagaccacagccgaggaggaagatggggatgaggaggaggctgccgaggaagacggggaggatggactgttccagaagagccaacgccgtttgggctgccgcttgaggtggaggtagtcctccttctcacgctccttccgtgcccgctggtaatgatcttcctccttcaggtaccacacaggtggccaccgatgcttctcgaaatactcctggttttctggagcagagagcaggcagcttggttagaaaggaggcagagggacaagaggaacgtgggacaccagccctaccccaccacaaggcctgcagcaggcctccagcccagcccccagcacatccccatgacccacggcacatgagcctccgaggcaagcaaagttcccaaagagcagggctgaaagtcagcactggggaaggcctttccagctgggttcctttccaaagacgggcgatctagacaagggcttcctgtgcgttgggaatgaaacagaggcgaaggataagggagaaggggtaagcgaatgtcagccaggagatactcagcatggttaggggatgagagtggaagtttctggccagagctaaggttccgagggggaatacggagtcaggacacagcaggacacagcagcagaccagaggaacggctggccttattctgcagggtatggggggccatggaagactactgtttcagtggaaggtctggaagcagggagtgatgctattggacctgtgctttaga

SEQ ID NO: 14886 - DNA, 1111 bp, Artificial sequence
  DNA replication origin
ctgtgggagcccttttctgggctggccaaggctggagcccgctccctcagcttgcacggaggtgtggagggagaggcgcgagcgggaaccggggctgcgcgcgcggcacttgcgggccagctggagttccgggtgggcgtgggctcggcgggccctgcactcggagcagccggccggccctgccggccccgggcaatgaggggtttagcacccgggccagcggctgcggagggtgtactgggtcccccagcagtgccggcccactggcgctgcgcttgatttctcgccgggccttagctgccttcccgacgggcagggctcgggaccgccatgcctgagcctctcaccccctccgtgggctcctgtgcagccggagcctccccgacgagcacctccccctgctccagggcgcccagtcccatcgaccacccaagggctgaggagtgcgggcgcacggcgcgggagcacggcgcgggactggcaggcagctccacctgcaaccccggtgcgggatccactgggtgacgacacctgggctcctgagtctggtggggacgtggagaacctttatgtttagctaagggattgtaaatacaccaattggcactgtgtatctagctcaagttttgtaaacacaccaatcagcaccgtgtgtctagctcagggtttgtgaatgcaccaattgacactctgtatctagctagtctggtggggccttggagaacctttgtgtccacactctgtatctagctaatctggtggggaagtggagaacatttgtgtctagctcagggattgtaaaccaccaatcagcgccctgtcaaaacagaccactccgctctaccaatcagcagggtgtgggtggggccagataagagaataaaagcaggctgccagagccagcagtggtaacactgtggaagcttccttctttccctctgcaataaatcttgctactgctcactctttgggtccacactgcctttatgagctgtaacactcaccttgaaggtctgcagcttcactcttgaagccagcgagaccacgagcccaccaggaggaaagaacaactccagacccactgccttaagagctgtaacactcactggga

SEQ ID NO: 14887 - DNA, 1393 bp, Artificial sequence
  DNA replication origin
gtcgatgggactgggcgccctggagcagggggaggtgctcgtcggggaggctccggctgcacaggagcccacggagggggtgagaggctcaggcatggcggtcccgagccctgcccgtcgggaaggcagctaaggcccggcgagaaatcaagcgcagcgccagtgggccggcactgctgggggacccagtacaccctccgcagccgctggcccgggtgctaaacccctcattgcccggggccggcagggccggccggctgctccgagtgcagggcccgccgagcccacgcccacccggaactccagctggcccgcaagtgccgcgcgcgcagccccggttcccgctcgcgcctctccctccacacctccgtgcaagctgagggagcgggctccagccttggccagcccagaaaagggctcccacagtgcagcggtgggctgaagggctcctcaagtgccgccaaagtgggagcccaggcagaggaggcgccgagagcgagcgagggctgttgaggactgccagcaagctgtcacctctcagtactacggattttcaagaatacaggagtttttggtactgggagtagatgactggggggatccaggcaagactacaggggagggcggcagagaagacttaattcccagctgtgtacttggaaaaccgtgctcagctggggccagtccctgccaaccgccatgcctgttaatggaaataaggtctccatcctcaggctgtcagggtgacttcagatgagcctggagctgagctcagttccggaccccaggtcctggctctgtcaatgccggactggtccaatctctatgccaggtccttccaaccccatccctctctttatcaaagtaggaatcaagaagatccgaaggctcaggctctcaggttgttagagagtactgaaattggaggctgtggatggctgggccctgccgtgctcccggtccagctctgactctggtatggccccagctccttcctgtaaaatgaggggataaaaatcttcagcagccctgtgtaaacttctgcaggctctgttaacaggtctaggaggacaaattgcagggctggtgtcagtcactctagactctggatccccagggcacatgtcctccactcagcagaggctgcaccttctcctacctgtacctcagtaccagctccctgagcttgaggcagaaatttctgaagactggggtggagcgccatgcggaggggccgtagaggaacagacgagccagaattcaaatgaggacggtgatggcactgcagggccacagcctggtttacctgccactcttccaattgtctttctgttgggcacccagccggtgccccagtttgaagagtgagcaggaaaggtctcaatccgtgtgg

SEQ ID NO: 14888 - DNA, 882 bp, Artificial sequence
  DNA replication origin
ccgaatgtctctcctgaatgacaagtggctctagtaaatcattttcctttgggcccctacacactctgattacctcctcccattcctgctccagggtacccagttcggatggcctctctggcccctgccgcgctcctgcctcctgccccagcaggtaccacggtcctcggcccatctccaaccaaggagcagctgcggttccccgaggtgcccgggctggccggtggtatcgtggacgcaagcctgaccagcctttgtatgtgccccgggtgctgcgcaggcaggaagaatgggggctgacctctacctcggtgctcaagagagaggccccagctggcagggacccagaagagcctggagatgttggtgctggagaccccaactctgatcagggactccctgtgctgatgactcagggaacagaggacctaaagggcccaggacaaaggtgtgagaatgagccactgctggaccctgttggccctgagcctctggggcctgagagtcagtcagggaagggagacatggtggagatggccacacggtttgggtccaccctgcagctagacctggaaaaggggaaggagagtctgttggagaagaggctggtggcagaggaggaagaggacgaagaggaggtggaagaggatggccccagcagctgctcggaggacgattacagtgagctgctgcaggaggtgatgaggctcttgagcccgaaaagggagggcggaggtgaggtgggtgtggccgtgggtggatggggaccaagggttatggtgtggagagcaggggatgtgcaaggggaggtagggctgggtgttgggtgacagggattccttagggaactcaggagatgaggtgtggatttgggtcccagcc

SEQ ID NO: 14889 - DNA, 1741 bp, Artificial sequence
  DNA replication origin
gaggggtttgccatcctcctctagttaaaagtaagggggaaaagagtaaacgcgcgactccagcgcgcggctacctacgcttggtgcttgctttctccagccatcggagaccagagccgccccctctgctcgagaaaggggctcagcggcggcggaagcggagggggaccaccgtggagagcgcggtcccagcccggccactgcggatccctgaaaccaagtaagagcgcttcccgcgccaccccctccccgaagcggttcgcgagaaagcgggagcgtccctatggggtctccaggcttcgtcctgcgcggggctgcctctcgacagtgcctgggggttcccaaagacttcttgcggggagcgatgcgaggacgtgcaggctaacgggtcctcctgccgccccgggcggccccgcccaaccccacctcgtacgggccgggcgcggcgcggctgctggcgcgcccggggagcgaggcgctgggtccctggatcgtcccgagcgcccgtaatcaggcgggacagagcccgtcaagtctcggtgtgtgctgggcgtcttggagagtgcagcgtggctccagggacagcgtctccggaattctggctttgaggagtggggcacgcgggggacgggtcgggagacagtgactgccctcggggctgtggttttggggatgtagagcgtgctgggctgggacggagtgggggcggggaccccgggggctgcgcccgggagctgtagcgtccactgcttgaacccggttcaacccccagcctgctcgaaaggctgttgggagcgcgggagcgccgtgagtcctgcgggagcagaggcgctctcggcacgccaggtatgcactcccaagtcgccctgcctctccggggaccagggaccctctcccgccttcatcacctagaagccctggagttggaaagaacgggcacgagcgaacccacggctacagctgatcccaatcttgagccgttggtccggtggtctgaagtgcctacaacttttacgcaggcgctttgcccaccgcgccccttctcaccagcccaaatttggaagccctctgggtgtggctgcctgctcgaggtgtcccaggaatcagcgctggaatagagatgattgggagaacaagcgaggttccctcctctccgtgcccgagctaagaccatcaaaaaacagccggagtgcggggcggagcggggcgagggtgtgaggaagagaacaccgcagaacacggcgagggagggggctgaactactcaatatggttaggaaaccccaagtcctgatgaggggagagatgtgcatgacagaaacatgctccaaattagtttcgtccctaagatcttgaaactgcagagatctcaaaaacaatactttttttttttttctcccagaggaagaaaaacgctgaggctcacggtcactgagttagtcaatgtggggactgaaacccatacctcttactccaggcccctcccctacaccactgctagcctgtccgtcctggaaccccaaaacaacatttgtcatctttggtggaatgaattagttattgatggtgtatcatgtacttaatggtcagggttggggtttagggtggaagaggaagagttcatttccctggtcagttcccagataagtgactgactcactggatcctaacttgactaaatttttaatctttctcctcacctttgtcccgttcctcttcctggtccctagtatctgccctgg

SEQ ID NO: 14890 - DNA, 1498 bp, Artificial sequence
  DNA replication origin
gagaggcagccccgcgcaggacgaagcctggagaccccatagggacgctcccgctttctcgcgaaccgcttcggggagggggtggcgcgggaagcgctcttacttggtttcagggatccgcagtggccgggctgggaccgcgctctccacggtggtccccctccgcttccgccgccgctgagcccctttctcgagcagagggggcggctctggtctccgatggctggagaaagcaagcaccaagcgtaggtagccgcgcgctggagtcgcgcgtttactcttttcccccttacttttaactagaggaggatggcaaacccctccccggacccacccccttccccgaaggcggccgccgcagcaggcccggcctccggcctcttttgttgtaattcgagagcggccactcccagggccagagggagctccgcgggggaggccaaggcctgcggggcagcccttcccaggctcctcgcgcccgggtttccggagcctgagatgccgggaagggggcctttcctcgggagattcctctaccctttcctccctgcagccgtcccagaatttaacccttcgatgtccttatccaccagccttagggcccgtgccttgtccacctcctatcccgaaaaccctggccctccttggcacataatacacgctcaattaaagctgccgaatgaaagtgttcagaaacttgcacccatctcgcctgggtttcacctcccttttcctgtagggggaaaaccgatcctgaaccagtaaataaacagccccctttcggccagcagatcacgtctatggccttggccaagcctcttctccgaggactagttttcttctttgtaaattcaacgctttggattccgtgacctctggggtccttcctggaatggtagggctgggattaacaagccctgtgcttggggactgaacaggacacagctaatgcgtggccattgtgcagaaggacctcctgtgcctggctctgaggctccgggtgggggatgggcatgctgggagagccctctgcacagagagggctccttaagcaagagcagggctttgccagtcccaaggaggcagcgagctgcaaaacaagggacccctgtgcagaagtagactgtcacctgaaaggcggctccttcctcagtcctctcttactccactccctgaggagacaaacccctcccaaatctcacctccagcccaggcttctctcctaagccatggatatttaaatccattggccccgaaagactttcacctggacattcccatggccgtagctaacctggcaagccccaaacttggcactgcaactcacggtccaccttgactcctgtgagctctcccaggcagatatggggtcttctccgttgcctcctccttaccctccccactgatcagtccctgactctggtgggcagtagagggcaagggtcagaggaagggggtgtagttatcaaaggcaggaggagggatctttgtggtggtg

SEQ ID NO: 14891 - DNA, 1444 bp, Artificial sequence
  DNA replication origin
cgccaggtgtcccctgccaggggctgggggagcgcgccggccgccagggctcacaggggttggtcccggggcgctcggatgtggccgcgcggcaggggaggcgggaaccggtccgcggggctaagcaggcggctgtgggggcctggggcagagaggctcgtccgcggcccgctcgccgcgccgccggcccccgcactccaacccactcgccggccccttcggccgcccgccctcccctcacccacgctcggaaggcaacctcacctgcttggccggccggggaccccgggagcgggggaccaccagtgggcagcatcacggccagccggcttcctggaggccgcgctcctttcctggagccgcacccccgcccggcccccgccggcaacacgtcaccgcctgcgcccggagcgcgcccgctggcggcgggagcgcgcacgccgaggggcgcgttgagcgctggggggcggagcctgatgcgggatgattggcgtccgagcgctgggctgttccgtggacccgcgcggccacgccagtgtgctgtgcacgggaaatgtggacgtgggagcacggaggcacccagtactgtggcgtggtgctcgtctggtcgtcagcgagcctcagcgtacttaggacaccgcagtttatctttccttagcgctcctaacggttatggaaaatagcgcttgaaaacctggtaaggactaggcattgttgctcaactcttgacatttacacctttgccggtaactctccctgtttcacagatggggaaacggaggctcacacttattcagtctctcttgagatccacctgattcgtgagaggtagagccaggatttcattcttgcccgtcgatggcatatgttagtgcctatgttgggggaggcagactgccccagccctccccaacacacgcaatggttatgagaagaaataaagcgaagggtgttcctgagattgaccccatgacctacacttagtacaaggctaagctctcttagctctctggcttagcaataaactgctttgaagacacagaactttgcacttgagagccggaagagaccttgggaatcccgggttccatcctttcttccaccttgtatacaggtgaatgcactgtggcccagagataggaagtgaccagcaatccagccactttaaaagatttttaaaaacaagagccctagaaacgtctactccattccatttatcaagtaaaacaagcatagacagaactggcagttctacatcttaacacagaatccttcttggtccagcacccgcctgggtcacctcctcttcctggattcagctactgttaacggaagaaaccatgaagcctcagaaggttagagccaaagggactctactgtgtagccccaatcaccttcttttacagttaagagcctggaacccagagaggttgagtgacttggc

SEQ ID NO: 14892 - DNA, 1630 bp, Artificial sequence
  DNA replication origin
gtttcgggacgctgccccgaggctgccggcgcgcgggatgcaaatgcgcgcgcgcgctccttctccgctcgttgcgtccccgaagtctccccgcgcctcaccttcaccgagtccaccgggtacatgaccgagtgctccaggatcccggccatcgctcctgctgtcatgtgggtggacacggaggcgctagtcggcaggttctcgtagtcctccgacccggtggcgtccttgccgccgccgccatctcggctgtccccatccatcctccgcgccaccgcctggctgcccacgctcccgctgcgcagctccatccgccagctcggcggggcgcaggaggctgcaggaggtgggcagggagggggaggggcgcaaaacttcacttcttaaagtgggagccacctccccggggccgcggcgcctgacgccatggcgggctggggtggagcgcagcggccagagacaccaatcgccgggaaccaagaggccggcggccgccgcgccattggtgtgcgggacagtggggacccgcctccctgtgtgacgtcaccgtcccgtgcacatttccaagcaaccggacgggggcgagaggagacgtggggtggcccggaaagttgtactatcttgaggatgggctggtccgcgaggggcaggggaggtcattggggaggggccgcagtggggtatgcccagagctggaggcatgggtgacagtgtctcggggaaaatccgtccccgtggcgggtgggtttgcaaacagaatcgctcagtgagctttggcattcctaaggcctgaattcaaacctcaggggcccgttctagactgctttgttggagagacccccattcattcgaaattgtttctctcaacctaaatacataatgcagagctaaatgtgttcctcttgttctcaccgagagaccgaacccaccctgccctggaccgagcaaggctataaggagtgaccaggagggagcccctctgagtaggcacctccaggaaattttctttgggtttgataggcccataaggtctgtagaggcctgatctcacagttaggagtgtgaactggctgagagtaaaatcttacagccttgcccctgcctgtcttaagactgtggtcacctagttcttaaagtcgtcctaagctggcctcttcaataaagtgtaacccaggctgttttaatattgttttgctccagtctggggaaaaagggagaaatcagaaagtaggggagggacctgtctgcctctggaagtgtccgtctaaattgcgtgttccagggcttaagatgacttgggctgatcaacttgtaggcaccagggcctccctgccttatctagacaaggcttctcgtcaggaaagctggatcctgagatatgaaagggtggggaagaccctgaagaggctgagcctactctctgccctcaccgtgatcagcatcccaagcagctcttagggatttgagatacagtaatgtgagcatgggtagaggtcaatagaggcgtcaggaccaagagcactgtttgcctagttttggtagctgcagatagtagctggcaagctgagtgctaaggatgtgataagtaaaaacaggctctgtgtttttacttagccatctctgtaatggc

SEQ ID NO: 14893 - DNA, 1155 bp, Artificial sequence
  DNA replication origin
gagcactcggtcatgtacccggtggactcggtgaaggtgaggcgcggggagacttcggggacgcaacgagcggagaaggagcgcgcgcgcgcatttgcatcccgcgcgccggcagcctcggggcagcgtcccgaaaccgagctctccccaggaccgcggctggccggggtcgccccaggagcagctgcgcgcagcctgggcgccgcgccttccgccgaccccgcgagggtgcccggtcctcgccccgcaccgcccgctgctccagccgcgtgcccggccccggctgctggcggcgctgaggcgggggaggcggagtggcgagcaccgctggcttcggcggcgactgggctcccgggggacgcgatcgctgaagctctgcacagtcttaccacgctggccgttcgggctggctggggccgcccacacgtgcgcggtttccgagggagctccccgcaggggaagccctcaccacgctggagctgagaaacgtgtggccctggcccggccgcgcgccctcgggacttggtgtgtggctgctgctccccgggttatttcgggaacttggggccggcaagtcttctctcgactagtggcagctctttaccggttcgacagcggcccgtgggatcccctttctgagggttcctgcacttcttcccccgactttgggtcgccgagccgccgggaggcaatgacgtttgccttctccttttgcttgcggggaggtgggtgggcttgtgccttacagcccttgctgtggattgtgtgagaggcactcagtttcctttaaaccctgtctgtcacttgccccggtagttttaactgcatttctgtaaagaggcagcgttactaggtgcgttttgcctggtagactgagacctgccctctgtcagcctgcccagaacaccccagggccaggatagagtagtgcaggaagtaatgccagtattgactgttacacgttgcacttttataggcataactcgcctaattcatgcaacagccctgggggttaacagatgaagaaactgaggcgcagagaggcgaaccgattaccttgcccaggctcctacaccacctcctatcctctggctgcagctgcagtgtgctttggaggattcggaggcctctctaggtggcaattattttgcaagg

SEQ ID NO: 14894 - DNA, 1256 bp, Artificial sequence
  DNA replication origin
cactgtctctgttgtttcattgtctcaccagtgaagaatctgagatttccacgcaaatctccaatagctttggtgtgcacacctcttgctccctgaccttggccccttgtgcttttcatagagacaccctggggaaggcagtttttgatcataatggttgtcacctgagctggcattaccaaaaagctgggctccagctgcccacgcagtacaggtatgggtagtaaggatagctgttatacacggagaccagggaggcccgggagaaggcctcctctttcagggccggcaaagaggagtgcttctccaagtctcccagctccgaggagagctgctttcgcttagtcttatagcgtctgttctggaaccatatcttcacttgggtctccgtgagcttgaggttcttggccaggtgggcccgttcaggggccgacaggtacttctgatggctgaacttcctctccaactcgatcacctgagtgtgggagaaggcagctcgggagcgcttctgcggctgcttaggggtttggggaagccttggaagggcgcctgaagtgttttcagagtccaacagataagaccccaagtgcctttctggaaaggagagtggggaaggagggatgggaagacaaaagttacatgttagcagggaagagaacagaattcaatccacccttatctctttagtgagtgaacaaacagcccactgtcatcgtggatacatttcacttttttcacatgactaaggagctctccggagtgaagagtgagtaaatatgtttattacgcattcatttgctaagaatcatcaagaacccaaagttagagacgtttcgtggttgaactttctccctactgtctagtagaattatatggggattctggatctgtgtgctgaggagaggcgggagagggaggcagggaaaatgccgtggaacaagatacccgggaaggccagaccaaaagacatccggtgttaggatccaggtgggcaagagagggcttgtgccactggagacgcagaggcaggctcattctgggctttaattccctcttcgctaaacgaggcgttcggtcgcctcatcagaagtgacaggaaagaaaataagtggactctctctcctggacaccggagggaaccccgaatataccgctttactgcccacgggattgggaagcacacggaggctttgctggtcaacccctgctttgtcactgttaataagttattattagttctcataactaccgggggg

SEQ ID NO: 14895 - DNA, 1198 bp, Artificial sequence
  DNA replication origin
aaactatatttccctggacttttcatcccaacagatttcaaattctcctttccaaggagtatttgaccttcacatttcaggccctgtatctcttcatttcctataccaccatatgttagaaaactcaaactgggctacaagtatatatttctgttaactgactttaatgaattttggttgttttcaaaatctgcgatctgtccattgtgccaaccctgcattgcagggaagtcttagcctgtgattccagcttcgctcctgcaaagatagtcactacaggcaggtttaaattgtatttactcggagagaagagggggaagggaaccccctgccccctgccaacctgacaggccaggctgggtgacaagccccccgggtggctgcacctcccactcgccgacctgggcgctgtccttggtgctgccggcgccatagcgagcacaagcgccttaccttctgcccctgcggaagctgcggacgtcccccaaacgttaaaaacgccatatcccactttttatacaaataactaccccggcctgttctctttgtccccttcccgaagccttcaggcagaccgttccgcaaagtctttttttttgttttgttttgtcttctagacccagctcctcggcgctcatctccagctgctttaagacaaggggtgggggaaggggagggaggcaagaaaagatgagggtgggggaggggaaaagagggaatgcaaggggaaggagggaggagacggggagaaggaaagattggaagaaaaggatctccgaggaaggggctgagagaagggcagggtgaactggactaaaggccagagtaggaaggagaagaggggccaaaaaagaaggggatgaaattaagcacagaagatgggtaaagaaaaaagtatcagggaaagggcaaaataagagaaagccttgaggataagagggtagaaggctaaagaacaaggggaccacggggtcggggaagcgctgcctgaacggcgggacagtgacaaagaaagggcgctggcgatattcgcaccaagggtgcgaaacgcaatcgggaggtgagaaatggaaagaaggcgaatgcccggctacaagtagcctgggactgaaaggggacctgggggaggggctgggcccagggcagaaaagtccaggttcccatgcggcctgggcccacgtggagcgggcgctgaatc

SEQ ID NO: 14896 - DNA, 1120 bp, Artificial sequence
  DNA replication origin
agtggacttagaacacgtctcaacaggacacaaacatgcatggggaaactccatggctgacctggccattcccatctgagccctttgggctgaagccaattttgagagctcttccgatcactgccggaaaagtagagaatacacgcgtttctgcataagctatcctaaagttgctgatttatccactaccgaattcatccctcctgctttaaacgtgcaagcgtgcaaaattagaactggaaaagatgcacgtttctgaaaaaggtcaagacccttagcagctggggcaggtgggtgggggcggagtgtggaggatgagatgggcgaggacgctgatccgcaaataccctaggtctgcggcgcgcgtgctctagcgagcggccaccagggagcgcggcggagagggcgcctgggcacgagcccaagtgtcgggggcgcgcggcgctggcgctggcgcaggctggccgcgcagccgcggttcctacctggtagctgctgaggtcgtggttgtggcgctcctcgatgtcgctgagctgccgctccagggactccttggtgccgcgcaccgactctagctcgatgctcttggactgcagctggcgccggtactcggcgatctcttccttggcggagcggatggcctccttgttctgctcggccgcctcggtgagcttggcgtagcggcatttgaaccactcttcggcctggtgcatattctggtctgagtggctttcgagctgggagcggatttccttcagcgccgtcgagatgtctgtcttcaggtagtctttgcgctccaccgtgatgtgcgatgcctggatctgggccagaaggtcggccacctcctcctcgtggttgctccgcaggaaggccacctcatcctgcagcgactgcaccttcttgtccagctccaccttgaccagcgacgcctcctcgatgtctttgcgcagcgcgcggatggccgcctcagtgtcgtcgcgcaaccgcgcctcctcctcaaagcgctccttgagccggtggatgtcttcctccaggtggtccgagtccagctgcacctgagccttctcgtggttcaccatctccagggtggcgcgcagctcgcggatctcctggtcgtacg

SEQ ID NO: 14897 - DNA, 1041 bp, Artificial sequence
  DNA replication origin
acaaggaggccatccgctccgccaaggaagagatcgccgagtaccggcgccagctgcagtccaagagcatcgagctagagtcggtgcgcggcaccaaggagtccctggagcggcagctcagcgacatcgaggagcgccacaaccacgacctcagcagctaccaggtaggaaccgcggctgcgcggccagcctgcgccagcgccagcgccgcgcgcccccgacacttgggctcgtgcccaggcgccctctccgccgcgctccctggtggccgctcgctagagcacgcgcgccgcagacctagggtatttgcggatcagcgtcctcgcccatctcatcctccacactccgcccccacccacctgccccagctgctaagggtcttgacctttttcagaaacgtgcatcttttccagttctaattttgcacgcttgcacgtttaaagcaggagggatgaattcggtagtggataaatcagcaactttaggatagcttatgcagaaacgcgtgtattctctacttttccggcagtgatcggaagagctctcaaaattggcttcagcccaaagggctcagatgggaatggccaggtcagccatggagtttccccatgcatgtttgtgtcctgttgagacgtgttctaagtccactggtctccgtgcgtgatgtgcccaggaagtgtcctattgtcttactgatcttgtatgttcatttgagaatcgcttagatttaaaagaaaaagggggtgggacggggggctgggagtcaggtgtcagcgaggtttgcagaagtggagggagacgggaggaggccagggggaaggggtagcaagtggtttgcgaaggaagttgctgtttgcaaggatgagtctggggagattctctgtgtctgtttcaggacaccatccagcagctggaaaatgagcttcggggcacaaagtgggaaatggctcgtcatttgcgcgaataccaggacctcctcaacgtcaagatggctctggatatagaaatcgctgcgtacaggtacgatgcttactacgtgcg

SEQ ID NO: 14898 - DNA, 872 bp, Artificial sequence
  DNA replication origin
gccagaaacccagtggccagaggactgagtgggcagcgcgggggtcgggaggtgggcatcgtggtgtgggggtgtcctcttagggaacttctgccgcctgccctactcggggagcctagaggtgtctcctccagagccggcccgttctgggaccccagactccaacatggggctgggaagggggcatccgcagtcattctggacggtgcccctcctcatcgaggcctggccccgagagccacgccccagccgctctggagtctgagtttaacgtgaagaagctggactccgagggtgcggcgaggctgcggtggggatggggaagacaggggaaggagaaggggagggaggtgggcagaaaggagggaggaggaggagggaggaggggtaaggaggaagaaggagggggtaggaggttggggaggaaggaggaggggctaggaggctggggaggaaggaagagggggagggcggcccagcaccaggccaccgggaggcggggcggggcctcctacggattcctgggtggagtgtggacaagcggcctttgcatccttcgccgctggttggaaatgcagttttggaccccctcctcccccgccagggctcccacccaaccggaatctgcattttaaccggacacccaggcgattcctgtgcacattaagtgtgagacgacctggtaaacataacgcttatctgcagctcactcttacactggggagtggagaagggaggcagaggaggcagcaggttgctttttgtaacagaagagaggcgagaagaggagcagcttctccctttcccttataagctaagggcagggctggcgcggtggttaacacgtgtaatcccagagcgttgggaggcga

SEQ ID NO: 14899 - DNA, 1027 bp, Artificial sequence
  DNA replication origin
ccagacgcttccgccatgttccgccaaacttcgctggactccgcgggccgcctcctcgccgcgccgcccgcgcccgtgcccgtgcccgcgccgcccgcggtcacctgctgggccgggctgcagcgcagcagtgcgcgcccctcctggcgccgccccagtccctcccgccggccgcaccctccgcccgccggggccgcctccgagccgcgggcgcccggcctctcccgcccgcgccgctctctgcgctctgccgggcgggggccgactgcggctccgcctcgcgcgcttccctggagcggcttcctgggccggcgggactttgacgctggcggcactttgcctttctcccgccctccccacccggctgataccccggaggctgggtcccgggggtccggctcccgacagagggctgcgctggaggagccgggcacgcccaggccgggcggccggtgggcgagggatgcgggctgcgctcccacggcgcgcgccggacacttggggagcggaaacggatcagcgagagcggcttcttgctcggggcacctccggtgcctggcactaagcgggcgcgcaataaatatttgttgaatgaatgagcagttgacttctgccttcaccccctggagcttgaacccgcgccgcgagcgggagaagccggactcagggcagactgaatctcccggggccaccgcttagagcctggaaagcagaacttttatcaccggagagctggtgcaagggaggtgggctcctcagaagtatcagaccgtttgctaggggatcctctgcagggaaattgtttagaaagccctaatttggaagtcctgtatccccaaactccggggaccccccaaccttaagctgaagaaacttagaccctcatgcccagacctccctttcccaaccagccagcagcccagagagcattcccgtggagaaagggccaaggcgcatccccgtcttttctccgtcaacgactgccttttcttgacgaagatcccaaaggggctgcgcatttgaaccg

SEQ ID NO: 14900 - DNA, 1236 bp, Artificial sequence
  DNA replication origin
gtcgccgccgccgcggggcgaggtcgccgccatggcccgctggatcccgaccaagaggcagaagtacggggttggtgagtgcgcgccccaccttgtcccggcccgacccacgcggccaagttcgcggacagcggccctgccaggtttgcgcagagcccggcggaggaccctggccgggggctcggcccggctgcgcagctctgggagccggggacggtaggagtcctctccagggagcgccgatggggaagtcgcccagggtttggggactccgagtgcttccaagtgcagctgagcttcgggaccgtaatcccgctcttgcatcccaatctccggcacttcacaccagggaaatgtcaacgcgaggggggcgcgcctgctgctcttttggggccgcagctctgtggctcgccccggtgcgcccagcgtgggtttcacctgggagtaggtgaccagcccgggtcggcacatggactggtgctcattgtcccagtgctttctgccccccgctttcgtaggttcttctcagacgccccttaagtgaggagttgagggtggaaagccgccctgccccctttcctccagagactgggatcttgatgacagttgtgagctggatggaaactagagtcgtggcgtggaagtgatggaagggacaggaagttgtggcacgggaagggggtggctggcccctggggctgtttgtgcgcactcatcccctaacggagcctgtctggagagggtgtaaggctgccttccggatcctgagtttcatcctggagacgagaagaggacattttattaaggaaactgtgccagaccccgtgctgggcacttggcattcagaacagcggtgctggagagccccgggttgtgcgcaggggttgctggtggtggtgctttggctccgaaacaatagatgtgcggggattttgacccaggtggaaagtcaggctcctttggctttttatcaaggattgaagttattgagggcctgtgggaagacttctgccctgaacggggtgattacaatggcagttagacctggggtgattccctacaataaacacggctgagtgtgttgcgaattttatcacttcctctcagatccattcatttggcctgtttgtaatttagtctttgactttactcccttactgaggtcctgtttttcctcacctcactggttaatgaagtgcagtctcaattaagagctactcaacgtgtctaggggct

SEQ ID NO: 14901 - DNA, 1652 bp, Artificial sequence
  DNA replication origin
atagaacattcaggatgcagtaaggagaagagaaaatgagcaaagaaagaacagaaacatgaaaaccaggtaggaagctacggcagttgtccagggaagaggtcatcgtagctccaatttgggtagtgacaatgcagatggagagaagggagagagagacttgagagtcctttcaaaggtaatgctgacaggtcttatctactaatttatgtgagttataaaggaaaaggagatatcaagggtgactttctggcttcttgcttgtgcagtggatggataggtgggtggatggatgggtgggtgggtggagggagggatggatgggtggatagaggttgggtacgtggatggatggatggatggatggatagatacatggatggatagaggttggataggtggacggttagatagataggtggacggttggatgggtaggtggatgggtaggtggatgggtgggtggatggatgatagatgggtgggtgggtgggtggatggatggatggatgaatggatggaggtgctattttcttagataaaacacaagagaggtgcctcaggcctagatgcacagaattatgaggtccaaatggggatgctgagtaagaattagccaattaaagcaaggaggggctgagtgttgtggctcatgcctgtaatctcagcactttgggaggcagaggcaagaggactgcttgagcccaggagttcaagattagcctgggcaacataatgaaacttgatctctacaaaaaaaaaaaaaaaattaaattagccagatgtggtggctcatgcttgtagtcctggctacctgggaggctgaggtgggaggactgcttgagcctcggagatcgaggcttacagtgagctatcatcacacaactatactccagcctgcgctacagagcaagaccttgcctcaaaaaaaaaaaaaaaaaaaagaggggagtcctgaggcaggaaatagctggctatagggtcctagaattcattaaagaggtcttggtcctggagctacagatttgaaggtgacaggcagatgaaagccaagtgagtggatgatacccctagggagaaaacacaggtgagacagaaagagggctgttctgggcagaactgtgtcctccccaaattcatatgctgaagccacaacccctagtaacgcagaatatgactgtatttggagatagggcctttaaaagagtaagtaaggtaaaatgaggtcatataggtgggccctaatccaatatgactggtgtcctcatacaaagagattaagacacagacatgcacagagggacaaccaagtgaagacgaagggagaagatggccatctgcaagccaaggagacaggcctcacaagaagccatccctgctgtcaccttggtgttgaatttccagtccctgtcctttgttgtgagaaaataaacgttgttgacgccacccagtccgtggtattttgctatggcagcccaagcacactcacacagggtctcaggaccaaataacaaggaacttcaacatttagaggtgaagcagaatatgagaaggtggcaaaggggttctagcagaagccccagggaaatggagaagcagagaaaagtgaggggtcaccaatgagaagggaaggaaatatttcaacaatgtca

SEQ ID NO: 14902 - DNA, 1019 bp, Artificial sequence
  DNA replication origin
gaggaggaccaggtgggagggtggcggctcactcaggacccagcgggggcagcgcgatgaggcgggtgaccctgttcctgaacggcagccccaagaacggaaaggtaacgggggcgtgagggggcgcggcgggccgggggtcggggcgagggcggacggtgcggaaccggctggcggggcagcggtgaagttgggtagaggggctgggaggtgggcgtgcgcgggctgggggcgctcggggacagcacagggtccccgcggcctcctcccgaccctcaggacccccgtgcccgagcctgcccttcagtgcctcagctgcctgggggccggcgcggttcggcccgggggctccgggtctcccggatgcttggtgcggggggcgcggggacgggggcgcggggagggccgcggtcacctgggcgcccgggcggtcgcgcctcttcccgcctctccccgagaccccgctcccgcctgcgggaggaggcgcgccggctccggtgctgagtaatgatctgctcggaaagtggcggcgagcaccagagcctgtggagatgggtcagggagacagaagtaaactgcccgtggataaacaaaatctcccatccgaggtcgcagacaggatttttaaaatgggggcattttcttgttgatttttgccctcctctctgagatgcctcaagcccccacgccccgccgccgccaaacttctctgtactctttttattattttgccttattttgattccctagaggacgggtacagcagacccaaaagggatcgatttgacagtcgcctttgctgtgttaggcctttgcggagagtgtggtgctcagtgttcttccagcgctggagcaagccaaaacgaattctcttccttcccagccttttgccccacccatgaaagttgttctgctcctttgggaaattttcactgttcgaggcagacatttattgcgttgctaaatgatacctagaagtaactcagcctttacgagtctaaggtaaaggtaaatgggtc

SEQ ID NO: 14903 - DNA, 3010 bp, Artificial sequence
  DNA replication origin
tgtacccgtcctctagggaatcaaaataaggcaaaataataaaaagagtacagagaagtttggcggcggcggggcgtgggggcttgaggcatctcagagaggagggcaaaaatcaacaagaaaatgcccccattttaaaaatcctgtctgcgacctcggatgggagattttgtttatccacgggcagtttacttctgtctccctgacccatctccacaggctctggtgctcgccgccactttccgagcagatcattactcagcaccggagccggcgcgcctcctcccgcaggcgggagcggggtctcggggagaggcgggaagaggcgcgaccgcccgggcgcccaggtgaccgcggccctccccgcgcccccgtccccgcgccccccgcaccaagcatccgggagacccggagcccccgggccgaaccgcgccggcccccaggcagctgaggcactgaagggcaggctcgggcacgggggtcctgagggtcgggaggaggccgcggggaccctgtgctgtccccgagcgcccccagcccgcgcacgcccacctcccagcccctctacccaacttcaccgctgccccgccagccggttccgcaccgtccgccctcgccccgacccccggcccgccgcgccccctcacgcccccgttacctttccgttcttggggctgccgttcaggaacagggtcacccgcctcatcgcgctgcccccgctgggtcctgagtgagccgccaccctcccacctggtcctcctcccacctttttctcctcccgcccttcccctccctccacccactcggattcgcctcccttcgccaccttcctgcccttggggacacaccacacgcacgcactctgtcccacacccaaggttcggccggtcctccttcccaccccgcccctaggctcctcagcctgcctggggcccttcccccacctctccgagactgacactctgccgtaccaaccaacccgcgtcaccggacagagtccagccaatcagcacccagtatcgggcgggctctggctaacctagccgggacggagggagggaagagacgctgaaggctagtagacgggaaggggcatcagccaatcagagaggctcctggagccggacggcggcttccagcgttactgagcaggcgcaccctctagtttaggtagcgcttatctgcatacgagggcggggtctggggaaaggaggtggagcgctgaaagggacccaagcaccagtcagcccctcctccagcgttagccccgcccacaagccggcccagctaggaaacggctgcggtagggacggactgattgggtaagagccagctcgtcgctctgttaggattggttgaatgagtcttttcgaagtttgcagcatccaatagaaaggtgggaggcggagttaaagcgctaagagaagcgttactccgcgagactctcctgaaaagtagtccccgaggtcacaaggcagtggcaggtgtctgtagtcctcgggttgactgcagctcgcggtggtccctctccgagcccaggaagccactccagtgccgagggagaggcctgggagcgctcggagtgtgcgcggactggagaagggggaggtggcggagtgattcgtagagtaaattcggtaccgaggggcggggtcggggatttgaatcggtcggcgggcggaggaggcgggtggaggaggctgccgggcagagcgcaggccaggatcagcgcaggctgtgagtccaggtcagccgtcgggacctcgggctccgggttcgaagagcggctcccggctgcgggtgctttgccaggagagcccttccggacagaggagccggggtctggaaggagcggccgacgcgacgctcgcctgccacggggctctgggagtaagcctgtctgcctggcgggccttcaggtgcggcgtgagaggtaggattgcatccgcgctgccacggggctgtttctccggggcatttctaggcactttgttcggcttaccctgcagcacagaattagtactcctgtcaggagctgctctgggtgaccaggagtgcatccggacctgttgagagaatttctggaaatggatagagctgcgtcttgagaggggtacccttatgattcaggttttcgctacggttgaaaagccatggcttatcctttggggtctgctttggtgcctgaacagcagttttctccatttctttctgtttaatttggctttaaaagtacgcgcttagagtaaaagaatggttagcacagggtgggaagtgtattggggatggatgggaaggaagtggagatggttaataggtagaaaaacaaagaatgaataagatctagtatttgctagcacaacagggtggcggtccataatttaattgtgcatttaaacataacgaagtataattggattgtttataacaaaaaggataaatatttgagataatggctacctcatttactttgatttgattattacgaattgcatgcctgtatcaaaatatttcatgtaccccataaattatacatctactgtatacccacagaaattaaaataaaaaatgaaacctgtgacgtgtgtttctatgccagtatggactgtattacaattcagtcctgaataaggtacgtgatcgaatcacgttcatcttgctggtggggttatttttcattgtttttcttcacctcttagatggatgccaattcaaaagacaagccccctgaaaccaaggagtctgcaatgaataatgctggtatgtgatgatctgcctccttgtgaagttgaaggtttagacagagagttgtcctcacccctacaatatgtcgtccgtttcaggaaatgcctctttcattttgggaactgggaagattgtgactcctcagaagcatgccgaattacctcctaatccttgcacaccagatacttttaaatcacctttgaacttttccacagtaaccgtagagcaattgggaattacacctgaaagctttgttaggaactct

SEQ ID NO: 14904 - DNA, 1246 bp, Artificial sequence
  DNA replication origin
cggtcccactctctcatcaccactactgagttgggatttgtggcctccaggtccttgtctgcgagagaggcagcccttctacccccaaagagccgatgaacttcttccactaccctcgcttcccctgctgccctcctggccacccacatttaagtgccaacatcacacggagaaatgatccctttcccaaactggccaggtgtcccgggtagagcgaaccggcctctacccttggagcggagaaagcagaagttttatcgctccgggacttgggccggcggcggttccctccctcctgtggcccggggagcgcggatttccctccggcagaccgcacagcgcggcggccgcggctttccgcagcgcttcgggactggcccgcctgcgagctaagggaaataaggcagcaccgcagagccaactgtgccgcgcatttccttagctgggctccttaaagacgcctccctcgctttccttccttcccgggatcaaaaagtttgttgaagctggaaggagcagacttagtgggggagagcttagccaaaatgttacccctttcaaaagagtgaatgaaggtgcttgcgcaccggggttcaacctgggagaccccagcgccgcagggcagctcccgcaatctgtgcgttcacctcagccccaagtcttcggtgaaatgggatctgatggccaggtgggctgtgactgcgaccggttggctgggaagcgtgtgcacacactcagcacgctcgagggcgccttccgggtcccccaacttgggtttcacagtcactgggttcggctggcgccgccagaaaacgcagcatgagtggggatcgcgttggccccaggaaaggaggttctcgccttttaacagtttggcttttccccacctagcacctctgggagggagggccccctatgtcggtcatctcatttgtggtggccagcgatccccggggctggtcgcgaggattccgccctgtctctgtcccaggcacaacttttcggaagagcgaggcaagcagcccaaggacccagacctggactctgtgttactctcccgcctgccccttggggttcttacccactacctttcccagtcagcatttgggcgttgtgagcagtgggtccaggactgataactcgaattaatactaaataaaagggtcgcttcttccaaagcaaaggaggcacttattcccctaaccctgggccccagctctgcatcctgatacacccagcagtacca

SEQ ID NO: 14905 - DNA, 1114 bp, Artificial sequence
  DNA replication origin
ttttatctttgagccgggaccctccagcctgtcccccctcccagagctcccggccgcctcgtcttcccgggcagccgctccggcttttcccgctcccctcgccgccgccaccctctggccgccggcctcccaggctccaggaatcgcccagcaagatgcgggaggtaggcgctcgcaggcggcgtggcgaagccaagagtggccaggaagccggctttcctcccgcgccgccactgccagcgccggtgttcacgctccgttcggggccaggccggctcggcttgcaggactaggggctgagctgggagatgttgggggctactttatttttccttgcaaagagtggactgtggtaaaggagagggagagaaacgcctacgacccaggcagttcaggaactcgagtgccggctgccgggtgagcgttcgcctgactgcagcgatctgcttgcccgagggcgagccccagcgcgcagggcctgggcgacagatggggggacagggagagagaaaggcacggggtgcgcggggggggtgcacacggagagacagaccgtaagagcgagagacagcataataattgcgcggccgtgtcgttacctctgcgcggcgacattagcgtccaccactccgacattccggacccaggacctgaccgaatccatctccgcgcccagcgatttctctttcagagttggtcctcttcctaaagtatcttgaattccaaacatttaaaaagtctgatcctctactgtcgctttaaaagtaagagttacaacacagtcctgactgttcccaacgttgccagcaaatcgtctcctccaaagcaatccaagaaaagggatcaagtgcccaagtttgagtcttagaaaaaaaaaaaagataacccgtcctttgcttcactggcgaggtgcggactgatgtagtcaaagtttgggttcttatcctccgcaagttcagatctgccgcctcagccactccaccctaggtcgctcgcatccttccagctgcagtgctgcctcctgaaagtgatcacaatttagaagcatcacctgttctgggagaaactggaggaaattgatggctgcctaatctctccccttcctccaggtccc

SEQ ID NO: 14906 - DNA, 1979 bp, Artificial sequence
  DNA replication origin
ccagttaataactatgttaatttaaaaaataatttaaattttttaaatagagatgaggtctcactatgttgcccagggtggtctcaagctcctgagctcaagtgatcctcccacctcagcctttcaggctgctggaattacaggtatgaggcaccagaacgggcccatttagtagctattttaaaatggaacacggcacctcatgaaatagtgagcttcccataacagcagacatgtaagcaaagacttgatgacagtctgtccaaaaatattgtgatgggcattcctacattggatcagagtttcaacaagataagaatcctaaagtccttccaacttcaggttcccagactctgcaatcccattctgttctgtgggtcgacaggaagagctgtaggtcactgagcatgaggggaacgtgatgaaactcagctgcaggaaggaggcaggggtgtggtggcttcgggaaggaaggggctaggctacagcttggggccggggacggaaatcagacaggaggtatgagcagggcatcatcttcctagggagaagagagtggaacctatggattccatggagaggggaagagggttgagggtgggacgaggaggtgcttccctgaaggcacctgtggaggaaggagaggagcaggctgggagaacggaggcatgttagaggggcacagggtgccacggccacacgggcagcagggagagctgctaaccaagggatgtcattccctggggtcaggtcctggggagcaggcaggtgggttgcaatgagatcacgtgcctttctgaaagcagtttcaggagagctataggggagaggtcagattaaaggcaataaaaaggagggggcagggagggtgactcatttctggaagctgaatggaaaagagcaggagctggaagaagcgcaggagaggaaaggggaaggctactcctgtgtagatgcacagagaagcaggtggaatccggcgaggggaggcacaggaggcagcgcagaagagttaacagctcgcgaggtcccagaggaggggaaagtgctgggtaagggttggctttggcaaaggagatgctggcatcttcgctaagtctgcaaggctagaagaggatgtgggaattggagggtaaggatttggggactggagggaggagggaggaaagcaagactcatctatctcaatgaaatagaagaggaagttattcttaagggtgaggccaggtgcctctggaggaggggacagggtctggaagagcttaatagtgagcaagaaatgaatgaaagaactaccgagcatcactgagagctcggctgaagtgagcatggcctgggagtggacgcagcagcagggttttgtggcttttccttgacagtgcaaggcaaccagggaaggaggagatgaaataagtctctggaggctttccctgggttgggagtcatcagaaaggaagggtggggtacagacatgaatgagttcaggagacaagtgatgggattggaagctgcaagaaggaagacagtgcactcacagggtggaaagcaggaaagggcatggccatggagtggcacctgcagcactgagtctgcggcgacgacagccacacaggtgagcactctccatcccagcgcggggactccccaacaggctcagcagtggacaggcactaggacttgggtggtggcagggaagatggtaaatgccaagaggatggtctgcagggtgcaggtaagccacattttgggggatctccgaactatttggggaaggcggaatctgacatggtctgggattcgcagtgaggttgaagtcagggatgacaatcttctaagagtttcattgtgactatttttattgccacgctggtgtggcctgagggatatagaaaacaatgaccttgtcgaggaactgctgtgacagttaatgtgaggacatgggtaaagcattcgcctggtgtcggattcatggtggatgc

SEQ ID NO: 14907 - DNA, 971 bp, Artificial sequence
  DNA replication origin
acatttatgatatggcaagcattgaggagtcaacatttcagtggttttctttaagccagagagatttattcattcatgcattaatcccacaaattatgtggctgatgatatggcaatgaatggcatacttcctaccctcaaagaactcagtgtagtaacagacaaatatttagataatttgagtgtggtctagaaagacagaagtgaactggattttacaagaatattgagtaagggtgcccagcccagcttaaggtgggtaggaaatggggaacaatgtcagagaagccttcctggaggaagttaacattggaattgttttttaaagaacagtagttttactggctgaggaggaagaaggacggctgctgggagtgttggggtgggggtggcggggtgcgtgggagtgttgggctgggggtggcggggtgtgtgggagtgctggggtgggggtggcggggtgtgtgggagtgttgggggtggggttggcagggtgtgtgggagtgctggggtgggggtggcggggtgagtggatggtagtgctcaggaaagggacagcatcaaccatggtatggaggggatgtggaatcaagacttgtgcctggcagcactatgtttgaaatgctaaatgggcatctagaaatgtcacataggcatgcagaggtgtgtgtctacagttccagggtgagggcatagctggagatctaaatttagcagtccctggtatatacatggtattacatgatatttacttaagactaaatgaggttgctcgaagaatgtgtagttacacaagggaccccagtacggaggctggggagacagatcaccgtaatatttatttatttatttagagacaagatcttgttctgccacccaggctggagtgcagtggtgtgatgatggctcactgcagcctcgacctcctgggctcaggtaacccaggtagctgggactacagtcacgtgcca

SEQ ID NO: 14908 - DNA, 1030 bp, Artificial sequence
  DNA replication origin
gacagcgacggcggcggcggcagcggcaggggcaggcgactccactttcaaaatggcgccggctggcctggccagtgacgtcacctagggggcggagccgccgggctggggcggagagcggagggggaggggcgggggagcggccgggcggctcttggccacgcccccttcctgctgcgcctgtgccccgccctccgtgtcccggccggcagggcctgcgccgcgccagcgtctcgccatggcataccctctgtccgcaccgcctgcgccaggccgcggctgtgtgcacctagcagtgtcccagcctcgagcactagcgccggggctctggggcgggcttaggagtccagtttacgtgctctcctgcaaggattcatggggtcctatgtcttctaggaatacctgggccgggcacggtggctcatgcctgtaatcccagcactttgggaggctgaggcgggcggatcacaaggtcaggagttcgagaccagcctggccaacatggtgaaaccccgtctctacttaaaaatatacaaaaattagccaggcgtggtggtgtgcgcctgtaatcctagctacttgggaggctgaggtgtgagaattgcttgaacccgggaggcagaggttgcagtgagccgagatcgcaccactgcactccagcctgggtgacagagcaagactccgtctcaaaaacaaaaaacaaacaaacaaaaaaccccgtactgcttcttaggaaattgtcactttggattagccctgagaccacaaagaaagggacagcggtgcagacttactgctcagccggggtgaaagttcacggggttcagagggacacgattgggctggttctatctgggtgaattaaattaccttctcgtgggccccaggatccaaggcgggagtcctaggcactgcggacactaagagtgatttctaagagaaacctgagtttgtgatgagagggtatggcccaagaagtgacccggcgtctctccagctaaacgtgttggactgcgtgcttaagagctgg

SEQ ID NO: 14909 - DNA, 1006 bp, Artificial sequence
  DNA replication origin
aggagaaatccccctcgccccctgacaaggcaccgcttccttattcctccctccatcaccccctagcgaccgcccgcgcctcgcgcagagccacagggcgcccctcgggtttgagggagtagggtccagaggggtggggtgggggcggggagggctcccgggaggcaagtggtcacggtgagagtcactgggcttggagaacggggctggcgccgtggcgggggtgggggtggggtgtgccggcgagcttggggtgaggcgtgggtggggcggggtgggggtgcgtgcagatttgtccctcccgctcgggagcctggtggatcttctcccacctccccaccttgccccccgcctttatttttttttcctgcaggtcttcatttaatttctatttttccccctgctgcaagccttcttgggtgtatatacacatttattttgcctcgagaaggaagagcgccttataagttaaaatacagtgggggcatatgtgtattttttccccactgtagatgccaatatttttgagactggaagcctaaattttttgtttcgaaccatttcgtttccgtttcttcccttttaccgccgaagagtgcaaggcctttcatgtacagcaagttgcatgaaaataatttaaactttgcgtttagcatgttagcttttttgcagatgtccttttcccaaaagggtttggtagagttagttaaaatagttgcggagttcagagatataaatagcaaggaggagagagatttaggtagaagctttgaaggggaggggaaaggatgtagagagaaaaccagtttggaaataaatttagcaaggaataggggtgatgggggagagagaagtaatgtaattgctttgagaattctttttgtacatgttggtattgctaaatcttttccttcatgtagtagaatcagttgcagatttagattcagtttctttctccctagagccccaggacattttcaatcatttcgacctcagtacttgcacg

SEQ ID NO: 14910 - DNA, 1183 bp, Artificial sequence
  DNA replication origin
gtctctgcccccgccggccggcctcaacagtgagtgcggggccgaggctctgtgaaggggatgggggaggaggagcagccccggccgccgccaccggcgcggcgcgggaggcgggaggagaaggcagctcattggctcaggcatgggatgtccaggtgactgacagctcccgtcccctgtcaagaggaggggcgcctgccttgctccgggcctctctgttgcctcctggggtcttgggcccggggccgtttgggctcgcggtccgggagcggcgcgggtagcgcggatccccctggtgcggggggtggtccccagcagcggagccgggcggggcggggcgggggcgggcctggggggcggggaggccgggtgggcggagcgggccgcggaggggacgtgggccgggatggggacgtgcggcggggacgccgggggatggacgcgcgggagcggggcggggcgggcggctgccgcgggacgtgtcggggatcaggtgtgcggggctcgcgggcgggcagcgtctggcgggcgcgggagccccccagcgagcattcctttgttgccacacgtttgtcaggaaaattcatttgctcgtctagggttggcttcagtcacgtgtggggtgagaggctgtgccttgcttctcctttttccttttttatttttttattagatttctcgaagttgcccaagtgatttttttttttttaaagcgatgggttgtgcgcccagtaaagctgagagcagcctcctgaaccacccaagattgcacacgtcagggagtctggggccatgcatttaaagaaacggaattaaaaacgcactcgggcagttgaaagttaacggacgaggctgatagacaacccaggccagggtcttttcataacattccgctgcccagacatcttgtcctcagattgttcctagtcgtgagaaccgggagccttcttggaagggttcttgcctaacctttctttaattcaactcttgggaaagaggtaatgggagcagtgagcatatggccagatgaagtcttttcaaaaccacttggatgcttaaaggtcatgcagtatctttcgtaagagggaggtgcttccagtgtggcctgaagattattttagggaagagagtttcagccctcaccaggtagcgatggagtttggagattttaagatggatgctg

SEQ ID NO: 14911 - DNA, 1280 bp, Artificial sequence
  DNA replication origin
ctgatatttccccctttcgcagagggagcagcgcgcgtcgggagacgcagtgactcgccagggtcagacccagagcttcttccccacgcaaggccgagggcagggtgagcacaggggcgttctccgtctgccccggctcgggtgcactggcctggacgcctctgtgcaggttccatggtgtagagagacggctcgagtgcaggcggagtttaagggaagggggttttgactgcgggagccgacagaaaggactaaatccaaaaggtcctcttggacctgaaccttctgctacaagcctgaccgataaaaggggactctgcatctttttaagcccaaaatagaaaagccttgggagttagaatggcagaaaccccagaccgacggcgctggaagcgcgcagctcggtgcattccccggccgcactgccctgcggggccgcgcacgttccagcgctcagggacggtgccgcaggacacaccccaaacacagagcacagacgaggtaaaaacgagccggctgcaccagggaccacgctgcccctagctggctctgccccagcctctctgaacagcaggtccctgcgtcgaagcccgagggtcttcgcatttgctgctgtggcttctcccggatacccacccccttcagatcttacagaagggccttcttccaaaccagaccttccctgttccctggcaactggttttaaaatcacagcacctctgctcctgcaattcacagtccctcctcagtcccttcactgcttagtttttttttccttagcccttgccgcagtcaaactcgaatgcgtttgtgaatcacctgaggaccttcctacaacacagatgcgaattcacttggtcgagggtgggtccccaagtttctaacgcgtgtccgtgatattctgctgctccccacctgcctgcggatctgcgaggacctttgacttacaaagggtccaacatgcagataatacaaaagtttatttttcctatgtattttggtttaccatcccccgaacttgaatgtgagttccaccaggatagagctctggtctgttttgtttgctgctatattctctgtacctggaacaggcctggcacatagtaggagcactatgttatttccagaaggaagcagtgaatgaaatacaaaccagaaaagacagcagaggtgataaacctaacattatacaaagtgaaagtcaaggtgcaaattatgaacgaaacaaaggttttacactcatttttaaaagggagaaataacagtcacaagcccttagg

SEQ ID NO: 14912 - DNA, 909 bp, Artificial sequence
  DNA replication origin
tcggccttgcgtggggaagaagctctgggtctgaccctggcgagtcactgcgtctcccgacgcgcgctgctccctctgcgaaagggggaaatatcagcggcccagctgggtggttctgacccaagtggggtcacttctagggaagctgctgtggccagaaagcactgcacaagagactaagtgtagcgcgccgccctcggctaaaccacggctgtgcggaccaccctggacccgcgccccgatcttctgctttcttctgcacagggagttgtgaggttgctacacccccgggtctggattccgcacccgcagcggcccccgcacggtgaccacataccagggactcgaccgagcatctccagccacaggattccccgggggagcgtccccgagcggaggagaggagcgattggctgggagggaggtgggacgagcggttacgccggcgccaggacactgcggggcggggaccaggggacgggcggggtgcggaggaggggggaggacggagtgggacaggagaggggagaggagaaggagggaggggcggaggaggggagaagaggggactgggacggggtgacccgaatggggaggcggggcagagggtacggggtgggggaggggagagggccggtagggagtggagagggaggttgtaggggagaggaaagggggagagggacccactgcgtagggaagaaggaaagtggggtggagtgagcgaagaggggacaagggactgggtgtggagagaaaacggagctgagtggggaggagaagaaaagggagagaagctgagaggggtgagcaggaggagggagggcggggcgcctcccagcagtcgggcgcaggcctagggtcctcccctcccccagaggccaacgtccctggggcgtgattagcagc

SEQ ID NO: 14913 - DNA, 1088 bp, Artificial sequence
  DNA replication origin
cactgcgtagggaagaaggaaagtggggtggagtgagcgaagaggggacaagggactgggtgtggagagaaaacggagctgagtggggaggagaagaaaagggagagaagctgagaggggtgagcaggaggagggagggcggggcgcctcccagcagtcgggcgcaggcctagggtcctcccctcccccagaggccaacgtccctggggcgtgattagcagctccttggggaagaggacggagcctgagctccgggcgcggaggtctgggcggggcgacccgcggcgctgctcgtggccgcggcgatggcgcggggaccggggaggtttgtccaggaggacgctggtcacaccgcgtttctgaagctttcgattcctcttcggctctgctctctgcagccgccctgccttccctctgcgcgtctgagccgagtccccggcgcccaggggcggggcggcggggtggggacactcatggaccccccagcgaggacctgctgggtgcgactacatggtcacccgaaggaccctgagagaggggcagctgtagggggtccttgaagagggtctgactgcggggtttgtgagcgtcagcgcgggggaggcttgggcctggaaagatgggggagatctggccgatagagacgtgagtgccccagaaaggggggccgaggtggtggaggcgggcgcgcggctagctggggtccaggacaggaggggcgggaggcagccgggaaggcctcaggcagggccagcgagcagcacctcctgcagcctgccaagtgcaggtacgaggccacccctgccctcacctatgtgtgacgcgtcgaggtaacctttctgagcgttgacttgtccacatatgccagtggggcaatctctgagggtgatgaacatgtgtaacatatgggaagctgtatagtggccttcccagcgtggctgcttcataaacttagtccctttccctcctggaggaaggaagtcaacccagaggcttctcactaatgggcactttcctagcacaggtaagcgtcaaatggaatcaaacagaagaggcatctcagagttcaacagaacaggtgcctggcc

SEQ ID NO: 14914 - DNA, 1765 bp, Artificial sequence
  DNA replication origin
cagaacatgccacagaatttctgccggggcttggggctgccggagcccaggtttttaaaaaaagcagggacctcttcgtcctctgccgccttcccggattgctttctctcggccatggctcgggggctcgggtagggtcctcgccgtccgtccgtccgtctgccagtccctaagtctccctcgctgtgtgcacaagccccctagctgctgccgcggctgccgttcgccgcccaccgcaaggtgcacagaaaggaaggagggctggcgagccggcgacccaccctcccggtccctccccctgaccccgcttctcccctccctgcccacgccccccgcggctacagcgcgagctcggggaagcggcaaagttggatctgggagggcgtccgctgcggctgcgggagccgaaaggctgccagttcccggcagcgctgggaggagggaggcgcgggcggggcgcggcgccggggaggggagcggtgctcaggggagggctggaggggagggaaggagagagagaggggagggcggcaccgcccctagccccgcgctccggaagtgaagcggccagaccaccagctaatggatgcggagcggagggcccgctgaccgctctccgcgcctgggtaagtatcgggcagggcacgcggagtgaggaccggaggacgcagcccccagccccagtgcccctctcctccacctgcctggcccaggcgcctctgccccgccgcatggcggaggtgggccgggggcgagggcgcactgtggataggggtcccgccccgttaccctgggtgtgagctgatggatgggaaaaggggacaagccgggcgccaggctactcagggtgtgggaagcgggatggcactgaagatgagcaaggatagcacaggcagggtggacaggaggggggcagccaagacgctggacaccccagcttcagtttgtccactcgccttggcaggctgcagggagcagagactgaaacgagaaggttcccgcttcgtgcatccactttggtgtggttggggtgacgggggagtggggggggggcacacaacatggcgggaagaaattcagaggggcgtagcagatgggagaggaatatagagagagacgcaggtctgcggtctatgggggtgtagcaaagagtgcagtcgggaattccagcccagggccacgacttaaagacggggtgcagaccgactctattgcgcaaggcgccatggaccgtgtctgcgccactgcgccaagaagggcgcaggaacgtgtcgcgatttggtttattctgcttcctccaccaaaaaaaaaaaaaaaaaaaaaaaaagagagaaaaaacaaactgaaacccccttcccaaatctccagctttcccctgcgccccagagccccgcctggttcccccgcccctgttgcgcactgcgccacagtcgcagcgtttcccgggttaccagatgccacgtgtttggggagtaagtgcgggtgcgcatctggtgcggagtaggaggtaggatgtgggctgtgagtgccatgaattgtgtggggccaagcaggggaaaggtgtgtaggaacttggtgtgtgtgtgcagtagctgagccacggccaccgggttggtaagtaaccagggggcaattagatttgtgtgcctaacacggtcaatgctggtccttcattgcttattcccatctccacgtcctttccgcgtatcagtccctgcctctgcgcgatgacagctccgcctctctttccacagtggcaaaatcc

SEQ ID NO: 14915 - DNA, 766 bp, Artificial sequence
  DNA replication origin
ccaaccccctcccagacgaccaccgcccgccccagcaggggatcagcccattccctatgcccacgccccacctctcaagctcaaggagacgcgggcagcctttgtgggcgcacggccgcccaccgcccagcccgagcctcgccgcaccctgcgcggagaaggggcgggtagggcggggtgcgcgtgcagatgcgggaggcgaggtccagggcggggcatgaaggcgggcgcgccgggctcaggggcgagggaggggcgatccccgcgccccgtcctccgtctccacccccaacccccacaccgacctggtcgttgatgttctgcagggcttctttgcccgaggccctccggatctccaccttccggcccgattcaacagatggctctccgccggcgcgccggccctgccgcgagtacggcggctgcgggtccgggcccaagtgggcgacgtcccgctgctgagccaccacctgccccgagccccggcccaccgacagcgagtcgaagtcgatggtcttgttctccgaggacccttccaccgggcagaacatgccacagaatttctgccggggcttggggctgccggagcccaggtttttaaaaaaagcagggacctcttcgtcctctgccgccttcccggattgctttctctcggccatggctcgggggctcgggtagggtcctcgccgtccgtccgtccgtctgccagtccctaagtctccctcgctgtgtgcacaagccccctagctgctgccgcggctgccgt

SEQ ID NO: 14916 - DNA, 804 bp, Artificial sequence
  DNA replication origin
aaaaacctgggctccggcagccccaagccccggcagaaattctgtggcatgttctgcccggtggaagggtcctcggagaacaagaccatcgacttcgactcgctgtcggtgggccggggctcggggcaggtggtggctcagcagcgggacgtcgcccacttgggcccggacccgcagccgccgtactcgcggcagggccggcgcgccggcggagagccatctgttgaatcgggccggaaggtggagatccggagggcctcgggcaaagaagccctgcagaacatcaacgaccaggtcggtgtgggggttgggggtggagacggaggacggggcgcggggatcgcccctccctcgcccctgagcccggcgcgcccgccttcatgccccgccctggacctcgcctcccgcatctgcacgcgcaccccgccctacccgccccttctccgcgcagggtgcggcgaggctcgggctgggcggtgggcggccgtgcgcccacaaaggctgcccgcgtctccttgagcttgagaggtggggcgtgggcatagggaatgggctgatcccctgctggggcgggcggtggtcgtctgggagggggttggccgcggttccattcttctgaaaccctcccgggcggcttccgattgcagctgcggctgggtgccccaccctttttttgagcggctcagagcgtgcggtggaggctttgcgtgaaggcccgcggctccccggtggtcgggaggggcgggggttcggacggccgctccctacagcctccgcccgcgccttctgcgctcacgtcccgag

SEQ ID NO: 14917 - DNA, 1802 bp, Artificial sequence
  DNA replication origin
tttcgcgcgctttcttcgggccggggcggtggggaccgggtttggcggcggccccaggcgcggcctgggccacgcggggacaatggaggggtggtcgtcgcggccggggggaggggcggcaccccgagacggcggggcttcggggccgcacgcactcgcctgcgcgcgccccggtccctgcccgcctgcgcgccaatccgcggaggccgccgcggcagccccgcgtggggtgactgcgccgagccaatggcttcgctggcggcgagcgcgcgactgcaccgccggccggcgccgcgcagcccgggagggctcccgggccctcctcccccgccgttgctggcgctgaactcgcctggcccccgccctggcgcggctgaggactggaacggcggcgggcgggaacccggcggggagggcccggccacgcccggccccggagagggcggctgcttcccgggagcgtccgggcccggctcctgggggcggggaatgggcgcgggccggggggaggctgcagagacgggatctggcccgcgtggaggcgccgggctgcaggaaatgagagccctgaggaaacccttccaactccgagccgggaaggaggcatccggggaaggctgcggggtatgggaaaccccgccctgaaacatccttttgtgccttccggccgcgaggaacttagtagggcggaggaatggggagcagccgcagcccgccgaggccgatgtggcgcgatctgcgctctgtgcgcccgctttacagtcacgcccacctcggctccctgaggggtgcgtgggggcgcagcgcatttcgctggtgcctgcagcgctgtcgggggcagctgctgcgatcccagcgccccggggtcctgagggtttacagtgccagtggatgggacccacaccgcaccgtggggcggagaggaggagatgagctgtggaggagcaagaaaggaagagtttatatcccacaggaaagggaaactgagtcttggggaaaacctactgaatcggagttaaaatcaagagtgtcctgactgcccaggcagagccttgtcacttcaaacggcactcaaggccccttcgtggtcctagcaattgagcaggcctgggaccccttagctttgcctgtccaagccatgctgggatgctctaacttcagggtccgtgggaaagaaaaacgctgatccagttgatcctcaggaatctaccgaggccaacccccgtgggaggttgccctggcaggtacaataactaaaacatctggaccagccctcgtagcgctcgggcttctctgcttgaggtcgaaggatacatagaatccctacgtaatcatgggctggggggtgggggaagaaagagtatgtaattggctcacacctgctcagcaaagcttagctagataaatacggaataattcgagctgctgtgggcctgacttccaatctttctgcccttcaccaccttagccactttaggggaatgtctgtccttccagactcagagaaggtgtaaaattctccttttcactcctatatctctaaaaatctgaagtcccagaaagtagccgtagggcacgcacaaagtttcaccgatggttaattcatccaagttcaatttagctgtgcatctgaaagagaaagtgaagcacttccccctccagcaatctgatatgccgcaagcaaggtgagatgatgtcggcaagtattgctgtcaaccggtaatggttaaagtcacgagtctgagaaagcttaaaatacgcctttctacttggcctctctctacttgtgaaaaaccaacagt

SEQ ID NO: 14918 - DNA, 1148 bp, Artificial sequence
  DNA replication origin
gatggcttttgcctgagaggaaagggagtggctggcggcgcatgcgccacggtggccgacttgaaccgaggcttttattgctgtagtttatttccacccccttccctcctgtttctctctctccttctctctctctctctctctctctcttttttttccgccctagctggggctgtgttggaggagaggaagaaagagagacagaggattgcattcatccgttacgttcttgaaatttcctaatagcaagaccagcgaagcggttgcacccttttcaatcttgcaaaggaaaaaaacaaaacaaaacaaaaaaaacccaagtccccttcccggcagtttttgccttaaagctgccctcttgaaattaattttttcccaggagagagatgtcttatcaggggaagaaaaatattccacgcatcacggtgagtttggtacttgggaaatctgcggtcggccagccaccttttgtagcacagaaggtctaaggaatttttaaaaaggaggggaaaggagagggaccgaactttttttttcctttctgttgctaacggaggcgatggtgatggtggtggtggttgtgggagatgcagtgatccaggattagaagtcgcatcgtttgcaaggcattaaacaggagcgcgagtgcacgaaggtagccttaggtaacgcgccagacccggtctatcttttattgtcagtgagagatgctgcagcgtcggcccgcggggtgcaagcaaatggatgccagattgaatatgcatgcctggagctcggatattgttctctgggctgcgtgctgcgaggctggactcctccagcagcgatggggagatggggacttggatcctccccgggtcttccgcccccacccaaaaagggctttctggagccttctccgggtccttggaaaaaggagcgggtttgagccctaaggcgtaatgacagcagagggatgctgaaaagggcagggtgtaccggaatggtgtggaaacgggaaggaaaaacagggacgaggtgatgagcagaggaggaaggcggggggcaaggcgggggcttcttgttggccaggaaccggttttgggtgccccccccccggttttctcgccctgtagttcggggctggggccctggcggggattcgggct

SEQ ID NO: 14919 - DNA, 889 bp, Artificial sequence
  DNA replication origin
caagctcacactctgcggtaaggtggttccccgctaagttggtggggccacccaggctggcgcctctcccaaccccaacgcaccgaagagtcagcatcctcagaccgcaggtggtcggcaatgtagtgcacaccttccagtgccttctgcatgtggggtgatagcagcagctcaccctcctgcagcagagcctcagccttgggacctgaggccccagagtgcaggtggccgtggctgcagagggtgcccacagagggggccacatgacctgcacatgcccatctgtcctcctcctccaccaccacctccctctcctcggcatccacgttgctctccagccagtgataagaggggctgagcttcaggcgtagggggtggcagagctccacgggtggtgggggccggttcatcagaagccaccggggcacacagcccagaagggccccccgcacccagtggggcatggtgtgggtgctgggggagcggtggtgcacattgagcacgaagacggtgatgacgatggacagggtgacgaagatcatggtgaacagcaggtactcgccgatgagcgggatgaccagcgaggtggacgggatgatctcagtgatgagcagcaggaagacggtgagtgacagcagcaccgaaatgcacagcgtgatcttctcgccgcagtcggagggcaggtagaagaccagcacagtgaggcaggagatgagcaggcaggggatgatgaggttgatggtgtagaagagcggcagccgccggatgacgaaggcgtaggtgacgtcggggtagatctcggcgcagcagtcgtacttcttgctgttgtaggtgcccgtggcattgacgatggcccactcgccgctctcccagtagtccttcaggtcca

SEQ ID NO: 14920 - DNA, 1604 bp, Artificial sequence
  DNA replication origin
ctgggccggggcccaagaagtgacgaggagggagggaggcttgcgagcgagggaggaaaggagggagagggagaggagaaggcgggaaggagggagggaggaagggtgcgcggggcgaggggcggcggcagacctcgcggggccccagcgggaagcgcgggcggcggcgggatgcgcgctctgggcggcggggcgcggcgctaggcgcccggcggggcttccccaggctgcgaccccgcgggaccctccactcctcccgccgcctccgcagcccgcgcgccggagcatgagtcccggccggagccccacggccgcgggcggcgcctaggacggcgatccgcgccctggaggatccgccggccgcccggctccactacagctccagccgcctgcagcggggccctcctgaggccccagaggaagagaccatgaaaggtaagggcggcctgtcgggggcagctccgaggggggccgcctgcacccccgctccacccagggcctggggggcgccttttctgcaggcgaggctgagaggagggcagggcgcctctggcttttcccctgcctttttgggcatcctgcgagacaggacggatccctgaagaccagaggaagcaaagaggagagggaggatggggacactcacacacccccccttgcagtcctgttctcatcggccgttgctctaacctcacaaataattttaaaatccagagaagtttctgatccctttaaccagtagacgcagaaaggcatcaccagcccaactttccagcagtgtaaatttcgaccctggggacccatcagagaggcccctgcatcccccaccgagcctttcaaccgggggccaggcctaggattctcccccaggacctccagcccttccccaaaagagacctgcagtgtcagagcccctcagcccaggccctgcccttcccaacccctgaaccctgcctgacccaccctctgacctccttgggaggaagccgccggggaagccccatgggccaggactgacctctccccagggtggtgagccagcagcagggtggcccttgcagccagttcttgggatggaaataagaaccagacatgatcccaagtggccatttccagggcctgggtgtctttaggcccctacttggtcttcaaggtcattttgaggctacaggagaagcaggctttggagttatctcatgaggcagggaacctccgaggttttgaacgccatttcgggtgtctttcagtaatcctcctgtaacacccccagcagatgcttgtgttcctagcagtgagaacctcaccacctcatctgcttatggaaagtagaaactgaaaagggcctttgagatcatctacagggctctcaaccacactctcaggtgccactgacaggtatggaggtggaagaggtggggccagagctctcagcctacttcaaccagagcagctctgtttgtctctcatacaaagaatggcctgagggttcattggaagaaagggctccaccgacaaacttctgactggatgcagcctccgcattgcatagttagggaaactgaggcccaagcaggtagggctggcttcatggcttctgcaaccag

SEQ ID NO: 14921 - DNA, 1381 bp, Artificial sequence
  DNA replication origin
gcagtgacatttgccaacttcgtcgagtgtctgctatgtcccaggcaggaggctgttgctccattttacagatgacaatgcaggtgcagcgggtggccacgtgctcaagataacagtgctggcgtcaggattccaatccagacccgagaggctctaagacccaatctccttcccccatgccgctaccttggctcctgtgccactcccagcactgcctggaggagggagaggctgcaatcctaggcactgcctggaggaaggagaggctgcaatcctaggtgctgcctggaggaggaagaccccagagcctttttctaaagagtgctttggggtccccactgagtgagaaggggactcagaaggctgccttccttaggtgagcagggcaccacctgccctccaggccaggcatgagtcatgcgggcagaggactgacagcaggcgtgacctggtctggctagggaggaagtcaacaactgtagtttagtagttagtgtgggggcaaggaatgtggacaaaggctgaccaaggcccctccaggccggggtgccactgaccctgccaataacaaggcaggggtgaggggcagaggagagaagggctagagaagggctagtggctgctctgagctgagggaaggcacttcaggccaccaaggaagatgggcaacagtggccgaggtgcgtgggaaggagagggaccggcacaccctggagtccggtggaggggggcggccatgattactcaggaagccacaggctgtaatcaggctttccaggctcattagggtccagccacagctgacctcacgtctgggaccatggagtggctggctctgtggtctgagcttggatagggaggagggggtggggtgagcagagtgcccagtgtctcgggcatcagcactgcccacccatgggaggggcagtgcatggcccaggaggagcccatggtacatcttatggtcaaaggcaactggccagcttacaaggacagaagaaaataaaacaaaggggtgcctctggagggactggcctggtgccgtgggaggcacattggcgtggacatcaggcacccagtgtttgagacccagctgtcatattagcaaagcgcgtggctggggctcaggctcccctctgctccatgagaatattggcctggctcagggactctcaaacttgcttgttgccaactgagggctgttaaaaacatgcccatgggcttcgacttctgcttacgatggactagtttatgacagattcaacctcccacggagaacaaacagagctgttagagaaagaccaaaacatctttctggaggctttggagggataccaagggccaagatcccagagaagagaagactcattgaagtcagcct

SEQ ID NO: 14922 - DNA, 1540 bp, Artificial sequence
  DNA replication origin
ggtacattagcaggaggcatggtgacgtctctagcttggaagaggaagggcctggaaagtgcctcaaatacagggaacacgctttcctctcttcactgcttacagctcggaagcaaaatgcttccatcccaacaaccagggtttctggaccaggcagacccaatttagatcttggctttacggcctgccagttgtctaagaaacagtgggaaggctattcagtcttctcatctataaagtgggcaataagacctttttgcaggatgtgaggattcgtggtcttgaatgtctatttgagaattcatgtctacaaaatgcctgcctcattataggtcataattcactgtaattgttatttaatactattagttagttcctgaacactaatccctgctaggggcaagggaggtcaaggaaaagagaagacaggaaaagctaagatcccaggggcatgtgtttggaagaagaaattctacctccttccctcctttgatttctgggatgtgaaggcccaaagtgacccaggaccaggaacccaaactgggtaggggaagcctctgatcgtccagtgtcaagatttaacagttgcttttacgaatattgagtctcagttatgtgcactgcactcttaatgctgggggacacagagacatacagatccaggtggactgtgggtaacagaatgagaaccaggcattgggcttaaaggtcctgatcattgaactgtacacctgaaaagggggtatttcatggcatgtaaattacaccttattaaacctggatcattaccagccatgaggccttgagtaaggcagggacttcctccctgagcctcagttgttttcctgccaaaatcctaccctgccctctacaacatctgccttaaaccacctcatagattctcctcaggtcccattttaaaacaaaacagggtaacaaaagggctgtgtaaactggaaaggatgcagagggccccatcattatactttcactctgataaatgcagaaactcagaagagggagacttcagggagctagaaaggttggggggggttcagtaggatttgggtgggcgaggaggaggaaaaagaggaaaaggaggaaaaggaggaaaaggcagaggaggaagaggaaaaggaggagaaaaagaaggaagacaaagaggagaaggaagaagaggaggagaaggaggaggaagaggagggggagcaggaggaggaagatgaggaggaggaaaaggaagatgaggaggaaaaggaagatgaggaggaaaaggaagatgaggaggaaaaggaggaagatgaggaggataaagaggagcagggaaaggaagaggagaaggaagaaagggtggaggagaaggaggaagaggagaaagaggaggaggaggaggggaaggaaaaggataaggaagaaagggaagaggagagagaagaagaggagaaggaggaggggaagaaggagaaggaggaggggaagaaagaggaggaggaagggaaggaggaggaggaagatgagaaggaggggaaggaggaggagg

SEQ ID NO: 14923 - DNA, 1197 bp, Artificial sequence
  DNA replication origin
aaggaggaggaagaggagggggagcaggaggaggaagatgaggaggaggaaaaggaagatgaggaggaaaaggaagatgaggaggaaaaggaagatgaggaggaaaaggaggaagatgaggaggataaagaggagcagggaaaggaagaggagaaggaagaaagggtggaggagaaggaggaagaggagaaagaggaggaggaggaggggaaggaaaaggataaggaagaaagggaagaggagagagaagaagaggagaaggaggaggggaagaaggagaaggaggaggggaagaaagaggaggaggaagggaaggaggaggaggaagatgagaaggaggggaaggaggaggaggagaaggaggaggaggaagaggaggaggaggggagaagggaggaggaggagagaagggaggaggaggagagaagggaggaggaggagagaagggaggaggaggagagaagggaggaggaggagagaagggtggaggaggagaaggaagaggaggaggaggagaaggaagaaaaggaggagaaggaagaaggggatgggaagaggaagaaggggatgggaagaggaagaggggaaagaggaggaggagggaatagagaaagaagagaaggaggaggaggaagagacggaggaggaagagaaagaggagaaggaagagaagaggtgaaggaggaggatgaggagggccctgcaggtgcaggagcctctggagcacagctgtcagtggggaaggtgagctgtgcttccagggcagtgacgagatgtgccccactagactggatgcatcacccacagcaagaccatgtatggcccttgagttaaacaattaaatatctcgagaacatcacatgtttctggtttcgtttgaaacagaggcagaccttgtcaacctgggtccaccttccagcctggcaaaaatgggctagacctgccataacccttaacactcccctgacattgcagtctctactccttgacattgctcactggcctctgcagcagttctctctgtgccccctagcatgagaggcagtggatgagaaggcaggcaggacaggataggaaagcaatgggaagcacactagctctgggatcagaaaggccagcatgtaaatgctggtccatcacctcctggccctgcggctgtgggcaagctatggaagcttcccaaatctcagtgtgctt

SEQ ID NO: 14924 - DNA, 1016 bp, Artificial sequence
  DNA replication origin
ctgaattataaggtctccaaagcatagaacacatggggttctagaacttgaatttatgttacaataaagcagtgattaaaaaaaaaatactctaagtctgagctctactcccagagattctgatattggtgtctggagtgggatccacttgggcatgaggatttcaaaaagcttcccaactgctttaaaagtgcaaccgaggttgagaactatgccctaagatacacacaaatacagcaaataaatgccattatcaaaattataagaatggagcagtctcagtgaggtgtaaagaaatgtgtggctaagcacaatcctccattgtcatcaatccctgctttctgatgttggctccacccaactgggcttgagtaggaatctttaactcatcttgaactctttctaagacactagtagttccagagttttcaacaattctaccaggtttttataaacttctttcttttaccacaggttttgatttctctgagacagagagagagagaaagtgagagagggagggagggatggagaaggaaaagagaaagaggggaagggaagagagagggcaaagagagagacaggagagagagggagagaaagagaaaggatggggggagagagagaaggaagaaaagagaaagaaggagggagaaaagggcaagagagagggcaaagagggaagagagagggagagagaaagggagagatggggaagagagagggagaaagatagagaaagaaggggggaaagagagggaagagagggagcatggacagagggaaagagacagacagggagggagagagggggaagagagagggcaaagagggaagagagagggagagggagagatggggaaggagagggagaaagagaaatgagggaaagaggaggaagagagggagcaaggacagaaggaaagagagagacagggagggagagagggggaagagagagggcaaagagggaaaagagggagagggagagagaaagggagacatggggaagagag

SEQ ID NO: 14925 - DNA, 2037 bp, Artificial sequence
  DNA replication origin
cccggccctcccgcgcccggccctcccgcgccccgcgcgtttctgccggttcctgcccactccggccggcgcgcgaggccaggctgcgggacgggcgggacagagggacacaccctccgcccgcgggcgacccgcgtccctcccgccctggcggccaccgccccctctgcccgcacgctctcgcccggtcccgcctccgcccgcgcccctggccctccccggcggtggcaccgtgggctcacgcgggtgcccggggggggggcggggctgcacagggagtttgtcttgtgcaaacaatttccaaggcagcgttttcttccctgcctgggagtgcagggctcagcgccttcactttggaactgactcagagacctaaagaagcccacctggccagcgggaaggggggccgccgccgcctcccggttttgggcagccctggccagctccctgtggccttggaggacttccaccgggcaggcgttcccatgatgccaggctaccaggcgcgggggattcctgcaggccggcgctgcttttcttagaaccccctttctagaaaagtacacctgggggttttgcttcaaagtgagtgatccacaggtatctaaggccttcttgacaccctccctaggcgttgtgtaaacagaagcacctggtcgcaaacacctcgaaacacagggaaacatggccattaagttcaactccacaggtcctgtcagggagctgctgtgctctcagcacggtgccaggccctctgggaggtgggagaggcaccgaagagaccccaggcttcaggaagcctaggactaggtggaagtgatttaggagtttacgttcaagttaatgtgcagtggctgcctgagttagtggagatgctggagagggagtatatcagataaaggaaaaacgagattggggaagggacttggagtactaagttttgaagtaaattatgcctgtggagagtaactcacccgtagggcccaaagacaagaggagaagaaagtaacaggtgggataatttacaaagtggagcagaggagcagaggctcatacctgtctcggggagagaggagacagaaggtgtaagagatgattccctccctccagggcttctgccctcatagaggggacagaaggatgtcagcatgtgaaatcagacgccaagagagggaatggtaactgtcaaagtgcgaggtgcagaaatagttctgttggagtcagagaagggagttgtgggcagggatcagtcaccaggactggaggctgacgctgttgagataggctgtgaggtgggaatgaacatggctttccagagagacaaggagatgtccttagccataccagggaatgtatcctgaacagtaggagatagaggtggagaggaacaatggttgagattgtgaaagtcttagcccttttggtgattgcatgccaccctgtgtgtcctaaggagacattcagggtttttgagtgagggaatggtgtaatgaacaactgtaatggaagggttttggaaagttgtgttagggggacacatcagtgagcaggctgttggagttgcagggtggccagagtttgcactgggatcactggaagtgaaaaaggtgggtttgagaaacattactgttgaaataatctgtttacagggcagggtgaagggatgagatgaatggaaattaattcttggtggaaattgattcaacgccagggccttggagctgctgtagttggtaacttgagaaatcggaaatgtgtattttggagagaaggaattggctactcaggctatagagaagtttcttgtggctgctaagatatccagatgttagtgtcctgcaagcagctatggctctgagatgggggagcccaggggggacagtgttgcagaggctacagatgccgggagagggaaggggctcagagaagtggggaggctgctggtaataggggggcagcggaggatgcctttgagtggtactcaaggcctgaaccgaggggcttctgtttccctctgctgcactgccattcacatga

SEQ ID NO: 14926 - DNA, 1258 bp, Artificial sequence
  DNA replication origin
agcggagcagcacgccagcccctgccagccggcgcccagcggcgacactcgggacacacccccgcccgccccccgcgcctccgcgcccccgcacccgcccagcacgcccccagcgcgcctgggctacacacccccggccgcccgtagacagtcggcgctcaataagtgcccgagcgactcctcgcgcacatgcgcacttgaacctgaccgagtggtgacccccccctccacacacacacacacacaccccgccccgcccctcgatcggaaccggcagctgcagcccggagccaaacttgaggcttggcttttcgcaccgagccaaagtttctctcgctgttgtttttccaggcctgcctctgggacaggctcctccgagaggggccgggctcgacccagggcgggaagggagccagacagctggggcgccgcggacgggagctcggctggggcctgggggacccaggcggcgcagccccagccgccccaagcgcccatgcccgcgctagtgggaggaggctggaaagcgccttcccattttcctttggactcaatgttttcttccccatttcatgacatctcactcctctgtcggtgtaaagtgaggcgttatttactgttgctggaattaaatgggagaaagttaactgttagccttcaatccttacgtaaacaagaccggttgcttttggcaccgttaggctctggcttttggataatttgtaacaaggagaattgaagttgttccattgtgttgttctgtgtttttcagagataagaccagcgccacaacggtagtgagggggccccgtgtctatatatgtgtgggcatcaatatttctattcaagcgaatttaatgactccaaaggtagtaattcctttcccccaaaaaaggttttaaaatctgtgttggacataatgtttgaatttgcagttcaccttggatttaaggtgtgctgtttttctggcaaagagtcagtgggagtgtccgggaaaagggctaaagtctttgtagtcagacaaaccggcttgcagtcctgactgagctacattcactttatgatctccagcaggttcttccactctctgtaccccagcttcttcatctgccccaagatggaataacatagataagtgtgtctagctcatagcaaataagtattatttcccttcctccatctcccaccatttgtgaaataagaacattatctaactagaaccaaaatttctataggacactggttctcagctgggggt

SEQ ID NO: 14927 - DNA, 976 bp, Artificial sequence
  DNA replication origin
actagcggcggggtcccggcccgtgccgagtgcccagccagccccaaccctcttcccccgggattctgcggccagagccccagccgagggagggtgcgtgccgcgcacgtgactcttgttgtaggcggggcctgcgcagcgtcggtggagagaagaggggaggaggagggagggaggaggtggggaggagggagggaggggggaggggtagatggggaggagggagggaggaggagggacagggaaggaaggaaagagagtggaggggcggagggaggggaggagggagagaaggaggggaggagggagagaaggaggggagggacggaggggaaagcaggggagggggaaggggaaagcaggggaaggggcggggcgagggtctggcctagtctcctccagcttcgtggagcccgcctggggcgccgctctcccgcccccgcccctccacgggtccagctgggaactggctatggcctcgccgcccggcgagggctgcagtgggttccccgacgactttgccgcggttgctgcttctgccagcgcagcctcggagcgctgcccggctgcagggctctcacctcttccccaggtccctgctcagcagagcctcttaagcttcctgcctgtgtccacagaacccgacatctcaagccccctgaacgcacaggctcctgctgcataaacaccccgccctcctgcctcctgcacacacaggcctacattgtagggcctcccacgcctctccgttcctggaatggagctcacctaaccctgtgctcgtcctgctgtcttctctaagggtggggaaacttgaggttcagaaagctggaaggatttcagtgtgcaccatacatcgaccacacaacagtcccactcctaggtattacccaagagaaattaaaacagatgcccacactaagacttctacgtgcatcacagccaaccagaaaataatcacaatatctgtgaacag

SEQ ID NO: 14928 - DNA, 1316 bp, Artificial sequence
  DNA replication origin
tcaccatggtaaaattacttctaagggctttctaattactgaaatattttgtgaggagatgctttgaaaggctgctggcaagcctggcttcgggagggttccacctgcatagctgcaaagcatcctgactttgaagggtacgaggttcggtttactttttgctcaggaaggaagggggcggggaagggaggaaagaaagaagattgataaaaagggaagaaggaagggagggaaggagaaaggagggaaggaaagaagagagagaaggagaaaggagggaaagaaagaagagagggaaggagtgaggaaggaagaaaggaaggaagaaggaaggaaggaaggaaagaaaggaaggaaggaaggaaaggaagggagggatggagggagggaggaagggagggaaggaaggaaaagtcaggcacggtagctcacgcttgtcattcagcactttgggaggccgaggtggatcacttgagtccaggagttctagaccagcctgggcaacataggaaggcccaatttctccaaaaaaaaaaaaaaaaaaaaaattagccaggggtggtggttcacacctgtcatcccagctactcgggaggctgaggtaggagaatctcttgagcatgggaggtagaggctgcagtgagccacaatcatgctaccacactccagcctgggcgacagagtgagaccctgtctctatttgagacagcgtctagctctcttacccaggctggaatgcagtggctccgtctctgctcaatttcatttttcactgggccctgcaaattacgcagcagcgggcccagggtaatagagcaagagtcaactcttcttgcctttgggaatattttggggtgacaatgagagggcaggatcttgtcctaccgtcaaagtggaagtaaacttggatttcgcctcgggcatgtgtgtctgcagggcagagtgcggggctggcagggatgggtttacagatggaggtgaaagatgggcccaaggcctttggtggatcagacttagacaaagaagctgaggtagaaaaacagtggggttggccgggcgcggtgactcatgcctgtaatcccagccctttaggaggctgaggcaggaggatcgcttgagcccaggagttcaagaccagcttgggcaagccccatagcaggaacctgtctctaaaaaaagatttttcaaaaattagttgggtgtggtggcgcgcatgtgagtcccagctactcaggaggctggggcagctggatcgcttgaacctgggagcttagggctgcagtgagccgtagtcacgccaccgccccccagcctgg

SEQ ID NO: 14929 - DNA, 1251 bp, Artificial sequence
  DNA replication origin
aaaagaattagcaggacttagggtggtggggaagtgggcaggggagggatgggagaggaatcaaagatgatactgaagtgtttaagctcgggtgactcggggaatgtcgctgctattgagggaaagctggtgtggagggggggttgtgatggtaaattttattctttctttttattctgaaataatttcaaattgacaggaaattatctgaaagaatcgaacaaaataactcacctattctctgcccagagactcatcgcctttcatctgtggcctctatgacattctttttttttttttttcctgagatggagtctcgcactgtcacccaggctggagtgcagtggtgcgatctcagctcactgcaatctccacctcccacattcaagtgattctcttgcctcagcctcccaagtagctggggcaacaggcacccaccaccacatccagctaatttttggatttttagtagagacggggtttcgccatgttggccagactggtctcgaactcctgacctcaagtgatctgcccgcctcagcctcccaaagtgcagggattacagacatgagccacggcgcccagacttcaatgacattctttacagcgcaataatcacacgttggacacagttgctctgctgaatctacttccacctggggcggctcctcaagtttccttggctctcaaggtctcgacttttttgaatattacaggccattttgtaggctgtgcctcaatttgggtttgtctagcgtttcctcataagacgtgggtcctgcatctttgacgggaacgtggcagaagtcacgctgcgactcctcattgggtttcaccaggtggcacgcaatgtcaacttatctctttatctgtgggttcacgttcatgatttgattaggatgatgtgcgcctggtctcaccatggtaaaattacttctaagggctttctaattactgaaatattttgtgaggagatgctttgaaaggctgctggcaagcctggcttcgggagggttccacctgcatagctgcaaagcatcctgactttgaagggtacgaggttcggtttactttttgctcaggaaggaagggggcggggaagggaggaaagaaagaagattgataaaaagggaagaaggaagggagggaaggagaaaggagggaaggaaagaagagagagaaggagaaaggagggaaagaaagaagagagggaaggagtgaggaaggaagaaaggaaggaagaaggaagga

SEQ ID NO: 14930 - DNA, 1280 bp, Artificial sequence
  DNA replication origin
tcaaactaggcgtccccgaggcccccagccgccaccgcgggcccgggcccccgctccgcagcccgccacagtccggcgcccaaggcttttgttgtggccgcgacgagaggaacgatccctgaggaggaggcgccgggctgctgctggctcctcggcgcgggctgaggcggagcagcaggcagccgcgcggcgcctcctcgggctccacactcgccgctccttctcccgctgccccggcccaggggcccacacgcttcgcggggctcacctcagaccccggcgcctggctccaaggggtgggggggctgcaccgcctgccgcgggcggccgcgcgtccctcaggtacccggagcggccgaggaacgccggcgcgcgcctcccagcgacagcgagctttcgcgagcaccggggcgcgcggcccggagagcgagctcacgagcgcgcgcgcacgcacggggcaggcgcactgagtacgctcggccgaaagctccctgccggatcctgggcttgcgggcctggcccggcgcgcctcgttgttctctgcctctcgccctgagtgacgcctggagctcccttgctccggcgtgctcgttcccagccctggaggcgctcatctgagatgcactcggggccctcctcgcaatgcactccgtcccctgatgacacagcgcggaggtgtgattgcaggaccacctacacctggtctgagaaccagaggtgccgacctccggacctggggatttggggtgctcaagaggcagatccccggatgctgagggtggaatggggtgcaggagctctggcctgctgcagagctccacgcgaaacagcgtagcggacagaataggctactcgcccgggatagttcatagcctcttggccaagaccttaggaaacaggtggcgctggtcgttactggtgcgcgccccaatttttgctccttaggaaatgtttctcctctccttttctacataagctgctttagagctgaaagaattcttaaagataatctaaaccgaacctctcatttttcagacgaggaaaagaacgcccccaaaggttagatgatttacctaaagccatgcagcgttttaacaacagggcctggactcgtcccaacctagggctgtctttcttttcactgcaccgtttaacctgtcttttctttctcttctttttcgttcctcgtcaacctggatttcatgggcatcattttgttctgtcggtagcacatagaacttaaagaaattgaacgatgtgaatggactattagaattgta

SEQ ID NO: 14931 - DNA, 1072 bp, Artificial sequence
  DNA replication origin
tcctctcgtcgcggccacaacaaaagccttgggcgccggactgtggcgggctgcggagcgggggcccgggcccgcggtggcggctgggggcctcggggacgcctagtttgaggctgggggctgagggctgagggctaaggggggagctgccccgggagactgttaaccctgtccgccctgagcccgcggctcggcaacctgtgcgagtgtggaccgcggttcgctcgcctctaccccggctcagaccctgcgcggcggagagaggggcccggccggagccggcggcagcgcggggtgccgggggccgtaggcggaagacaatgctccgggggctcccggccgcccgaagcgcgcgccgccaggctcccggccccggctcgggtcagcttcgggcccacctttgcctgcccacgcctgaaagtttcccctcccgtccatcagtttgcaaagtccttgctcccttccgcgagcttcccccggctgcctcctccgcgggctgtgggtttgccgtggggtggctgctgctggatccccgagggtccgcatctgaaatgaagctgctgtgaaatagccagcaaggtgaaggagccttgtgtcctttcaagacatgtaaacatcttcctagcggtgttttacatcttaggagtcttgagttcgatccctctgttgtaagagaagccaagggtgcttttcttggctttgtttttaagaacaaaagcacgtgccatgaattgaggcagaggagtagatttcagatttagagagactggctccatgaaggaggtccggcggtttgcccagtgtagaatgactctttgaattttggttcccgtctgggttgagggagatgcagcagcagcacagcagagtagccgcatcagtgactgttacggggaagtgtttagatacagcctcatcttagagaagtagttctgatcgggaatgcttattgatgggaattgagttactttgtaaagccaatatgatatgagcaaggaaacaaagacctgactacccctggggatgttacctccttccctcaccctcctttagtccttggtggtgtgctggt

SEQ ID NO: 14932 - DNA, 1297 bp, Artificial sequence
  DNA replication origin
cgaccggcgccctctgcgctaggcgcccggtgccgtatagccctccgccgtgtgcagccgggtgctggtgttgttgcagcggcgcccgccaggaggcagcgcaggctcggcattggctgcggcgtcccacaatgcaccgggctctggggcctgcacgacagtcttgaacccagctgcggggccgcgagaaggcgggcccgggagccggcgagggcggggcctccgaggaaagggccgggagccgacgcggaggcggtgggcggggcgttagggggcggggccgggagccgccgagggggcggtgggcggggtattcggggggcggagccgggagcctcccagggggcagtgggtgggaccgggagccggccggccgggccggggatgcggtgagccgagggcggggcctcagggggcgggaccgtggagagggcggggccgggccgctggcgctgtcgccggctgcagtggccgccgctggagaccgcgggacctggcgctgcagcgaggtaggggctcttcgggatcttccctttcgggggtgggaagtcttttcttcgtcgtgccaacgggagaagcggcgagctgctaaaatttagagacggcttcgcacttctcgctgtagcccgggctttacccgggggatcgattttaaaactctttgtctggccccgtcgtcctgcccgcgggccggacgtggggcgcctgctctgggcgtctggggcgggcgattgcaagctcgcggtccatgtcccctgcctcggagtgtggacgtgaactccggggtgggctgggctgggtttctacagaggcgggaatttgtgagaactgggagagtgtggctgtcggcaggggtccgtatcacactgtgggcgggggtcccgacccctgctgcctcgggtacggggtaagcggcatctgccacgcgcccgcctcgcgcgctgtcaggaggcgctgtccccgtgggtaagcccgtgccgtgggtgccctccagtccctgcagccccaaacacacctaccccagaggacaccacagaatgcggaccccaaagccagccgtacctgcgagcccctcagcacagctgactttaatttgggatcccacaatttgagcttttcaaaagttaagtttggcagattggaagcccgggaatagggggcgctcggaatgctgagttttgttggtgtttgtcctcagcctgtttctgggtcaccctgcagggctccatccgttcagtctcaccccttggtaagcatgtcctgtcctgaaggctccatgctgaaagtctagacccca

SEQ ID NO: 14933 - DNA, 1069 bp, Artificial sequence
  DNA replication origin
atgagcccttccgggcgcggcccccgctcctcgggctcacgcgcggccagcagtcctaccggcttccagctcagggacccgccgccgccgccgccgccgcctgcgcgaaagtcggcgtcccagaagccgttctggctgccggccgcccgccttccaggccgcgcctgatccgccgctccccctgccggccggcagccatttccgacaggcgactgcggaacttgccgaagggcgccgcgccggaaatggccgaagccggcgttcgcgagcgggggcgcggacgcgggcgcgcgctcgccactttcccgaccgcgtccgaagaccgccgaggcctcccgcagctccgcggtgacacccgggtcaggggcgcggggccgggcgccggggattgtgggaggcgcgggggggcgcgccggccgccttcggagccccccaactcgcgtcctgcaaaggccgccgggccctgtcgagaagacccgaccgcagatggcggggaggatgctcccggcggcgtgggaaccgggtctgactcccgagccaccgccgcttccgcaggggcgccggccccgggaaagtcaagtcataaatccctgaatctaaaactccattctcagagaaaaggcctccaaggacgggcgccgtgcgcggcaactgcctgcagttttgaagccctttgactatttcataacaaagacaaggccgggcggcttggacgcttaggaaaatcctggggctttgcaaaaacaacaggttaatctagtcgtgtgggatgatcaccaaaacaagacaggaaagaagaacaccgtgtcaatgctgaaaagccagcccctgtgagccccaaagtgcacgttttccacagtcccaaggaacacgtgactgtgtgtttccacacttgagaagtcaggataagaccccttggataatggaacaggggatgggggtgggagcaagcaccctacctggtcacctgcttaacttagaaaccagcttttaaaacctgtaactgcagtatgagctacgatcaaatttgtcttaacgtattttttttaatgtttttaatacccagaac

SEQ ID NO: 14934 - DNA, 879 bp, Artificial sequence
  DNA replication origin
agcgcgcgcccgcgtccgcgcccccgctcgcgaacgccggcttcggccatttccggcgcggcgcccttcggcaagttccgcagtcgcctgtcggaaatggctgccggccggcagggggagcggcggatcaggcgcggcctggaaggcgggcggccggcagccagaacggcttctgggacgccgactttcgcgcaggcggcggcggcggcggcggcgggtccctgagctggaagccggtaggactgctggccgcgcgtgagcccgaggagcgggggccgcgcccggaagggctcatgggagggtgccggggctggccccgagcgctggggacgcggcgggagggaccgggtccgccgtgccccggggaggctgctgctgcccggcggcgggaggcatgcagcctccgagcggagtaggcctgcccggtggctcgggggcccggggagaggccgccaggccctcggccggcagccgggagggctaacgggtccctgggctggggcaccccctccccgcccccacacgccctctctcgtcccagtttgggctgctcgggacccgcctccacctttttttggacgctcggctgcagctgttgggcttcctctgctccctgaagccctccaccctctgtgacccgcggcgtttctctggctgctggcccggagcatcttctgtcggcggaggcgcagctccggactacccccaccccttcccgagcacaccttcccacatctgccccccgcttctacacgcagtcgcctgctgccctccccgctggctctttttgccgggctcgcctcctttcaggagccacagtcagaggagccgcttcctgtccgagggtccaggtgctgcaggaccctggctcccaggccc

SEQ ID NO: 14935 - DNA, 1327 bp, Artificial sequence
  DNA replication origin
ctggccaggcggggggctgatccccccacctccctcccggacggggcggctggccgggcggggggctgaccccccccacctccctcccggacggggcggctggccgggcggggggctgacccccccctcccccctcccggacggggcggctggccgggcggggggctgacccccccacctccctcccgggcggggcggctggccgggcagaggggctcctcacttcccagtaggggcggccgggcagaggcgcccctcacctcccggacggggcggctggccaggcggggggctgatccccccacctccctcccggactgggcggctggccgggcggggggctgacccccccacctccctcctggacggggcgactggccgggcagaggggctcctcacttcccagtaggggcggccgggcagaggcgcccctcacctcccggacggggcggccagccgggcggggggctgacccccccacctccctcccggacggggtggctgccgggcggagacgctcctcacttcccagacggggtggttgccggacggaggggctcctcacttctcagacggggcggttgccaggcagagggtttcctcacttttcagacggagcggccgggcagagacgctcctcacctcccagacagggttgcggcccagcagaggcgctcctcacatcccagacagggcggtggggcagaggtgctccccacatctcagacgatgggcggccgggcagagacgctcctcacttcctagatgggatggcggcggggaagaggcgctcctcgcttcctagatgggatggcggccgggcagagacgctcctcactttccagactgggcagccaggcagaggggctcctcatatcccagacgatgggtggccaagcagagacgctcctcacttcccagacggggtggcggccgggcagaggctgcaatctcggctctttgggaggccaaggcaggcggctgggaggtggttgtagcgagccgagatcacgccgctgcactccagcctgggcaccattgagcactgagtgaacgagactccatctgcaatcccggcacctcgggaggccgaggctggcggatcactcgcggttaggagctggagaccagcccggccaacacatcgaaaccccgtctccaccaaaaaaaaacgaaaaccagtcaggcgtggcggcacgcgcctgcaatcgcaggcactcggcaggctgaggcaggagaatcaggcagggaggttgcagtgagctgagatggcagcagtaccgtccagctttggctcggcatcagagggagaccgtggagggagaga

SEQ ID NO: 14936 - DNA, 966 bp, Artificial sequence
  DNA replication origin
tgggggggtcagccccccgcccggccagccgccccgtccgggaggggggaggggggggtcagccccccgcccggccagccgccccgtccgggagggaggtggggggggtcagccccccgcccggccagccgccccgtccgggagggaggtggggggatcagccccccgcctggccagccgccccgtccgggaggtgaggggcgcctctgcccggccgcccctactgggaagtgaggagcccctctgcccggccagccgccccgtccgggagggaggtgggggggtcagccccccttccggccggccgccccgtccgggaggtgaggggcgcctctgcccggccgcccctactgggaagtgaggagcccctctgcctggccagccgccccgtccgggagggtggtgggggggtcagccccccgcccggccagccgccccatccgggaggtgaggggcgcttctgcccggccgcccccactgggaagtgaggagcccctctgcccggccacgaccccgtctgggaggtgtgcccagcggctcattggggatgggccatgatgacaatggcggttttgtggaatagaaaggcgggaagggtggggaaaaaattgagaaatcggatggttgccgggtctgtgtggatagaagtagacatgggagacttttcattttgttctgtactcagaaaaattcttctgccttgggatcctgttgatctgtgaccttatccccaaccctgtgctctctgaaacatgtgctgtgtccactcagggttaaatggattaagggcggtgcaagatgtgctttgttaaacagatgcttgaaggcagcatgctcgttaagagtcatcaccactccctaatcttaagtacccagggacacaaacactgcggaaggccgaaggccgcagggtcctctgcctaggaaaaccagagacctttgttcacttgtttatctgctgacctt

SEQ ID NO: 14937 - DNA, 909 bp, Artificial sequence
  DNA replication origin
cactgctcactgtcctgggaggcggtcaccccaggccctggccacattcatttagccagtccctgccagacaatggccagtgtccgagtgctggctgtgtagggcctgtgcgggggggtggcagtgtgggcacatggcctctgcagaggtaagggaggtgcagggggccgtctgcagctcggctgccctccatatcaccctctccttcccccgcaggtaagaatgacggttccatcggcgggaagcagtacttcaggtgtaaccctggctacgggctgctggtcaggcccagccgggtccgcagggccacgggccctgtgcggcggcgcagcacaggactccggctgggtgcccccgaggcccgccggagcgccaccctctcgggctccgccaccaacctggcctcgctgacagctgccctggccaaggccgacaggagccacaagaaccctgagaaccggaaatcctgggccagctgagccgctgccttagggcgaacttttctgggggtgcccggccccttttgagccctgccagtgacagccctgaggagccaggagcccggtggccccttccccaggggcagggcgatgaatgctttttgcacgacacagggctggtgacctccctgggcctctggaagctttgtttcttctgtacccgggtaaagtgggggcctcaactgtgcctcctcaggtggatggaaggttctgggtgcccgcaggggctgggggatgctaggactgagaccctgggtggtgcagcgcctggtgatcttgctgtgtgcctgtgcctggggccttatgttgctctttctatcatttccattctggtggccccactaatgtcttaacctaaaccataattgtaaccagtgcctttcctccccactggagggcaagccccccc

SEQ ID NO: 14938 - DNA, 1326 bp, Artificial sequence
  DNA replication origin
cgctgcggccccgccggggtccatgcccaccgcccctgaggccgagcccgaggcgcccatcagccaccccccaccgcccacggccgtccccgccgaggagccccctggcccccagcagctcgtgagccccggtcgggagcgccccgacctcgaggccccggcgcccggctccccgttccgcgtccggagggtgcgggcctcggagttgcgctccttctcgcgcatgctggctggggaccccggctgctccccgggggccgaggggaatgcgccggccccgggcgccgggggacaggccctggcctctgattccgaggaagctgacgaggtcccggagtggctccgagagggcgagttcgtcaccgtgggcgcccacaaaacgggcgtggtgagatacgtggggcctgccgacttccaagagggcacgtgggtcggcgtggagctcgacctgccctcaggtgggtaccgggcactccgggctccagggtggtgccgggggtctggggaagcaggaacgtggccggcctgggaggggacagggtccgggcaggagagggaggggccgggaggcagcggcttggctgaagctgcgggagcggctgggcctgcaggggtgaggctgggggcagggctagtccctggagacgacatggaaaattcctgatgattttggctacaaagatcctgtacccatccccccatcgccatggctgttcccgcttttgttccggtctcccctgccctctgcactccctgggctctgctttctcatccttcaccttagagcatctcccctttgccgttccaggaggctcttcctcaccccatccggacacatctcgctggcctctgactcgccctcatttggcagttttgccagtttccatttcatagattcagcaaaagaaccattctcccgccacccagcccaggcctgggtccagatggagaagggtctgttcccgcacgaggcgggccggttgtgccttagtggctggcctgcacctatgcttccacaaggcactccccagggcccccagggcctgtcacctcctacctgaggctgcaggactggggctgtgcatccttggtcaccactgctcactgtcctgggaggcggtcaccccaggccctggccacattcatttagccagtccctgccagacaatggccagtgtccgagtgctggctgtgtagggcctgtgcgggggggtggcagtgtgggcacatggcctctgcagaggtaagggaggtgcagggggccgtctgcagctcggctgccctccatatcaccctctccttcccccgcaggtaagaatgacggtt

SEQ ID NO: 14939 - DNA, 1468 bp, Artificial sequence
  DNA replication origin
cggagtgcccggtacccacctgagggcaggtcgagctccacgccgacccacgtgccctcttggaagtcggcaggccccacgtatctcaccacgcccgttttgtgggcgcccacggtgacgaactcgccctctcggagccactccgggacctcgtcagcttcctcggaatcagaggccagggcctgtcccccggcgcccggggccggcgcattcccctcggcccccggggagcagccggggtccccagccagcatgcgcgagaaggagcgcaactccgaggcccgcaccctccggacgcggaacggggagccgggcgccggggcctcgaggtcggggcgctcccgaccggggctcacgagctgctgggggccagggggctcctcggcggggacggccgtgggcggtggggggtggctgatgggcgcctcgggctcggcctcaggggcggtgggcatggaccccggcggggccgcagcgtccaggccggggcccagggcgtccgacagggtcgcggtggagacgctgtgggagaagtacccgctagaggcttcactcagggggctggggggcccgtcctgtgcctccggagccggggtgaccgctgtgacagctatgacaggcggtggggaaggcactttggcaggtttgtcgcagatcttcaaggccggggcccccatcgtctgcaccagcacgtcagggcccatctccggctgagcctgcagcaggacggggaagcaggggctgagaacagaaaactttccaacacgaaccaagcaggcagctttgacttggaaaagagcatgaggccaggggcagtggctcagcctgtaaccccagtgcttatggagggcaagacggaagatcgcttgagcccaggagttcaagaacagcctgggcaacatagtgagaccccgtttcgacaaaataaataaataaagaacatggctgggacccggccaggccctggttcccacactggttctgccacttagggctgcatggccctggcttccaaagtgataaaggttgaggggccgacagtgcaccccgcaggccctgtgctgtgtgcccaggctcaagagcactgaccatggccacagcccctgccccatctactttttacctttcatacaaaatagaatccagggcctgccatgcagggccagcacgctacaaagaccaaggcccctcgccacagagggcagcacacagtaggtgcacgctaaaaccctgctagggctagttagctttcctcccatggagacaaagcccctgcccacccccaacctcacgaagagactgagtcactaaagagaccagaagagcacttttttgtccggcaaaacctaaacaatgatctcatcggaggaccggaacacactcagcacagcctggccagctcaggcaccaacaaggagccacgggcctgcagcctggctgggcatcccgagcaaggcagcagggggac

SEQ ID NO: 14940 - DNA, 1157 bp, Artificial sequence
  DNA replication origin
aatacagaaaattagccgggcgaggtggtgggcacctgtagtcccagctactcgggaggctgaggcaagagaatggcgtgaaccacggggggcggagcctgcagtgagccgagatcgcgccactgcactccagcctgggcgacagcgagactctgtctcaaaaaaaataaaaaataaaaaaaagaaaaagtagagggagtctgtgggcagaacccagagaggcggggccttatttttggcatcttgacgtcatgtcccaaggaatggcaggggagttggacaccatggaaggacttgaaaacagagcagtaatatgaccacatgtgaattaaaaagtttgttttaatggtccagctgagccccaccccgtccctagctgtggtgtgtaattttgcattaggaaactatatggtacaaatgtatgcagttatcaatgcaaacgtggggaaaaatggttttgagttggagagtggagggaccggttaggggagaaatagccagagagatgacgagagacacagatgggttggagaggggtactctagaatcctgcagaggccaagtatgtgacgggctggagtgaggggacttgggtgacatcgggttttggacagcagtgtataggtccgagagatgaactatagggcaggcttggggaggaaatgattcagttccattttcgagggtctcaggtgtccgagttgaagccaggtttgggagcccgaggggatagtggggacagtgtggggcggggttggctggggagcgccgaggcagtggtgacacttagggccactgaggtgcactgaggtggcggcgccagggaggaatgaagacagggccaagggagtctcagaagtccaggggaggagtgttttaggaaggactccatccacatgcttcggagacagcatggggtgaggatggggggagaccatttcaggtgcaacgctgcagggctcattgtgtgcctgtgcaaggtgccttccgtgcagggctggggattagcaagacaaatcgtattaggcaagtaactgtgatgtctcacagttgtgttaacgcttctggaccttcctacttttcgttcttggttccttggggtccccgagtaacttagtgaggacgtgggaggcgagaggaaagtggttcggttctaa

SEQ ID NO: 14941 - DNA, 850 bp, Artificial sequence
  DNA replication origin
gcggggccggcacgaggggcccgacggcgccagggacggggctggccaggggggaagggaggggagaagagggagccgggcgtctcagcgcgggagcgggtttcagggtccccgggcccctcctcgcgccccgccgctgactataggggcggggccgccggaccccccacggcggccgagggaagggcgcgccaggcacctgccgcctccgccccggcggcccaggagggctcggctctcacctcgccggttcatgggtcgtatccgcaccgccactttcactttggagtcccccatcctgcagccgccgaggaactcgttcggcttccgtctgccgcggccaccggcgactcttcggggttgacccggcgggagggggccgggggcggagccgggggtggggaccgggctgggggcggggccggcgcgagctccgggcgctccccgctgtatggcgggacttgtagttccccagggtcgtcgtgggcggggccgcagcgaaggcgggggcgggaatgctcgggcgcgagtcgtttgctacaacttacctacagcaatgacggcttttgtaaattacacaccattcttgctctcgcagccagtattgagaagtaagccttcaagagctgatacctcttctgaaaaacaattgaatagatggcgtcagggaccccgctacctcttcctgctcatttcctgccaatcttagtgtttgatccctggctcaagttatttcctctgcctggattgacgtccggccttgtttgctgagctcgtccttcacgacaagttgcaaatcacgttttctgggagtgtccataggtccacgggttaacattgtcctgtgagt

SEQ ID NO: 14942 - DNA, 1393 bp, Artificial sequence
  DNA replication origin
ttagctctcgcccgcccctttctgcagcctaggcggcccgggttctcttctcttcctcgcgcgcccagccgcctcggttcccggcgaccatggtgacgatggaggagctgcgggagatggactgcagtgtgctcaaaaggctgatgaaccgggacgagaatggcggcggcgcgggcggcagcggcagccacggcaccctggggctgccgagcggcggcaagtgcctgctgctggactgcagaccgttcctggcgcacagcgcgggctacatcctaggttcggtcaacgtgcgctgtaacaccatcgtgcggcggcgggctaagggctccgtgagcctggagcagatcctgcccgccgaggaggaggtacgcgcccgcttgcgctccggcctctactcggcggtcatcgtctacgacgagcgcagcccgcgcgccgagagcctccgcgaggacagcaccgtgtcgctggtggtgcaggcgctgcgccgcaacgccgagcgcaccgacatctgcctgctcaaaggtaaacgagggctccgggcgctagctggagtcggggagatggagggggtcttggcggcctgcgccttattggcacgggaaggagtccccggcgtgattcgtggttgcggggatccccgcgcgcccctttgtgtgtgttggtgtgtaggggtttgcaaggtttctgtgcaagtgcgaggttcaagtcctcagggaaagtgcggacgggtttctccggtcacctgcaattccgcaccgtcctagcgaggccccgtttattgacattaacggtcctagcctcgaggatgaagcgactcctctgcgcggtccatcttgagtcccgggaacagtttccaagtaccacggggcgcgtggggacaagataggcctgttggtttggcgtgctggggccctacactgagccggaccgggagaatcccagaggtggagaaaaggtgaagaggggtgggcgccgaggtacaattggccttgccagtttcactgaaaacaagaccctggcaaatgcagaaagggagattgggttgcacacactgtgtagagcgatctgtatctgcgttcccgctgcccaactccaagctcagcttggaaggtggccaatccccgtcccgggctagatccaggctctgggagcgggaggctgaaggactgggtatctgggggacgccgggcggaaccggtcctctagcgcctgcaaatccgggcagcggagaatgatcaccttttgttcagcccggattttcgactatctgatggcggcgcgtgccggattttagcgagccctggcgaaactctcggcggcgagactgtcttgtcacatttggtagtcggaaatcctggaaaaatcgcgtgctgtccgagtccctggagggacc

SEQ ID NO: 14943 - DNA, 1055 bp, Artificial sequence
  DNA replication origin
aacctacggggctgtcacgcggggaagcgcgaaggtgccaagggatgaaagctcaaacccgagccctggcctcctcagccggctatttcctttggcgccgcccgcctagcggcggggtgcagcggcggcacaggtgccggtgtcgggctggaggcgcggcgcaggctgggcccgcgggtagacggcgaaaggcgccgcgcgctccattcacaaagtccgggcgctgcccgccgctggcggcgggtcggaggccgcctccctcttcctctcggcctcggttttatgaatgggcctgatggcgagcacccggcgccctgtttactccgctctttgtgacgtcgagttcccgtgaccgggagccagcggccgcgctccattcaagctccggggagggggtgggaggaggggcccggagggggcggggagtcagcgcggggggcgggggacagcgcggggggcgggggacggcgcggggcccggaatggaacggggcggggcctggcggggtagtacctagcgccccctcccccgggagcgcggaggagcattaataaacctctaagccgaggagaaaactctggctggggcagtgcgctgagcgccggaggagcgtaggcagggcagcgctggcgccagtggcgacaggagccgcgcgaccggcaaaaatacacgggaggccgtcgccgaaaagagtccgcggtcctctctcgtaaacacactctcctccaccggcgcctccccctccgctctgcgcgccgcccggctgggcgcccgaggccgctccgactgctatgtgaccgcgaggctgcgggaggaaggggacagggaagaagaggctctcccgcgggagcccttgaggaccaagtttgcggccacttctgcaggcgtcccttcttagctctcgcccgcccctttctgcagcctaggcggcccgggttctcttctcttcctcgcgcgcccagccgcctcggttcccggcgaccatggtgacgatggaggagctgcgggagatggactgcagtgtgctcaaaaggctgatgaaccgggacgagaat

SEQ ID NO: 14944 - DNA, 1240 bp, Artificial sequence
  DNA replication origin
tgccatcgtaagccattttggagcccggagcaaaaggaaatatcaccttgcccaagcggtgcccctacagctcatccgagtagggcccgggggtcgaggcattcggggcccagtgggggacgaggccagtcgaaggtctcggaagtggaggctccgccgagctccggtcggggagtgcagggatggcccccgggaccggaggtgagagctcgggaaagccgctccgcccggaacaaaggcatggggagagggtgagcttgggcgggagagacccggcgggtaccggtgccctcgctgcctgggtcgggcttccacgcgcgccccggaatggaatacgctactctgcagcctccgaaactgcgagcgagtcctgtaactcccttgctctgtgattaattctcactaacaagacttggcaagatgtcgggcgaatgatttttggcttctgcacggtccccaccgcgtgcgtgcacaaacccccagccaaaagccgcctctgggaaattaaatgcaaaagagaaatggggatggggagggctgctacgtgaccaggaaaaagggatgcccagaaacatgaatcggacccagagctgctgaagtcctttcaaaaggtcattctttgcgggtacattttccagggtccagctccgcaacaaatgtggaccctgtcatttcctgaaaggataattcacaactatgcaagatagggtgaagacgtttcccaaacccgaaaaccttgtttttcccccgaccagggttaaataaacatcttttaggaagcgtggacaggagcgcagcctgctctcctccctcggaacaccattccggcaattaatgcctccctttgggtagtaaagcaacaaaccccacacctcactccgatcctgggcttcgggcgggaggactttctctttcatcttccaagcagggggttgcccacgttcttggggaagctataaaactgatttaatggctttagatgaaaatcgatcacgctaatgcatacgctaacgtctcaggaatcgcatattcagaaaggactggccgggccgaaagcgcacggggagtctggggctaggaggtgtcaggccccgctgggtgggcagcagcgctccggtcccctctccacttgggtaaccgggaaaaacctacggggctgtcacgcggggaagcgcgaaggtgccaagggatgaaagctcaaacccgagccctggcctcctcagccggctatttcctttgg

SEQ ID NO: 14945 - DNA, 1548 bp, Artificial sequence
  DNA replication origin
ttgacgtcccccaattcatatgcggaagtcctggcccctagtacctcaagatgtgcttggttttggagctggggtctttaaagaggtaattcagttaaaatgaggttgttattatgggccccaatccaatatgactgttgtttttataagaagagctgattaggacacagacatgtagaggaaagaccatgggaagattcagggagaaggtggccatcttccaaccaaggagagatgggcctgaagagcccagccctgctgacacctcgatcttggacttcccggccttcagaactgtgaggaaataaatttctgttgtttaagccacccagcctgtagtactatgtcatggcagccctagcaaactaatgtcccccccacatctaaaattggcatcatttatggagatggagttgagcccagatttctcttgggggaacattgtctttggtttctaatttgacaaatgtttactgagtgtagaactatgcaggcctctgtaaggctcacaaggaatacaaacaggagaaagtccaggtcccagccctcagggagcttatagccatctcagatattctcgggagagtagcaagcttaggtataaaggaagtgttataggagcgaaggtgaggaagagacttaaggcactgagagggacaggcaaggctgcagaggagcggcaagcatctgactcgggtcttgaaggagaatgaaaagaaggcctttcttgtgtgagtgtgtgtgtgcatgtgtgtggagtgtgatgtgagtggtgtgtggtgtgtgtatctctgtgtatgaagtgtgtgtgtggggatgtggtatgtagtattgtggcatgtgtattgtgtgtgtgtggaatgtgtggtgtgtatggtacatgtggtgtgttgtgcataatgtgtgtgtggtgtgtgtatggtgtgttttgtgtgtgtggtacgtggtgttgtgtataatatgtgtgtggtatgtgtatggtgtgttttgtgtgtgtggtatgtgctgtgtgtggtgtatgtgtggtatgtgtttgatgtgtatgtggtgtgtgtgtgtgtgttgtgtgtggtgtgtgtgttgtgtgtggtgagtggtgcagtgtgtgtgtagttgtgatgtaggtgttggtgtgtggttgtgtgtgatgtaggtgttggtatgtggttgtgtgtgatgtaggtgtgtggtgtgtggttgtgtgctgtgtgtggtgtgtggtacaattagtgtatgtagtgtatgtgtgtgttgtgtgtggtgcagtgtctatatgtggtgtaagtgtgtgatgtggtgtgtagtgtgttgtgtgggtggtgtgggtagtgtgtgttgtgtgtgcatggtgtgcggtatatgtggtgtgtgtggtgcatgtggtgtgttgtggggtatgtgtatgtggtgtatatgtgtgatatgggtgtgtggtgtgttgtgtgggtggtgtggatggtatgcgttgtgtgtgcatggtgtgtgtgcagtgtgtgtgtttgtgtggtgtgggtgtgtggagtgtgtaagtggtggtgaggtgggagg

SEQ ID NO: 14946 - DNA, 1045 bp, Artificial sequence
  DNA replication origin
ggatgcaactcctatgccccagtaaacagcatttattggagtctgtgaaaacattactaaaatagcccttatctttcattagttttcccctatatatttaccttcttaaaatctactgcccctagaagtccaaaacctttcctttgtctacttttccacaatgcatcaccctttgttaaaatgatacatgctcccaggcctaattactttttgagttttcacttcttttctgtgaagcctccttgtgcatgcaaaataaacctttttttttttcctggtaatctgtactttgttagtttaattcacagttctcagcttctgaacctaggagggtaaagaaagtttttatcctttcctacactaggaaagatgggtaaatagttctctgaaaacttttgattgcgatctgccaaggaaaatttcccccaaggagagacaacacagtgatgaataaatgtgttaatagagaacggaaaagccatcgcaggtggcggggtgtgttgtttgtgtgtgtgtgtttgcgtgtgtttgtgtgtgtgcgtgtttgtgtttgtgtgtgcctgcatgtgtgtgtgcatgcatgtgtttgtgcgtgtttgtgtgtatgtgtttgtgtacgtgtttgcgtgtgcatgggtatttgtgtgtgcgtgtgtgtgcgtccttgtgcgtgtttgggtgttgtgtgtgtgcgtttgtctgtgcgtgcgtttgtgtgcgtgtctgtgtatgcgtttgtgcgtgcatgtgtgtttgtgtgcgtgcgtgtctgtgttgtgggcgtgtttgtgtgtgcctgcatgtgtttgcgtgtttgtgcacgtttgcgtgtgtatgcatgtttgtgtgtgtgcgtgtgtttgtgcatgtgtgtttgtgtgtgttttgtgtgttgtgtttttgtgtgtttgtgtgtttgcgtgcgcgcatgtatgtatgtgtggtggggagttaggagctttggcagcaaatggagcaaggaacttgcttggtcccttggagaaaagagaggtggccaatggggttggtcaaggttggggtgggg

SEQ ID NO: 14947 - DNA, 1277 bp, Artificial sequence
  DNA replication origin
ggctgcggggcgaagccggggtcgcaaccgtccgttgcccgagggcgccgcgcccacctccgggccaagcgcagggccggggcgggggtcgcttccccggcgcagggaccccacgcgcgcgcgcgagcccggaggggaagtgcgggggccgcgtgggacccccggcccatcttcccccgccggccccagccctcccgcgtcctgcaacccaggcccacctttgatgcctgccatggcggtgacgtcgctcctggctccacgacccgaggcggcggcggcagcagcggcagccgggagacccaagacgcgctacggcggccagacaacacccggaagtgcgcgacgcagcacttccgccggcgactcgggctcgcgcgggggcgcgggggacgcgccgggctgggctgtggggtcgaccccctgcctctcttctccgcgggtgtgcagatcgccgccggccgaggcttgccgccgccgccccgactgggggaatgagcaggcgccaggtcttgaattcctgtcagggccggtctgggggctccctgctgaagcccctgtccctgatcccgcaacctcccgcgtgcgttgggaaggggtcgcgggtagcggccgtcctttggatgcacgtgtgatggcttttggcttaatttcacattgttttgtttgttttttgagacagggtctctttcgcccaggctggagtgtgatcacggctactgcagcctcgatctccagggctcaagtgattctctcacgtcggcctcgcagtaactgggaccacagacatgagccaccatgcctggcttttttttgttttgttttgttttgttttttgtagagacagggcggggtgtgagactctcatcttgttgcccaagctggtctcctgagctcaaggatctgccctcctcggcctcccaaagcgctgggattacagcttgataccctaccttgttttaacctgattgactcgctcttagctgagagagcgggacagactccattttggtttcttcgcttgcagcaccttgtccccctcccttaaggacataactggtgcagactgacaccaagcacatccaggaatgtgcttactgataagatactgaggcaagctgtaccagcagctcctgggaacgcgctcggttgatggtacccaaagcccctgcgtttatctctttgtgataatttaagccccatgcacctggaactgtttattttcctgtaactgtttctataaccatttatcttttaactctttgcctgttctgcttctg

SEQ ID NO: 14948 - DNA, 898 bp, Artificial sequence
  DNA replication origin
cgcctgctcattcccccagtcggggcggcggcggcaagcctcggccggcggcgatctgcacacccgcggagaagagaggcagggggtcgaccccacagcccagcccggcgcgtcccccgcgcccccgcgcgagcccgagtcgccggcggaagtgctgcgtcgcgcacttccgggtgttgtctggccgccgtagcgcgtcttgggtctcccggctgccgctgctgccgccgccgcctcgggtcgtggagccaggagcgacgtcaccgccatggcaggcatcaaaggtgggcctgggttgcaggacgcgggagggctggggccggcgggggaagatgggccgggggtcccacgcggcccccgcacttcccctccgggctcgcgcgcgcgcgtggggtccctgcgccggggaagcgacccccgccccggccctgcgcttggcccggaggtgggcgcggcgccctcgggcaacggacggttgcgaccccggcttcgccccgcagcccccactttctgccgatttcggcagcctctctcccacccatcgccccccggacaaaatatgaagtggttggcggtcagtgaggagtcccgtcgcgacttggacggccacacacgttttgcaggagtttgcatccgagagagaggcaggcagagcgtgggattgagaaggctgaggctgctagagatgccagctatggaaaaccagtcatttcccaccgaaaggcacaagtgcggtctgcgggcgctgcacgggtctgcccgaaacctcgaccccacgtccaccccggccgcccgcgcccgaggctttacaggctcccgaaacgggtgcattttcatctgcggtgtctggaccctagagttgatcctgtaggcgaccccaaagtgctcctggctctct

SEQ ID NO: 14949 - DNA, 900 bp, Artificial sequence
  DNA replication origin
ggacccctctgcccggccagccgccctgtccgggagggaggtgggggggtcagccccccgcccggccagccgcccagtccgggaggtgaggggcgcctctgcccggccgcccctactgggaagtgaggacccctctgcccggccagccgccccgtccgggagggaggtgggggggtcagccccccgcccggccagccgccccgtccgggaggtgaggggcgcctctgcccggccgcccctactgggaagtgaggacccctctgcccggccagccgccccgtccgggagggaggtggggggatcagccccccgcctggccagccgccccgtccgggaggtgaggggcgcctctgcccggccgcccctactgggaagtgaggagcccctctgcccggccagccgccccgtccgggagggtggtgggggggtcagccccccgcccggccagacgccccatccgggaggtgaggggcgcttctgcccggccgcccctactgggaagtgaggagcccctctgcccggccacgaccccgtctgggaggtgtgcccagcggctcattggggatgagccatgatgacaatggcggttttgtggaatagaaaggcgggaagggtggggaaaaaattgagaaatcggatggttgccgggtctgtgtggatagaagtagacatgggagacttttcattttgttctgtactaagaaaaattcttctgccttgggatcctgttgatctgtgaccttatccccaaccctgtgctccctgaaacatgtgctgtgtccactcagggttaaatggattaagggcggtgcaagatgtgctttgttaaacagatgcttgaaggcagcatgctcgttaagagtcatcaccactccctaatctcaagtacccagggacaca

SEQ ID NO: 14950 - DNA, 1924 bp, Artificial sequence
  DNA replication origin
ccgggcagaggggctcctcacttcccagtaggggcggccgggcagaggcgcccctcacctcccggacggggcggctggccaggcggggggctgatccccccacctccctcccggacggggcggctggccgggcagaggggtcctcacttcccagtaggggcggccgggcagaggcgcccctcacctcccggacggggcggctggccgggcggggggctgacccccccacctccctcccggacggggcggctggccgggcagaggggtcctcacttcccagtaggggcggccgggcagaggcgcccctcacctcccggactgggcggctggccgggcggggggctgacccccccacctccctcccggacagggcggctggccgggcagaggggtcctcacttcccagtaggggcggccgggcagaggagcccctcacctcccggacggggcggctggccgggcggggggctgaccccccccacctccctcccggacggggtggctgccgggcggagacgctcctcacttcccagacggggtggctgccggacggaggggctcctcacttctcagacggggcggttgccaggcagagggtttcctcacttctcagacggggcggtcgggcagaggcgctcctcacatcccagacagggcggcggggcagaggtgctccccacatctcagacgatgggcggccgggcagagacgctcctcacttcctagatgggatggcgaccgggaagaggcgctcctcgcttcctagatgggatggcggccgggcagagacactcctcactttccagactgggcagccaggcagaggggctcctcatatcccagacgatgggcggccaggcagagacgctcctcacttcccagacggggtggcggccgggcagaggctgcaatctcggctctttgggaggccaaggcaggcggctgggaggtggaggttgtagcgagccgagatcacgccactgcactccagcctgggcaccatcgagcactgagtgaacgagactccgtctgcaatcccggcacctcgggaggccgaggctggcggatcactcgcggttaggagctggagaccagcccggccaacacagcaaaaccccgtctccaccaaaaaaaaacgaaaaccagtcaggcgtggcggcgcgcgcctgcaatcgcaggcactcggcaggctgaggcaggagaatcaggcagggaggttgcagtgagccgagatggcagcagtaccgtccagctttggctcggcatcagagggagaccgtggaaggagaccgtggagagggagagggagagggacagggacagggacagggacagggacaggggagttctttatttaaatcaacaaactcatattcctcaagccccagaccatggtaggcagccctcctttctctgttccctcacccctactccctagccacagtgaggggaatggaaaatgagaagccacgagggcctctgccagggaagcctaccccagatgtgtggtgagcacggtgcagcagtggctggggtagcaaccgccacaagcccctccctataaattaagtccctgcagccacagctgtgggagaactaaaaaccgcctttgcaaaattatgactgagacagtgaaagagatctaacctaactgactccatattggttctacctttaagctgtccttgttccttcctgggcaaaggccgaactaactttgagaggaacttagtttacagcttaaaacaaagatgataacagccctttcccaaaacaaacctccttcttgcctagggactagactgcctttataggactaacaaattagccacaagattagaaattatggtttaggagtcatacagctggaggctacaagattctgaccctccctaaactgctcctaaaatcagtgcttaagata

SEQ ID NO: 14951 - DNA, 1151 bp, Artificial sequence
  DNA replication origin
aggcacagtggctcatgcctgtaatcccagcactttgggaggctgaggcacgcagatcacttgaggtcaggagttcgagaccagcctggccaacatggtgaaaccctgtctctactaaaaatacaaaattagccgggcgcagtggtgggcgcctgttgtcccagttactcaggaggttgaaccaggaaaatcacttgaaccccagaggcagagtttgcactgagccaagattgcaaccactgcactacagcctgggtgacagagcgagactctgtctcaaaaataaaatgaaataaataagagctagaagtaaacccagccaccaagaaggaccctctgtcggtggcctcccagcagaggagagaaagtggaagggacaggttatccagagtggggaccacataaggtctgggaaggagaaagtgggaaagatgaagctgggaccctggagggagagcctcacagaaaccagggaggcggggggtgggggttgggactcatcagggagtagggggatggctcagaggcggaagtctctaggctgggtgagcacacaaattaagactggagtcatggaggaaatagtgagaggggagtgatgagatctctggttgagcaagaggaagacagcgtgagacgtgcagggcagaggagaatttcaggaattcagagcgtggggctggagcagctctgcctggtcatctgtttgtgtcttgatgatgtggaatgagtggagataaaggtctctagacctgtggaggctgaagaactgcaaggaaaggaaatttatggatgtttctagaatggaaaggggaaagactaagacctctgaagaagatcctagagcatgttgagcaggaagaaggattgggaaaggcgcgtgaacagaatggtgtggacatccatggaagctgccgagagttgatgaaagaactagttgggaaaagggacggggacccaggaaaaggagaggcccctaggaaggtggagagtgagaggaatgtcataccaggggaggagggagctatcgtccagcagataaaatagattttgattaaagtgaagtgttacagaaaggaaaagggatggtttacttcccaggataccccgaggagagcacagactgagctgagagaagcaagaatacagac

SEQ ID NO: 14952 - DNA, 1451 bp, Artificial sequence
  DNA replication origin
cccgtcccctccttccagcggctgcagcccccagccccaactctccgcgcttactcctgggacgcgcgtcctcgccccatcctttgcttccttccttccttccttcttccttcctcccctggctcccgccctccctctccaggtcgccctcccggggcccgattgtctcggtgccccgctcccggcccgcgccctgccccgtctctcccttgcacttcctgagtcgcccgccgccgccgtcgcagactcgccgcgggagccccagcccaacccgagcccgacagccactgccccggctccagctccagccccacagcccgcggcgcccgcccgagggagccccggcgcccggggaaggctccagtgggctagcgcgccctcgcccagccccgcgccccagccctgcccggcccggcgaggaaggaccgggaagatgaacaacggcggcaaagccgagaaggagaacaccccgagcgaggccaaccttcaggaggaggaggtactgggcggctcggtgtggtggcgggggcgacgcgggacccagtgcgggcggccggcggggcgcgggcccggggcgcggcggtggaagaaggttcaggcatggcccgtgccccggacgcagccccacagtgtggcccggggagggtggatctcgggagcgtgtgtttttgtgtccacgcgcgtctgcgggccccaaattgcgtaactccaaggacttttcggagacttttgtaagtataatgctcagctttgtttgcccgggatttataagtggaaccgagagctgactcctgggtgacctcagataatcgggactcggagggtcaggacttagggccggggctggaaattgtgtatggattcagggtcggggggggagcagtttaaggaagaaactcgggggaaagttctcgttaaaagatacctctattccctgccccctccctttccgtgttaaaagttcttggtgaaatatctttctagccgaggttttttggattaatagataactcatcagccacattcttctctgctgagtcaaagaccccgagcctgggcggtgaacgcttgtgattttaggggccgtgcagctgaggggagcagagtaagagggttaaaaacgcagcaattcaccaaatgctcatcgagggtattttcataggactttgacttctgagcatgcattttaggtggtgcgtccgtaatcatgatgaaagttttgtgactgcggagcgttccttcggtggaaacaaaattgagtagatgtggtcagaaggggagtcggactcaggaacaaacgtttcagaattcagtaggatatttgtggtatcctaccaaatgactctttttgcaggtacgttatctggagtccaagaaattatttctggcgtacttcttaacatcccacacagttgagttcttaaacattctagaggaacttgagagtgtgt

SEQ ID NO: 14953 - DNA, 1234 bp, Artificial sequence
  DNA replication origin
cgagcacaaggcggcctgggaacctcctcctccccatgggcctcctcacgagcggttctttcctcgctggcctgagtcaggaaacgcaggcttaggacataccggagcttctgcctgcaccacgactccgtcaggctgcctgtgcattgggtctcttctggcgaccatgccagatatgaccagcgatcagatgaccagctagagcagggtccccagtatcagggaaaggcaaagttgctgtcctcagggccaccagcaggtaccaaagctcatttaaggcagggctggggtcactcccaacactcattgcaattacagggacaagggtcagaaacttttcccaggcaggaaggctagaaaacactcctctgggaaattagaagtgtgttcagaacaaaagaaggagggcaagagtggggaagatgggggtgaggtaggggcgggcagggaaggggacagaagagtctaggggaggagagggagggcagaggtggggagaagaaagaactcatacctacccacggctcatggcctggtgcatctgaatccacttgctcactaagcaaagagcagagttggagctgccttcctgagacaggtgggaaaggacggggcggggacacagagcccccatggcaggtggggggctggacacctaaacacacagtagagggtgatgggtctgtgtgcactgggtcagtgtggagcgcagtggtgtgactggtgcggcctgggtgtgggttggggcgctgagccccgacgaggccaagacgtgacggtgtttcacaggagacacaggagggggagggctgcccggggaggagagctgcacagtggatggcatggttctgctttcggtgcaggtgactgcgagaaggaagccctgccccagcctctctgaccagctctcgcacacagccctcacgttctcactcgcacaggtgcctgcagggttggggacgagcgtgcagcccgtcttcaggctctcgtcagcctggtcgaggcgcactccagagtgacatgaaggcgggttccgagctgtggggtccaggggaggctgtgctcagctgaggagtgaggacgccagtgatgcaataggtggctgctcctcagagtggatgtggtggcgggtggcggacacacagacccctgaattcattgctcttgtgtctcaggctaggacactatgtgcttgccaagtggggggctcttctcaccgcatccacagacaccc

SEQ ID NO: 14954 - DNA, 1274 bp, Artificial sequence
  DNA replication origin
cgggatagttccgctcccgcggcaccagaggcggggcacgcaatgacgcatgcgctcgcttggctgccctggcgccgcggtggctgccgggactgagctcctagcacccgatcgggaagtggcgggcggagtcccgggtccagtcgccgcctcagctaccgccgctgccgccgccgccgccgccaccgccagtggtgagaccccgacctggcgggtcagcgctgggcgtgcgtgcgggcaggcgggggcgctgacgagaagcaggaagagggtgcagtgccggcgtgggcggccggccgaggcggaggcgcaggaagggggcggcgagtcgtgcgaggctgcccttctcactcaggtaggggctgcggccgccgggtgtggggcgcagagccccggcttgctgttccctgggacgcaggcgcgccgccgcctcccgggaggctgagcgtgacctccacctcacgggaagctgggaccgccgttctcgaagcgaaacacccagcacgcgaaccgttccccggagcattgtctttaggccagaggttcattgagcaaacttttgggttggaaagagggaaaattcgcggtctgccgcctgactgtgcctcttccaagcctccaagttcacgggcgcggtagccaagcgaaccgtgtgtggagtttgagcagccgcggggtccagccagctcaagactgtgatttaaaatgatgctcatacgcggactgctttctaggctaccttttggagatttggtttgtgatgatccctaaactttaacgatagtagttgatttctgcagtctaaacaacgctgcggcccccttttcgcccacctccccacttccgtcatttaagggcgaagcagcctgcttttcatagccgggtcctgaggtgccagggacactaacgaggctgggtaaaagtgaaagagaggggaagtagtaaggttgaaagaggtcgaatggtggcaagaatcgtgggcttggaggcagatttcagtttaatttttgggttttccgtgtctgcccacggaggaaccagccaactccttgagttgtggttttgtttaattgtaaaatggacatggtgatgtagcctgtttactccataggggggtccagagatctaaaacttagtacacatattgggtagtctttgaaaaaggaggaaaagttaggcggagcacgtgatggtgaaagacagacattgcgaagctttctgctctagatgcctttgaacgttcccgaacctcacaggtggcctttgttttaaag

SEQ ID NO: 14955 - DNA, 1069 bp, Artificial sequence
  DNA replication origin
aggcggagaaacccctcaggctccgccaccggggcggggaactgggaggcggccccgcctctgggcatcctcctgggtcttgcctagcggcgggcgcatgcttagtcaccgtgaggctgcgcttgcccggggcccgcgcccccctaccccggggaccgcccccgggccgcccgccccacttggcgcgccacttccgcgtgcatggccctgctgccccgagccctgagcgccggcgcgggaccgagctggcggcgggcggcgcgcgccttccgaggcttcctgctgcttctgcccgagcccgcggccctcacgcgcgccctctcccgtgccatggcctgcaggcaggagccgcagccgcagggcccgccgcccgctgctggcgccgtggcctcctatgactacctggtgatcgggggcggctcgggcgggctggccagcgcgcgcagggcggccgagctgggtgccagggccgccgtggtggagagccacaagctgggtggcacttgcgtgagtaccgccggtttgttcgggcggggggcgcctctttgtctcggtctttcgggggacagcctgtgctcgttcctatggcgatcctgtcccccggcgctgggctttcctcttttccacccccgcaactccccattccgaagccaggaacccagcaggtggaggagagagaggcgtccgggggcttctctgcggcccgcaaagccgagccagcgtctgcttccgcacggatgcgatattgaccagggccggggcgggttagattaaccttcctccatcctcacttgtccaagtgggagaggattggattctgttcttgaccgcgtgaaacacaaaactgcatctgggaacattgctggtggcctgtgtgtagggacgagggtgacggtgccatagatcctggttcttgaaaaatgtagatcctggttctcccgtttcaagggcagaatgatttatagcggttgttgtcaaccttggctacacattcgaatcacctgagggtgcctggattcccgacttaattggtctgaggtgcacttgggctttgggatgtttcccgact

SEQ ID NO: 14956 - DNA, 1111 bp, Artificial sequence
  DNA replication origin
gccctgcgtccttgtttgcagctgaggagaaactcgctgctctgaggcagcgagaggagagagcgccacaacttggtggtggcctccgcctcgccctggctccctggaggcgcagtttgtagtcagcagaaggcagcgcggagcagccgcgttgcgcagggcgcgtggggatcttcgtggtgcgtggggatatccgcgggggcggggagggggcgggagccccgccgccccgggaccgcaactcgggactcctgtgggactcgcgaccctggagcgctagggcggggaacgccgcccgggtgactggcagtccgcgcgcctcattctcccctgcagagcccgcgctcggaccatgcccgcctgcgccggctgtctcgctgcaggagccggtggacgcgggggagcctcggtaggtgagggcggcgcgggggtagctgggctccgacgcgggcgcctgaggggagcgtcccccgactgcaggaggactggcgcgcccgggatgcggtgccgcgtgtcccggcgctgtggctgttgtaaggctgagtggaggttttgcagggctgcttcgccctggtggctcttggcttcctggctcggctcagtgaagggagtgaaacccctcgggtcccggcgtggtgcgggtgcaggaagagactcctgcctcagtttcgtgtgagccgcgtcccaagcccagccctgcacagatcctttcaggcagtttccatcctctccgcgctcggggttgagtttccgcgtttggaatgctcggtttgaggcgcatggccaccgcgctggctgtgtcgggagacagtgcccagggatgatgttcgagaaagtggagaggctgaggtcgctggcaactcggagactttgaagataccacggttcccttcaagtttaaaaatggtgagctctaagtgcagtgtgaagcaccccaacgccctaagtgcactgattgcttttgggggtgatgggtgaatatggggctgtttcaaagtatgaagtagaagtgataccattattcgctttttttatttttgaatttcctttttgacgactatgtgtgttggtggagaaggaagagaagtgatacaagctttggcgagcgctg

SEQ ID NO: 14957 - DNA, 1398 bp, Artificial sequence
  DNA replication origin
gccccccgccgtcgctctccccgcctccccttccctcccctcctggcgggtgcggggccggtgtccgaagtcaggcggcggcccccgcagcggccgcaggaggggcggctgcggtgggcgccgcgggcgatgcccctgcccggctgctccggcggggggcagtgcgagcggcggcggcgggggaggaggcggggggcggcggctgcggcggctgcagcagaggggccgagagctggcggtggcggcggcggtggtcgtgaagggcatcggcggcggcggtgatggcagagatgatgtgagtgcccgccggctggagacctggggccgcggagcgcgggacgggcggcggcggcgtgcgggagcggccccgggggcggcggagggatgcggggagcgcgggcagagccggagcggcggccgccaaccggccggcagtggctggagccccgcgctgcggcgccgggggagccgggcccggcgtgggggtcgcgggcggcggcggggcggtcaggccgaggggcgtctgcgattgttctcaacacccctcccccaccccatcccgtgtgtctgtttgttacttgcagctgaagatggaaagagccaggcgaaggggaggcggcggcggccgcggccgcggaggcaagaatgtagggggctctggcctaagcaagagtagactctatccccaggcccagcactcccactacccccactacgcggcctcagccacccctaatcaggccgggggcgcagccgaaatccaggagctggcctccaaacgagtggacatccagaaaaagaggttttacctagacgtgaagcaaagctcccggggccgcttcctaaagatagccgaagtctggatagggagaggccggcaggacaacatcagaaagagtaaactgaccctctccctgtctgtggcagcggagctgaaggactgtctaggggacttcatcgagcactatgcccacctgggcctgaaaggccaccggcaagagcatggccacagcaaagagcaaggctccagaaggaggcagaagcactcggcaccctccccaccagtctcggtggggtccgaagagcatcctcacagtgtcctgaaaacagactatatcgagagggacaataggaaatattacctagacctaaaggaaaatcagcggggtcgcttcctacggattagacaaaccatgatgcgggggactggcatgataggttattttggccacagtttgggccaagaacagactattgtcctcccagcacaaggaatgattgagtttcgtgatgccttggttcagctgattgaagactatggcgaaggagacatagaagaacgaagaggtggagacgatgacccgcttgaactcccagaggggacttctttcagagtgg

SEQ ID NO: 14958 - DNA, 1689 bp, Artificial sequence
  DNA replication origin
cctgcggccgctgcgggggccgccgcctgacttcggacaccggccccgcacccgccaggaggggagggaaggggaggcggggagagcgacggcggggggcgggcggtggaccccgcctcccccggcacagcctgctgaggggaagagggggtctccgctcttcctcagtgcactctctgactgaagcccggcgcgtggggtgcagcgggagtgcgaggggactggacaggtgggaagatgggaatgaggaccgggcggcgggaatgttctcacttctccggattccaccgggatgcaggactctagctgcccagccgcacctgcgaagagactacacttcccgaggtgctcagcggcagcgagggcctccacgcatgcgcaccgcggcgcgctgggcggggctggatgggctgtggtgggagggttgcagcgccgcgagaaaggcgagccgggccgggggcggggaaaggggtggggcaggaacgggggcggggacggcgctggaggggcgggtcgggtaggtctcccggagctgatgtgtactgtgtgcgccggggaggcgccggcttgtactcggcagcgcgggaataaagtttgctgatttggtgtctagcctggatgcctgggttgcaggccctgcttgtggtggcgctccacagtcatccggctgaagaagacctgttggactggatcttctcggggtaaagtgtcttcctattcccgttttcccagctccgtgccccggggtatctatagtgctaggcttctgagacacgtggaggcgcttaggcccgcggagcaggcccctgggctgtgtttgggagattctggaaaaacagactttctcccttttcctttcccctctggagcagctgggaaaggcgtctctcggagcttccgccattcagaaagtgtttccccgcccctgacggccccagcttgatgtttaccttgcgcgcttagttaggattgctctttctagtacggcctttattatggcagaaattgagccactacaggtctgcacagcaaagtcgagggaaataacctgctgtctatgatttagcaagtgatgatggatatttttgagttcaaatcactcagtctttaatggattttcttttctttttttcctagttgaatctcagttgttctcaggctaggtttgatatgaaaaatactactccctattgaagagggtaatataattcttaggatgctaatacaggagtctgtaagtcggagtacttcaggctttttatggttcggtacatttctttttaggggtgggatattgggataagtaggacagttcagatcttgatgtcattgaatagtggtgtctacctaaaaggaagaggctggggcacaaaattataatttaaagtgtttacttcagccaaaatgaggacagctgcccaggactcatttcccagttgccttggggagtgctccttcagccttggttacaagcaggtttttaaaggcgaaggggaagagtgggctgagacaaagttggtcaggaattgttattggtttacagagataccattgcttagtgattggctgtacactgtaactcatagggtatgagttatcgtgtccagcatatggcattttatggcttcttggttccagtctagagcccatatagcaggtgggctttaagagataattatccagctcaga

SEQ ID NO: 14959 - DNA, 1195 bp, Artificial sequence
  DNA replication origin
atggaaccacagaaaggcgaagaggtataagggcaaaaaaaaaaaaggcaaaatagaaaaggcaaaaaaaccgctgccgccgcctcagttacagggagtgacaggtccccccaccccccgcgccgccgccgcgcccgagccctgctgtcggggctgctgtcaccggaggaggacgtggaggtggaggagctgctccgcgggtgacagtcctttgtgtgaagtgatgctgcggcggctgctggggctgcgagcaagcggctgggagagagcgcgagggagagagccctggaggcggagttgcgtgcctggaaatcgctgggtggccgcggcggcgacagcgtcctgcgcctcgccagcctgtttacctgtggtgccaactcggcccgcgcgtcctttccccatgctgctgccggagcggagcgggacccgcgagtgggtcctcctgggcgtccccgtccccgcgcgcctcctccctctctgtcgccccgagtgctgcaatgggaggacgggcggcaaacaggctgcagtccgagtgggctgcggaggcttactggggagtgagaggtgacgcttcagtgagcaaggacctgtagccggcgcaggatgcccaggcgccggtgggaggcaggcagagaggggcaggtgggaccccgggcgtgcgggtcctcggtgcagaaaagttttgggtgaacccgttgcttgacacttaaaagggagcaacatgttcgcaggcgacaagcagcgattaaaacaacaactttataacgctctctctccttgcagcgcgcacacacagtgtgcacttcagatgtgacgcctcctctactccatgctcctttgatccttcggtcttcatgacccccgccttttcttttactgaaattcctgcttcaccatgactttatgacatgtgtggtactgctgataggagcatagtttgaataaaatatttgctgaacgaggccattttgtacaaagtttatggcactttgtcaactaatgggttttgcaaaaaataaaaataaaaagtgaaatgaaagaagcttctatggctattggaacaaaagatcccaggcataaggagttgtaggtatttaacctccacctggtattgtgccacctgaataccaagctcccccaactccacccccatctgtccccctacccccacatgtcctgccaaatttaaagagct

SEQ ID NO: 14960 - DNA, 1108 bp, Artificial sequence
  DNA replication origin
cccacacctggtgcaccttcaccagatagggcgcctcctccccgggctcgccggcgctgggcaccggggcggtgggccaagagggcacggtcccgttggcggcgagcagcggctcctcggcgggcggccccagcgcccgtgggcccgcggctggcggctcgcgatcgccgccccacgcccctgcctcgcccgccgccgccgccgccttcctgtcgagtgccccctgctgccgccgctgcgggtgcacctttccctcgatcaccaccgcggcgcgctgagctagctcctgcaccgatcccacgctgggcggggacgagtagcacaccgaggcccccgcgggagccgcctcgttgccggccgccgcccccggcgccagggccgcggtccccagcagcagcagtagtggcagcagcggcagcggcggcgacgagcgggcggcggagccggggcgctgggcccgggggccgggacgcccggagcggcgcggggcgcgtcgccatctcatggtgcgaggtgcgtgcgggcttctggctgtcggttcggactctgcccggctctctcgcgctgcctcccttttccttcccctcgcagcaccactcctcctcctccccccttgccctcctccttttatttatttattgggggtgcaggggtaggagagttgtttatgggaggaggagggggaagaagtggatggaaccacagaaaggcgaagaggtataagggcaaaaaaaaaaaaggcaaaatagaaaaggcaaaaaaaccgctgccgccgcctcagttacagggagtgacaggtccccccaccccccgcgccgccgccgcgcccgagccctgctgtcggggctgctgtcaccggaggaggacgtggaggtggaggagctgctccgcgggtgacagtcctttgtgtgaagtgatgctgcggcggctgctggggctgcgagcaagcggctgggagagagcgcgagggagagagccctggaggcggagttgcgtgcctggaaatcgctgggtggccgcggcggcgacagcgtcctgcgcctcgccagcctgtttacctgtggtgccaactcggcccgcgcgtcctttccccatgctgctgccggag

SEQ ID NO: 14961 - DNA, 928 bp, Artificial sequence
  DNA replication origin
gccagccgcgggcccacgggcgctggggccgcccgccgaggagccgctgctcgccgccaacgggaccgtgccctcttggcccaccgccccggtgcccagcgccggcgagcccggggaggaggcgccctatctggtgaaggtgcaccaggtgtgggcggtgaaagccgggggcttgaagaaggactcgctgctcaccgtgcgcctggggacctggggccaccccgccttcccctcctgcgggaggctcaaggaggacagcaggtacatcttcttcatggagcccgacgccaacagcaccagccgcgcgccggccgccttccgagcctctttcccccctctggagacgggccggaacctcaagaaggaggtcagccgggtgctgtgcaagcggtgcggtaagttcctcgcccttgggggcgcgaacccgcggcgaggagggcgcatcccgggcgcgcgggcagcggggctcgacggccgcccgagcaaggcagaggcgctctgggtcccagttgttggtttcagggtggtgggttctcagcgatcctcagagagggaggtttcgctttctccagcttcccttgtcttaggctttgccactggagaaagcccaagtttagtcctgggttggggcctcctgaaactttttaatcctttggggtttggctcaccaagtagatcggaaatgtgccggctgctttcttgtgggtgatatgaacttggctttggttaggagttgctgattctgggcctcctttgaaggaggaagggtgagtcccgcaggattttaacgccttcccttcacttggagtccagagtgtggagatggttaggggtttgcttctgtgtctgtgaagtctctgcaaggaaggggcagtgcactgacattccccgacagatgtggcagagttttttggcaactcaatgtcca

SEQ ID NO: 14962 - DNA, 1500 bp, Artificial sequence
  DNA replication origin
tcccatcgtccggcagccgccgccgctcagctcctggcctccgcgcgagcccggagttccaacaagtttcggggaactcctcgccggctctttttcaattgccccgcagccacccacctcccgcccgcaggttggaggcaggcgcctccttcgcaccctcccctggcctcgccccctccctcttccccaccacacccccaccccgaggcgcggacacgccaccgggaggagcctgggctcggcgctcccgggcgcagccccttttcctcccgcgctggccgggcggggggtggcggcgcggctgccgggaacccccgacaggggtcgctggacgctgcgcggagaccgaggccagcgccccggagacccgggaacccaggcggagacccgaggctctcgctgcccgctcccctccgcagccaggcagcgcctgggagggctgctccgtcccattccacgcggaaaaggacggcgcagagaaaagtttgcgactcccacacctgtgccccaagcagagtctccgtggtcaggaaccctgggaggggtgcggggggaacgttggtggctttcccagaagagttcggggttcattccttaactcacttaagtacaaaagccctgtcgcacgcaggcgaaaataaactctaggtggaagggagtttaagataaggcttccttccaggtgcacaggaagggctaagcgaaccttaaagatgctaggttgcgctctcctgctgggtctgcgccgtgtgcgtgtgtgtgtgtgtgtgtgtgtgtgtgtgtgtgtgtttagtaagtgcctgttagaaatcttcagcttttccttaaaaaataacctggcctcttctaagggggtgcccttaaactacgtctcttactacaacttaattttcagaggaactgataaaaaacatagttcggagcacgactcagaataattaaaattactgcagccgctgaaagtcactcagttctgccgagtggaaaagcaggcagggaggggtagaataaagacacagaactggagatccttaattcgtgaatgtggggtttctcagattcaaactttactcagaactgcgcgtgaaacctactccttcccttgtcctccctctggtggagaattctaaagagcaaggaaataagaaggcattgacccctcccctgcaaaggacaaaagttaaagaccagggtaacgggcaccacggaaggatccagaattgtctacatgtagagaaaacattctcagagttataccacagctgtggttaacttagactcttaatttacagtgaaatactcttgtgttgtggtcgggaagtggtgagttggaacaatccatattcaaaatctattgcttcactttaaaagtgacttgctcttggttttccattttctggggtcaatgctaactgaaccattacctacacactaccttctcacggtattttctgatggccgcaatttaaataaaagtgcagtctggagtgtctccttgat

SEQ ID NO: 14963 - DNA, 1405 bp, Artificial sequence
  DNA replication origin
ccacgctgcctggcgactcgggccaccgaatgtgagaccgagtccctttatgtcaccagcgcacacgctgatttgaaccctgcttcgacgtgtgtgtcatggcttaaaaatagctgctaatctgtcaacctgtcttgggcagaaacagcggcggcgacagcagcaggagcgtcatggccgtggcgctgtctgcgccggcgatccgcctttcggactgaggcccagcgcagcgcttgcaaagaggtagaggggctgcggcgggccttcgccttttcagctggctctccacgctggggagaggcgcccagctaggggcgacgggggagggaggggaccgggaagcgggcacccgagcccagcgagccagcctctctctcccgggcgccctccctccgcgcgcggggcccggctgccaggctggcgaggactggggcgacagccatggacctgttacaaaggcgaccgcaggcggagggagggagcggcgggccagggcccctggagccgacggatgggattggagaatgcccagggctgtatccctggacagaaaggggcttctgcatcccccgggaaaaacagccccacggagatccttcttagacctgggctccttcacgcttcccccatcccattcatcatctcgtagacagcagactctctaagaggaaaggttgtattgcaatacagtaatggggtctttaggcctgggtgcaaaggtagaagaagatgatggtgatagtgatggtggtgatggtggtagtgatgatggtgatggtggtggtgatgatggctgtagtgctatatttctgtgctccttccggacccagccattgaaaactctctctccctaaactccctaacatccaatcttccctcaccaatcctggtcctaaaacccctgcttctaatgccttgtaagtgcttggtttctcttggcactggagcaagggagagctgggccctgtctaggggtgtgagatggggacagagcatgggcagggacaaagatggcctctcactgctggtcatagagttgaagtccccctggcaggaggccaggaagggagtggaaggggattctgcaggctccaggacctcctgctttcaaacaggcaggaccacaggtgtgagaggatggggagggagggggaaggggccttgccattgttgcctccctgcctgaaggtcccagggcaagcctcaaacgctggtccttcccagctctgcagctcaacaggtaatctgagacacacctgctaagcccctcgttattgacctcgtgttttgtagggtcacttgactccaacagccatacggttggtaattctaagcctctgagcccctggacctggcaggatccctcatttttccctttccttcctgctttctaggcccccaccac

SEQ ID NO: 14964 - DNA, 1235 bp, Artificial sequence
  DNA replication origin
ctcagcttgcagggaggtgtggagggagaggcgcaagcaggaaccatgcctgcatggggcgcttgcgggccagctggagttccgtgtgggcgtgggcttggcgggccccgcactgggagcagccggaccgccctgccggccccaggcaatgaggggcttagcacccgggccagcggctgtggagggtgtactgggtcccccagcagtgccagcccaccggtgctgcgctcgatttctccccaggccttagctgccttcctgcagggcggggcagggctggggacctgcagcacgccatgcctgagcctcccaccccctccgtgggctcctgtgcggcccgagcctccccaatgagcaccaccccctgctccacgatgcccagtcccatcgaccacccaagggctgaggagtgccagcacaaggcgtgggactggcaggcagctccacctgcagccgcagtgcgggttccaccgggtgaagccagctggcctcctgagtctggtgcggccgtggagaacctttatgtctagctcagggattgtaaatacaccaatcagcaccctgtgtctagctcagggtttgtgaatgcaccaatcgacactctgtatctagctactctagtggggccttggagaacctttgtgtggacactctgtatctagctaatctgttggggaggaggagactctttgtgtctagctcagggattataaacgcaccaatcagcgccctgtcaaaacagaccactgggctctaccaatcagcaggatgtgggtggggccagataagaataaaagcaggctgcctgagccagcagtggcaacccattcagggctcccttccacactgtggaagctttgttctttcactctttgcaataaatcttgctactgctcactctttgggtccacactgcttttatgagctttaacactcaccatgaaagcctacagcttcactcctgaagccagcaagaccatgagcccaccagaagaacaagtccaggaacaactccagacgcgccaccttaagagctgtaacactcaccgggaaggtctgcagcttcactcctgagccagcgagaccacgaacccaccgaaggaagaaactccgaacacatccgaacatcagaaggaacaaaaactccagaggcaccaccttaagagctgtaacactcaccgtgagggtccgcggcttcattcttgaagtcagtaagaccaagaacccaccaattg

SEQ ID NO: 14965 - DNA, 904 bp, Artificial sequence
  DNA replication origin
tgtgaggagcgcctctgcccggccgtgaccccgtctgggaggtgaggagcgtctctgcccagccgccccgtctgagaagtgaggagcccctccgcccggcagccaccccatctgggaagtgaggagcgtctccgcccggcagccaccccgtccaggagggaggtgggggagtcagccccctgcccggccagccgccccgtccgggagggaggtgggggggtcagccccccgcccggccagccgccccgtccgggagggaggtgggggggtcagccccccgcccggccagccgccccgtccgggagggaggtgggggggtcagccccccgcccggccagccgccccgtccgggagggaggtcggggggtcagcccctcacccggccagccgccccgtccgggaggtgaggggtgcctctgcccggccgcccctacagggaagtgaggagcccctctgcccggccaccaccccatctgggaggtgtacccaacagctcattgagaacgggccatgatgacaatggcggttttgtggaatagaaaggggggaaaggtggggaaaagattgagaaatcggatggttgccgtgtctgtgtagaaagaagtagacatgggagacttttcattttgttctgtactaagaaaaattcttctgccttgggatcctgttgatctgtgaccttacccccaaccctgtgctctctgaaacatgtgctgtgtccactcagggttaaatggattaagggcggtgcaagatgtgctttgttaaacagatgcttgaaggcagcatgctcgttaagagtcatcaccactccctaatctcaagtacccagggacacaaacactgcggaaggccacagggtcctctgcctaggaaaaccagagacctttgttcacttgtttat

SEQ ID NO: 14966 - DNA, 1243 bp, Artificial sequence
  DNA replication origin
cacggcaaccatccgatttctcaatcttttccccacctttcccccctttctattccacaaaaccgccattgtcatcatggcccgttctcaatgagctgttgggtacacctcccagatggggtggtggccgggcagaggggctcctcacttccctgtaggggcggccgggcagaggcacccctcacctcccggacggggcggctggccgggtgaggggctgaccccccgacctccctcccggacggggcggctggccgggcggggggctgacccccccacctccctcccggacggggcggctggccgggcggggggctgacccccccacctccctcccggacggggcggctggccgggcggggggctgacccccccacctccctcccggacggggcggctggccgggcagggggctgactcccccacctccctcctggacggggtggctgccgggcggagacgctcctcacttcccagatggggtggctgccgggcggaggggctcctcacttctcagacggggcggctgggcagagacgctcctcacctcccagacggggtcacggccgggcagaggcgctcctcacatcccagacggggcggcggggcagaggcgctccccacatctcagacgatgggtggccgggcatagacgctcctcacttcctagatgggatggcggccgggcagagacgctcctcacttccttgatgggatggtagccgggaagaggcgctcctcacttcctagatgggatggcggccgggcagagacgctcctcactttccagactgggcagccaggcagaggggctcctcacgtcccagacgatgggcggccaggcagagacgctcctcacttccaagacggggtggcggccaggcagaggctgcactctcggcactttgggaggccaaggcaggcggctgggaggtggacgttgtagcgagccgagatcacgccactgcactccagcctgggcaccattgagcactgagtgaaccagactccgtctgcaatcccggcacctcgggaggccgaggctggcagatcactcgcggttaggagctggagaccagcccggccaacacagcgaaaccccgtctccaccaaaaaaatacgaaaaccagtcaggcgtgggggtgcgcgccagcaatcgcaggcactcggcaggctgaggcaggagaatcaggcagggaggttgcagtgagccgagatggcagcagtacagtccagcttcggc

SEQ ID NO: 14967 - DNA, 1736 bp, Artificial sequence
  DNA replication origin
caagaaaggatagacaggttaatagaaaaataagcaaaggatttgaagcaatttacacacacatactgacacaaatacagatgtcaacattggtagtactcacattagattagcaaaaatataaataaatgataaataattaagggctggcaaggtgttctggttataatttactatgtgacaaattacccctaaattaacagctttaagcaacgaatgtttattacctcattgtttctgtggatcaggagtctgagaggtgtttggctgggtgttcctcactcaaggcctctcatcagattatagtcaagctgttggctggggctgcagtcatcaggactcgcctggatctggatgacccatttctaagctcactcacctggtgttggtgaggctgcagcttcttgtgaaaggctggactgagtgtctcagttccttgggtgtgccatgccacatgggcctctctatagggcagctcacaatatagccatcttgattcccccagcatgagaggaaggaagagagaaggagagggagaaagagaatgtgtgtgtgtgtttgtgtgtgaaagagaatgtgtgtgtgtgagagaaagagaatgagaatgtatgtatctgtgtgtgtgagagagagaaataatgagaaagtgtgtatgtgtgtgtgacagagaggcagagagagacgggaagagaaggagggagacggaaaggagatgtgtgtttgtgagagagagaggaagaaagttggggaaggcggagagagagagagtgagaatgtgtgtatgtatctgtgtgcatgtgtgtgactgagaaggagggggagaaagaatgagagtgagattatgtgtgtgtgtgaaagagggagtgaggaaagagggagggagagaaagtgagagagagaatgtgagtgtgaaagaggaggggcgagagagaatgtgtgaggaagaaagagagaaggagagatgggaagggtagagggagagagagaatgaaagagtgtgtaagtgtgtgtatgtgtgtgtgtgagcaagaaggagaggaggagagagagaatgagaatgagattatgcacgtgtgtgtgtatatgtgtgtgtgtgaaagagagaggaagccaaggaaagagagagaaaatgcgtgtgtgttggggggagagatgacagaggagagagagatgagtgagaaaaagggggagagagagaatgtgtgtgtgagagaaggagggagagagaaagtgtgtgagagagagagaggaagagagatgaggaggggagagagagaaagggaaagagaatgaaaacgtgtgtatgtatgcatctgtgtgtgagagagagggaaggagggagagagaatgtgtgtgagagacacagaggagggggcaagggtgagagacaaagagaatgtgtctgtgtgagaaaagggaggggtggggggagagagagaaagagaatgagaatgtctgtatgcatgcctatatgtgtatgtgagagagaaaaaggatgggggaaagagagagagagggaggaagaaagaaatttggaagccacagtctatttatagcatcccatcactgagatattctatttgttaaaagccagtccgtaaatctagtccacactcacggaaaggggattacgcagtatatgaatattgggatgcagggatcatcgagacccattttagaagcttcataatcttcactggtaaataggctattggaattaagccagagagcagttt

SEQ ID NO: 14968 - DNA, 945 bp, Artificial sequence
  DNA replication origin
gggagggaggtgggggggggtcagccccccacccggccagccgccccgtctgggaggtgaggggggcctctgcccagccgcccctactgggaagtgaggagcccctctgcccggccaggcgccccatctgggagggaggtggggggtcagcccccccgcccggccagccgccccgtccgggaggtgaggggggcctctgcccagccgcccctactgggaagtgaggagcccctctgcctggccagccgcccaatccgggaagtgaggggcgcctctgcccagctgcccctactgggaagtgaggtactgggaagtgaggagcccctctgcccggccagctgccccgtccgggagggaggtgggggggtcagcccacccggccagccaccccgtccgggaggtgaggggcgcctctgccaggccgcccctcctgggaagtgaggagcccctctgcccggccagccgccccgtctgggaggtgtacccaacagctcattgagaacgggctgggatgacaatggcggttttgtggaatagaaaggggggaaaggtggggaaaagattgggaaatcggatggttgccgtgtctgtgtagaaagaagtagacatgggagacttttcattttgttctgtaccaagaaaaattcttctgccttgggatcctgttgatcggtgaccttacccccaaccctgtgctctctgaaacatgtgctgtgtccactcagggttaaatggattaagggtggtgcaagatgtgctttgttaaacagatgcttgaaggcagcatgctcgttaagaatcatcgccactccctaatctcaagtacccagggatacaaacactgcggaaggctgcagggtcctctgcctaggaaaaccagagacctttgttcacttgtttatctgctgaccttccctccactattgtcctatgaccctgccaact

SEQ ID NO: 14969 - DNA, 1239 bp, Artificial sequence
  DNA replication origin
gcgcctggccgggcagaggggctcctcacttcccagtaggggcggctgggcagaggcccccctcacctcccagacggggcggctggccgggtggggggctgacccccccccacctccctcccggatggggtggctggctgggcagaggggctcctcacttcccagtagaagcggccgggcagaggccccctcacctcccggacggggcagctggccggtggctgacccccccccacctccctcccagatggggtggctggccgggcagaggggctcctcacttcccagtaggggcggctgggcagaggcacccctcacctcccggacggggtggctggccgggcggggggctgacccccccacctccctcccagacggggcggctggcctggcgggggctgacccccacctccctcccggacggggtggctgccgggcagagacgctcctcacttcccagacagggtggctgccgggtgtaggggctcctcacttctcagatggggcggctgccgggcggaggggctcctcacttctcagatggggcggttgccaggcggagggtctcctcacttctcagatggggcggccgggcagagacactcctcacctcccagacggggccgcggccgggcgctctcacatcccagatggggcggcggggcagaggcgctccccacatctcaggcgatgggtggccgggcagagacactccttacttcctaggtgggatggcggctgggaagaggtgctcctcacttcctagatgggatggcggccgggcagagacgctcctcacttcctagacgggatggtggccgggaagaggcgctcctcactttccagactgggcagccaggcagaggggctcctcacgtcccagacgatgggcggccaggcagagacgctcctcacttcccagacggggtggcggccgggcagaggctgcaatctcggcactttgggaggccaaggcaggcagctgggaggtggaggttgtagcgagccgagatcacgccactgcactccagcctgggcaccattgagcactgagtgaaccagactccgtctgcaatcccggcacctcgggagtccgaggctggcggatcactcgcggttaggagctggagaccagcccagccaacacagtgaaaccccgtctccaccaaaaaagtacgaaaaccagtcaggcgtggcggcgcacgcctgtaatcgcaggcactcggcaggctgaggcag

SEQ ID NO: 14970 - DNA, 947 bp, Artificial sequence
  DNA replication origin
ctgggcaccattgagcactgagtgaaccagactccgtctgcaatcccggcacctcgggagtccgaggctggcggatcactcgcggttaggagctggagaccagcccagccaacacagtgaaaccccgtctccaccaaaaaagtacgaaaaccagtcaggcgtggcggcgcacgcctgtaatcgcaggcactcggcaggctgaggcaggagaatcaggcagggaggttgcagtgagccgagatggcagcagtacagtccagcttcggctcggcatcagagggagacagtggaaagagagggagagggaggccgtgggccgtgggccatggggagagggagagggagagggagaggatttctatcatttcttatttgaaaagaagctagatggactaatatattccagatctatgtatcaagtatcagtagcatttcatgttagcaatttaataaggtaccaggaaactcctctcctgtatctctggatatatgtctattttcggtaataaagactgggatacaaattgaaatttacatggaagagtttaaacattaagtcagcattagttcttcaaagtttgtgtacgcttattcaaaataaaaattgtactaaaccactagataatgagtcccaatgagaaagtaggcacttgaattgaatatacacagaatggaaaattttagaattcaggaacttgaaggagctggtactgtgggtattatttgcacaatctgggtagagttttaataaaccagtggtatcatgtgtgctttagctcagaatattcctagggcaaaggtgagaagacaggatatccaggttcagtaggatgtcagaggagggacagaaaagaggaaataggaaggcctagaaaacacatcttaaccattttaatgaactttgtatcttgactctgaactgtgcaaagaaaatcatcttctctatt

SEQ ID NO: 14971 - DNA, 1185 bp, Artificial sequence
  DNA replication origin
tcttcaataaatcatgtctatttcaattattaaacacctaaaattgtctcattactcacacttcagatccatcttccattagttagaaaaattaacaggtgactataatgtatattcattctaaatgtgtgaatagaagtaaaaaatctcttcatgaatggaatttagtgagagggagacagaaaatagattagatggatctccaaggtggaaacagtacatataattgctctaagtatgtttaaaatattgaagaaaaccagcaagaaggtaagtacggctgcagcagaattggcaatgagaggtagtaagagatgagatttgagaggcaatggatgaggctgatagaatatgactttctaggctcttgaaaggtcttcaattttcctttgaatagaataggaagccattacagggtttgcagccaagaattgacaagatcagacttacattgcaacagggccattctggttgcatgtcagaatcaatccagatttggcaaagacggggtggctgccgggcagagggtctcctcacttctcagacggggcggccgggcagagacgctcctcacctcccagacggggtcgcggcggggcagaggtggtcctcacatcccagacggggccgcggggcagaggcgctccccacatctcagacgatgggcggccgggcagagacgctcctcacttcctagatgggatggcggccgggaagaggcgctcctcacttcctagatgggatggcggccgggcagagatgctcctcactttccagaccgggcagccaggcagagaggctcctcacatcccagacgatgggtggccaggcagagacgctcctcacttcccagaccgggcggcggctgggcagaggctgcaatcttggcactttgggaggccaaggcaggcagctgggaggtggaggttgtagcgagccgagatcacgccactgcactccagcctgggcaccattgagcactgactgaacgagactccgtctgcaatcccggcacctcaggaggccgaggctggtggatcactggcggttaggagctggagaccagcccggccaacacagcgaaaccccgtctccaccaaaaaaatacgaaaaccagtcaggcatggcggtgcgcgcctgcaatcgcaggcactgggcaggctgaggcaggagaatcaggcaggg

SEQ ID NO: 14972 - DNA, 967 bp, Artificial sequence
  DNA replication origin
tagcgatgcggactctcgcctccgctccgtagttcggggcccggcagcggcgcgagggctgggaactgcgcggcggggactgcgggcgactccggcatccgcgctggcggcagcggtcgccgcgccgtgggaagctatggggacgcgccctttctcggggtgcccattcagcggcggctcggagctccctgccccgctgctttaggaagcgatcgtggagcagagtcactctctgaagactcccgagacccattcgactcgggaccctcatcgccgaccctttcccgggctcccggagcgtgaagaagagccgccctccggaacgcggcgaggagcatggggagagcggcggccaccgcaggcggcggcggaggggcgcgccgctggctcccgtggctggggctgtgcttctgggcggcagggaccgcggctgcccgaggtaagcgctgggcggagcgggcagctgggggcgagggcgcaggggcgccagcctgacggagcgggacctgcaccgatggcgttggcttcccaacttgcgccctgcacctcggcgctccaagcccaaccggatgggagccgagtggaggactccgaggggaccacagccttccaacccaagtttgcgatctgccgcaatcctacaggtggctgtgacccgggcccctaccgttttcctggaccctccttgcctgctccattttccaagccctccccaattgctgcagactggagtagcccggtcttcactccaatctcgctctcccctctcctctccacttcctctcaagccgagcttggtcatgagttagcgcccatagcgatgtcggagagttcctggggagaggggccaggtgatgggagtgtctgtagggtgggcttgaacagagagggtgtcttttcccttaggggaggaacacccatgctgaagtcccttcgctctgcgcctagcttggcacccctcgggcgt

SEQ ID NO: 14973 - DNA, 1388 bp, Artificial sequence
  DNA replication origin
gtgaggatccagggctcaggatcagcagggtgatagccccactcatgttggggtgttcccagccactcacccctcaactctcatcacttcatcccctcctctttctgcccaagtggcctgggactgagaatcagcctgggcagcaccagaagagctttgcagacgagattaaaagcaaatcaaagaaggaaaattgtggctcagtttatgtcttcctaattaaaaccccgccagtctcccttctttttcttcccagctaatgttacactaacgagctgagtttagtggcatttatgtagataaaagtcccaatgattgatctcaatggcttgttaaaattagtttcagtccaccatattgatttaattccattgcttgaaagtgctaattaataatgataataaaagtgtcttggcccattattatcagtgggcaggcgggggagggggggcgtgtggaagctgggggatcgttgtttttagtgtcacttactctggctaagggtggcctttgaaggctgactgcggggacaggaggcggggggactgcggggcatatggggatggttctgtccctttctctggatctggtaagtcctcatggaggtgctaggggctgctggaggggagggagtggtggctgcacaggtgagcagtgtacctggctgccctccaagccctcttgactccctgcagagtttgaggtgtgggagggggcactgcttgcctgagagattcttgaaggaggtcaaatctttagaccctgttctagaggtgaggaggctagagggaaggtgtcaggagttcactgcttgggttcctgatcagcagcagaagacgcaggcctggacatctgagcttaaaggctcagccactcagacccagtgctgtaggaagcccaggagtggagggagggatttggggcaagaaagctcatggatgaagggtccaatgatggacaggggagaggcacttccgagggcaaagaaaggaagggccctcagacattgagttgagttgataagggagaattagaggtttcttcaacattaattaattagtttagctttcaagcagtcttctcacctgagataaaggcttatgctcctggaaaagattcttgcagccactccagggaatggaatgtgggggtgaggggagggtggtgctgggagtgagagcagcacctggtggagtgagcagatattccaagactgtggaaagggcccacataagaagcacctgcgtggtgggggtggttagtgggaagaaagtgggagccggggaaaatgtctcctgcaatttggctaactctctccatcccaaattctctaggattcttctatagaccaccatccagatctcttcgtctctctgtctctctcactc

SEQ ID NO: 14974 - DNA, 945 bp, Artificial sequence
  DNA replication origin
ttccttcagtcggcccccaaaacacacacgcatgcagacacaccagccctcagatacccgagctcttcatcttcctcattcttgctaggggagaaattactgacagagcttaacatataaaccctcccaggagactttgctgtataattgtgagctaagcttgagtcagaatgaataaatctctaagtacggggtttagtcacatctgtgggccgaaatgtattggctgaggaagaaagaagtaaaacagcaccttcagaatcccagacaccattctaagcccaagattaagatttggggtgcagccaaccctatctctaactagaaatgggtccctcagcaagtcccctcccttcttcagtccaggtgcccatgagaaagctgtgacgggtgaacccaagtgcctcggggccctgccgtactgtgattccggaggtcgggcatgtgcacacaagagtgtgagtatgagcgtgtgtgggggttggtgtatgaatgtgtgtgtcagagtgtgtgtgtgactgtgagtgtatgtgtgtgtcagtgtgtgggtgtgtgaatgtgtgtgtcagagagtgtgagcgtatgtgtcagagtgtgagtgtgtccaaaagtgtgtgactgcgtgtgtgtgcagttgtgtgtgtgtgtgtgagactgtaggtgtgtgagtgtgtgggtgggcatgtgaatatgtgtgtgtgtgagtgtgttagggtatgtgagtgtgagcttgtgtgtgtgagtgtgtcagagtgtgtgtagtgtgtgagtgtgatagtgtccgtgtgtgtgaaactgtgtgtgtgcgtgtgttagggtatgtgagtgtgagcttgtgtgtgtgagtgtgtccgagtgtgtgtagtgtgagtgagtgtgatagtgtcagtgtgtgtgtgaaactgtgtgtgcgtgtgagtgtgtgtgagtgtgtataggggagtg

SEQ ID NO: 14975 - DNA, 1411 bp, Artificial sequence
  DNA replication origin
tttagctatctaggcatggctttcgtggagggcaaaagactagaccaagactcagcctttttttttaaacacaaaaatcacaaaaagaatcctggttacttaacttctgtatgcctatgtccttatctgtaaagacctgggtcactgtgattagagtactacgattactctatcagattatttcttcatgtgcatccccactacctgtgatcttgacagtgatatgagtctttgtctacccagcacctaccacatgacccagcatggttggcctacacataggctgagtgatgggcttacacctgacatccttgctcaatggtgcagatggcatcaattgctgtcagatgaatttaaaaaggagaaagggagggagggagggagggggggaggaagaaggaaggaaggaaggaaggaaggaaggaagggagggagggaggaagggaggaaggaaggaagggagggagggaggaagaaggaaggaagggagggaaagaaggaagggagggaaagaaggaagggagggaaagaaggaagagagggaaagaaggaagagagggaaagaaggaagggagggaaagaaggaagggagggaaagaaggaagagagggaaagaaggaagagagggaaagaaggaagtgagggaaggtaggagggagggaggaaggaaagaaggaacggagagaacgtaggagagaggcaaaaagagaggaaggaagagagggagagatggagagagggagagagggaggagggaaggaaggaaggaagaaagaaaagaggaagggagggcatgagggaggaagaaaagaaggaagggaaagaaggaaggaacaaatgaacaaaggaaggaaggaatgaaggaaggaaagaaaagaagaggagaagaagggagagagggaaggaggaaggaaggaaggaatgaaaagcggaagagagagagagggagggagggagcagactccattttctccttcgttccctctttgccccatcccaggagaacacagtccttctgactttcatgtacactacgatggttataatagcagttttacatgcttcaagggactgtggtgcagaggacacaggaatgggtggtgtgatcaagtactgtcttagcaaagcactgtgtgcaaatgagacactcaagacagcatcattagcatatgacagtgccatttctgggccatggtccacaaaaccttaacaacaagaactgcaagtgtgaggactgtgtgcagagagggtgactccccagcgggagggccaagggacctcttctgacttacagagctgtgaagccctaagaccccctccacacacacacacacacacacacacacaaacactaacattctcccttcccatcaccccaggtcaactgcaagactgaaaagtagtgacaaag

SEQ ID NO: 14976 - DNA, 876 bp, Artificial sequence
  DNA replication origin
acggagcctattaatgtttccatcttacagtgaagagctggggttggagaaacttgccgatggtcacagagtgagtcagaggcagagccagcctgggacctaggttggtctgaggccaggatacagttctggccactgcaatgcctagtgaccctcccagcatggggtgtccagcagcagggccccagaaatgccaaattcagagcagcaaccatgtctaatctctgtagtcctacactctggccttcagatcctgccaatccaccaggccacaatcaatgcaccaattaatcaatcagtgcgtctagtttggagtgaggaaattcggggcttggtgatcttcagggtctctctcagctcagtgaacgcaaaatgtcagtgatccctggcctgcggtttagtcctttgctaaatgccggggagccaaggatggaggaagcctagactcctggcttgtcctcatggagtttaggggagagcttgggggagacacaggagattaacacacataaaactatcaggcaaaaatgatgaggtggtggagagtgtggtgcagagttcaaattctgtgatcagcatggatggaggagttgaaacaggattctctacgtgcgtgcatgtgtgcgtgtgtgagtgcaagtgtggatgggagtgtgtgagtgcgtacgtgcatgtgtgtgtgtgagcgtgggttgtatgagtgtctgagcatctggaagagtgtgttgtgtgttcagggcattgaaggactggtggtgtttgagtgcagggtgttgggggcctggtttagaggagacgagcatgaggacttccctggtcttctgagaaatggaaagtagagggacgaggaatggctggggacagagagtaagacaa

SEQ ID NO: 14977 - DNA, 1287 bp, Artificial sequence
  DNA replication origin
gagccgcacgtcaaatagccgcgatcggcagccacacttcaaagggatcgccgcgcccgcccaatcgcagctctcgccgggaccccggggcggggagagcggcgggctgaggccggctccatcggtgggcggggagagccttaaaggggccgcgccgcgcgccgccgctgcctcggtctcggccgctcccgggattcctcccctccccccgactgggccttcctcgccctggggtcccccgcctgggacgggacttctccgggaccctgagctctgcgccccgtcctcctttccggccgctctctctcctctctcccttctcaccactgggtgggtggggggtgatgctggcgggggctgtaaccccgcccgccgtgtgtgtccgaggtggggtggggtggggtggggtggggtgggagggatcgcacggcgcgggctctgggacgctggagttcaagcctctcccagaggccgcctgggggcaggcctcgcctcgggagcccgggtccttctccagagctgctccggctctcctcggccccgctctccttcccctacttggcctccccttggtgtgttcacttggaagcgcccgagcctcggaggcacccactgttctcgggacgcggcgtaggcagctccaactactttgagcccgtcttgtctgaagcctgcaagtttgtctcccttctggagtgacatggtcggcgaccaagcgcgggaccccaggctgtgcgcgctgtgcctgcgccctgcgttagaggctcggtgtctggtgtgttacaggcttcttaccgtgtcctgctgaggggcgtgaagttcctcactgtaccgcgcccagctgctacgaggagagaccgagatcacgggcgaggcgggtgtccctggagggggatctctctctaagcgctgctcggcaacacaacccctccgcccccccatccttctcactccgggggaaaaagcacttgctttccccaggcaaatttcgggataaaaacttttaattaaaaataacaatacccttcccgactccctgcgcctttctgatacagtgtgcattgctagcttcgccctgggcagagattttacgtagtcatagtcctgacatccaagttccggatccgccgcttttccggaggcgaagttggtcctttgggtgccgaactctggggagcccacttctccgtgcgctcggcggccagtggaggcgcgctggtgtcactgcctggctcccagcaccacttttccagtcccgatccatcactccggttgtcagggctgtca

SEQ ID NO: 14978 - DNA, 1105 bp, Artificial sequence
  DNA replication origin
caccgaggaggagccgctgtctttgcgggagtcgccgccgccggagcccttggagtagggcttgaagctggacttgtcctcggccggtgagtcccccagctgcttcagggccgcggctgcggaggcggcgcccggggctgagcggccggggtccttctccgctcccagcccgttggccgccgccgccaccgagttgagtttggaggagggcggcgggtccggcttgccgatctgcgagcaggtctgagccagcagcgccaaggggctcttcttggcgtccagctgtgggagacagaagcagggggagggagaaggagtgagactcagaggcctgcggggcgagcgggggcgcccggggagctgggcggcggcgccacggggcggggcgggcctggggagagggtctgcgagcgagggccgggccgggcgcggcagctggcggaactgcgcccacactgccgctgggtcccggggtgcgccgcaggccctgcggaaggagttcacccaggacccctgcgggagaaggtgacgtctctggagtcggggctgtgactcgccacttccctctaatgtccccctcctccaggcccaggaaaaaacttattcctttagtttgggggaacttcgcttgggacgggtttctggcgatggcgccgcggggtaggagaggggagcgcggattctaaaggaggggctgcagttggcgctctctccgtagcccctccctcccggggagggcacccagggaagaggcaggaagaaagatccgggatcgggagcgccagggcgccgtgcgccctcaccggatgggacagaggcgaagtgggacccgggcagccagggcttcaaagaaaacagcccggcgtggggggcggggaagacccagcagagaccaactcctggctggaaactggggatcagaggaaaagtaaaggacccagaggggactccaggagcaaatccaatccgagagaaaacacggagctccgaagggcgagcgtggaaggagacccttccacggggaagcctggggaagccctggtgggctctgatccctcggttttcttcccctcctcactcagcccgccagcgtgaccagacttgg

SEQ ID NO: 14979 - DNA, 1199 bp, Artificial sequence
  DNA replication origin
ccacccctactgccaggggaggggtcgttgcccccacgagggagagaaaaacaaggactataatgcacttcgcaaaatgtaaggggccggcttcacgccagcggggccttctgggactttgaattcaaccaggtgagcgctccaggtgccccgacaggcgcactgtagccactgggtgttaggggcgggagtctggaaggtgacggtagacggccacttgggcccttctgggggcgagcctactggtggggtcagggctctccgtgctcagagcaaggtagaggagcaaggccctacttttggggggcagggtccagaccaaggaccctatgcgcggagggtggcgggggaggagtcccggagcagtgtaccaggtcaatagagctccagggcccctgccacccaggtggccccctccacccccaaaatgagttacaaaaaaaacctcctctctgttacttgtacaacaaaggaaaaaacaaaacaaaacaaaacaaaaaacaaaaacagaaccgcaaatggaaggaaacaagagggaatgaagggggaagagggaaaaagagaaggcggaaacgtagttttaagttaagactcatgcaagaaactccccaggaagggaaaacaaaacgtctagaagaacccaaagaccccaactctccctcaaaccaaaccaatcaaaaccaaaaaaagaggaaaaggaataaaaaatgtaaaacttatatctaagaaaaaataacagaaaggaacaggggcggggatcatgtcgttatttgtgggattaatattattatttgggagaacacagactttttgcataccattgactcatgtgggccgttaatgcacttatattcccagcttgtaagctaacattatagtaaataaatacacagtccggtggggaagggctgggtggggaatcccggcagggtcaagcagtagtggaggttgcagcggcgacggcaggtggggagggaggaggagggagagggaggagggtgagggggctggggtggaggaagagctgtagttactggtatcccagcgccgaggctgaagctagtctctgtccatacagcgcgtatggcgaatagtagggtccggctgtggggagggacggcacggccaggccccccgctgtggataagtggctcttgccataggggtggtaccggcttaggcccaaagtgtgtggattc

SEQ ID NO: 14980 - DNA, 1301 bp, Artificial sequence
  DNA replication origin
cagggagccttcccaaactctgggcagggaagaggttggcaccttagacagatctgccttgctggagggagtacaggggagaaggagggagagagccggtaagggctacaggcccggcctccaccctcccttcctcctcctgttcctcccctggtagctcccaggctccttggagctcaggggaaagtgtggctctctcttgcccagggtcttatggatggatcaggaatgaggaggctttcctatctgcagccttacccggccataacagggagggtcctttcgggggattgaggaggctgtgcccatccaggcctggcttcccatctggtttcagggctcctgggggcatggtctgtaacctgttccaggcccatgcaaggggctgctccatcaccagccttttttccccagaggcagccaagatgatgagtccctgccgcaggccagcacccctttccctgagccccatggtgttagacattcaggtctcagaaaggtggaggcagctctagccaagagaagggtgtgtgtgagcatggggggtgggctagggagagggggcgacagaggggcaagaaggggttacgaggccagcatttttgtatgggtgtgtggatgtgtggctttcacgctgtagaaaataaaatatagaggatgagggggaggcagtaaggcccgtcacgtgcagtgtctggtttaaccctcacaccatgccatatgtggctactgcctttcacagatgaggcactcagagaggatgtgtgcatgtgtgtgtgtgtgcgtgcatgcacatgttggggtggggagagagggtgtgtgcatgcggagagagggtgtgtgcatgtgtgtgtgcatgcgtgcatgcacgtgttggggtggggagagagggtatgtgcgtgtgtgcctgcgtgcgtgcacatgtgtcagggtgggggcttcatttggtctcgcttctttctgtgatggaatggggtcacttgatggagaagctggggtgagcctgggctccccgatggctgctgctccctgatgaccctgctcatgctccctgctgcggtgccctgcggtgggtgagtgttggcaggtgcggatctctgctccgctgacccatctgcacccccatgccccgcaggaggcctgaaccgccatggaagggaaccggagaggagcgcagagccggctggtggagaaagtcgcaggcgttcttccaggcaggaggaggggtagggaacaccccgggcagcttggagcgtttggggtcatccccagggcactgggccaggtgggggctggtgcga

SEQ ID NO: 14981 - DNA, 1548 bp, Artificial sequence
  DNA replication origin
cgccccgcggggacccacagcgctggggccgggctgcgcgccggccggagggacccaggcgtgcgggaggagtgctcagcgggggcccggggctcccgagggcgtggaggggggccctgggcggaggcgagccccggggtccccgccgccgcgccccgggggcatgtcctgcgagcgccccggcggggaggacgtcggcgcggctgtcagcgcagcgcgggcagctcccagctgcgcggccggagtctcagcgcccggccctcgggacactggaggcccggcccctccgcgtcgcctgctcgctgggcgctgggctgggacctagcggatcgcgccgggctcctgctgccgccgccgccgccgctccgtgccatggatggaggcagctccgcgccgcgccgctcccgccgccggtccccgcccgcccgggccttccgcggggccctagcgccgaccgacacgcggccaggcctagaccctctgccgagtgggggcgggccagctggttcgaggaccctgcgtccccgcgcccgccctgcaccaacactcctctcccgcttgtccccgcgccccgggccaggacccttcctttccgcaacccatctcagacctctgagccgaccaccaccaccttccacaaaatttccctcgtccgtgccggtgcagcttgcgtctccaggctgctggggccctcctggacccgcgggcttggacagagacgtctggggcgccctgttttgggttgaacttggtggaaggctccgaggtttcctttggcccctgacacgatgatcagtctggaagtcggctctcactctccttccagctccggtggaggcagccgcaggaggatggcagccgagacaaggaggcagcagaccctcctccgctgcggtgacctcgctcagcggggggtgcatgtcattcggccaaggagaggtcaaaggccaaggcagacaaggctagaggctagactgggcctcctacattttccacaacgctgtgtgtgtgtgtgtgtgtgtgtgtgtgtgtgtttcggggacagtgagtgggacaagggaaaagtagatgagaaggagcagggctttgcagcagggtgtggaaagagcactgcgcagtgagtctggagacccctattccagactcggctctgcctctcattactgtctgaccttggacacagcccctagcttgctggggtagcagatctctggggttgaaatggggctctgcctgctccccagtttatagagtggcattagatgcccagtaaatcgtggcattagaataagagagtgtggtgggggggaggggcacatggtttccaaaggcagaggactggtggtggcaggggtgaccttgacaactagtggtgggtataaagctgcctgcaggccgggcgcggtggctgacacctgtaatcccagcacttttcgaggccgaggcgggcggatcacttgaggtgaggagtttgagatccacctggccaaaatgatgaaaccctgtctgtactaaatatacaaaaattatccgggcgtcgtggtgggc

SEQ ID NO: 14982 - DNA, 1379 bp, Artificial sequence
  DNA replication origin
cagtgtcccgagggccgggcgctgagactccggccgcgcagctgggagctgcccgcgctgcgctgacagccgcgccgacgtcctccccgccggggcgctcgcaggacatgcccccggggcgcggcggcggggaccccggggctcgcctccgcccagggcccccctccacgccctcgggagccccgggcccccgctgagcactcctcccgcacgcctgggtccctccggccggcgcgcagcccggccccagcgctgtgggtccccgcggggcgatgggttgatgggcgccgggggacgcaggatgcggggggcgcccgcgcgcctgctgctgccgctgctgccgtggctcctgctgctcctggcgcccgaggctcggggcgcgcccggctgcccgctatccatccgcagctgcaagtgctcgggggagcggcccaaggggctgagcggcggcgtccctggcccggctcggcggagggtggtgtgcagcggcggggacctcccggagcctcccgagcccggccttctgcctaacggcaccgttaccctgtgagtaccctaccaggccagttccgtccgagccgggactggggacgaagggaggcgagacgggaggggtgggagcagggggaagggggctatccccccacttcagagatttctggacaggcctgggttcaggcccccagaggggaagattggaggagcaggggagagactggggctccaggagcgtggaggcgggaaggggctgcgggggacaggcgcaccccagagaaaggcaccgcaggcgcccactcacctgcacaggtgaagtggagagcacgcctgcagggcacccacgccccggatttccagcctggactagggttgcggactttggggacctgagaagggtgagagcggggaatgctcaggaaagatcgacgctcgtggcccaggagggggctgtggtcctaaccactacggtcgcgtcccggactgggctggaggagtctccggatttacctggctggccttgtcccttcaattggggtcatcccatccttgccccctggcctgccagcgccgcttccagccggtctccttagggcaaggggaggctgggctcagaaaagtcggcccttggaataccggcgctcctgggctgcaggagaccctggcgtccccatccctctagaggcccctctcccacggcgccgtttgtgcagtgagctctgtgctgggtcccgcgtccttgcctctcctttgcctctcctggaagtaactcgagctttggctgtttctccattgacttcgcgcaaagattgcgaagaaagaaacgcggctggggaagcggggttccctcaccgcagcccacccgggcctccttccgcgacttc

SEQ ID NO: 14983 - DNA, 1187 bp, Artificial sequence
  DNA replication origin
ggaggagtctccggatttacctggctggccttgtcccttcaattggggtcatcccatccttgccccctggcctgccagcgccgcttccagccggtctccttagggcaaggggaggctgggctcagaaaagtcggcccttggaataccggcgctcctgggctgcaggagaccctggcgtccccatccctctagaggcccctctcccacggcgccgtttgtgcagtgagctctgtgctgggtcccgcgtccttgcctctcctttgcctctcctggaagtaactcgagctttggctgtttctccattgacttcgcgcaaagattgcgaagaaagaaacgcggctggggaagcggggttccctcaccgcagcccacccgggcctccttccgcgacttccctcttagtcagggcctcagtacgcctttgctttgctggcagcgagcgctgcagcgccgcagcccgaccccaagcctcctacaagggggtcgcaagtcccagcagccgcgcgagcattggcgacccctccccaccgcagagatttcctgcgccgaccacgtgctcgcagctccacgcacgccgtggatttgagggtcgggcccccgcggccgccgcttcctttcctgtcccaaatccagcctaagagccgcttccctttccctgtcctcctgaccccagtggcaaccgtttctccaccgccccttgcccgcagtcggggctggcccagtcttttcgattgtgtccagaacaatacagtaacgcctctggttgggtgagttcagaggctgcccgcttcctgacaggacacaactggtcagcctctgacgctggccgcccggcctgcattttccccggcccgggtgtgtgtgtgcatgtgtgtgccttaagggtggaggcggtgtgtctgctcgctgccgcctccctgctgctcagggtaaggctgtggccagggaaggcacctgtggctgttcagggcagctctctctgactgtccgctggggtttgagggtccaggcaggcctgggcattccccagctcacttagttctggaggagaaaaatgcttgctctgcggaacagtcggtagcgtctgcgtgagtcccagctgcataagaattcagagctgaggccgggtgcggtggctcaggcctgtaatcccagcactttgagaggcagaggcgggtggatcacga

SEQ ID NO: 14984 - DNA, 1030 bp, Artificial sequence
  DNA replication origin
ggggcaggtgtgggggggtgagaggaagggggtgggcatggagcaggaggggtgactttctccctcgggaggggaggggtggggtcaggggagggcgtgccactcacaaacgcttcagctcccccaggcccaggaaggcgcccggctgcactgtgctgatgatgttgttcctcaggtccctgcagaggcaagtgcagaggccctcacacctctccccgctggagccgccctgctccccgggaggggtcctcactgtcaccacggtgttgttgctgggtttctcagggacttgacttcctgctaaacctctgctctcctcagcaccgggtgggaggtgggattaaagaaccacccctgatcaaggccatcctggccaacatggtgaaaccccgtctctactaaaaatacaaaaaaaaaaaaaaaaaattagccaggtgtggcagtgtgcacctgtagccccagctaggcaggagaattgcttgaacccgggaggcggaggctgcagggagccaagatcgcgccactgcactccagcctgggcgacagagcgagactccatctcaaaaaaaaaaaaaaaaaaaaaaagaaccaccccctcggacaggcctcctccgcctccctggctaccatcagcgggcactggtcagaacagagagaggagacgaagaagccaagagatgggatcacaagggcctcagacaacatggagagcgtcctggattggaagttaggaggcctcctttcccaccctgccccacctccggactgccctgcaggtcgctggggttgccctgggaagcatttgaaaataggtgtcatggtgttttgtaaattgctatgcaaaggtagaagcttcttgagcctggcctttgtgggcaggggaggggacgcatgggaggggtagttgttttgttttgttttgtttttgaggctgggtctctctgtcatccaggctggagtgcagtggtgtgatcatggctcattgtaacctcaaattcctgggcccaagccatcctccaacctctgcctc

SEQ ID NO: 14985 - DNA, 791 bp, Artificial sequence
  DNA replication origin
cttgtcctttaagtcttagtggttttcgggaaaggcctcgctggcctccagctaggttgggtggtccctcatccctgtgccctccaaaacacttcactgcttctcacttacaacgagctgctcttcactgctgctcacttacaacgagctgcacttacaacgacttgtccactgcctgtcctctctgctgaagggtgtgttcctcaaggacacagccgtaactgtctgtgcacaggtgtgtcccagctcaggcacagtctggcacataccagatactcagtgagtgtccctggccagaatgcaagacctgacagcaagagtctgtgctaggaacaggatggaacccacggtggggtggcagtgccttctggctgggcaaagggggtacagccacatcgctaggaccctagagggctcatggagggaggcagacgtcctgatgatgggaaacaacccaagactttgaaggggctctctgacgtgcaaagtgcagtttgcagaaggtgaatctggtgacggcatgagggatggactgaaggtggaggtgtgggggccagagatgggctggtgtcagcgtggatggtgggagtaacagtggaatcactggcagaaagaaggcaggtgtggggtcgctggtcccgggggagagatggaacgacaaaagggggactgcaggtgatccatctgctttctgggtgccaggcccccaggtgggtggcgagtcagacactcggtgtctcccacccaccacacctctgctcatgttgttattcctctgccctggtctccgc

SEQ ID NO: 14986 - DNA, 864 bp, Artificial sequence
  DNA replication origin
tgggggagggactccgaggcaggtgtaggaaacctcccagcatgggtgcagggtggactcactgaggacttggcaggggttttttccccaggtgggtccacatgactttctcagcctctcacccattggggttggaatcactttgaggggttaaggactccctaccctatggcctctgtcacattcccaaccattcacacacgcagatatgtgcctgccccccgtggctctcccagtggccttgagaccccatgggcctgaccttgggttggacggccattaattcgagactgtttccgggcagctccatccgtgtgtcccggaaaggctggcacatgctgctgaacttgtgcttccacatagccatgacctctgctgtctttgcggggggcatcacactcaccaactaccagatggtctgccaggcggtaagcaggagaaggggctctgggggtggtgctccgagatgagtgctggcacctaggcatagagtggggtgatgcgctggaagaaaaaggctggtgctcataggccgtggctccatggcttcctctgtggcagccttggaaggcagggatggtgggtcgtggagagtgaaagtagggggtggtaagaaccagatcagagagaatgggagatgggcttcaaagtggaaatggagacgtgcagtggtggggaggtgggggatcagccagatagccatatcagggtcatgggaagccctgcaatgggagagaaccctggggtgaaggcagagggtggcagtagggatggaagcttggcgagtgtatggggagtgggctgggtaaagtaaaaaagctgggggccggaggctggaagcctgggaggacaccagcaggactg

SEQ ID NO: 14987 - DNA, 1633 bp, Artificial sequence
  DNA replication origin
ccagctgcaggccggcgcccgggctgttgcggctgctgcccaggtagctgtcggtggggctgttgtgcagactgccgctctcgctggacagcagctccagcgcccccgccgcgcccccgcgcagggccttgagccggttcttgccgcaggcctcccccgcgcggtgtcccttggcccggctcttgtgcgcccgacgcccgtggtgcacgttgttggggtggcggtgggcgaggtttccccgggtgcccgccggctccggctctccttccccgccggccgccgcccccgcctcgcacacctgactctgggccagctgcaggttggtgagcttgcaggggcccagagccagcggatggccgctgctgccgcttggggaggacttgagggagggggggccctccccgaacaccggggaaccgtcctctgcggcggcgggcagggcccggggcggggcatggggggccgcgggagaggcaggggggcagcaggcgcgccacgaggctctcacgtccctccgcctggcacagtggtgagtgaagacgaagaggcccagggcggaggctgccaccccgtacaagcagctgcacaccacccggggcagccagcgctgggacactgccagagccccgcaggcccacatggccaagtacaggaagtgcgtggtcaccagcgcccctagctggactcccggagaatagaggctgtcaccatcctccgggggcccgggcgtccccactcgcgcgctcccagtagcaagaagggaacctgagtcactcaggagggggccgctgcccctgagcctggtggaacccctcagctcctcccctgcctccagggaggccctgctgttgcccgccttggggttctgtgccagaggaccccgtaagcgtagcccggcgcacaggaaatagatccaggtgatgagcagaatcaaagccacagggatgtagaaggcgccaaggcttggacgccacaccagccagcagctgtaggagacacagaagcagtgatgaggacagggggcatggctggggtggggctgggggccggggtggttggggagacaggatatggtgagtacggagacaaggacggcttggtcagcatgcatgggcttgggttgggttatggctgggtggacctggcagatggccctgccagtggagtggaaggcatctggtgttaggtaggtaggcttggggcgggagggaggggtgctcactaggggctgtggtcccggtagttgtggatgttgactgcagctgtgatgccacagataatgagtggaatccctccagcgatcaaatagaacctggagggaatgagggattgggggtcccagagatggggaaagggaagggaagaactgggtgcttagagccctttgcttgatgtttctgtcccatcctctttcccctttaaattatcagaattttttgccagggatgcaaggtccctgcagggactacttggacttggccatgactgttctaaggggcagaggccagaattgctctctcaccctaaacagtgcagaagtcaggggtgccactcaggttcccaggatccttgccatggcatttggagtcatctccttccctggctttgtcatgccccagaagcccgcaagatg

SEQ ID NO: 14988 - DNA, 1715 bp, Artificial sequence
  DNA replication origin
agagtcaggtgtgcgaggcgggggcggcggccggcggggaaggagagccggagccggcgggcacccggggaaacctcgcccaccgccaccccaacaacgtgcaccacgggcgtcgggcgcacaagagccgggccaagggacaccgcgcgggggaggcctgcggcaagaaccggctcaaggccctgcgcgggggcgcggcgggggcgctggagctgctgtccagcgagagcggcagtctgcacaacagccccaccgacagctacctgggcagcagccgcaacagcccgggcgccggcctgcagctggaaggcgagcccatgctcacgccgtccgagggcagcgacaccagcgccgcgccgctttctgaggcgggccgggcaggccagcgccgcagcgccagccgcgacagtctcaagggcggcggcgcgctggagaaggagagccatcgccgctcgtacccgctcaacgccgccagcctaaacggcgcccccaaggggggcaagtacgacgacgtcaccctgatgggcgcggaggtagccagcggcggctgcatgaagaccggactctggaagagcgaaactaccgtctaaggtggggcgggcgacgcggtagacgggctggccacgcggctcgttcccccgctcctcggggccctccaaggtgtctccgtagtcagcaggttggaggcagaggagccgatggctggaggaagcccacaggcggatgttccccacttgcctagagggcatccctctggggtagcgacagacaatcccagaaacacgcataatacatttccgtccagcccggggcagtctgactgtcggtgccctcccaggaacggggaaggcctccgtctgtgtgaaagggcacagcacatcccaggtgcaccctccccaagtactcccaccccgcctactgtccatgcggcctcactgggggccatcagcctcaccagcaaagcagagatgagagcgtgggaactgtgttctttcctccctgccctctactgatttcagcccagcccctgcctagatcctaggtcccttttcctcccgagtttggctggcacgagagctagcccagcacatgaagcaggtgatgttaagtcacaaggtgctgcttttcagatccactatgcaagaggggagggtggggccacgtgaaaggcagctctagacatcaaccagtcctgggggaggggagtgggaaccgggcacaactaggaacaatgccaccattcccacaggagtggtacttaaaccagacagcagggttcagaggtggcacaccgggacaaagctgaggccctgcacctcaacagctgactgccaggtgcctgtgggtgaactgaggggagtagagggagagggcaggtggaactggggcagaatctagtcatgccctaaagctagtcctgtaaacaatggtgccccagaaagctgcaggtggtgtttggagaagcagttacttttcagttacaagacccatctccctagtctcagccttacaacaccacgggactaaggaagagcacttccttgcctccgtaaggccagaggaagaaccatcccaatcatttgatctccagctccacagtagagagaaacctacaaaatgtcaaaccagcttcccgactcccaggagctcaagccaagcccagaggcagtggctggggtccctgcaggtcatgaggggcctatgcctttactcct

SEQ ID NO: 14989 - DNA, 1470 bp, Artificial sequence
  DNA replication origin
ggaggggagggcccggcctgggggcgcggacccctccggcagggcggtctgggcgctggacccttcgagagtaagccgggcagcagcggggaaggcctttcgggacggagccctcggccggtgctggtgttctcacctggcttccccttctgcggctgtcccgcccagctctgccagctttgggtcttcttggaagaaggggccgtatctggggcgctttttttttttttttttttagacagagtctctgtcgcccgggctggagtgcaatggcaatggcacgatctcagctcactgcaaacttcgcctcgcaggttcacgtgattctcctgcctcagcctcccgagtagctgggattacaggcgcgcaccaccacgcccggctaatttttttttttttttttttgagactgagtctcactctgtcgccaggctgcagtgcagtggcacgatctcggctcactgcaacctccgcctcctgggttcaagcgattctcctgcctgagcctcccgagtagctgggactacaggcgtgcgccaccacgcccggctaatttttgtatttttagtagagacggggtttcatcagattggccaggatggtcttgaactattgacctcgtgatccacccacctcggcctcccaaagtgctgggattacacgcgtgagccaccgcgcccggcccgcccggctaatttttgtatttttagtagagacggggtttcaccgtgttggccaggctggtctcgaatttctgacttcaggtgatccgcccacctcggcctcccaaagtattgggattacaggcgtgagccaccgcgccgggcctggggcgcttttgaatctgcaggacgcccctcagcgtctggcacacagtaagcactaagtgaattttagatgaattccaactatacgtgggcaggtgccttcttcttactagggtggtagcccgtgtctgatactcgccttcgcttgggtggaaggcctcctgggtatttcactgaatagaagaacacttcgagccgagaatgactgggccagggcgcagggcagaggaacaggaggcatgaaaccagctgacacccccaccctaaaggctaaccccgggcgcaacgcctttacaatgcggggtgggtggaggttgggggaggggaatggcgtttgccggctgtcacatgacttgctaaccccttcccctacctcatacttgcctagggggttggtgaagagaatttgcccctacagaaagaatgttacaacagtgtggtgtgtgccctgggccccatgttagtaaagatttctccaggttggaaggagcccgggtgggcccttgacggagcagaactgggcattgtttccttttggagttggtagagttcttctctctggtcctaatcctggtggatgtctgctcgcctgtagctcccaaagattgtgtcaggttatttcacttctgcagtaaaaactggg

SEQ ID NO: 14990 - DNA, 1236 bp, Artificial sequence
  DNA replication origin
cgccggaggcggggctggcgcggccaggcaggcaggggatcacgtgcgcaggggcgggcgcatcgagaatctaatctgagaggtggtaggtgacggatggggtccccagctgccaaaggtcgcacggcgggaaggagctggccgaagcactgacttggaagtcagacctcatttccagggtcacatcgccagtcgtggccttgcgcggattacctaacatcaagtctcaatttcttcacctgacaatcacctcctaggattgctgtaaaaaataataataataatgcattacagttcttggcccagtgcctggctcatggtgagttctcagtaaataaccatgaccagcacgttgggaggctgagacaggaggatctcctgagcccaggagttcgagaccagcctgggcaacatagccagatccccgtctctacaaaaaaaattaaaaataattagataggagtggtggcaagcgcctgtggtccccgctacttgggaggctgagtctggaggatctctggagcccaggaggtcgaggtgcagtgagccgagatcgtgccactgcactcccagcctgggcaacagagcaagaccctgtctcaaaaaaataaagttggtaactatgagggtgctaaggaagatgcccacccaattcactgtgctttctacttctcccgctggaaagccttgctctggaggaaggcagctgcagaggaaggtgaggaccttgtgagggccggaaaaggggaaggtatcctggggagcatgagttcaatgtgggagtgtcctattttgccctccccccaccagataaggcgaggctgagttagaaaaagggaagaaaggaggaactgaaaatgggattgccaaatcaaacatcgggacagtggcaggcccccagcccgcagttccccatttctcccttgccaggccctctttagtctctccctgcctctatccctgggctcccaggcagtccctttcttgttccaaatgcctaatagatcggctgcttcccttcatttcacaggtcctagttcaaaggctcaactgtttaacgagtcatcagattggaaaggtcacttggaaggttttaaagttttacagttaaggaaagactcagaagagaggagtgacatgtccaaggtccctctgcagagctgggactgggatcccagtgtcctgactcccaaacagctgttcagtgcatctcttgattcttccagatccacagaa

SEQ ID NO: 14991 - DNA, 1307 bp, Artificial sequence
  DNA replication origin
ggacacagcacatgtttcagagagcacagggttgggggtaaggtcatagatcagcaggatcccaaggcagaagaatttttcttagtacagaacaaaatgaaaagtctcccatgtctacttctttctacacacacagcaaccatccgatttctcaatcttttccccacctttcccccttttctattccacaaaaccgccattgtcatcatggcccgttctcgatgaactgttgggtacgcctcccagacggggtggtggccgggcagaggggctcctcacttcccagtaggggcggccgggcagaggcgcccctcacctcccggacggggcagctggccgggcgggggctgaccccccaacctccctcccggagggggcggctggcctggcgggggctgacccccacctccctcccggacggggtggctgccgggtggagacgctcctcacttcccagacggggtggctgccgggcggaggggctcctcacttctcagatggggcggctgccgggcggacgggctcctcacttctcagacggggcggctgccgggcggagggtctcctcacttctcagacggggcggcggggcagagacgctcctcacctcccagacggggtcgcggccaggcagaggtgctcctcacatcccagacggggcggcggggcagaggtgctccccacatctcagacgatgggcggccgggcagagacgctcctcacttcctagatgggatggcggccgggaagaggcgctcctcacttcctagatgggatggcggccgggcagagacgctcctcactttccagactgggcagccaggcagaggggctcctcacatcccagacgatgggcggccaggcagagacgctcctcacttcccagacggggtggcggccgggcagaggctgcaatctcggcactttgggaggccaaggcaggcggctgggaggtggaggttgtagcgagccgagatcacgccactgcactccagcctgggcaccattgagctctgagtgaacgagactccatctgcaatcccggcacctcgggaggccgaggctggcggatcactcgcggttaggagctggagaccggcccggccaacacagcgaaaccccgtctccaccaaaaaaatacgaaaaccagtcaggcgtggcggcgcgcgcctgcaatcgcaggcactcggcaggctgagggagaatcaggcagggaggttgcagtgagccgagatggcagcagtacagtccagcttcggctcggcatcagagggagaccgtggaaagagagggagagggagaccgtg

SEQ ID NO: 14992 - DNA, 970 bp, Artificial sequence
  DNA replication origin
cgccatcccatctaggaagtgaggagcgtctctgcccggccgcccatcgtctgagatgtggggagcacctctgccccgccgccccgtctgggatgtgaggagcacctctgcctggccgcgaccccgtctgggaggtgaggagcgtctctgccccgccgccccgtctgagaagtgaggagaccctccgcccggcagccgccccgtctgagaagtgaggagcccgtccgcccggcagccgccccatctgagaagtgaggagcccctccgcccggcagccaccccgtctgggaagtgaggagcgtctccacccggcagccaccccgtccgggagggaggtgggggtcagcccccgccaggccagccgccccctccgggagggaggttggggggtcagcccccgcccggccagctgccccgtccgggaggtgaggggcgcctctgcccggccgcccctactgggaagtgaggagcccctctgcccggccaccaccccgtctgggaggcgtacccaacagttcatcgagaacgggccatgatgacaatggcggttttgtggaatagaaaagggggaaaggtggggaaaagattgagaaatcggatggttgctgtgtgtgtagaaagaagtagacatgggagacttttcattttgttctgtactaagaaaaattcttctgccttgggatcctgctgatctatgaccttacccccaaccctgtgctctctgaaacatgtgctgtgtccactcagggttaaatggattaagggcggtgcaagatgtgctttgttaaacagatgcttgaagggagcatgctcgttaagagtcatcaccactccctaatctcaagtacccagggacacaaacactgcggaaggcctcagggtcctctgcctaggaaaaccagagacctttgttcacttgtttatctgctggccttccctctactattgtcctatgaccccgccaaatccc

SEQ ID NO: 14993 - DNA, 999 bp, Artificial sequence
  DNA replication origin
agggaagggagtaagtggattatgaaaagaaaacaaacggagggaaagggggccgaggatgaactgcattcagtgatatttatttatctgattgcaaaaggaaaagaagggatctgttctaatggttcaccttcttatgaaccctggagctcccaaaaccctggcgaagtccttctgacactgctgtgaggtagatcggagccattccatggctaaagtgagagaggccactgcttgagagcagtaataagggaaccagagataaaaccccaaatcttggtcttttctaccctgctgctctcagcctgggccacagagcctggagaacactaaggtctcatcagggtttgggtggcagaaggaatggaaccaggggagctctctttgccctaagcactcactgactgcacaggcaagccgggtgatgggtgcccctaccaaagccagcctgctgctccacggcacctggacactaccactgagggaggagtgaagttcaaggctggggtttagaaaacatctctcagacagagagcaagaggatggtgaaaacccacttggtaaggatccctccttgggtcacatggcccagtcgtcaggttctggagggtagagtgtcacagccggggaatcccatgggactcattctgaacagaggccagaggttttccacaggttctgatcaacagagttgttgcttcttgtccttcaggcctaagaaactccccaagaagccctgggaaaaaaagtggagataatagaccctggggtgaaaggagcaacaggtgcactgaggggaatgacagagatcagagaccctggaacgcatatttagttacacaaaaacgccagggcaccacccagccacacacgccccaccccatccctactccaacccagcccagggagcgggagggcacacatctgcactcacaggctcctcactcacaactgtacttcataccggaagtggattctcacctccacagctgtcaaacc

SEQ ID NO: 14994 - DNA, 1111 bp, Artificial sequence
  DNA replication origin
gcgcggggagctgggccgctttccgcccgaggagtctccgccggcgccgtcgcgctctctggccccggccccggtggggacgtgcgctccgcccgaaggggtgcccgcctgcggccggcggcccgcgcgcctcctgcctctccgggaacaccgggccctgtgcaccttgggtctcatcatgggcaccttcactctctgctggttgcccttctttctggccaacgtgctgcgcgccctggggggcccctctctagtcccgggcccggctttccttgccctgaactggctaggttatgccaattctgccttcaacccgctcatctactgccgcagcccggactttcgcagcgccttccgccgtcttctgtgccgctgcggccgtcgcctgcctccggagccctgcgccgccgcccgcccggccctcttcccctcgggcgttcctgcggcccggagcagcccagcgcagcccaggctttgccaacggctcgacgggtaggtaaccggggcagagggaccggcggctcagggtcgggaagcatgcgatgtgtccgtgggtcaactttttgagtgtggagtttattaagagaaggtgggatggctttgcttggagagaaaagggaacgaggagtagcgaaccaaaatgggacccagggtccttttctttccggatccagtcactagggtagaagcaaaggagggcgagcgggccgtcgttcctcacccaaggacccaaggtgcgccaccggaaagcgctgcggtgtcccgaggactctcgcctcgcctggtcggctttagggattttttttttttttaaatagagacagggtttcgtctctgtcgcccacgcgggaatgcagtggcgcgatctcagctcactgcagtcttgaactcctggctcctgggctcaagcgatcctcccacctcagcctcctgagtatctgggactacaggcgagccccaccaatcccagctatttttaaaatttcttgtagagatggggtcttgctatgttgcccaggcttgtcttgaacttctggcctcaagtgatccttctgcctcagccttccaaagcattaggattacaggccggagccagggcgccgggtcggct

SEQ ID NO: 14995 - DNA, 1915 bp, Artificial sequence
  DNA replication origin
cgagccgttggcaaagcctgggctgcgctgggctgctccgggccgcaggaacgcccgaggggaagagggccgggcgggcggcggcgcagggctccggaggcaggcgacggccgcagcggcacagaagacggcggaaggcgctgcgaaagtccgggctgcggcagtagatgagcgggttgaaggcagaattggcataacctagccagttcagggcaaggaaagccgggcccgggactagagaggggccccccagggcgcgcagcacgttggccagaaagaagggcaaccagcagagagtgaaggtgcccatgatgagacccaaggtgcacagggcccggtgttcccggagaggcaggaggcgcgcgggccgccggccgcaggcgggcaccccttcgggcggagcgcacgtccccaccggggccggggccagagagcgcgacggcgccggcggagactcctcgggcggaaagcggcccagctccccgcgcagcaagcgcagctggcgcgtagccaccacgaaaacccgcgcgtagacgaagagcatcacgagaagaggaaggtagaaggagacggaggaggacagcagcacgtagggcatgttggaggcgaaggcacagcagcgcgggttggagtggcagcgctgcgcctcggcgtcggcccctacgcgccaccactggctcatgatgggcgcaaacgacaccgcggccgacacgacccacaccaggaccacagctgtccgggcgcagcgcttggtgaccagtgcgccgtaacgcagcgggttggtcacagccaggtagcggtccacggccagggcgcacagggtttcgatgctggcggtcacacacagcacgtccaccgaggtccacagctcgcagccagtggcgcccaacggccagtggccagtcagcgccaaggtggccgccggcggcaccaccaggagtcccatcaccaggtcggctgcggccagcgaagtcacgaacacgttggtcatggtctggagtctcggagtccaggcgatggccacgatgaccagcaggttgcctcccacggtggccagcaccgccagcgccagcagggccccggctagggccgcctcccacggaacccctggcagcccactggtgttggcggtattgggcgccagggtggggaggtccggccatggggcaagagagctgttctcgtgaggccacggagccatccccgggtcgcgcgtggggcggtagggaaagaaggaaggagggggtctcccaaatcacctggctcaggggaggggacagcaaggcatgagagcgacttccccagcctgggccatcttctctagctgtcccagccagagcgctcagcctccccccaccccaactccctcggtgccaccgctcttgggggaggagtagcgacgcttaaaggggcagctgcctatagtctggaggggcctctggagccgaattggagagtggggaggatggccaatgggatgctccacgtttcctttagctaaatctggaggaagggacaccgtggttcctctgccaccatctgtccacccctgccgtggccaggctcctggactcagcatagcactccctgggcactggcttcctggagccctgcacctcctttcccagaagttcccacagcaaggcaggggaaggagagaggagagcgctcccatccccaccctttatgtatcagaggcaaaggtaacccgctggagtcaagcaaaggattcacaggagccccgcatccacttgggtggcctcccctaaggtattttaaattaagtaatagggctcagccagtatctcctctcccaagacctcagcttggtgagatctgtcccctttcccttctgtttcagttaccttctctttccttctagctttttgttttttttaatattttcaggtactga

SEQ ID NO: 14996 - DNA, 1119 bp, Artificial sequence
  DNA replication origin
ccggcgagtggcggggatggcccggcttggggtctggctgcagctgctgcccccggacatggtctcctgtgcgctgcacccgcgaacctctcgctgccctcccgcgcctccagcctcgctccgcctcgccccgtgccgccccgccccaggacgccccttccgcctctcccgccccacgcccctgggatttgtagtccgcgccgcagccccacccagctccaggacgctgcttccacgtgggatcccccgccgccccccgacccactcccgtctgctcacgggctcttccgcacgggcgctggcgccgccccgcagcgactgcccctccgtccggggtccctccccgccacgctggcagggacggatatggggatggcgggcgggatagctcgcctaaattaatccttggctgggttgggggcggcgactcaggaccgcgcggagatccgagctgacccggcccactgcaggaaggcccggtttctgcattaggacatcaggcctggtgtacccttcggcactccctgtttcgtgccttagttcctcagatgagaaaatggggattgagtagttatgctcaccgccccccgccccgcttcaatttcttgaccttgatgggggtgggggtggaggggctaacaattccgttcccggcctttagagagggtgtgggaggaggagtgaaccaaccagcggcgtcctgggagctaaatttagagctgggggcgcagaggtgggtggtggggaagggcgttggagaggagtaagagtgtcgaagaggtttcccgatagcccctgaattgagtccaacgtccacctgaggtttagtaggtactccttggatggatggatggatggatggatggatggatggatggatggatgttcaaggggagagagaaaaatgcaagaaggaccgaggatggaaaagcttgttgggtttgagaagttcttagcattatgggcacatattgtggggaagagggtgaagaggggagggcagtttaaaagggaaattgggtggtgcacctgtaatcccagctactcaggaagctgaggctggaggatgcttgagcccaggggtttgaggctccagtgagctgtgatcacaccactgca

SEQ ID NO: 14997 - DNA, 1062 bp, Artificial sequence
  DNA replication origin
cagccagtgcagaccacagggttcacagggtgcccagggttcccccaggctcggggcttcccgggagccgaggttcccccgccccgcatcccggccccgcagcgctgcgccgcccacctgcacccagcctggcctccctcggtccagccgcccgcccgacgcggtctcacctggcggccccgccactcctcaggctctcctgccctccctgaggaggacactgcatggcccggccgcggcctttaccccagcccgggcggggcgcggcggagcagggcggaacctgcagccccgccgggctcgcgccgaacaccaggcgccacggcgctcccagtgggcgagtagcgggcccggatgccaggcgaaaaggtgaggcggcggggagcgcggcgcgcgaccgcgggtggggcgtgcagggccgcagggcacgggcggcaagtgtcgcgagaggtggggggagtcgcgcgagacgtggctcctgcgggcagggagctgcagcgccgggcggcgggctgctggctgctgaggtctaacagtgggggagagtttcgagtgtccgtggcggaaggggcttcgagatcagtttctagtatccgtgacggcaggggcttcaagatcagtttcgagtgtccgtggcggaagaggcttcaaggcggcccctcacgtacggggcgggaaagtcggaatgatcctcgggatacgctacagaccctactagtgcgccaggagcagcgcggtgatcaccggacgcagggactgcgcggccccgggattagcggagtagggcggagggcgcagccacagccgccccgctcctggcctctgcttctgggtgctgagaacgggtgtcactagcatttgccaggcaaaaaggctttggcccgtcctccgtgcatttattatgatttagaggttaccaaaaaggtatccctaaaaaatgtagaggtgtcgggcgtggtgtcagcgcctgggtctgagctactcaggaggctgaggctgaaggagcgccccagcccattggtgccagctgcatgagcccagatggcgccagtgcactccagc

SEQ ID NO: 14998 - DNA, 1373 bp, Artificial sequence
  DNA replication origin
gcatccgggcccgctactcgcccactgggagcgccgtggcgcctggtgttcggcgcgagcccggcggggctgcaggttccgccctgctccgccgcgccccgcccgggctggggtaaaggccgcggccgggccatgcagtgtcctcctcagggagggcaggagagcctgaggagtggcggggccgccaggtgagaccgcgtcgggcgggcggctggaccgagggaggccaggctgggtgcaggtgggcggcgcagcgctgcggggccgggatgcggggcgggggaacctcggctcccgggaagccccgagcctgggggaaccctgggcaccctgtgaaccctgtggtctgcactggctgccctgctgctgtcgcggggctgcgggcggacgacctgagcccgagctccgagggcccggagcggggcgccagggcctagggtcgcgggggccaggggcgcgccagggtggctgaggtaagtctgtgtggggaaaaggacaatggagccgaaagccggcgtctgccgtcccgccgggcccgcgcgagatgccctcctgccccccgccctacgaggcagcttagaagtgtccttctggtgcctgcggcgctgatcgttgccgagtggaaggagtgttggagaggtagaaacagctggtcagagccgcctctgcgggaggaggcttttgaggtcgcttgttagctttcatctgagattctggctatgggagtgggcgtgcgtgtgcgcaccgtggccccaggcgaggtttcgtcttttcccaatttgtaccaccacccattaagcgacttcaaggatccatcaaaaatgattggttcctaagcgaacagttttattttttgtattttaagattccattagttgtgtaatggtaggggcctggagcccaaaaccttggcgttactaggacagggcatgacccagctgacttggagtaaattttctgcctttaactacatttagattggaaattagggtaaaatgtttttgttgcaatctagtttcgagcatgtggtcctgtgattctgggtttgttttataacttatggactgagtaaaattacccagtttactgagagaattgagaactctgtgcaatggttgatctaatagaagcattttatttaaagcttccacccatccagttgctaatttatgttatttctcttttaaattatgtagattttgttgttgttgttgttgcagaaatggctccgtaaaatgattagttttgtgcgtgtgtgtgtgcgaacagttacacagttaagttcgttttcctgatagttttcttttgtctttagagagcgaaatgtcatcagtgcagtcacaacaggagcagttgtcccagtcagatccatc

SEQ ID NO: 14999 - DNA, 1951 bp, Artificial sequence
  DNA replication origin
gcggagaggcgtgcgaattccgagccgagcgccgaggaccgtgctacccaggccgggctgccagccgcaggctcctctctggcagcagcggcggcgcggcgacccccgtccctcggcctccccttcccatcccacctcccgagccttcctcttcccgcagcacgcccggcccggcccggccgtggccctcctcagtgccggccgccatggcagaggcgtccggcgcggggaaaatctagcccggggatttcatgcggcctagctcggttccgcctcctcctcgcgcggccccagcggctgcccgcaccccagccccactccgggcctccgtgtctctcctgtgatcgcactgacacggccggggggttagaatggaacaaactgaaggtaaagtgcgtgtgcgtgtgtgtatgtgtgtgtgtgtgtgtgtgtgtgtgtgcgcgcgcgcgcgtgtgtagtgctaggaagggctgaggagggaacgacggggagggggcgacctagggatggagcgccagaccccaggaggaatggaaggggaagcgggtggcctgaaagggctcgaggggagtcctgacggaggagcagatggcaaggtggggggtgtggagggaattggggggtgggccaggggaggtggggagtgggatgggagtcggagtggcgctgagctgggaattgggaaagtgggatgggggcggggataaggatggatcggggaggggcagggaaaggggagaagagttgcatggagattacagacctgggtggactgataaatagggagatttggggatggagtgtaggaaccagaagagtctgggagaaggggataaatttgctggagaaatggggcattttatgggaatgaagggagaaatgaggaatggaagtgaaggaaaaggtggattaggaaaggggatgaggcaggctgcaataggagaatgggaaatagacgcaggaaactggaagacaggattgggctagggaaggaaattaactgaatgatgacagggatgagaacgatcgacttagcgtcagagtgggaggaagagaaggggatggaggtcgttaaagtgttaggaagggaggccttttgttcctgtatttgtgtgtattctgtgtctttctttcaaggctagagaatagagaagctggtggttatgggattgtgattgttgtgaaatggggaggtgtgggttttactgttttgagggagaaggcgatgtgtttgtgttatggaagggaggcagggagagacatggccataatttgatggttttggggagggagtgaagattatttcgatttaaagggggcaggggcagccatgtttgctgccaaggcactgcagtgtaaataaattccttttcctctccgacatcagtatgaatctggaaggggccaattcagactgttagccccctttctttctattcatgaactcttttccccttacgtcttgggtcattttaaattattcataaccgccaaaggaggtagtgatgttttccatcactacctttttgatgcttttctccctctctttaccctcttccttctggttgcaaacaaggtatgctaatgagctgcagtgtaaatttaacccatttaatcaatttaaaactagatttttactagctgaaggaatcattactacgcttacatatcaaacatgatcgtgaagtcttttacgtattgaaaattcgtttgtttcggaagcctcagaagcagtcaacatgttttctgcaattctttaagtaaacaaggaaattgcatcggttattttacttgggcctgtgctcttggcaaagcgctgtgtccgggtgaaaggggtaggaagctctgcttgtggtagattatcggcttgctgtattttgaatgttgaaaaattagaaatgtatgtatttttaaatagtatttctgatagctcttgcttataggtgatgag

SEQ ID NO: 15000 - DNA, 998 bp, Artificial sequence
  DNA replication origin
cgcgaggaggaggcggaaccgagctaggccgcatgaaatccccgggctagattttccccgcgccggacgcctctgccatggcggccggcactgaggagggccacggccgggccgggccgggcgtgctgcgggaagaggaaggctcgggaggtgggatgggaaggggaggccgagggacgggggtcgccgcgccgccgctgctgccagagaggagcctgcggctggcagcccggcctgggtagcacggtcctcggcgctcggctcggaattcgcacgcctctccgcggcgacctgtgcacagccccctcggcctccgcctccgtgctggccgccgccgccgcctctcccgccgccgccgcgcacaaagcccccccaccccgactctcggggcgccgccgccgccaaatcctcagcccctcattggccgcgggccgcggcgcctgccgggaaatgcagtccctggttcgggacgctggggctccggaggaagcggcgagtcggcggggcggagggggcgggagcgcgaaccaggaacgcccgcggcagctagcgtctggacgactagggagaccgggcgagagggccgaggaacgagggacggggagggactgtacgtgggagagtgacacacaaaacaccccgggaagccggaggaggcgtggaaaggtggggcccgggaggtaaaactgggatcggcgcgttcagtgaggctgattaaagaacaacgcgcaaccagcgccatacggcgctcctcagggtgactcggctctctagctcttaagggttagaagcgaccctcgcacggtccccggtgggtcaccgcgcgagggcggggcagtccaggcgacccctcggccgtctcccgtcctacggctgtcagggaagggctccggttccggtagggtctgcatttggaaagccgggggcgatgcaagaccgccttggcgtcgtctccctctcagccccggctgagctgtcggatggtccccctcccccgg

SEQ ID NO: 15001 - DNA, 839 bp, Artificial sequence
  DNA replication origin
ctcctcagggtgactcggctctctagctcttaagggttagaagcgaccctcgcacggtccccggtgggtcaccgcgcgagggcggggcagtccaggcgacccctcggccgtctcccgtcctacggctgtcagggaagggctccggttccggtagggtctgcatttggaaagccgggggcgatgcaagaccgccttggcgtcgtctccctctcagccccggctgagctgtcggatggtccccctcccccggttgcaagcagtaggagacccggccggcggcgccggctcgccgagggagcgcctcgacctccccggcaggcgccggccccgcgcgcctcttcctgctctgctgcggcccggaggcttgtgggtaaccgggaggacgacgtcagcgcccgccgcatccccgggtgccccccagccgcgggggaccgcgacggctccgtgaccgtcacgtgccggaggccgcggctgctcgcggccagaccttcgcatcgagggacgtgagggacatttgtcctagagggcccaagataagaacgagaggaagaaccgggaggcaactctccgtcatcctctagccccccgcatcctaggaaacgtatggaaaacaatggaaggttaagtgtgtgcacagtgatctggccctgcaggagtgtgccgaccaggtgatatttcctggggcctggtgataaggatttggaaggttacagcacagagacgtgaacgtaaaaaggaaacagaggcagcaagcaaatgaggaaaccgatactctgttctgagaataaagccattttaccgctagacgtcatactctgtagacgttatagtgctggatg

SEQ ID NO: 15002 - DNA, 930 bp, Artificial sequence
  DNA replication origin
gagagtggaagccaattgcagggagtcttgaaggtgaggcagggatgtggattttactctgtacacagggtagattttgatcaggaaaataatgtcaagcacatgacagcttggaagcaggagtctgagctgcagccccagggaggccatttaaaagattatcccggctgggcgccatggctcatgccagcactttgggaggccgaggcaggcagatcacgaggtcaggagctttagaccagcctgaccaacattccccttctctactaaaaatacaaaaattagctgggcatggtggcgcatgcctgtaatcccagcaactcaggaggctgaggcaggagaatcacttgaacccgggaggcagaggttgcagtgagccgagatcgcagcacttcactccagcctgggcgaaagagcaaaactccatctcaaaaaaaaaaaaaaaaaaaatttatcccgagatggttccggtaaagggataggacagagcatacctgagccacgtttggaagggaaccggggtctaaacttgcatcaggaggaaagcgagctggttcttgaggcttttacagatcacgtatagtggagttttgtttgcacgttctggttgggacgggcaggaagttacggatccaagctggtatcagctagagcgggtctcaccagggccagtgttcctttgctgcattctcttggggggaaataaatgcctgggggttctctttgctacatttttgtctttgggagctgcttttttctctgggatcggctgcaataggccttgtgatgccagagggtaagaattcaagtttactcttgaccaatgggttgcacagatcacaagctgcaaaatatttaatcaccgaggtcatttgagggaaatgagatttgatcaatagaagtgtctgctctgttccttaagagttgagt

SEQ ID NO: 15003 - DNA, 1504 bp, Artificial sequence
  DNA replication origin
gccggccgcggagctcttgcgaccccgccaggacccgaacagagcccgggggcggcgggccggagccggggacgcgggcacacgcccgctcgcacaagccacggcggactctcccgaggcggaacctccacgccgagcgaggtaagagccgcggcgcccccggatctggggcgggcttggcgtcccgagcggcccccggcgccggagcctcccggctgcgcgctttgcccgccgcagcccagccggggccggcgcctccctccgctcgccgcccgcccctttcacctcctggctccctcccgggcgatccgcgccccttgggtctcccctcccttccctccgtccgcgtctcctgcgccccctccctgcgctcgtcccgccgctcttcccgccgcccaacttttcctccaactcgcgctcgggagctggcgaggcggcggcggctcctcagtgagtcccgggagggacaggcccggggcgaaggcggcgaggcccgcggtttcctggactggggaggagggcgggagtgggcggcgaggtgggatgcgttgtgtgtgttatgtgtgtgtgttgcattccactccatgtctttttggtccccttttggggattcacccccaattcagcaggtagctttgggctcaacgctaaaaatccggggcattcctaagtccttttccacccccgggaaagcctggggtgcgggttggggtcggatggggtgggagatgaactgcggaggacgtggagggctaggttagcttctcttggaataggttttaaggaggtgtcgtcaccaaatggctgaatctgcttgagctgagagcgaaaaacgactcccctttccagaaggggtgatcttatgacttggacggtctctgaaagggtcggaagtttggggaacgggaggacaacccacggtcgttaagccgaggtgtgggatgggggcggaaggaccgttcggtcccaatctggttcctagaggtgggggaagggatgagggtttttgtccggtgtggttcactcggcagcgatgcgtatgcttctctggcccagacccctctgcacctcgcttcccctaccgttatgtttggggttgggagaaaagtgaggctacgacccatgtttgcggaggaattttatggaccttgtagatgggggttcatatagaacacacaccccctatgaggcagccagacacttttttggtggtggtggggggggggtggggtgtgaagcctgtttcttgttctgagcccagaagctatcaacccttttgaaaaacattaccacggtgcctttctcccccagcactcccccacccccaatttccagatgtagcagccgcatctggttccgtttcaccccacacgggtacaccgcagccgcattattaacttccctcttcctcccctccccctcccccaaattaaaactcagattcttcagcctgtcttgaccacctccctccttaacatttctggagacttggagatgcggcgtt

SEQ ID NO: 15004 - DNA, 1265 bp, Artificial sequence
  DNA replication origin
tccgccacccggggtctccagaccttgtgcccccctcctccagaacgcagcggcggcgcctcactttccttgcagaccgggctccatcgccctgcggaggccccggcgccgcggcgtgcccgactgcagcacgggtaccgtgcgccctgcggggcgccccgagctcggaccggagaaaagtccttgggttccgcggcttttcaagcagcggcgcgctcgcggccggggaaggcgaggtcgccgcaatgcgctacgaggggtctcggtcccgtccggacgtggccgcccagctcccggcacacccgggttcctccgcgcgctgcggctgcaccggcgtcccggctcccgctagctgccgcccgccgccgaggacgccgcgcctgtggccgcaagagcgctccgagcgctatgcgccggcggggcgcgagggctcgctctctcactcccacccgcgctggtccctcctccgcctccgccccctgcagctgcctgctgggccttgtagttccccagccgcggccccaaaggacggggagcgggccgagctgtccggcgctctgcccttctcttcctacagcctggtctcctttggcgtttgcgcccctgcatctgagcacgtcccagagggcgccggaatgtcaggccctagacatagcagcggtttgggggctagggggcaggtgaagagacgccgcagccttgaggttgtacctggtagcgtgggctttggagtctgtgcgccttggggaaatgattttcgcgctctaaatctctgttttcccatctgtaaatgggggataatagtgcttttcacatagagttgaggcgtcaacgagggcctagcgcatagttaacacttagtaaatacaagccggttttattataaggtcagcccctcctcaaacccttcccttggatttcagctttccccagccacataatttaggttttgtggtccaccgggaactggaccctgtaaattctacagcgatgctgttggcttccagaagtctccagcctgcagtgaatgtctaggaagcaaagagtaagcagtgggagttgaggggagacgtgtggttggtttggaaattaatcacagcccactcagaacaccctccagtactgtggaacacaggaaagtggctaaaatgcttccccctgagtcttcccgcgaagtggtataatgtagtggttccctaatccagatggacacgggtcctagggaacgtctgaaaaatacaagttcatgggcctgctcagacatg

SEQ ID NO: 15005 - DNA, 1142 bp, Artificial sequence
  DNA replication origin
gcgagagtgtgtatgtgactgtatgtgtatgtgtgtgagagtgtgtgtgattgtgtgagggtgtgtgtgagtgtatgtgattgtgtgtgtgtatgtatgtgtgtgtgagggtgtaatagtgtgagtgtagtcgtgtgtttgtgaatgcatgtgagagtgtatatgtgcgtgtgagagtgtgtgatagtgtgtgtatatgtgggtgtacttgtgagtgtgagtgatagtgtgagtgtgtgagtgtgtatccgtgtatgtgtgtgtcagtgtgtgagtgtgatagtatgcatgagtgtatatgagtgtgagtgtatgtaagagtgtgtgtgattgtatgtgtgaatggtagtgtgaatgtgtgtgagtgtatgtgacaatgtatacgtgtgactgagtgcgaatgtgtgattgtgtatgtgtgtgtttatgtgagagtgtgtatatgtgtgagggtgagggtgtgtgatagtgtgtgtatgtgtgtgatagtgtgtgactttgtgaccgtgtgtgagggtgtgagtgtgtgtgtgtgtgtgagaatgatagtgtgagtatgagtgtatgtgagtgtatatgtgagtgtgagtgaggttgtgtgttacatgcatggtatgtgtgggtgtgagtgtgtatgtgggtataggcctgtgtgttctgtgtgtgtgagagtgtgtgaaggggtgtgtgtgtgtggtatgtatgtgactgtgggtgcgagtgtgcacgtatgtgtctaaacctgtgtgtgctgtgtgtgggggtatatgggtgtgtgtgagtgtacatgagggagggtatgtgtgtgcattgtaggtatgtgagtgagggtgtatgtgactggacgagtgtgctgtgtgtgagtgggggtttagattgggcatatgtgaacctgtgtgggaggtgtgagtttgtgcaggagtacagagacacgggttgcatgtggatgtgtgggggtgtgtgtgtgcaagtaggtgtgtgggagggaggaaacgtgccccagcctgatcctgtgagaacactcaggactgtatctactcccgtgggtggaagacagcgtggtcctgggaccgtccctgatgcgagcgctcactcccttttccctcccagcccacacctctccctcctaccgccagagaatc

SEQ ID NO: 15006 - DNA, 1259 bp, Artificial sequence
  DNA replication origin
ccacggcactccagcctgggcaacagaaagagacacggtctttcaaaacaacaacaacaacaacaacaacaacaacaacaacaacaacaacagagtgttcctgcctttaaagaacttatattctagtgaaagatagacaagtgaagagatcattattattattattattagagatgaagttgtgctcttgttgcccaggctggagtgcagtggcgcgatctcggctcactgcaacctccacttcctgggttcaagcgattctcctgcctcagcctcctaagtagctgggattacaggcgtgtgccaccatgcccggctaatttttgtatttttagtagagacggggtttcaccatgttagtcaggctggtctctaactcctgacctcaggtaatccaccccctaggcctcccaaagtgctgggattacaggtgtgagccaccgcgcccggccgggaagagagaattataaaataagattggtaaatgcttcgttagcagagttaacaagtgctataggagccctgggaaggacagcgataacatgggtgtaggatgcctgcatccatcaccaattgtgagcgcccactgtgtgccaagcatgttggaggaacagtgaaatcgaaacagattccctgtcttcatggagcttatgttctagcaagggagacaggcagtaacaaagaagatgtaacatcaagatgcaggatggtgtcatagaagggaggtttggagaaggattccagtctgctggaaaaagcgctagaataaggacaggtggctggagaggaggtgggtgggaggcaggaatgggtgaggaagggcatgagagatgctctaaagggagttgctaggtgtagctggatcgcagatgagatgatagggataggtgtttgtttgtttgtttgttttttccttgcgacagagtttggaggaaaattcattgcctggttgtcagagcctaaagggacattaaaagctaaagatgaacatactcccttgttttatggataaagaaaacaagactcagagagggtgaaataacttgttccaagttactcagctagttggaggcataaccagagcccagttttctgtgcagcgcagtccaggcctcccctagtctcaggaggcagaagcggtttaggggaaagagcatgccctttgcagggccgcctgggtcccctgaccccgtcacacaccgccccctcctgctgcttctctgaacagcagctcccggggcctcttcccgcggcttccc

SEQ ID NO: 15007 - DNA, 1958 bp, Artificial sequence
  DNA replication origin
aaattgactttttgacaccccattccttctgctggtcgggatcctgcctctcaggggtgtgtcttcaaatcctgtgattcacagagaactttctgtagcttctgagaagttgggagtctcccttctgcagtcgttcagtgcttgttcatttgtatctgctggttaaactgcagtataaacaccctgcattggatgcagaggggactcattgtgactttttgtatttatagaagtacaaatgttgaagaaattctcttcacacacaaatgtgttgatggacggtgtgatggaacgttctagtgccctctggtggctactgcggcttccggctggtgaagctgcacagcagaaggaacgggagtgtcaaaagttcaattttttcctcctccatccttgataattgtgtgtcttgtttgatcgattccatacccctgtatgaatggtccaggggctgagcaagaagctgtgtcttaggactgaagtgcttgaggagtgtgtgtgtgtgtgtgtcagacagagagagactttgaggggtatatgtgcaatgtgtgtgtgtcaccatatatatatgtgaaactgtgtgtgggaggtatgtgtgtgactgtgggcttatgtgagagttgggggtaggtgtggtgtgtgtggttatatgtgtaccagagactcaatgtgtgggtgggggtgtgtggtgtgtgtgagactgtgtatgtaagactgtcgggggaggtgtgtgtgtgactgtgtgtggtgtgtgtgactatgtgtgtggggtgtatatgtgtacatgagactgtggggatgggagtgtgtgatatgtgtggtgtgtgtgagactgcgtggtgcgtggatatgaggctgtgggggtggaggtgtatggtgtgtgtgtgagactgttgtggggaggtttgtgtgactgtgtggtgtgtgtgtgtgtgagagactgtatgggtgggggtgtgtgtggtatatgtgtgactaggtgtgtggtgtgtgtgtgtatgagactgtgtatgggagggtgtgtgtggtgtgtgtgattgtgtggtgtgtgtatgtgtatgagactgtgtatgggttgggggtgtggtgtgtgtgactacatgtgtagtgtgtatatgtgtatgtaagactgtgtatggtggggggtgtgtgtggtatgtgtgtaactaggtgtgtggtgtatgtgatactgcatgggtgggggtgtgtggtgtgtgattatatgtgtggtgtgtgtatgtatatgagactgtatgaggtgggggggtgtggtgtgtatgtgactgtgtgtggtgtgtgtgtgtgagactgggtatgggtgagggtatgtggtgtgtgtgtgtggtgtgtgtatgtatatgtgagactgtgtatgggttgggggtgggagtgtggtgtgtgtatgactgtgtgtggtgtatgtatatgtatgtgaggctgtatgggtcaggaatgtggtgtgtgtgactacgtggggtgtgtgtgtgtgagagagagactgggtatgggtgagggtgtgtggtgtgtgtgattgtgtgtgtggtgtgtgtgtgagactgggtatgggtgaaggtgtgtggtgtgtgtatgtgtatgcgagactgtgtatgggttgggggtgtggtgtgtatatgactgtgtgtggtgtgtgtatgtatgtgaggctgtatgggttaggggtgtggtgtgtgtgactatgtggtgtgtgtgtgagactgggtatgggtgagggtgtgtggtgtgtgtgtgattgtgtggtgtgtgtgactgtgtgtatggtgtgtgtgtgtgagagagagtgggtatgggtgggggtgtatgatgtgggtgtgagactgctgggggaggtgcatgtgtgactgtgcatgcgtgtggtgtgtgtgtatacatgagaccctgtgtggtgtggcgtgtgtatgtgaacatgcgtgctccctgcgctgccggctctggctctc

SEQ ID NO: 15008 - DNA, 1408 bp, Artificial sequence
  DNA replication origin
ggggcggcttctggggcgcggctccggcggcagctgatgcgcgccccgccggccgggaggcgggagtccgcgagccgggagcgggagcagcagaggtctagcagccgggcgccgcgggccgggggcctgaggaggccacaggacgggcgtcttcccggctagtggagcccggcgcggggcccgctgcggccgcaccgtgaggggaggaggccgaggaggacgcagcgccggctgccggcgggaggaagcgctccaccagggcccccgacggcactcgtttaaccacatccgcgcctctgctggaaacgcttgctggcgcctgtcaccggttccctccattttgaaagggaaaaaggctctccccacccattcccctgcccctaggagctggagccggaggagccgcgctcatggcgttcagcccgtggcagatcctgtcccccgtgcagtgggcgaaatggacgtggtctgcggtacgcggcggggccgccggcgaggacgaggctggcgggcccgagggcgaccccgaggaggaggattcgcaagccgagaccaaatccttgagtttcaggcaagtacacggcgtccccgctgagatgcagacgcgcttgcctccatccatctgcgactccctctgtgtgcgtgtgtgtggtcgccacccgcgaaaccgtcctcacggccgtgccgcgtccctgcccggagccgggtccccgtgtgcgtccgaaagttcaggatcttctgtcctcccgtggggtttctggcccccgtttcgctaggagagttccgcacccaacccagaatctgcagtctctccgcatccccgctggcctcggtcactttctctaagcttcgacccccagcccccgcccctccacactggagcaacgtcactgatctaacccagtgcaacttagggcccccccgtggggaagaagtcgctccccggcccttcccggggccctaccgtgtacccaaaacgcagccgcggtgaagaaggtcgcgtgatgacaggcccctggcagctgctgggaaatggtggtctctgccgggctgtcatccgcgtgattgcggaaggcaggtgacaccattcttagcctcgggcccagggagttccagcaggtagaggcctaccgagcaaagaggaatgcctagcatcggcctaactcgggggtgggaccagtattaattgttaaagcctctgggaaagggctcttgtgacaaaaggagtctgttggaaaagcgcatttttcaggtgtctgagggaaggatgacctcgaaaataaatggtgctggagaaaagctccagggaatggaggagctttcagagagacaggatgccagcctgagaaacccaaggagggcactgctcagagaccgcagttgcctcccgcaggtcagaccctgctga

SEQ ID NO: 15009 - DNA, 1703 bp, Artificial sequence
  DNA replication origin
ccccgtgcaggggccggggctcgggcggggcgcgttacatcgggcggggtcgcccctccggccgccgggtccgccgcgctccagggatttctgggtctgcctgccaaactctccgcgcctctcgctcccctcgctctggtctcccccagtgccccctccttctctcccgtccctcggctcttttttccgggttaattacgtttcgcattaaagcaaaacccagccccggatgtgagtacaatgctccgcggagcccgccggggagggagaggggtgccggggcgccgcgggctgggagggggtgcggccgggcgccggggccgcgcgggggaggcgggggcggggcgcccggaggctgcgcccgaggccgcccgcgttccgcgcctggcaggtgggacctgcgcgccgagactgccccgcggggaggcccggccccgacgctcgctcgggcagcaggtgtccgggcagggggcgtcctcgcaggaggaggcgagctggagcgcgagctccctcaagaaccccatttcctcctcccagagccccacccagcgacctcagctgggcctccttcggatcccgagcccttagcctttggggaccgaggagttggggtaagggttagggtcccaagaagagtggcttcttcaggttgtcctaaatgtgccctaagagaccagtgggcgggaacgctctaaccagggttataaggactttaatttctttattttattttattttttaatcaagacagggtctggctctgtcgcccaggctggagtgcggtggcgcagtcatagctcactgcagcctcgacctcctgggtccagcgatccttctgccccagcctcccgagtagctgggaccacaggcgcctacaccgtgcccgttgggactttttcggtgtgatgcgaagactcccttcctgcccccagagcatgagggtgctctgggaaaaaatgggaaacagacaagcatgtgttactacgtaaacctcgccaagaggaactaagagagctgctgtgcgcgggtcccgcccctgcgctatctcatttgatccacgccgcaacctatgggtaccagtccggttcacggtgaggaaaccgagactcagacttgtgaagtaatttgccctgggtacccagttagtaaacggcaggtctgtcaggttctgactccggcctcccacgtcgggagagagacatttgaatatgcatcaagtcaggtggacaacatccgaaacatgaaaatgtagaagattcgcgcgggcctgcggggccgtgcgccggtgtctggcgatcctaatgcaaacgttgttaatcaggtgtaaatcctacgaggctttgaaagaggcaggcataagaagacgctgaggttctccaggacaaggactggatttgcaggaaggagggagaggctggggcacattcccggtgttaacagaggaaaggcggcctcttatgtctccacgaccgaccggaggccacaaggcctggggaggggggctcgggccgatgagccaggaccgagggagaaggacagcccgccccacacaccccgaaagcaccagtgatgaaaccacacaagtttcctcttccattttgattgccaaagcaaaaatgaacaccgccggtgtctcaggtgtgaaaaaagactgtttgctttagagcattttgctttcaatgaggaagaaaagggggacgatg

SEQ ID NO: 15010 - DNA, 940 bp, Artificial sequence
  DNA replication origin
atgcgaaacgtaattaacccggaaaaaagagccgagggacgggagagaaggagggggcactgggggagaccagagcgaggggagcgagaggcgcggagagtttggcaggcagacccagaaatccctggagcgcggcggacccggcggccggaggggcgaccccgcccgatgtaacgcgccccgcccgagccccggcccctgcacgggggggtaagttgggcgccctcgcgggctcgggagtggagaggcgcagaggggcgcgcgggggctggcggggctgggggtgcagggggcgccccggcggaggcctggcggcctaggggcgcgaggggcgcgcgcgcagggctgaatacgccggtcctagtggctgacaggcgaggggaggtggccgcagaccctggaggcctcctccaaccctctgggagagccccgagggcagcccctcctccaagtgccccgggtggccaaggtcgccgccgccaggggtcgggctgcggggggtggggccgcggagagggtgggggcgggagttctgctgagctgcattttctcacgtttgcagcagcgaaacttctctgcgggttctggcgctggggcaccgaccccgcaacgactgcccgggctgcgggaggggaggagagcagagaacgtccccaggcaagtcccttgggtacggattgggccatggagactcctctttcactcccccgactaccttattaaatgacaggcctagaaggctcccctagggactcctgtcctttcctctgggtgcagcctggacttcgggcttctggaactccagacagtgaaaaggactgccctaaaatgcaggttcggtgccaggttgggtgagccctcgaggggagctgtcgttctctctctcaccaacttcttcctcaccttacacgcttcccttttctcctccagtcctaaagac

SEQ ID NO: 15011 - DNA, 897 bp, Artificial sequence
  DNA replication origin
ctaggaagcagccgtcccaaccgacccggggcgcggacacccacctggccgcgccgcaccgaggactgggcccaccaggccaagcaacagcaaccaccggacacgaagggtccccgagggaaagcgcgcgccagaccccatctcggccgattccgcaggttcctctcagcactcggtcgcctccacctccgcctcttccatcattttccaaccctgccggggccccaagtctggccgggaagcgcgcgcgcccgacgagcacgcgcgcccgacgagcacgcgcgcggcactgacgcaactgagccctcggtccgagctcgctcccgacatcgcctagctgcgctgacgtagggaaaaatccagtccccggcgcgagaataggatttctaaaccggcggtggcaaccagcactagtcggcccgccagtcatatccgccccgccccgtcggctgccgggcacgcccacctaggggggtcgacggatccgattggagaacgcattcggcgcaaaagaaggaggagcatgagacccagaagaggaatcgagaagcagaagcagagggcggagtagccccgcccgtctgctcgaccttttctagttggttggcggaggtgcgcggagcgtcgagctgcgcgtccattggctgtttggcggggctacgcgggcggggctacgcggaaaggcctgaccacgcagttcttgggtctgtgctgctggcctggggttgtggttgaggccgggtctccgctcctgtgcccgggaagatggtgctaggtggttgcccggttagttacttacttctgtgcggccaggcggctttgctgctggggaatttacttctgctgcattgtgtgtctcggagccactcgcaaaatgcgaccgctgagcctgagctc

SEQ ID NO: 15012 - DNA, 1136 bp, Artificial sequence
  DNA replication origin
tcttttccccacatttccccctttttctattcgacaaaaccgccattgtcatcatggcccgttctgaatgagctgttgggtacacctcccagacggggtgtcggccgggcagaggggctcctcacttcccagacagggcagccaggcagaggcgccccccacctcccggacggggcagctgctgggtgggggctgcccaccacctccctcccagacggggcggctggccgggcgggggctgccccccacctccctcccggacggggcagctggctgggcggggtctgccccccacctccctcccggatggggcggctggctgggcgggggctgccccccatctcccggatggggcggctgctgggcggaggggctcctcacttcccagatggggcggctgccgggcggaggggctcctcacttctcagacggggtggccgggcggagatgctcctcacctcccagacagggtggcggttgggcagagacactcctcagttcccagacggggttgccgccgggcagaggcgctcctcacatcccagacggggcggcagggtagaggcgctccccacatctcagacgatgggcggccaggcagagacactcctcacttcccagacggggtggtagccgggaagaggcgctcctcacttcccagactgggcggctgggcagaggggctcctcacatcccagacgatggttggccaggcagagactctcctcacttcccagacgggatggcggcggggaagaggcgctcctcatttcccagactgggcagcagggcagaggggctcctcacatcccagactatgggcggccaggcagagacgctcctcacttcccagacggggtggcggccgggcagaggctgcaatctcggcactttcggaggccaaggcaggcggctgggaggtggaggttgtagcgagcggagatcacgccactgcactccagcctgggcaccattgagcactgagtgagcgagaccccgtctgcaatcccagcacctcgggaggccgaggctggcagatcactcccggttaggagctggagaccatctttggtctttctcacaattcaaaatacattcatttcacccaagtagcccccaaagtattaacttctagc

SEQ ID NO: 15013 - DNA, 1073 bp, Artificial sequence
  DNA replication origin
gaggaggttgcttcagaaactaagcaaagcatttttgcagaagaaagtagtgatctgctgggtcaaatcctgctggcataagaagtaagatgaggactgaaaattgcacgtgagcagtgtagaggccgtggatgagctgatgaaagcactttggttgaggatgaggtgagaggctctttggagtgagttcaaggagaggcattggagatagtgcatgcaaacagcttcatggaggagtggagctgtaaagctgtgcaaaaaaaaaaaatgaaatgtcaactctagggatacatggggtgaaagctagtgttggttatttaaaaatgggaaaagtagcgggatgtttgtattggatggaaatgggccagtgggcagggtacaaagatgatgggtgggggcggaggtgagaatggccttgagtgggtgagggagtgaggcctggcctcttggacagctctcaggggaagaggagtccgtagccagaggccatgtgatggggtgggtgaggcggggtgggggaccctcttggatgccttcatttttctcagagagtagcatggtggatcacaagcttcgagacaggacagcgaggacctcagtccagcgggtggtggagacaaatgctccctgcacacagagcgagagggatgccagacaatgacagagagttgtgctgcgtctctaaatcaaaattaaaaggtttctgccgatgctatcacttgagcttttcactgcgaaaggggctctgtgagctctggagagttatgactgaattaataaggccaggatgagggcatggatcgagatcctcaaaaacagtctcatagattcctacaggcctggagctgctgcggaggtagctctcgtaggattgaattgaaaagaaacaagagttgttgcccagagtgagtaataaccctcctcagaagtcagacaggtggcaataaagagtccattggcctgggctcagggggagttaggggagatcagggcacttttttctctcctcctaaagctttttgctttcgagatctcttgctttgtttttaaaagtatcttcctatgagggagga

SEQ ID NO: 15014 - DNA, 1008 bp, Artificial sequence
  DNA replication origin
tgcggctcgccccgccgggagctgattggctgcgcggggcggctccgagggctcggccgtaggagccccgcgcactccagccctgcagcctccggagtcagtgccgcgcgcccgccgccccgcgccttcctgctcgccgcacctccgggagccggggcgcacccagcccgcagcgccgcctccccgcccgcgccgcctccgaccgcaggccgagggccgccactggccggggggaccgggcagcagcttgcggccgcggagccgggcaacgctggggactgcgccttttgtccccggaggtccctggaagtttgcggcaggacgcgcgcggggaggcggcggaggcagccccgacgtcgcggagaacagggcgcagagccggcatgggcatcgggcgcagcgaggggggccgccgcggggcagccctgggcgtgctgctggcgctgggcgcggcgcttctggccgtgggctcggccagcgagtacgactacgtgagcttccagtcggacatcggcccgtaccagagcgggcgcttctacaccaagccacctcagtgcgtggacatccccgcggacctgcggctgtgccacaacgtgggctacaagaagatggtgctgcccaacctgctggagcacgagaccatggcggaggtgaagcagcaggccagcagctgggtgcccctgctcaacaagaactgccacgccggcacccaggtcttcctctgctcgctcttcgcgcccgtctgcctggaccggcccatctacccgtgtcgctggctctgcgaggccgtgcgcgactcgtgcgagccggtcatgcagttcttcggcttctactggcccgagatgcttaagtgtgacaagttccccgagggggacgtctgcatcgccatgacgccgcccaatgccaccgaagcctccaagccccaaggtaaggctgcctcctcccacgtgcgcgagccgccccctccatcccccggccggagctgcaggagaacccgcgccaccctac

SEQ ID NO: 15015 - DNA, 1193 bp, Artificial sequence
  DNA replication origin
cgcccagggctgccccgcggcggcccccctcgctgcgcccgatgcccatgccggctctgcgccctgttctccgcgacgtcggggctgcctccgccgcctccccgcgcgcgtcctgccgcaaacttccagggacctccggggacaaaaggcgcagtccccagcgttgcccggctccgcggccgcaagctgctgcccggtccccccggccagtggcggccctcggcctgcggtcggaggcggcgcgggcggggaggcggcgctgcgggctgggtgcgccccggctcccggaggtgcggcgagcaggaaggcgcggggcggcgggcgcgcggcactgactccggaggctgcagggctggagtgcgcggggctcctacggccgagccctcggagccgccccgcgcagccaatcagctcccggcggggcgagccgcactcgttaccacgtccgtcaccggcgcgggagccaatcgcctccctcgcgagcgggttcggtttactagaaccagacgcggctcaacaccccttaaaaaacaaaaccaaaaatacataaataaaagggggaggaggaaagagacaaggggagaaaaagaaggggaatggatcacggcgtggggtggagagagaccagggcggacgctgtaattaactcgcattggcttgcagagaagcggggagcctggatcatacttgcaaacccatgaaattatgaagactttttttttttgagacagtttcgctcttgttgcctaagctggagtgcaatggcgctatctccgctgactgcaacctccgcctcccgggttcaagcgattctcctgcctcagcctcccgagtagctgggattacagccgcgtgccaccatgcccccgctaattttttgtatttttagtagagacggggtttcaccatgttagccaggctggtctcgaactcctgacctcaggtgatgctcctgccttggcctcccaaactttttttttctttttctttacactgcttcctaatttcaaccaacagccctttagactagcggctcctctcctcggttctctagctgcggtgcagacaggtggtttcccaactaacaggggttcaggaaggctgaagcgagggaggtctgcttgtaaatacccagtgggcctggctgggctccctggaaggcgaggcgaaggcgcagttggagctgtttgctg

SEQ ID NO: 15016 - DNA, 849 bp, Artificial sequence
  DNA replication origin
ttcttcagagtgctctctcctttcttgggtgttagggctgcctggctccaccgcttattgattacaagtgtgcttcctctcattaacaacccccacccagacttggggagaaatatcagaaggctcaaagcctgcttgttcagaatagtttgtgggacatgaacaaaaatgatagaggtgggtgaggggggagaaaaggagagaggaagagagagagggagagagagaggaagagagaaggaggtaagagggagggggagagaaggagatgggggagagagggagagagagaaagagagggaggtgggggagagaggaagagagggaggtagggaaaagaaggagggaaagaatgagggagagaaggagaggggggtagaaagggagagaacaaggagggagaggaagagaaagaaggagagagaagcgggggggggaagagagagggagggaggaaagagagggaggaagagaaagtgagagggagagagagtgagcgctgtcacccactctgtcctgtggggtatgggcaacatactccacagagggattgaggtggggtcctagtgggttggttctggggccatgtccatctcatgtctgttggtttctctgggttgccagacaaagtgtgggcagatagatctactaagaagaagcatgctgtcctgactggctgtgacatcccctcagtccaaactcttcccacctccactctccccagccatgggctctgttatcttccctgctatcctttatgttatctttccttcccacctttgtgcttcttggggttgggaatctatctttgatgttctcttttcctcacgtgacccagcacagaacctg

SEQ ID NO: 15017 - DNA, 1347 bp, Artificial sequence
  DNA replication origin
cgcgccggccgcagccccacagctcgccccggccgcagccccacagctcgccccgcctctctccttccggaaacaatccccgcgcgggcggaaggcggggtcggccctggccccgcccacatcatttcccttcctcggcccagccccacagcgcgcagcttcggcagggtggctttacggccggaggagagggtgggtcccagacctgaggtaggaggccgagctgaggggcggggaagaggctttttgcggcaggacgtaagtgacggcgaaggcggtgcgacagcagctggagggcagaggaggcgggtttgtgtttcccgggccgaaccgggttgtggggggcgcggggcctgggccaggcggcagctaaggcccgcggtgacagcatgggtgaaggggagcggggcagaggaggccttgggctgttttcggcggcgggtgggggcgaggggctggcgggtcagagtcccgggtccaggccggggctctgactcgcggttggtgttcccccgaccccgcagcgcggggtgtcctgtcctcgccatgaggccgcagcaggcgccggtgtccggaaaggtgttcattcagcgagactacagcagtggcacacgctgccagttccagaccaagttccctgcggagctggagaaccgggtacgcaacctggctccccacgcctgctctggcgagggagagagactcaccggggacgggaagggtgtgggcgacaaccgggcctttgagggtcccgcagttctggggaggtccaggcacagaaggggccttggccaaacgtgtaagaagagagccactaagcaagacaggtgtttggagcaggaagaataatataggccgatcgccggggttgacgaccttatggaactttgttgcccggtgccgggaatctggatccagcagtgttcccctgctgcactcccccaaatccccaccccgggttattgtcggcagcgatgaggagccaattcctgaggctccaggtcgtctcagtcaccaggttgtaaactatatcctcctacctctccgcgcaagataaatcatcatcattctcgtgactggtgtttgctgcctctgtgctggccgcactgtttggctgaaagggtttattaggtgcatggccaggcggtgcgttcaggctttcttggaaccttaaagacgtcgggcgttagataggcctggacaggaaaatgtctcagaacaaggccttaaacttgtcacattcactgggagccacctgttttgtcttgcatatcaaaatggtcatcaggatataggtcctttgggcaacattgcaggcaaaaatggaagaatgggatttgcttcccc

SEQ ID NO: 15018 - DNA, 1048 bp, Artificial sequence
  DNA replication origin
ggcgggcgcggaccgttccatcccggacggggggcacccgctccacccgccggggatccccggggcgcggcgatggtgcctcctgacgccggcgcagcgtcgccggggcgtcccagaccgcaggccccgcgcggccgcccaagcccggctcccacgtcccgctctcggctccccggaggtcggagactttgaggtaaggggccagctccctcctactcaccgaccgcgaggctaggcagctccaaatcccgcggcgaccgctccctcccgcccttgccgccgccgcgggcccaagctgcgtcaggacgtgcgcgcgcccgcctttgtctgcgccgcccaacgtgaccctgcgcccaccgccccgcacgctcccgtcgggcgcgcgcgggccggcagggcgggggcctagggagaggcgggtgccgcgtggaccggtcgcgggttgggcgacccgcggagtcgccctctggcggactagggggcactgccgggggcggggcggggcaggagcaggagaggccgggccctggctgtccctccgctggcgcgtccctctcagaaagcggagcgcttccctgcgttaggacccgatactggctccctccccggaggttcgcttgtgtgttccggagagggtgaaatcaggctggcaccgcgggaagaggctagagtcactaaatcaccttgtcctcttgaggctgctgtccgtatgcagcgacattctgcccgttagaggactcagctcagggcctggtacgctcaagatctgttagctaccagcaccatcaccacgaccaccgtcatcaccagcagtatccctcagcctcgtctaccttgctcgtcaagcagggtgctccaggagtgggtgtaggccactttcgccctgcctggcagatgcaactttccaacttccacctccacttggacctgctctctctactcaagtctagctggtggctgctggagtttgcgtgtgtgtttcttactatatcttctgacttcggacgcctaacccaagcttattatctcccctaaaatgggacctcct

SEQ ID NO: 15019 - DNA, 1227 bp, Artificial sequence
  DNA replication origin
gaggagcgtctctgcccggccgcccatcgtctgagatgtggggagtgcctctgccccaccgccccgtctgggatgtgaggagcgcctctgcccggccgcgaccccgtctgggaggtgaggagcgtctctgcccggccgccccgtctgagaagtgaggagaccctctgcctggcaaccgccccgtctgagaagtgaggagcccctccgcccggcagccaccccgtccgggagggaggttggggggggggtcagccccccgcccggccagccgccccgtccgggagggaggttggggggggtcagccccccgcccggccagccgccccgtccgggagggaggtgggggggtcagccccccgcccggccagccgccccgtccaggaggtgaggggcgcctctgcctggccgcccctactgggaagtgaggagcccctctgcccggccaccaccccgtctgggaggtgtacccaacagctcattgagaacgggccaggatgacaatggcggttttgtggaatagaaaggggggaaaggtggggaaaagattgagaaatcggatggttgccgtgtctgtgtagaaagaagtagacatgggagacttttcattttgttctgtactaagaaaaattcttctgccttgggatcctgttgatctgtgaccttacccccaaccctgtgctccctgaaacatgtgctgtgtccactcagggttaaatggattaagggcagtgcaagatgtgctttgttaaacagatgctcgaaggcagcatgctcattaagagtcatcaccactccctaatctcaagtacccagggacacaaacactgcggaaggccgcagggtcctctgcctaggaaaaccagagaccttcgttcacttgtttatctgctgaccttccctccactattgtcctatgaccctgccaaatccccctctgcaagaaacacccaagaatgatcaataaaaaaaaaagtgttttccctttcctacaacttcccctgggtaagaattctggttgtatcgtcagtggttgggttgatctatgtaagaccatctgtttggggccatatttgtctcgataaagtgccaaactctttacagcaaactctatgccaatgaaaatctcacaaaaaggcatttccagtcttcagctattggcccacactgtaagaaataatccacacagcccgattgctgcaaaagactgtctcctgccacatcttcctg

SEQ ID NO: 15020 - DNA, 1267 bp, Artificial sequence
  DNA replication origin
aaccctgagtggacacagcacatgtttcagggagcacagggttgggggtaaggtcacagatcaacaggatcccaaggcagaagaatttttcttagtacagaacaaaatgaaaagtctcccatgtctacttctttctacacagacacggcaaccatccgatttctcaatcttttccccacctttcccccctttctattccacaaaaccgccattgtcatcctggcccgttctcaatgagctgttgggtacacctcccagacggggtggtggccgggcagaggggctcctcacttcccagtaggggcggccaggcagaggcgcccctcacctcctggacggggcggctggccgggcggggggctgacccccccacctccctcccggacggggcggctggccgggcggggggctgaccccccccaacctccctcccggacggggcggctggccgggcggggggctgaccccccccccaacctccctcccggacggggtggctgccgggcggaggggctcctcacttctcagacggggcggttgccaggcagagggtctcctcacttctcagacggggcggccgggcagagacgctcctcacctcccagacggggtcgcggccgggcagaggcgctcctcacatcccagacggggcggtggggcagaggcactccccacatctcagacgatgggcggccgggcagagacgctcctcacttcctagatgtgatggcggccgggaagaggtgctcctcacttcctagatgggatggcggctgggcagagacgctcctcactttccagactgggcagccaggcagaggggctcctcacatcccagacgatgggcagccaggcagagacgctcctcacttcccagacgggttggcagccgggcagaggctgcaatctcggcactttgggaggccaaggcaggcggctgggaggtggaggttgtagcgagccgagatcacgccactgcactccagcctgggcaccattgagcactgagtgaacgagactccgtctgcaatcccggcacctcgggaggccgaggctggcggatcactcgcggttaggagctggagaccggcccggccaacacagcgaaatcccgtctccaccaaaaaaatacgaaaaccagtcaggtgtggtggtgcgtgcctgcaatcgcaggcactcggcaggctgaggcaggagaatcaggcagggaggttgcagtgagccgagatggcagcagtacagtccagctttggctcggcatcagagg

SEQ ID NO: 15021 - DNA, 1406 bp, Artificial sequence
  DNA replication origin
ggcaggcggctgggaggtggaggttgtagcgagccgagatcacgccactgcactccagcctgggcaccattgagcactgagtgaacgagactccgtctgcaatcccggcacctcgggaggccgaggctggcggatcactcgcggttaggagctggagaccggcccggccaacacagcgaaatcccgtctccaccaaaaaaatacgaaaaccagtcaggtgtggtggtgcgtgcctgcaatcgcaggcactcggcaggctgaggcaggagaatcaggcagggaggttgcagtgagccgagatggcagcagtacagtccagctttggctcggcatcagagggagaccgtagaaagagagggagagggagaccgtggggagagggagagggagagggagagggggagcgggagggggaaaacactttctagtgtttctagtaaacgtttttattaaagcaaatagttggaacaccttcttcttgaccctccctcgtccaggctgctgctgcggacttcccattcatgcttagtgtggcaggtaggaacacacaagggcttttgacagcaggactctcagtaagaagtgtggctgcaggccctagtgcgctccaacctactgcaggccttctctggggttgttaggatttccttctctctcctggtctcaggggaccttgaaggcggttaggaagctggacggcagaaaacaaacaggtatgaatgtcccgcagagcaggcaaatgctagtagagtggttttcaggagtgtggtccaggctgtgcccatgtgcaggaggctggtcaaggacctagtttctcttccaaggacttccagccccgcccccaggaatgtgccaggctggccagcgaagccggaggacaccatggttgtggattcccagcacacggggaactgtaggagcacctggcattttacacatagagacttcaagtccactttcagggttaagcaggacacttctgaaacgcttcactgggggcttccctctagcctgcgctggctccccgacacctcacttcctgtgcccacacccatcccactgcactgttaggagcactttgctggggaggctgaagaaccatctcaggctttctcgtactccatgaggttacttcctatgcaggagtcaaatacattaaactgggaaaggaatggctcttgcttgtcagctgccattacagctgctgatggggatcagggagtgaggttggctaaaggcaggacaaggggcatttgggccatcacccggcaggtacctgtaccacctgttgatgtcaccagcaggaagccacagcaagggggatgtcaggaggctctgtctgcctttagagtaagaaaggagaactggtaattccaagagtagccatgaccgcactcccttccctt

SEQ ID NO: 15022 - DNA, 2079 bp, Artificial sequence
  DNA replication origin
ttagctgtaaaagcaggatggctgttctcgcgtcccgtgcgcgctgtgcccctgtgcccttcacattctttctcatcgcaggtgtggttccagaaccgcaggaccaagtggcggaagaagagcgccctggagccctcgtcctccacgccccgggccccgggcggcgcgggtgcaggcgcaggcggggaccgcgcaccctcggagaacgaggacgacgagtacaacaagccgctggaccccgactcggacgacgagaagatccgcctgctgctgcgcaagcaccgcgccgccttctcggtgctcagcctgggagcgcacagcgtctgacgcccgccgtccaggcccgggatcctggctgcagcctgcggggggacgccgaggagcctaccttcccctccccttccccacgctcctgggggcgcagggactgagtctttctttggatgaggggcgcgtggaggaggagcagcaggtgcaggggaggaggaggggaggcgggggaggaggaggaaaaggagggaaaggggacaggcatcctagctaagggaggaggaggccaggagggaggcacagcactcctgagacctggaagccgctgccccttgcacctcctcgggcctcgcctgccagttctgcagattcacaagtggacagaggactaaaatgaccaggctctgcagccaagaaactggctgtggggtcccagacatgccactgtgatccagctgttggggcggggggagtgggcaggacttcccagggagggaggcagctggctggggagtcagaagtccagagtcttgggccccaagccagctgctggctgcagaagaaaagacaggtgagtggccaggtgcactcctcagacctgtgcacaggaagggtcccactggaggggccagagctgagcacctaacccaggctgcaggaaatctgcctccaggaggggaagtgggacatcccagtggagaaaaaatgcccctgacactgcaggatgacggcccctgagctgcggaaatccccctggcctcctttctccgatttaccctcagggtcaatacctctgagaccgctgtgccctcctcatcctgacagccggggaaaaggggagggtgcagggagaggggaggcggggacggtgtgcccaagggccacccacctgggcatcatttggtgctgatataaggacaggcccacccagagagaaaaagcatcccacctggggaggaaaggaagggctgggaaagaccccagaacggcacccctccaacaaggcaggaagggagaaggacagcccctccggctgggtggaggatgccaggaaggggctgaaccacggcctgctgggaatcacggcccttcctttcctcagatcgccttgcggcctggcactggagctggtgctgacagggacgctggccaacagggtggtatttttcacccgggtgatctgagctgctggcaggtagggggtgggctgggggaggcgggtgagggctggtcttagataggaatgcagcccagaagggaccaagcacttgcccatcctcactggctttcaaaaaataaacagtaaaaataaaagtcccatgaaccttacggctcctgtgcttctgtgaaagggaccaacggcaggaaactggctgtgaggtcccagacttgccagctgtggggccttccccgagggccgttgtctagtctcctggggacattcgtgctctgacaggttgcacaatacaagttatttgaaacctcactggtagatgccagacactgtccccaggtgctgagaaacccaaggtgaattttatggggtccctgatctccaggaatttatagcctagtggggaagatgatctatgtggagaattgggtatcataagaaaaataagaagggagagactagaagagctaagtttaacagaacacctgctaatttctcccctgtagaatgtctggattatcactgaccccacaagaaaactaggcagtaggtatcatcttcaatgcatggaggagaaaaccaaagctcagaaagttcctaaaccaagtcacagaagtgggacgaggcaacctcag

SEQ ID NO: 15023 - DNA, 941 bp, Artificial sequence
  DNA replication origin
gagatggagcaaagccaagcaggcttgggtgatggattggatggggcactgaggggaagtagactcaagaaagactttccgagggctggcttccacggcaggtgggtggtggcaccatccactaaatgagggatgctgggagcagaccggtgtgtggaaacacgggggaggagtcaagagcagagctgttccagatcctggtaaggaggctctgaggaatccaagcagaaatatatagtaagcagttggatatttgagcctggaactcagataagaggtccagcccaaagatagatatttggaagtcattcagccttcgaggaagtcgagtgctgacgggggctgatgagagcagggaggaaaggcatgttgaatatactcccactcgcctgtgtggggtcattccacagcactcattaaacacccactctgtgccaggcctattctaggcactgaacaagacagacaaaatagtctgcgcgctcgtggcctgtgcatgctggtgaaggaaatagacaatagctaagaggatgggcacatacatgaagtcagctgatgggagacactggggaggaggaaggtcaaggtgactatttcggtggggtggttgggagggctctctagggagacgactttcaagaggtctggaagaagtaagggagagcgccatgtggtttctggggaacagtattcttgggagagcaggaaacacgtgcaaaggccctggggcaggagtaagagtggtttgcttgggggaacagtgaggctggagttgagtgatggaagggaaggtggtaggcaggggggttggaggagtgcctggggtcagatcaaagagggcttgcattggtgagggcttagattttgccataagggtgaagtcatttgaaggtgttacacaagagatgcttatgctgatggaggtttctaaacaattgccc

SEQ ID NO: 15024 - DNA, 970 bp, Artificial sequence
  DNA replication origin
ttctgaaatatttcctgccccacagatgccttgctgaggaacctaggatgtgaatgccatgtgctttaggtcaagggaggcctcgccctagcagacacttaatgctttggaggattcaaaagagatagaagacttggtccctgccccaagaagcaaacagtttggctggggagacaagacttgcctgaattcaatagctagagaaagagatattttaagtgcattaaaaaaaaaacaagctcctgttttgtggttcctagatttaaagatggcaaatactgagtgtctaagcatagtgtcattcatgcaggaagtagccaccatcagggccttgaagggaagaaagattggaagtagcaaaccagagggagatggagcttcagggcccagggaggaggaaggtgcaggctaggaggtagacagagcatgagaatgtcacagaggacaagggaggtgagaaggggctcctgccgctgtggggacagcgagatgagtgtgcctcatgaacagacagccacagggcttggacttgaacttgagcttacatcatagggggcccatgtgggacctgaggttggggagggctggcaggaagtcaggatttggggaagaccagttaggcagggatggaggaggttggctgggtgaggcagggatggaggaggttggctgggaggcagagcgaggaagcagcatttctgcaggcctggggttgtgggtgggggctgggaggtggtgtggggcagcacctgagtgtggagggaggaccccctgtctggaaggctggagaaccctactgctgatgccctagggactccctgtttcagtggtgaagacgtgaagcgctgctttgtggaggaggatgagagttccatttggtcttcggctgtagatttggagtcttctgtgttcaagggtgttcaagggtggtcatcactagtgtgtgcatgagtttcccatggttgctgta

SEQ ID NO: 15025 - DNA, 1281 bp, Artificial sequence
  DNA replication origin
cccgcgccgcccagcagataaccgggagggggagcgggagccgggctcggatttcagcgcgggcgccggacgatggcagcgcgacagggcaggtccgggccagaccctgcggtgagtgcacgagctgtcgcggttgcccggccggggccggggcgcggggatcggggccggggccggggccggggctctgcgtccgtcctgcgggttgtggctccgcgcccggctgcccggcgccaactttccccggcgggtgcgggtgcgcgcgctggggctgcccttctgctgccgaggcttctagcaggatccagaggaaaattcctctggcctgaaggctgcggccgcggaggggctggagccggggttgggaggcagcgggacttgtggccggcctggaagaggggcacgggcgggagcgtggagccgccgccggggtgccccgaggggggccgggccctggccgaggccaagtcccctcaccccaggggacagcctggccgggtagattcagcagggggtgggagatgcacggccttgggccgggcggggacctggcttgcggcacgtctggcccctaaaactcagaaacgtgaggcgcccggaggcccccaggtagcaggaaatgaatggggcagaggaaggcagacctgttgggcgccctggcaagcctggagctctctgccgctgtccccttcgattctcgcagccccctggcaagatccccattttagcaatggggaaatggaggtttggggccttagatgagcacagcatcaagtggtcgagcagtgcatctcagccaggtcttccccagtgacgtcccagcccaccctgcccagcctccagggtcgggtgcagacagcacagggaaccccaggggttttcccaatgtcccgagttcgggttgagagattaagagggagcccagcacttccgctcaggcgtcttgtttcctcagtgacacctttaacttattcattttatttttgccaatggtagtcagactggggagcctggagacagtttgtaaagctgtaacagcacacctttctggaaggcaaaaggaaagaaacataataaaacacacactcactagggcccagtgttcacctctgtttctccatcgtcaagggagtaaaggcagggctaccaggctatgctggctggggacagctgtctttcctcataccccagtgcggctctcagatcccccaagcacaagcagacagctccacatcagggctgctgcctgtcttctggctgggctgcaggtcccccaggaaa

SEQ ID NO: 15026 - DNA, 1527 bp, Artificial sequence
  DNA replication origin
ccgggcgcggagccacaacccgcaggacggacgcagagccccggccccggccccggccccgatccccgcgccccggccccggccgggcaaccgcgacagctcgtgcactcaccgcagggtctggcccggacctgccctgtcgcgctgccatcgtccggcgcccgcgctgaaatccgagcccggctcccgctccccctcccggttatctgctgggcggcgcggggagcgccagcaagttacgcggcatctggctaaaaatacaggcgccctccactcgccccggcccggccctggccctgcgctctcccgcccgccagcctgccgctaatgggatctcttcattttctctccatgattatgtcagatgggaaagttaatgcgaagcgctctccggagagcaggcacctgctgccaagccctgcgaagggggtgcgcgcgggggcgcgggcgggggtgcagccccagctgcaggtgccggccggcgggctcggggcgggcgtcctgcccctgcggaggggaggcacacacgtccagtggaggtgaggagctccaagctgcatggcctccctccctgcctcccgcctccccgaatgccctggtgaatgggccccggagcttgccgagacgtggccggggtgagctcagcaaactctatttatgccccataaccgatttgcatgttttgagctcttccatcgtgtcgtgagataccagttaatcagcctattccagattctgcctgagagccgccagacgcagctgggttgcaggagggcagagctgtcactccccgctgcctcccgcactgctctgacgctggcggttaactagcgtcacccgaggctgtgtccgtgcagtaagcaaccagtgttctgtcctgggaccactatcaccctttcatgcagtcatttcaggggcagatgtcaaaacccatgtttgggattttggagaagactaggggtgacatcatcaagagtaggctcaattcagagggatgagggaaccgtaagtaaaagcagtgtcaggtaactgggcccctggcaatatggcttgttcagatcataggtgttttgtatcataagccggcttcttgctggcttcaagtcacagtcaagacacaataccaaatgctcttttcctctcccgctgtcccctgacattgtacagtacagctgcgcgttggtgaggaactagcacgctcagcgcctattagctgatggacatactgcattatctcatttaatcctcacagccacccataaggtaggcaacactactacagttggataaatgaagaaactgagcccagggaggtaatgggtggagaccaaggtcaccactagtaaatggtgggtccaactggttctaagccaaattgatccaaagccctgccactggccgcaccagcaagattcctaacaatagtgtactcagcgccaggaagagataatgtgggggatgatcttgaaggatcataatcccagcattttgggaggctgaggcggggggattgcttgaggccaggag

SEQ ID NO: 15027 - DNA, 1392 bp, Artificial sequence
  DNA replication origin
gcttcccctgcacccagcgacttttagacaagcagaagaggagatgccctgcccgcgactaaaccggactccctttcatttactaccctctcagcgtgtggcctgatgtccaactctgggctctgaactcagctctccccggctgctctcgaccccggggcaaccaggggtccgcgccggccgaggcctggggagcggggcctcctggggttgggggaggaggtgctcttgtaatctgcggtccccaggcgggcgccacccctccgcccgcccgtgccgggagcgcccggcccgacagcaagcgcctctggggccgataaggccctcgggggcctggcccgcacgtcacaggccccgcagaggctgcggtgagtccgccagccccagctgctcctcctcaagcccccaaggcccttcggcgggcccctgctgaaagaccggcatgccctattctgtgggcttccgcgaagtgagtactgggcggctgctcgggtggacggggagatgtcaggagggggccacccaggccgcgccagtaggcagcacgcgagcaagagcagctttgcacaccccacccgcctcgcctccccgtgggctccctgccttagcatagcggcacatcgaccttgtagctgaaggcagcaggtggactctgccctactcgctgaagccagtttcatattttttacatccagagatttgctgtcaaattgagttccaactacctgggtctctgaattatgtcctgtcagcaatagcgctggggagggatggtttttggattatagtccaaatctattgagatcttagaggctttcctttgagtctgctaaactgcgttttgtaggtgtgttattacaggctgcggggtgggccacccggctagggggctgtcactgtcatttggaaggggactttggcttgttttctcaaagactcacggaggccggtggtctcatggtcacacctgctcggttcttttaatttatgttgttaattcatggagagaaatatgtctacgaaggaagggaaagagcggcggcgtggcctggggagataggctctcatggatatttttcaagtgataatggcgcgttagcaaggccactccagccttcttgttctccctgtgtagatagaacccgtcctatctctgcctggcagcacggccagcctgtgccatgtgtcagtgtcctttgttgggtacggttcttagtttagtgatggattcagagcccagagttggacatcaggccacacacacgctgaaagggtagtaagtgaaaaggagtctggtttagtcgcgggcagggcatttcgtcttctgcttgtctaaaagtcgctgggtgcagaggaagcaatactaagcgggaatttctttttagtggcatc

SEQ ID NO: 15028 - DNA, 2026 bp, Artificial sequence
  DNA replication origin
gtggcatctacacaatttgcctttcctggtttttgttttgttttgttttgtttcctaaggagggggaggctctgtagaggaagcttcggccctgggtgcccctgggttgggagcagtcggggagcgctgagccagggcgcacgccctgtcggcgctgcgggtgtggggcgcaggagtccttctggccggcccctccgccccccggggaggctggagctctccaaggccggggagcctcccgaagcgcgctgccccctctgttctccgcgtgctttcactagggccccatgctgcttagtggccgatttgcagggaatctgggcacaatcttaataacaccagggccaaaaataacaacgttcctgggaaccgaggtgagtcaccgcaaacagcggctaggagggcgtgggatggcgcgggcaggggggcgcccaggcggtcccgcagctgccagaaggtcggggctgcccaccagccaggctggaccatcccaggccaagctcctgcaggcctggcctaggaagccgccttttgcaacgtccgcccgtccaacaacgggatgagatgtcatctgcccagaatggctttatcagtgagaacaccatatcctggaatggcagttggtggctggcagagggaacaggtgaccccgaggagctgagctgcggggccaggggcatggcagcctccctggaccctgggggtggtgccattaaggtgggggctgtctccctccatggtttcctctaggggtgggtgtcaccgctgggggcctctggtgcagtcctccctgagaagggtctctccagccttcctcacgtgatgcttggcctcctgctgggcccacgctggtccaggtcccctgacgaggccgccatctggctttagagctttcccgcagcaccaaactggccttgccatgagggcacagctgctgcggaaagatgccaccgagatcagcttcatgacccgtctgtgttttccacagcagctggagcgcaccccatggacgctgggccatctccccggggactagtgcctgacagagctgacagagttctaggccacatgtgggctagaaggaaccgccatgtctaccacagcacagtccttaagcaggagccttttgaagcacttggactcaaaacaatggctgtttgttgttgttgttgttgttgtttgtttgttttgagggagccagaaagctaaaaaatgtaaaagaagcaggtcacattagacatgatttcagacagcctccccgaaggacagatgatctcacttggcaacacatactgggccaggctcactcatgagggggcagcgtggcatgcaccccactcaggggcaagaatgaagcttaaatattagctgactcagaacatagcaagtgctcagtaatggcttctggaacgaacccgtggttgtcaccagcaggagtgacgaaagctagaagccgtttcaccatccaaggaagaggaggaacaatatttttctctttggagttcccacactcagaagagagaacaccagcatatgaacacagagtgtcacatgatgtaggaaacatcctgtaggtagagagtataattccaaagcttaggatcctgctagttccttgtgcagtgcttccggtgggcaacatggtgcctccccagtccctcaggcttgaggcgggccagcacagcttctctgggagccaggtcatttcagaatttaaccccagaactaggtcaccccaggcaacacaaggctcctctcccttggatacaggaagcggaggaaaaggccaggcatgctcaggggcaaaccaacacccaggtgaaagggagctgggctggtttcggggagcagcctggtttcagggagccggactcacgatgtgcttgagaccctcaaattcacccctggaagcagctgcccccgtgacaaggaactaaggacaggcatgtcatggactgtgaattggagtgacatttgtccctcccttcaccaacagactgccccaagagcttcccaagttatctgc

SEQ ID NO: 15029 - DNA, 1027 bp, Artificial sequence
  DNA replication origin
gaggctggcggccacagacgggatctgtaattcagtgcccgccatcacgtacctcggcctggccctgtgcagcttggaagctggagacggagaaggtggaaaatgagagttcatggagtgtcgggcctaagctgaaggaggcggcgctgcacgcacagacgaaggaaggcggcccagggcggctgcttggtgtggaggccacagcccagcacgggcggagcggggcggagcgggaggatgggcgggaacggcgctgggtgttcctgcttcctcctctagctcgcagcctttcataggaaattaaacattcagcactggaggaccgaccgggaactccatcattttgattccaacctggtgcccagggtctggaatcaaaatccctgagcgctcgcggccctggggcggggctgaaccctgaatgatcttagtctgttttaataggagagttgcaaacagtgggggcttcctctttattgcttgggcaagggtgtgtgtgtcgggggttggggggcgggggcggtgtgtatctgtgtatgcatgtgtgagtgcgtgtgtgtatgtgggtgtgtgcacgtgagtgtgcatgtgtgggcgtgagcatgtgtgtggggtgtgtgagtgggtgtatgtatgcgtgtgtgcatgtgtgagtgcgtgtgtgtatgtgggtgtgtgcgtgagtgtgcatgtgtgtgggcgtgagcatgtgtgtggggtgtgtgagtgggtgtatgtatgcgtgtgtggatgtgtgtgagtgtgagtgggtgtgcgtgtgagtgtgtgtgagtgtgtatatatgaggggatgtgtgtggagatgggtaggtattcgagtgtgtgtgtgtatgtgtgtgaagaaatagcctttgtaaaaccaggtcaaaaaataccttttattactttaatgttataaaataactgtagttaacttgcaatcctgtctaacctacatttccttttaaaggccattacattttgttttattttaaagctgtgaagatagtatgtggagagtttgcatc

SEQ ID NO: 15030 - DNA, 1783 bp, Artificial sequence
  DNA replication origin
cgcaggtaggtagggagtagggcagccgcacttagggatggaccaggtatggtgcctgcaccctgaactgtctcagggacacccttgttggactgcagctacaacaaaaatagagcctcctatagccgccttcagagcaaggcccacagccactaatctgaaaggcctcgatttcagatcttatatttttttctcatatccatcataattgaattttgaaaagttgcactgggcccaggaaaaaggcagtgagttgggagtgagaaccatttagcaaagcactcttttcttaaagtcttggctgcactttcgggtcgcctgcccgcagcccccaacctcctccaccccatccccgccccgcaggccctgcaatgacaggtaagcatccacttctttcagagtgtgtcggagagcagggcatggggtggagatgagttcattccatcttgctgtcttcctccagacaaggtgtgctaacaaggaggtgaccggagtccttgtggccctagctgatctgtcactaggaaagccctagtctgcctctgtcacagcagcccagctcttcagcactggctaagaaaaaacatgacaactgagaattgtgctttctgggttctggcctccttgtctcccactgcttctccttcatggtcattctttgactctcagtgagttcctgcttttgatcttcccattccaaagttggaaaaatacccaaggtcatttccaccatcacgactgaccctccactgagcaactcctcctggcacttgcaatataaccccacggtctgactatggaacaaaatgtgctgtccccgctgcagcaccctcaggagagactgggtggcagtctgtggtggtccagagaggacgggcccagcaggaccacctgtctcggtccatatatggggctgggatgggagaggggagggagcagagctgagctggaaagggtacgggatgaccgggttcccctcttcctgccctttctcttcctgaactccaagccctcctgtcctgttcctccaagtcctggtcacccagatgcgggggctcctgcacctcttgtcccccacaggagaccctaaagactctgcagcttcttggcaccgggagccagcagcaccaggtcccagtttagaggctggcagcagcaggcatgttgaagaactggaggcaggaggaggcaggggatcagtgcaaagaatgggtcagcatggatggaggcgggtatacccaacactgggcctccacaagttcttgagaaagtcaccaccggcctgccaagaggagctacaagggactctcccaggtgatacctgatggaacctgggcttgaccctagatccatccaactccaaactactggctcttcccagtgggcagcccaactccaataccaaggctcggcagacaggcacatctgtgcagtattaagtggctgcttcccatggccattcgtttctcctcctgtgccagggatgcgtgagtgatgatggaatgaatctgggttagccggtccctcttcccaagcagctgggaagcctccttgctgctcgtagaagaacacgctttgcagggggaggacaaactcccacttaacaccactgcactgtgggcgccatttttccccggacagccacatcttgcttttttcctcttggcagtgttttgtagatgatctagtgttacacggcgcagggactgggaagcagccggcacgagaaaggaacctgagcacacccactttgccttcatttctccggctgcatccgaggctc

SEQ ID NO: 15031 - DNA, 1309 bp, Artificial sequence
  DNA replication origin
aggatttacatccagattcgtagaaaatgctggagtaaggctgggcgtggtggctcctgcctctaatcccagcattttgagaggccgaggcgggtggatcacctaaggtcaggagtttgagaccagcctgactaacatcgtgaaaccccatctctactaaaaaaatacaaaaattagctgggtgtgatggtgcatgcctgtaatcccagctacttgggaggctgaggcaggagaatcgcttgaacccaggaggcagaggttgcgatgatccaagatggtaccactgcgctccagcctgggtgacagacagagactctgtctcaaaaaaaaaaaaaaaaagaatgagagagaaggaagggagaggaggggaggggaggggagaggaggggaggggagaggaggggagaggaggggagaggaggggaggggaggggaggggaagggaggggaggggaggggaggggacgctgacttgaaagttcagcgttggctggctgggtcctcaggcctgcgtgtgggtgaggcccctactgctccctcctctgcactctcccacccaaggtggccaccacctcactcctccgtggtgacagtgccttccactccggaggggaaatggaaaccctgggctgcatgtgctcagtgccctcccttctgcaccattgaaatgtgtctgcatccaccccttgttgacgtctttggaccccactccttctcacctcctcagaaaaaccgggctgccagagagctctgctctcactgcgtccccatggtgtgcctgtcaccagctcctccagcctgttacttccgggtgcagccctactgcactccaaattctcttgccaccacggaacctacggacgcacttggatctgactccctggaccttttgacctggtggtgtatctccccggttcctgagaccccactctccctgctctcctcccagctcctgaatgctttctacaggactcactaataaaaacttctgcctgggctctttttcagtttataccttcttcctctatgatcttagccttggcttccactaccacccacatgcctggatctataactccagctttgacctctctcagaagactgaggcaagaagtctgcccagtgtaccatcagaagtcacctcctggctcctcaatccccagttaacccaggcagaaacctgggcttcccagagagccccccttcctctcctttacagcccccagtcttcttactcactagatttcagaggctttcttcaaaaccagttctcaaatttgcacatgcactcacatcacctaaggatctt

SEQ ID NO: 15032 - DNA, 1332 bp, Artificial sequence
  DNA replication origin
caatggaaacattctgtatctagttgacacctagcaaactgcacatgaaaatggatacattttactgcatataaattatacctaatcaaatttaattttttaaaaaacaagtgatattcatacaccccaatagcattattcataataccccaaagatggaaacaacccaagtgttcatgaacagatgaatggatgaacagatgtggtctattcacaccacgggatatgactcaccctttaagaggagggggatgctgcacaccctgcaccgtggatgcaccttgagggcacaaggaatgaaagggccagttacaaagggacagatcccatgtagatgaggcacctcctgagccctgcctggtggtcacaccatctgtctgcaggcccctggatggcccactaaacacctgtgccagctgctgagtgtcaggtggctcctatgcagtttcacagtggcagtcactaagtcattggaaacgccttggcagggggaggggatgtgttgggggattttgagtggaggagtgttatcgtctgtcctacatctgaagagggtcactcgtgctgtggtgtggagggccagggtggaaacgcgggagcagcaaagaggctactgcggtgacctgggtgagacttgatggtggctgggacggggaagccatgacggaggtgaaaggaaggtcagggctctggttatattttgagtataataccagcgcaataccaaattaaagagtttgcattcgggtgggtgggtgtggcagagatggcaactgaaggggaattgcaggtttggggggaagatggggtcaagatctgagacggcctttgaagcagtggtgagggtggagtggagtgaggtggggcaggagtctgagaccgatacctggaagaaagcctggcggtggccagcagactaggcctgtttgggctgagtgacccgggagaggcacataaaagggtgagtgcatgaagccatgggctaccaccaacaccttagcataaactcggcactggatcagtcatgtgaacttgagggaaataggcaaagtagatgcattttaatgggtgcagataagggagaaaggtcttaccttggggctctgggtgataaataggattatggggggagggtggaggctgaggggcatggacagcaggagagacctggatatctccaagtcagggaaaggggacaagatggaagggaaggaaaatctcctacaagcctacactaacaagagagtgtggtcccagcataaagacagacatatagactgatggaacagaagaaagagatcagaaataaaccctcatgtgaagacgggcaac

SEQ ID NO: 15033 - DNA, 1359 bp, Artificial sequence
  DNA replication origin
ccactccgctgcctcgcggggtcggcgggccgctgcaggccccgccgcggcctgcgccgcctcccgctgctctgcgccaggcctcgggctggggcgccgtggccgccccctcgcgcccgcccgctcgctcgctcgcttgctcgcttgttcggcgcccggctgccccggcccgcggcccgcgcgccgccgcccggccccgcgctcgcgggccccgcgcccccgatcccgccggccgggcccgccctgggggagccggcgggtgggcgggcggcgagcggcccaggccgcggagcctcgggctggcggagccggcgagcccgctctccctcggggcgcgcccacccgcccgccgcgcgcgtgccggctgtgccgggccgggccgcttctccccgcgctcgcgggcgctcgggttcgggctcgggctcgggttccggctccggctttggctccggccgggggcgcggggatccgagcggggctgaggcggcgagcggggctgacaggccggcgggtgttgtggtgcgaggcgcagcacgtgtggtgttgtgtctgccgggctgtcagcccagccgccgaggggaggccgggcgcctgtcaacctcgcggcttggcccggtgcgcgactgtcaggctcccagcaacccgcgccgccctcgagccggcccccagagcttagggtgcggagctgggccggggctatgcaccgctctgaactccttcacgtgatttcattgttaacttgtgctcggggtctgtttccatcgcgtggaaacggtgcagcgccccgtcggcgagctgccgggctgtgcagatccaagtttttaaagtttctcgctctttgaaaagagagcgcgaagacgtgtttaggggtggggaatggggacgggaaggactgtcggaagcgagttgcgctcgctctagccgctcgtgtactttccgggagttaagatccgaggctgcaggcgcttgactttccgaagacctggagactgatgacaatcccgactggaaagacaatgagtgactgtcactcattcttttacctgcgaagcttagtcaattaggacgttcgttcccagcttgttaaactcaggatgtagcttctcatttagtttagacttaatatctgtataatgagcttacttggagtaatgatactctgatttctatcctcttgagaccctcaccaaattgaagcatgattctcccagggggcttctttttaggcagctgatttaaaaacaaatcttggctcaggtttgaatgtttgcttcactcttttctttcctatcagagttaatagtaatatctctttcctagtgtgtattagttttccgtttgattttaatgtcactacca

SEQ ID NO: 15034 - DNA, 1351 bp, Artificial sequence
  DNA replication origin
ccgcgggccggggcagccgggcgccgaacaagcgagcaagcgagcgagcgagcgggcgggcgcgagggggcggccacggcgccccagcccgaggcctggcgcagagcagcgggaggcggcgcaggccgcggcggggcctgcagcggcccgccgaccccgcgaggcagcggagtgggccctggagcggctcggcctcgggctgggcggccgggggcggccgggaacggcccctcggctacttaccgggaggaaggacagccgagatcccggggccccgggccggaccgcggagatgccccaaactgacacggccgccatcttggagacagtgagctccagccggggggaggggaggcaaggcggcggaacagccgcggggggaggggagcgtcgcgagggaacggcggcctgggggagggagctggaagagcctgggcgggcggcgaggggaggcggaggcccggcagcgcgggtggggggcggccgagagcgggaagagctgggccgagagccgggaaaggccggagggcggggcggggcagcagggaagagccggccggcggggtcacgtggggccggtacaaaaggccaaagccaggggaggaggaggacttggtggggctggaggctggggagcgggggttcctcctctcccgtctcacgcgtttaagtcagacggcgacccgggagaggaggagctggtgcaccccatgccaccgctggggaaactgagggcaggagtctgggtggggtggcttcagtgtggcacggaaatccggcagccacgcaggatgggaactctcggcggcgtctgtttacagttagtgagccctccctccccactcatttgcctgcacagcgactttccggagcccgagggcggggcctggggggcggagaggaggcggcttcccgtcctcacccctggcagctcgcctcagcccccgacggctctcctgtgtcggtgggaagagttggggagagggtggaaccagaagcacccgtcttaacccctttcagcagtgacttcatttcttccctcccccagcagctgagagggttcttggagctcactagagccattttatgggagactccacagacctgggtcgtgtgacttggacaaggtcacacagctagtatgtggcgcgcacctgagcctgggactgagatttgtcttattccaaagccggtcttcccttcttgccctgtgcggaactcttgtccatacttagggcgttggaaccacgagcaggcggttcttcatggcctgcctgtccactactggctgtatggacgtttctttgtcttgcctttcatctactttaaactctttgatgcagagactgag

SEQ ID NO: 15035 - DNA, 986 bp, Artificial sequence
  DNA replication origin
cctcactacattacacttctgtttctgtcagtgtcaggatattgattaggctggaccatgatctgaaaagttacgttattcttactgaatggtccagagtctaccgtatggagggtagggctatggattagagtggagacgggatagatagaaaagtttgggttccctcttgctgtgtctctcaggctggagtgtagtggcgatcatagttcactgcagcctggaactcccgggctcaagcaggcctcccgagtagctgggctacagcagcgccccgccacaaacggctttcttaacggcttaaaaaattgttcattcacgagcaacatttttttattttaaaccgcctactacagtacttgtacaacattattctaggtgctggagatgcagagtcattataggagagcatttaccagtgaatgtattcggaatatatatatatatatatatatatcacatgtaagtgcaaaatgactagagcaaatgatactactacagaagttcagaaaaggaagtcagcatggaagttaaggcagtgggtgagagggaggcccttaaaagctaaagctgagataaaatgaggtattgcgggcgacagtctaggcggggtgtgtcgtatggggttggggacagggcagataaaggtcaggcagcaggatacacgtccatgtcaacgattaaacatttagtgtctttttcatgtctactgtctttctagtgaatgcagaaaaaaaaaaaatgcatgacttggccaggtgcagtgtctcaggcctgtaatcccagcactttgggaggccgaagagggcggatcacttgaagtcaggagttcgagaccagcggcctggccaacatagtgacaccccgtctctactaaaaatacaaaaataagccaggcgtggtggcgggcgcctgcagtcccagctactcaggaggatgaggtaggagaatcgcttgaacccaggagacggaggttgcagtgagcc

SEQ ID NO: 15036 - DNA, 1317 bp, Artificial sequence
  DNA replication origin
atggcccaggtgtagccggcaggactgacaaccagccaggggcgccggagggagatccccacggaagacgacccgctgcaaggaacctaccctacccactggactgtcggtgtgggagagaaggaaggcaggggaagaggctggaaggaaagaagaaagccagcggggcccggcccggtgctaacctgtgagcatgtcggtgattcccccgttgagagtctcctgcggcgccttccgtttgctcatggcggcctgcacccgagaaccccagagtgttcagaaccagggactagagccctctcccagcttgaaggaggtaccaggacttggagacgggagcaggagcaacccagctccggcgcgaccggcggaacaatggttgcccccgatggggggcggggcgcacggcgcttgttgtgacgtcacgcgtcctgggcggggcggggcggggctagaggggcgagccctcggcaggtgaggagagagaactcggagggttcgtggactcgtggacgtggacacggcgcgggggaaataggcacctcagaatgacagcccaggggccttcctatgggaagacctggagttttgacctaagatattaaatctgttttctcagtgtttatctggaatcctttccctagaaggggaaacgggagtgcgatcttgattctgaaatacttgcgctggtggggtagcttcctgcacaaaaatgtgcactgtaatagctacccaatgcatggcgcgttttgtacgtggttagaggcgacactggcgtcacactgtcaaaactttctctaaggataccgggcagtccacactccagtgcagccccttacgtactagggcgctgccggagcccggcgtgaaccatgccgagaacaggaatcctcccgcacacgtgttagtacacctgccaaccagtgtcaaaagatattttatttttaatccccctgcctttgcggtagggaccaaattaatgaagagaccacaagaaagggagaagtgtttcatctagatcatgagcaatggaaccctaattataacatgatgacctacatctgagaaatttacagtctgcttgagaaatggaaatgtcacatcagcaatagtttattttacaagcgtaactcctgggttcatatcgaactgcaattccaggcaattgctttgtgcatcgaaaaattaaaatttattacaaaatgatacgtagttgctgtagagaaatctggaaaaatgtataaaaggagaaaattaaaatcagtgatctcaccctacagctgaactattaatattttgggacgtacacttctagtc

SEQ ID NO: 15037 - DNA, 1452 bp, Artificial sequence
  DNA replication origin
gcggtccacacgccggcgggataggtcgctgcccgcgcccggaggccacttgccccgccgtgctgcggctccatcgcctgaggtggcccgggcgggtcccggcgggagcgagcggccccggccccccgcgccccggtagcctgctccctgcccacagagcctccgttaggcccgcctcccgcctggcgctctgctcggccgcggcccaccgctctccgggactggagcccgcgcggcctcagctctcctcacctccaccccgagggcctgtctctgctccgccagggcaacgctgaaggtcttcaaaccaacgccgtccgcgcctgcgcagcctcgcacccccagccgcgcctgcgcgccgcccctccccgagagcgcctgtgcgccggcgtgtcgcgccacggtcgcgcgcttcggagcaaggcgcggagacgaacagccgggccaagccagcaccaccaactgtccggctccgcagcgcgcgtgcgcaggagggctcggtgtggacagtgaggttgactgggggcccaagaggctggggaccgcacctgtgcccttgaggggactcattctcgcgagaatgcgcgaggttgctagttaactgttgccatgggtgcggccgcgaaaaggccgcagggtgccggaccccaggtttgaggcatgccgcaggccggagtgtagtggcgcgatcttggctcactggagcctcgacctcctgggctcaagccgtcctcctgcctaagcctcctgagtaggagggtccacagaagcgcgccaccacgcccggctaatttaatttttttttttttttttttttggtaaagacgggaatctccctatgtttccaggctggtctcgaactccacggcataagtgatccgcccgcctgcgcctaccagagtgctgggatcacaggcctgagcccacgcccagcctcttatgggaatttcatttcagactgaccagacttcaagagtgtcactcttaggtcatctcgtcttaaggatgagaatacacaggtccccagggagtaagtgattgattcaagatcccacaagtagtgagagatgataattcaaaggggcagaggatgtggaggagaaaaagctcttctgtagaggagaagaccaactaataaaggtagaatagatgacagaaatagaaaatcatcgtcttggaaccaccatgataataattgattcaggctgaaatgatcagtggaccgttgaggatgttcatatggtttcaaagtatcacccccatagattactcactaaagagaaaagggtaccttcacatcaaagagactgatcaaacgggggatggtagggactgacatatgcccctggtgtgaggcacagagagggacacagagataatattcttgtaaaagtgtgtaatttgcctctcttcaggacgaaacaatcaggcaaatccaaactgagagacctg

SEQ ID NO: 15038 - DNA, 2201 bp, Artificial sequence
  DNA replication origin
ctcccaggtccaagcaattctcctgcctcagcctcctaagtagctgggattacaggaactcaccaccacacccagctaatttttgtatttttagtagagacagagtttctccatgttggctaggctggtctctaactcctgacctcaggtgatctgcctgcctctgcctcccataagtgctgggattacaggtgtgagccatgagcctggctggtaccaactttttcaaaccagggtacatttgtaataattttgaaaatgaggtgaatttaaatgaccctgttttgaatccagctcttggtgataactggagactcttctcaccccagggcttccccaatccaagactaggaatcactgtaacggcaatttctggcttctccacagcctgcacttcacaatcacagcatggaagaaagaggccttctgagtgcagggctccttctcacaaagccaactggcagcctgagaggtttctgatgtcctggtttcctagaaactggatcagaagcagctgcaactggaggaggaacagggggaggaggaagaggtggaagaagagaaggaggaggaagatgagaaggaagaggagaaaccagaggagggggatgaggaggagaaagggggcaaaggaggaggagaaacaggaagaagaggaggaggacagggaagagaagagatggaggaggaggaagagataaggaggaggaggaagagatggagaaggaggaagagatggaggaggaggaagagatggaagaggaagagatgaagaggaggaggaggaagagatagaggagaaggagtaggaagagatgtaagaggaggaggaaaagatggaggaggaagaggaagagataaagaggaggaggaagagatggagtaggagaaggaagagatgaggaggaggagaaggaagagatgaaagaggaggaaaagatggaggaggaagaggaagagatgaagaggaagaggaagagatggaggaggaggaggaagagatgaagaggaggaggaggaagagatgaagaggaagaggaggaagagatagagggggaggaagagatgaagaggagggggaggaagagatgaagaggaggaggaggaagagatgaaagaggaggaggaaaagatggaggaggaggaggaaaagatggaggaggaagaggaagagatgaagaggaggaggaagagatggaggaggagaaggaagagatgaggaggagaaggaagagatgaaagaggaggaaaagatggaggaggaagaggaagagatgaagaggaagaggaagagatggaggaggaggaggaagagatgaagaggaggaggaggaagagatgaagaggaggaggaggaagagatgaagaggaggaggaggaagagatgaagaggaggaggaggaagagatgaagaggaagaggaggaagagagggggaggaagagatgaagaggagggggaggaagagatgaagaggaggaggaagagatgaaagaggaggaggaaaagatggaggaggaagaggaagagatgaagaggaggaggaagagatggaggaggaggaggaagagataggaggaggaggaagagatggaggaggaggaggaagagatggaagaggaggaggaagaaatgaagtggaggaggaagagatagaggaggaagagatggaacaggaagagatggaggaggtggaggaagagatggaggagaagaaagagataggaggaggaagaaatggaggaagaggaggaagagataaagaggagaaggaggaagagatggaggaggaggaggaagagatgaagaagaagaggaggaagagatgaagaggaggaggaggaagagatggagaaggaggaagggatgaagaggaggagtaggaagagatgaagaggaggaggaagagataaagaggaggaggaagaagagataaagaggaggagcaggaagagatggaggagcgggaagaggaagagatgaagaagaggaggatgaggaggaagagatgaagagggggaggacgaggaggaagagataaagaggaggagacagagatggaagagcagaaggaggaaaagatggaggaggggaggaagagatgaagaggaggaggagggggaggaggccgcaggaggccgcagaggcaggggcaggcatgtctcaggtacagacatgctctgggaaagtcaggaaccaggc

SEQ ID NO: 15039 - DNA, 1008 bp, Artificial sequence
  DNA replication origin
ggccactcacgctgccggctccggaggcggcacgcggccagcgctgctccgctccggggctctttaccccggagtcggggccgggcgcgcgggaaacggttaccgagcggacctggacgccctctgccttcgtcatttcctgccggccggtcggtttccggatgaaacgaggagccaggtcttttttttttttttttcctttccccttttcagttttttgagccggagagacgcagcggcggccccagtgccgcccccgggcgcgtgagtggagccgggctcctttcccctaccgcgccgcgacccccgcccgggctgcgcgcgccgcctcccgcgagcccccggcccgactcccgggctcccgcgggtgggggccagggctggtcggcgccggcggggctcgcggcggcggcgggttgcgtcccccgcgcctgctggcccacgtggacctggccgtcgcttgccgtgcggcgcctttgcgaaaactcgacggaagtggcagggaccgggcattacctgcgagtgccgggcgcctcctgctccgctgtgcgcgcttggggtgggactcggcgggggaggggtcgtgtacattgtcccaccaggcgcaatgtagccgggcggcgcagaggatttcttttttggtcttgagagcatagagtcccttttcatattcacgtgtactcttaagaaagcgtctgttctccaaactggctttccattctccccgtcctaaatggtgcgtggctgacaccgtagtgttttcaaaactggatatggccaggatgctatagcattgtcagtgtaagtcccttttgggtatttttatttaattgtgtagtgacttgacagaagtgtttcccagcttgacctaagtaatgaatttgcataggatttcagcatcagtatggaagtgatcagatgtcagtggctggtgccaccttgcagataaatggccactggtccacgtagttcgtctttactatacattttgattaagttctctaggac

SEQ ID NO: 15040 - DNA, 1118 bp, Artificial sequence
  DNA replication origin
cctggctcctcgtttcatccggaaaccgaccggccggcaggaaatgacgaaggcagagggcgtccaggtccgctcggtaaccgtttcccgcgcgcccggccccgactccggggtaaagagccccggagcggagcagcgctggccgcgtgccgcctccggagccggcagcgtgagtggccccgcgtccccgcttctcccggtccccggcggggccgcgtcacccggccccgccccgcgccgcccgccccgccccggacgcgggggtaaggggggtggccgcccgcctgccctcggtcccgtgcggtccccgaaactccgagcacccgcccggtcccggcgcggagcccctcggcgtcgcgtggagctgcgagtcgcccgcttccggaagcgcacacgggccagttgcggcggcccatctgccggggcggcgggggctcggcgggagggttgaggctgaatcacgcgcagcctgcgggcggcggaaacgtccctagagcctcgccgccctgggacccgggctgcttcctgggagaggattacattttctccctgctccacttgactttcttccggaaggagcaggtctcgcaggatcggggccaagactggaagagttcaggtttgggagtcgtgtgtataacagccccgcgcctccacgcccaggcctgtgtggctttggacaagttatataaccaccgccgccaccccagtttcttctcctgtaaaatggagctttagtgccgcccagcagggttgttgggataattcagtgactctgtggactgcccagcacctgtgaattgctttcctggatgttgggtgaaggcctgtgagcttgtatgtaccctttggcttcagaataccaagcctttagtgtttcagagggatgagagaaagaaatcccattttttgatgcagaggattttgttgtaagggactctaggaactaagtggttccaatgtgaatttgtatcaaagtaacaaagttctaagtgagagacaaaaatgataacattcaaggcacgatgacaagcggtggtcaattttagaatcacctagacgtgacatcaggaacccaaaatcacgacacagattttaaagcttatgatacagtgacc

SEQ ID NO: 15041 - DNA, 1009 bp, Artificial sequence
  DNA replication origin
ggcgacgggtcctcctccgccgtccggtcgcgccctcgcggaagctcggcagtgcgcgtgcgcccgcacccgcactccaaattagaaaggggacgtctagtgggttgcccgggaggggtggcgggagcggtcctggaaataatctgtcctctgtcgccgggaactggcgaggtagttccttcgcggtggagaggtacgtccggcgcgcggcggccacgcccaccctatcggggcccgcggagccgcggacggcggggtctggccttcttggggtagctctggccgccgaggctctgcggggcggcgggagtcgccgcctccttccccccgggcccctccctcgtctggaagccccagaatcgccccgcggctgtccggagtcgccggcgacggtggaggggccgacgcggagagcggctctaggtgggtttggcggcggcgaggacaccgccgctccctctagggtcgctcggagcgtgaccctgagaactctccttaatgcaggaggggtgtgcgcccgctcgccaatccgtaaggacaccggccgaccccgggcctgcgtttctcagcgttcggagttgccttcgcttaatggcgaggcggatcgttctggagcttccacctctttagaggcacgaatctgtctgctgggctgccgataaatttttaacagatatagcatacgcagaaaagtgcatacgacatacacgtttaaagaagaattaataaaacacccagataaaaacgaaaagggcattaccggcaccccaggagtttctcacccatgccctgtgctcctttcggagcctgattgtctcctagcctgactagtgtgatcatttccttacagctttaccatctatgtgtgcatgcgatgtcgttttcctttgcctgtttttgaacttttgcgggtggatcacagtgtgttgttttgtggttttcaatcagtattaaattggtgtactgtgtatgtataggtaattttaattgttgcctagtattccagtgt

SEQ ID NO: 15042 - DNA, 795 bp, Artificial sequence
  DNA replication origin
gacagagcggcggcggtgtctggccaggcggtaggcgctgcctggccgcggcggggaagatgttcagcgtagagtcgctggagcgggcggagctgtgcgagagcctcctcacttgggtacgtgggggccgcgggccggcgggaagaccccctccccccgccacctaccgggaccctccacgcgcggcccgtggggcgagcgctgcgggcgacggtgccgtcacatccggggcctggggcgggcggggcgaggaggctcggcccagggtccgagagagacttgccgggcctgaggcgtcgctgttccgggcggaccccggccggggctgggctgggaacgcggcgggcgactctgggatccgtgcggctgctcgcagctggggctgcgctgcgctctgggggtggccgagcctgactgccccgcgtccaggacccgccgccgctcctcgcctttgttgccgcgttcgcggaggacgggcccggctccggcccgggaactgaaaggacctgtgagggagcgtggggagaatgcgggaggcgcccggggaccccgtttcggatgcaaggcaccgctggcggtgggagtgcgcgaggggcggacgcctgtcagaggcgtcgggcagacgtttaaaggagtctggaggtgtctgggcgtcaacaatggaactcgaaggccttgggggacagagtcgtgggattctgattttgaattcttaaacggttttagattcctcatactttgaagtaaatacatgttcacctctcacgtcagctgccgcgccttcctgaagccggg

SEQ ID NO: 15043 - DNA, 1067 bp, Artificial sequence
  DNA replication origin
tgttgccgcgttcgcggaggacgggcccggctccggcccgggaactgaaaggacctgtgagggagcgtggggagaatgcgggaggcgcccggggaccccgtttcggatgcaaggcaccgctggcggtgggagtgcgcgaggggcggacgcctgtcagaggcgtcgggcagacgtttaaaggagtctggaggtgtctgggcgtcaacaatggaactcgaaggccttgggggacagagtcgtgggattctgattttgaattcttaaacggttttagattcctcatactttgaagtaaatacatgttcacctctcacgtcagctgccgcgccttcctgaagccgggtcttcaggacgcggcaggggaaccgacgcccgggttccagtcgttctcgccgcggcgcggccggggagggggagggatgcgcagagcccgggcggaccccgcgctgccttcgggagcctccgtttcactcattgctgagaatgttaattaaatgtttacggatgtgtttatgaaggctactacagcatttgtattacttttaaaggtaaaacacgaatgtgagagaaattctctttagcggtgtcttgggttacgagtcaggatccctggagtgtagacgtcacgatcctgtgcaaggcactttgctggaaaggctggagaagtattgccttacgttggttgttaaaaaaattaataaaaatagtctgaggtttttatagtttggctacgtcacgaatcaatttctgtcctctgaaacagacttggtagagcttgagtagccagttgcatatcagaccatttaggggatttcagatcgttagcagtagtatgtagttagcgtgcagcttacccttctgatgagttctccctccaggcaaggagatggctttcactgctgtatttcagaaaagaggaagactggtaagttgtataatgtggctgaggtttctgactaggcaggggagagagagagaggaaagaattactaaattctttgatgttgtggaaggaatagatttggcagaatctgtacatctgtaaacagaatgctgaggaacttaag

SEQ ID NO: 15044 - DNA, 1135 bp, Artificial sequence
  DNA replication origin
tttcttagtacagaacaaaatggagtctcctatgtctacttctacacagacacagtaacaatctgatctctcttttccccacatttcccccttttctattcgacaaaaccgccatcgtcatcatggcccgttctcaatgagctgttgggtacacctcccaggcggggtggcggccgggcagaggggctcctcacttcccagacggggcggccgggcagaggcgccccccacctcctggatggggtggctggccgggcgggggctgccccccacctcccggacggggcggctggccgggcgggggctgccccccatcacccagacagggcggctgccgggtggagacgctcctcacttcccagacggggcggctgccgggcagaggggctcctcacttcacagacgggcggctgctgggcagaggggctcctcacttcacagacggggcggcttccgggcagaggggctcctcacttctcagacggggcggccagtcagagacgctcctcacctcccagacggggtggcggcggggcagagacactcctcagatcccagacggggtcgtggccgggcagaggcgctcttcacatctcagacggggtggcagggcagaggcgctccccacatcccagacgatgggcggctgggcagagacgctcctcacttcccagactgggcggccgggcagaggggctcctcacatcccagacgatgggcggccaggcagagacgctcctcacttcctagacggggtggcggccgggcagaggctgcaatctcggcattttgggtggccaaggcaggcggctgggaggtggaggttgtagccagccgagattacgccactgcactccagcctgggcaacattgagcactgagtgagcgagactccgtctgcaatcccggcacctcgggaggctgaggctggcagatcactcgcggtcaggagctggagaccagcccagccaacacggtgaaaccctgtctccaccaaaaaatatgaaaaccagtcaggcgtggcggtgcgcgcctgcaatcccaggcactcggcaggctgaggcaggagaatcaggcagggaggttgcagtgagtcgagatggcagcagtacagtccagccttggctcggcatca

SEQ ID NO: 15045 - DNA, 895 bp, Artificial sequence
  DNA replication origin
tctctgcccggcagccaccccgtccgggagggaggtgggggggtcagccccccgcccggccagccagcccgtccgggagggaggtgggggggtcagccccccgctcggccagccgccctgtccgggagggaggtggggggatcagccccccgcccggccagccgccccgtccgggaggtgaggggcgcctctgcccggccgcccctactgggaagtgaggagcccctctgcccggccagctgccccatccgggagggaggtaggggggtcagccccccgcccggccagccgccccgtccaggagggaggtgggaaggtcagccccccgcccgaccagccgccccgtccgggaggtgaggggcgcctctgcccggccgcccctactgggaagtgaggagcccctcttcccggccaccaccccgtctgggaggtgtacccaatagctcattgagaacgggccatgatgacaatggcggttttgtggaatagaaaggggggaaaggtggggaaaagagtgagaaatcagatggttgccgttgtctgtgtagaaagaggtagacatgggagacttttcattttgttctgtactaagaaaaattcttctgccttgggatcctgttgatctgtgaccttacccccaaccctgtgctctctgaaacatgtgctgtatccactcagggttaaatggattaagggcggtgcaagatgtgctttgttaaacagatgcttgaaggcagcatgctcgttaagagtcatcaccactcgctaatctcaagtacccagggacacaaacactgcggaatgcagcagggtcctctgcctaggaaaaccagagacctttgttcacttgtttatctgctgatcttccctccactattgtcctgtgaccctgcca

SEQ ID NO: 15046 - DNA, 1602 bp, Artificial sequence
  DNA replication origin
ctcaatgagctattgggtacacctcccagacggggtggtggccgggaagaggggctcctcacttcccagtaggggcggccgggcagaggcgcccctcacctcccggacggggcggctggtcgggcggggggctgaccttcccacctccctcctggacggggcggctggccgggcggggggctgacccccctacctccctcccggatggggcagctggccgggcagaggggctcctcacttcccagtaggggcggccgggcagaggcgcccctcacctcccggacggggcggctggccgggcggggggctgatccccccacctccctcccggacagggcggctggccgagcggggggctgacccccccacctccctcccggacgggctggctggccgggcggggggctgacccccccacctccctcccggacggggtggctgccgggcagagacgctcctcactccccagactgggtggctgctgggcggaggggctcctcacttctcagacggggcggctgccgggcggaggggctcctcacttctcagatggggcagctgccgggcagagggtctcctcacttctcagacggggcggccgggcagagacgctcctcacatcccggacggggcggcagggcagaggcgctccccacatctcagacgatgggcggccgggcagagacactcctcacttcctagatgggatggcggccgggaagaggcgctcctcacttcctagatgggatggcggccgggcagagacactcctcactttccagactgggcagccaggcagaggggctcctcacatcccagacggtgggcggccaggcagagacgctcctcacttcccagacggggcggcggccgggcagaggctgcaatctcggcactttgggaggccaaggcaggccgccgggaggtggaggctgcagcgagctgagatcacgccactgcactccagcccaggcaccattggcactgagtgaacgagactccgtctgcaatcccggcacctcgggaggccgaggctggcggatcactcgcggctaggagctggagaccagcccggccaacacagcgaaaccccgtctccaccaaaaaaacacgaaaaccagtcaggcgtggcggcgcgcgcccgcaatcgcaggcactcggcaggccaaggcaggagaatcaggcagggaggttgcagtgagccgagatggcagcagtacagtccagcctcggctcggcatcagagggagaccgtggaaagagagggagagggagaccgtggggacagggacagggacagggacagggagagggagagggagagcgaaaatgcttttctttagtaatgttgaatattagctcccactctcttctggcttgtggggtttctgcagagagatctgctgttagtctgatgggcttccctttgtgggcaacccgacttttctctctggatgcccttaacatttttttcttcatttcaaccttggtgaatctgacgattatgtgtcttggggttgctcttcttgaggaatatctttgtggtgttttctatatttcctgaatttgaacgttggcctgtcttgctaggttggggaagtt

SEQ ID NO: 15047 - DNA, 860 bp, Artificial sequence
  DNA replication origin
gccatccccgtctaggaagtgaggagcatctctgcccggccgcccatcgtctgagatgtggggagcgcctctgccccgccgccccgtctgggatgtgaggagcgcctctgcccggccgcgaccctgtctgggaggtgaggggcgtctctgcccggccgccccgtctgagaagtgaggagaccctctgcctggcagccgccccgtctgggaagtcaggagcgtctccgcctggcagccgccccgtccgggagggaggtggcggggtcagccccccaccccccccagccgccccgcccgggagggaggtggtggggtcagccccccgcccggccagccgccccgtccgggagggagatgaggggcgcctctgcccggccgcccctactgggaagtgaagagcccctctgcccagccgccaccccgtctgggaggtgtacccaacagctcattgagaacgggccatgatgacaatggcggttttgtggaatagaaaggggggaaaggtggggaaaagattgagaaatcggatggttgccatgtctgtgtagaaagaagtagacatgggagacttttcattttgttctgtactaagaaaaattcttctgccttgggatcctgttgatctgtgaccttacccccaaccctgtgctctctgaaacatgtgctgtgtccactcagggttaaatggattaagggtggtgcaagatgtgctttgttaaacagatgcttgaaggcagcatgctcgttaagagtcatcaccactccctaatctcaagtacccagggacacaaacactgcggaaggccgcagggtcctctgcctaggaaaaccagagacctttgttcacttgtttatctgct

SEQ ID NO: 15048 - DNA, 1167 bp, Artificial sequence
  DNA replication origin
ctttctacacagacatggcaaccatccgatttctcaatcttttccccacctttcccccctttctattccacaaaaccgccattgtcatcatggcccgttctcaatgagctgttgggtacacctcccagacggggtggcggctgggcagaggggctcttcacttcccagtaggggcggccgggcagaggcgcccctcatctccctcccggacggggcggctggccgggcggggggctgaccccaccacctccctcccgggcggggcggctggggggggtggggggctgaccccgccacctccctcccggacggggcggctgccaggcggagacgctcctgacttcccagacggggcggctgccaggcagagggtctcctcacttctcagacggggcggccgggcagagacgcccctcacctcccagacagggtcgcggccgggcagaggcgctcctcacatcccagacggggcggcggggcagaggcgctccccacatctcagacgatgggcggccgggcagagatgctcctcacttcctagacggggatggcggccgggaagaggcgctcctcgcttcctagatgggatggcggccgggcagagaagctcctcactttccagactgggcagccaggcagaggggctcctcacatcccagacggggcggcggggcagaggcgctccccacatctcagacgatgggcggccgggcagagacgctcctcacttcctagatggggatggcggccaggcagagacgctcctcacttcccagacggggtggcggccgggcagaggctgcaatctcggcactttgggaggccaaggcaggcggctgggaggtggaggttgtagcgagccgagatcacgccactgcactccagcctgggcaccattgagcactgagtgaacgagactccgtctgcaatcccggcacctcgggaggccgaggctggcggatcactcgcggttaggagctggagaccggccccgccaacacagcgaaaccccgtctccaccaaaaaaatacgaaaaccagtcaggtgtggcggcacgcgcctgcaatcccaggcactcggcaggctgaggcaggagaatcaggcagggaggttgcagtgagccgagatggcagcagtacagtccagcttcggctcggcatcagaggg

SEQ ID NO: 15049 - DNA, 1504 bp, Artificial sequence
  DNA replication origin
gctgtcacatagaaaggcagggctggaggaaggttagagtagtattttcaggtgccacggctggctttgggggaaaagggttctggtttctatgacctgccagggggaagagagattctagttgctgtggcttgcttcagagaggatgagtggccacagagaggagggcaggagaaggtcagagagagactgtgattgtgaagctgatgcttagaccttcatttgggatattcttttctgagccccaacaacatacattcatatgacccattgttaatgaaaagagtcaaactctggaaaatatttgaagagatttattctgagccaaatatgagtgattaatggcctgtgacacagcccttaagagatcctgagaacatgtgcccagggtggttggggcacagtggggttttatacattttcgggaggcataagacatcaatcaaatacatgtaagatacacattggttcctttggaaggacaagacaactcaaagtgtagggagaggggtgcttccgggtcctaggccgatttaaatatgttctgattagcaattggttaagttgttatcaatagaatgtccaggttgtgataaggggttgtggagaccaaagttttattatgcagatgaagcctccaagtaacaggcttcagaaagaatagattgtaaatgtttctcatcagacttaaggtcggccttgatgttaatgacccaccctcacccccacctccttccatcatggcctgaacaagtttttcaggttaactttggaaagcccttggcagagaggaagggtctattcagatggtttggtgttgggttcagaattttattttttggtttacaccattatatccgatcatatataaatacaaacaaaaacttcaccaaatattactttctttttctaatggtgtgtgtgttttgggacaggatctctgtccctcagactggagtgcagtggtgatttctgctcactgcagcctcaaactcccagctcaagcgatcctcccacttcagccttccgagtagctggaaccacaggcacccacatgatgcccagctaatttttgtatttttggtagagatggggtcgcattagattgcccaggctggtctcgacctccctggctcacatgatcctcccgccgcggcctccgagcggctgggatcaggcgttaatcaccgcgcccgggctttatatttcgttttgaaaatgctgagatggacgcaaagggctgagtgctcagtgtcccccagtcaccctcagttgcagcttccgtccaaagaaggaatcgccctctccctgctggggccactaacagcactaacacggtccgaatggcatcggcaaagctcgggaacggcgacagatgggaagacgcgtgggagcctgggggatctcgggagagccgcgcaaactcgcggcggacgcagccagcacccgcagccagcacccgcacactcccacccataccccggcagcccgccaagactctctg

SEQ ID NO: 15050 - DNA, 1349 bp, Artificial sequence
  DNA replication origin
ttagtgatgtggaggccacctgtgctgactgtgataaggtcagtttgggtgcagtggcagtgagttggagagaatgagaggacagagctgggcgtggggtttgcctgagctgggctcggggccagtttcatggtaacacactgtttgtagtaataggagagtgcaggaacctggggtggggcttgggaactggtggaaatgctctctgattgcttctgtttttctagtaaaataggatgatctcgttagatgatcagctgagagtgaaggtgggggaacaggtggtacatgtttggagaaggagagtgtgagcttccagctagcctaaggccactcgggacacacctatcacttttattgactcactgcaataagcgaggctgcatactggcgggacttgcatatcttcatcagagggacagagagtcatctgagagggcacagggcaggagtccttcggggcctctctgacctggcccggggcagggagctggggatggaagtgccatgagtgcaaatagggagcagggggtcagaggaacagaggatatgggaatgggtggtggagccgggagagactggagctttgccaatgggggcctgggctgagcagggctcagagcatgtggtgatgagccttatggcaggtgaggctcaaggcccagtgtgtgcttagggaagtgggcagcagagcgggtgagggacccgtgggtgtatcacaggggtagggtgttgaggaagttccaaagcaagctaataggggttatggctggagagaggcccagtgtgtgtgctaatgggggatagtgtggtagaggcaccagggtgtgtgctaataggcctctgaggcctcgtgtgtggtgatgggggtgtgtatggtgttagtgctgtgtgtgtgtctgtgggggcctgcagggtaggagagaatggggtgcttatggaggggaggtggttgaaggactcaagtgctgggtgtgcgcttgtgggggttgtgccgtggtgggtgtgtgcatgcgctaataaaggtctgggtagttggagcccagtgcatgctaatggaacagagctggagggacctcatggagggatctgatggagggaggacggtgggagacctgagcctgtgctagcggggatgaggattgtggatctctgtgaggtagggggtggtggtggtgcgggaagggtcttggtaccgtcagaggcccggtgcgctaagggtcaagttggtgtgaggtgcacgtgtgtccctgagcacgaggacactctaggaaggggcagccggatggtttaaggcgttctagaggctgctactgtgggtttagagccatagaggcactgaagtgtgt

SEQ ID NO: 15051 - DNA, 1879 bp, Artificial sequence
  DNA replication origin
tccgaaccgccccctcccccgcctccgcggggcccggccgcagcaccccgaagtccggcctccggtctggggcgcgggaccgcgaagtcgcagcaacagcccaggccacgggggcggttccggcccggcctagcgctcggcgccgcgcacggagataggggcggcgccgcggagaggagacgctgcgctcgtagccggccgggcggcggtaggaggtgtgcactcacctcgtggcggcgcggcctgggcatcgcgccccgaagagccgccgggggccagcagcgcggcgctcagcacggacgcggccagcagcagcgcggccagcgccctgcccgccccgctcatgcccgccgcccgctcggccgcccttgcctgcccgctgcgccccgccctgcgctgctccgccgcggacgcccgcgcgcccgtcatcgccccctccgctgccgtcaccgccgcctgagtcaccgcgggaggcggaggcgcccgggagccgcgggcgggggaacctaggggctgggccgggccatgctaggccctgccttgagggagctggccaggaaagaagccgaggctctgcgcccctgcgttgggagtgtttgtcttcgggaggaaaaacagccggaagagaggcccctgcaggccaggagccttcttccctcgccccaccttctccagccgcattctgccaaactcccgcccccgccggccaccctccgcacgggtgttagagccctcggtccctgttttggaaaacgcctcaataagcaagactgcaaagtccctgcccccaaggcgtttattacccagagggagaggcacgacttagaagccaccaagcggccccacctcttgaaagagcccccggccaggctgacgaagtggaagggagcaggtcgaggagtgtgcacacccattcttggctgtatgccgggagacactatcgcaggtataagggacaggtacagtaatacctatagcagaggtgcttgtaattgcaaaaccttgtcaacaagctgaatgtccgccagcgagaaaacaaactgccccacagcaggggaagtgctctacagcttcccgcatccacatggataaatctcaaaacacaaggctggggaaaatgcaaattgcagaatgcctttttaatatataaagcaaaacaataatgtatgttgtttagggacatccatatatgtaataaaaatacaaaggcacacatgaaaatgttgcgggacttttccttagttcagctaaagacggtggaggtccttgtcacacgccaggaaagattaggctcgcagacaatttgaagggtaaggcagggttttattgggtgtaaaggaagaaaaaggggaacagggactcagcagagccagagttctcctagttgtaggcttcccacctcacagattaaatcccaggttctcccgaggaagaggagggccaggctcctcccagctgcaaactgaggagcgaacttctgtggctccaccccagagcagtgcacaggccagttggagttttaccagggaacccttcccatctggctcattcctcgctctaaagaagtctatctaactgccactaggataagaatagggacaaagacagatcttaactgcttcctgctgatagggggcactgtttcgggaaaatggcaatcagatctccctcagaggcctatctaagggtgcccagcagaaggggccatggtccgagcttccagtagcatgaccgtttgatgtcctgaaggcaagaagagacaaactgggttattaaacacatatggccgggcacagtggctcacgcctgtaatcccagcactttgggaggccaaggcaggtggatcacgaggtcaagaaatcgagaccatcctggccaa

SEQ ID NO: 15052 - DNA, 2155 bp, Artificial sequence
  DNA replication origin
caggcggcgcccaccccagcggagcctgcgtcctggcgccttccgtctaaacagaggccgcggatcgggacgccgggaccccacaaactggcagccaggaggcgggccagccgaggatcgggggggctcggactccccctgcacccagtccactgttcggagggacttagagcagggtcccttccctgagggcctcgcccccgaggacgtggcgccggagccgtgcgacccattggcttcagcgggtgggaagcctggggccgggacgcgcgttcgccccgcgctggggttgaacctgcgtggatgtgcggcgggtgaggaaccgcggagaaggcggtgggggcgcggcctgcagcccggtcccgggcgagccctccgcgcgtctcccctcggcgcgttttccctccagggtgactgggaagccgccgccgccgccgccgccgcctgggaggggccgggctgggcgcttttgccccgggccccggaccccgggcgtttgtccggtgcgctggcttaagaggcgctcagctcataccgtgattgcacaactggcttgctctccgaactcggtggggaaaacggtgacaaatacagattccaggtctccatctagacccctgcaccggggagccccaggccctaggtccttcgcacacgcccctcccagaggggtcgggcaagcatcgcaaacccctttgggtaggagggacggtgggagtcacctgtctttcccctctcgcgcccttttcttggtcagaatacgaagttttagtgtctgtgtatggagttcaaacgacccctcctctccaagcagaagctggaggagaaaggcgttgtgaattttggaaaagcggctcagaggattacattttgtgcgatccttgatccacccaaccttcatctcctgcgctcccctcctttaaaattgcaaggaccccggggaggttatgtaatctgcctgatcacaatttgtcagggactgatcccgccgaacactctttgcattttagcgccagtattagcttatcaaagggcacttacttttagagagaggtggtttgtaaatagtaatcacacgtagtgaggggaagccgcgttgggaccgcaaggctttccctgtcacctggagcccatgtttgggccgcacagctttcctactaaaaacgtcatcatcttccttctttttgaaaattcagcatttgcttgaagaaaaaaaaaagtagactatgtctttaaaaatatgcccagcaaagataactcacgagcagagagctagaccagaaattaaatatttggaaaggaaataaaggtgtaatacacaagcagcacatttatccccgcaccattggaaggtgactttatttggtaatttgcccaccaagacgaggtagaccagaggagagagaaggaaataattgttcttttgtctgtaacgctctgggggtattgccctggaatttcttaggtcagctgctgtgtgggaaggtgacagctttttcttgaagctgaacatcaagctcagtttcgaggtcatatttgatgacttatttgatggcttagtaattgggtcctttggtcgtgtctgtaagtgatacagactgttattattatttttaaaaaccacattcaaataatgcaaagtgaaaaaaaaaggtgtcaaaatccgctggcgttactctgacagtctctagctgtggttccctagctgtggtcttcaccctcggctgcacactcgaatccctttgggaggttcgttgttttttgtgggaaattaaaaaaatcatgctgattgggcagagattctgatttaattggtctggaatggggccagggcattggtaacttttgtagtttttttagagcttcctcaggtaattttgacattcaatgaagactgagcccctctgcacattcccaaatagcatagttagtaacaatgacaatgaagagctttcagcctaaaattcgtgtggataatctaagtataaaacaagtaccttattccgcccaccaccaaaggcttagagaaacatgagtacacacagtacttattccatctacgaagggatgatgatgtgtggagaaattacgaaggaaaagctcatggcttcatggtctcttgggtatgatcaagtgtaggaaaaagtctacagag

SEQ ID NO: 15053 - DNA, 976 bp, Artificial sequence
  DNA replication origin
agccccccgcctggccagtcgccccgtccgggaggtgaggggcgcctctgcccggccgcccctactggaaagtgaggagcccctctgtccggccagccgccccgtccgggagggaggcggtggggggggtcggccagccgccccgtccgggagggaggtggggggggtcagccccccttccggccggccgccccgtccgggaggtgaggggcgcctctgcccggccgcccctactgggaagtgaggacccctctgcccggccagccgccccgtccgggagggaggtgggggggacagccccccgcccagccagccgccctatccaggaggtgaggggcgcctctgcccggccgcccctactgggaagtgaggagcccctctgcctggccagccgccccgtccgggagggtggtgggggggtcagcccccgcccggccagccgccccatccgggaggtgaggggcgcttctgcccggccgcccctactgggaagtgaggagcccctctgcccggccacgaccccgtctgggaggtgtgcccagcggctcattggggatgggccatgatgacaatggcggttttgtggaatagaaaggcgggaagggtggggaaaaaattgagaaatcggatggttgccgggtctgtgtggatagaagtagacatgggagacttttcattttgttctgtactaagaaaaattcttctgccttgggatcctgttgatctgtgaccttatccccaaccctgtgctctctgaaacatgtgctgtgtccactcagggttaaatggattaagggtggtgcaagatgtgctttgttaaacagatgcttgaaggcagcatgctcgttaagagtcatcaccactccctaatcttaagtacccagggacacaaacactgcggaaggccaaggccgcagggtcctctgcctaggaaaaccagagacctttgttcacttgtttatctgctgaccttccc

SEQ ID NO: 15054 - DNA, 1324 bp, Artificial sequence
  DNA replication origin
ctcctcacttcccagtaggggcggccgggcagaggcgcccctcacctcccggatggggcggctggccaggcggggggctgatccccccacctccctcccagacggggcggctggccgggcggggggctgaccccccacctccctcccggactgggcggctggccgggcggggggctgacccccccacctccctcctggacggggcgtctggccgggcagaggggctcctcacttcccagtaggggcggccgggcagaggagcccctcacctcccagacggggcggctggccgggcggggggctgacccccccacctccctcccggacggggcggctggccgacccccccccccaccgcctccctcccggatggggcggctggccgggcagaggggctcctcacttcccagtaggggcggccgggcagaggagcccctcacctcccggacggggtggctggccgggcggggggctgaccccccccacctccctcccggacggggtggctgctgggcggagacgctcctcatttcccagacggggtggttgccggacggaggggctcctcacttctcagacggggcggttgccaggcagagggtttcctcacttctcagacggagcggccgggcagagacgctccccacctcccagacagggctgcggcccagcagaggcactcctcacatcccagacagggcggcggggcagaggtgctccccacatctcagacgatgggcggccgggcagagacgctcctcacttcctagatgggatggcggcggggaagaggcgctcctcgcttcccagatgggatggcggccgggcagagacgctcctcactttccagactgggcagccaggcagaggggctcctcacatcccagacgatgggtggccaagcagagacgctcctcacttcccagacggggtggctgctgggcagaggctgcaatctcggctctccgggaggccaaggcaggcggctgggaggtggttgcagcgagccgagatcacgccactgcactccagcctgggcaccattgagcactgagtgaacgagactccatctgcaatcccggcacctcgggaggccgaggctggcggatcactcgcggctaggagctggagaccagcccggccaacacagcgaaaccccgtctccaccaaaaaaaaccgaaaaccagtcaggcgtggcggtgcgcgcctgcaatcgcaggcactcggcaggctgaggcaggagaatcaggcagggaggttgcagtgagccgagatggcagcagtaccgtccagccttggctcggcatcagagggagaccgtgga

SEQ ID NO: 15055 - DNA, 1179 bp, Artificial sequence
  DNA replication origin
gcaccattgagcactgagtgaacgagactccatctgcaatcccggcacctcgggaggccgaggctggcggatcactcgcggctaggagctggagaccagcccggccaacacagcgaaaccccgtctccaccaaaaaaaaccgaaaaccagtcaggcgtggcggtgcgcgcctgcaatcgcaggcactcggcaggctgaggcaggagaatcaggcagggaggttgcagtgagccgagatggcagcagtaccgtccagccttggctcggcatcagagggagaccgtggagggagagggagagggagagggagagggagagggagagggagagggagagggagagggagagggagagggagagggagagggagagggagagggagagggagagggagagggagagggagagggagagggagagggagagggagagggagagcatttcatcagctttcgatagtgtgcggcagttcacgaatccaccttcactggcacttgtatggcagctgggtttctggaaggagtaatatctttgtcattagtttagtggtgcgcagggacagcagagctgagggaaggcttgtgagccctctgctttgaatgagtatcagagtcgggagggcactagtcactgtcctcaagggccttgcaactgtcgttagcagaagaggacacaaacatctagacaatggccaaatggagccctcaggcaatatgtactttaataggcactagcaagaggtggaggtcacttctagatggtgtttcatatgaatgtggacttggtggatctccaaaaagggagccactgcttccagtaggattcattttagggtttgttgtcaggtctgttcttccggtcatacggttgggtagcagatagggcagggagggtcagtcagtggcgttcttggggtgatacagctgggtagtgggtagggcagggagagtggcttgtgttgggcctgcaaggtcctagcagacgtgcgggttgattgcaaattcctaataggaaagagccagggtcaggcacaggcctggctttatccccacacctgagtaagacgctttggttcttatcccagtctctcatctggccagcttcctgttttgagtttgagccatgtccctgactgaccctccctctattaagagggattggcctgtttttggaagctgg

SEQ ID NO: 15056 - DNA, 898 bp, Artificial sequence
  DNA replication origin
catcattttgctttaaaaatgtttattcagcgcctgcaatgtagaaggcactgtgtttggcaccatgaggaatacagaaaccaacaaggcatgattcttgccttaggaagctcacagtctagcgtgggaaattagaaattgcacatgcacacaggtaactgtcacaccaggcaggaagcactaaatgctgtgagattgataccaacattataagaacccagaggaagaaaacactatttggggatgaggataagagattagagaagttcccttagaagtagggggtttaaacatgacagatcaaatgtagataggaaaaaattcagaggaaaatgtaatcggggaaggctctaattaaaaccagaagcaggaggtacttctgtgatgtgatggaggcaggagaagccccgctgggctggattcagaggggaggggagacaagaggatggggaggtggaggagagagcagggagtggagtgggaggggaggctggaaagatgtgtggggatcaagacgggaaggtgagtatgtgagtatgtgtgccagacaatggtgtttccatgtcaatggaggtttctcagagagaggtgatctggctggagaaagcttaatctggtggcaatggacaggtgactttaagaagtggggaacgagggaaggaggccagtttgaaaatgataacaagggtccagactcagtgatgcagcagtgaccatgagaacagagcagctgcaggtagaagatggagacagaactggggagatctggtggaggtaagccgggtggaaagatgatgtcaggtttatacctagagacacatgatccattcacaaagccagggaaacctaaagagaaaacacttagaatttgaggagaagaggctagggctgggcctga

SEQ ID NO: 15057 - DNA, 1298 bp, Artificial sequence
  DNA replication origin
agggtggatgtttcccgtgccagacaacatctctgatgtgataggaggaagagggccctgcccagcagcccctgcaacccagtcctacctcctggccttcagacagaagctgctcagacctcaaggctggggctggaggaggcagaccccaaggagagcagcaaggaagattagaaaggcaaattccctccaaggaccagcccaagaaaaaggcaaagaggaaggaaaggctgtgaaggagaagagcaaatgcaagaacaaggacgaggagggcaaggaaaagtggaggaggaggaggggaagcaggagaaggagtgggaggaggagagagaggggaagcaggaggagggacgggggaaggaggaggagggggaggaagaggagacggaggaagggaagggggaggaggaagagggaggaggatgagggaggaggaggaggggaggaggagcaggaggaggagggggagggggaggaggagaagatcagaaggaggaggagtgagaggaagaggaggagggggagggcaagaaggaaatgagaatgaggaggaggagggtgaggagaagaaggaggagcacaaggaggaggaggaggtagaggaggagggtaaggaggatccgaggaggaggaggatgcaggctctgtgcagcagcgagaggaaggcagccaagatcaggggcccttgctggggaccgggtccccaggcagccgccaccctggggggatgattaagggaggtctagttctgtgagggcagctggccactctagggaagggagggagaaccttgcctgccgctgaccaaggaggcttctgccactgggtctacccttgcctttgctggcgatcctaccggctgctctgtttgccctttgctgctgtatgtgccaggcctccaggccaggcataagcctgctgtgcagggagggatgggctagctgggcctttggtagacaacctggtcctctcggcagagatgccagtccccagcatttctcagaggtgtgactgaggctgaggagggtcccctctggggtctgtttacagaggccaggaaaccaggcagggaccacctagctgcgctgttgtgcacagccctggagcctgtttgccctcccgtgccacccagggcatagcataaaggctccgcttccagccgtgagccctgaatacagagctgcagacctgcaggggaggcagcagcacctgccctgcaggatggcccaggcccccactaggcaaggctgggagagaggtgcttcccagggagggctggttttcccatggtggccgaa

SEQ ID NO: 15058 - DNA, 979 bp, Artificial sequence
  DNA replication origin
ttggttcccagcacccacctggactccatattcctggcagaaacggccacacacccacccccagggacacaaagatagtggaagccaaggccacagcggaacagccacaatctggggaggccctgggcgagagccacacccccagaaaccctggcagttctccaggacgacatgggcctcagagcccagcaccacaggaagcccctgccaccctcggtccccaaccccagtcaaaacatcactctttccagggaggacgaacaggggaggtggcaggtccctcaaaaggcgctgtccgggctacccagcagtgggcagagccagagaccacatgtcctccacaaaggcctagaggccgaggagcgggaagctcccaccagggctgcacctgggctcccaggcgctctcagaagcggggcaggcccaggcccctgccgagggcccctctctcagacccgaggagggaagaaggagcaggcatctttgtcagcgaccctgaggggcccaccgctgctaaatgctgtccttcttcatgaatgaacccaactttgagagagaagcgtgggacacacagcggagggtggatgtttcccgtgccagacaacatctctgatgtgataggaggaagagggccctgcccagcagcccctgcaacccagtcctacctcctggccttcagacagaagctgctcagacctcaaggctggggctggaggaggcagaccccaaggagagcagcaaggaagattagaaaggcaaattccctccaaggaccagcccaagaaaaaggcaaagaggaaggaaaggctgtgaaggagaagagcaaatgcaagaacaaggacgaggagggcaaggaaaagtggaggaggaggaggggaagcaggagaaggagtgggaggaggagagagaggggaagcaggaggagggacgggggaaggaggaggagggggaggaagaggagacggaggaagggaagggg

SEQ ID NO: 15059 - DNA, 1909 bp, Artificial sequence
  DNA replication origin
ccacttttccttgccctcctcgtccttgttcttgcatttgctcttctccttcacagcctttccttcctctttgcctttttcttgggctggtccttggagggaatttgcctttctaatcttccttgctgctctccttggggtctgcctcctccagccccagccttgaggtctgagcagcttctgtctgaaggccaggaggtaggactgggttgcaggggctgctgggcagggccctcttcctcctatcacatcagagatgttgtctggcacgggaaacatccaccctccgctgtgtgtcccacgcttctctctcaaagttgggttcattcatgaagaaggacagcatttagcagcggtgggcccctcagggtcgctgacaaagatgcctgctccttcttccctcctcgggtctgagagaggggccctcggcaggggcctgggcctgccccgcttctgagagcgcctgggagcccaggtgcagccctggtgggagcttcccgctcctcggcctctaggcctttgtggaggacatgtggtctctggctctgcccactgctgggtagcccggacagcgccttttgagggacctgccacctcccctgttcgtcctccctggaaagagtgatgttttgactggggttggggaccgagggtggcaggggcttcctgtggtgctgggctctgaggcccatgtcgtcctggagaactgccagggtttctgggggtgtggctctcgcccagggcctccccagattgtggctgttccgctgtggccttggcttccactatctttgtgtccctgggggtgggtgtgtggccgtttctgccaggaatatggagtccaggtgggtgctgggaaccaagtcctccacattctggacttttgctgaggcttctgcagccggggccagctctggaggtgaaggggctgcattggccgcgtgatgtcccagacagcctggaggtgacgctgcgcggtggggcggggtgaccagacgggccccagcggcatgtgggagccggcagggtctccgaccctgggatgttgaggacgaagaggacggtggcggacgggggacaggctgatggggcattgaggggccgctgtgggggcgggcggggtgagggggtctggagctccgggtggacactgcgctcagaagcgtcactggctcctgggaggccaaggaccggctttgcctgttggccgccagcggggacgcggagctgcggctgggagcccccacgtggaggaaagtgcaatgcttctggtcctcagtctcctgctgcaccaccgctcctccagcgtggagtccacctccaactgctttttctccctctgaagctgcaaaaatggaatattgaaaaattcgtgaaggtgctttaggcccgagctgttcttcctggaagactcggcggaggggaacaggaggagcggcctcagcaggatgactcccactggctcctgtcccgcagtccccaggacgcacacctgcgcgtgggcagcactttctgaagccccagagaatgcacttgaaggcgcactgcttggtgatggggatcacctggccagccggtggcagttcttgggcacgtccaggaacttgcatccaggtccattttggactccgcctccttgggttgttctccacctgcaagccccggtctggctgtttgcattttccaccctccactacctccgagacttcaactctcacgacgtcttcagtggtggggtggttcccgtagatgctgtggcctggatccctgcgtggggatatccacctccaccaaatgcttgccctgcggaccgtgcctcagcgcggtggggcgggtggccccgtctcccggatagccatcttcatgttttcacgccacggcgaagcgcctccgtggcctcagctcctgg

SEQ ID NO: 15060 - DNA, 1089 bp, Artificial sequence
  DNA replication origin
ccccacccggccagccgccccgtccgggagggaggtgggggggtcagcaccctgcccggcagccgcccaatctgggagtgaggtgggggggtcagccccccgcccagccagccgccctgtccgggagggaggtggggggggtcagccccacgctcggccagccaccccgtccgggagggaggtggggggtcagcccccccacccagccagccgccccatccgggagggaggtgggggggtcagcccccacccggccagctgccccatccgggaggcgagggtcgcctctgcctggccgtccctactgggaagtgaggagcccctctgcccggccagccaccccgtccgggagggaggtgggggggtcagccccccgcccggccagctgccccgtccgggagggaggtgggggggtcagccccccacccggccagccgccccgtctgggaggtgaggggcacctctgcccggccgtccctcctgggaagtgaggagcccctctgcctggccaccaccccgtctgggaggtgtacccaacagctcattgagaatgggccatgatgacaatggcggttttgtggagtggaaaggggggaaaggtggggaaaagattgagaaatcggatggttgccgtgtctgtgtagaaagaagtagacatgggagacttttcattttgttctgtactaagaaaaattcttctgccttgggatcccgttgatctgtgaccttacccccaaccctgtgctctctgaaacatgtgctgtgtccactcagggttaaatggattaagggcggtgcaagatgtgctttgttaaacagatgcttgaaggcagcatgctcgttaagagtcatcaccactccctaatctcaagtacccagggacacaaacactgcggaaggccacagggtccactgcctaggaaaaccagagacctttgttcacttgtttatctgctgaccttccctccactattgtcctatgaccctgccaaatccccctctgggagagacacccaagaatgatcaataaaaaaataaaaaataataatattaataataataataataataataaaataaatcactgct

SEQ ID NO: 15061 - DNA, 1295 bp, Artificial sequence
  DNA replication origin
cagaggtgcccctcacctcccagacggggcggctggccgggtggggggctgacccccccacctccctcccggacggggcagctggccgggcggggggctgacccccccacctccctcccggacggggtggctggccgggcagaggggctcctcacttcccagtagggacggccaggcagaggcgaccctcgcctcccggatggggcagctggccgggtgggggctgacccccccacctccctcccggatggggcggctggctgggtgggggggctgaccccccacctccctcccggacggggtggctggccgagcgtggggctgaccccccccacctccctcccggacagggcggctggctgggcggggggctgacccccccacctcactcccagattgggcggctgccgggcagggtgctgacccccccacctccctcccggacggggcggctggccgggtggggggctgacccccacctccctcccggacggggtggctgcagggtggagatgctcctcacttcccagaaggggtggctgccgggcggaggggctcctcacttcttagatggggcagttgccaggcagtgggtctcctcacttctcagacggggcagctgggcagagatgctcctcacctcccagatggggtcacggccgggcagaggcgctcctcacatcccagatggggcggcggggcagaggcgctccccacatctcagacgatgggcggccggacagagatgctcctcacttcctagatgggatggcggccaagcagagacgctcctcacttcccagactgggcagccaggcagaggggctcctcacatcccagacgatgggcagccaggcagagacactcctcacttcccggacggggtggcggccgggcagaggctggactctcagcactttgggaggccaaggcaggctgctgggaggtggaggttgtagcgagctgagaccacgccactgcactccagcctgagcaccattgagcactgagtgaaccagactccgtctgcaatccctgcacctcgggaggccgaggctggcggatcactcgtggttaggagatggcgaccagcccggccaacacagcgaatccccgtctccaccaaaaaaatacgaaaaccagtcaggcgtggtggtgggcgcctgcaattgcaggcacttggcaggctgaggcaggagaatcaggcaaggaggttgcagtgagctgagatggcagcagtacagtccagcttcagctcggcatcagagggagaccgtggaaagagagggagaggg

SEQ ID NO: 15062 - DNA, 900 bp, Artificial sequence
  DNA replication origin
gcagccaccccgtttgagaagtgaggagcctctctgcccagcagccaccccgtctgggaagtgaggagcgtctccgcccggcagccaccccgtccgggagggaggtgggggggtcagccccccgccaggccagccgccccgtccgggagggaggtgggggtgtcagccccccgcccggccagccgccccgtccgggagggaggtgggggggtcagcccccctcccggccagccgccccatccgggagggaggtgggggggctcagccccccgcccggccagccgccccatccaggaggtgaggggcgcctctgctcggctgcccctactgggaagtgaggagcccctctgcccggccagccaccccacctgggagggaggtgggggagtcagccccccgcccggccagctgccccatctgggaggtgaggggtgcctctgcctggccgcccctactgggaactgaggagcccctctgcccggccaccaccccgtctgggaggtgtgcccaagaactcattgagaacgggccaagatgacaatggtggctttgtggaatagaaaagggggaaaggtggggaaaagattgagaaattggatggttgctgtgtctgtgtagaaagaagtagacatgggagacttttcattttgttctgtactaagaaaaattcttctgccttgggatcctgttgatctgtgaccttacccccaaccctgtgctctctgaaacatgtgctgtgtccactcagggttaaatggattaagggcggtgcaagatgtgctttgttaaacagatgcttgaaggcagcatgctcattaagagtcatcaccactccctaatctcaagtacccagggacacaaacactgcagaaggctgcagggtcctctgcctaggaaaac

SEQ ID NO: 15063 - DNA, 1206 bp, Artificial sequence
  DNA replication origin
cttgggcacacctcccagacggggtggtggccgggcagaggggctcctcagttcccagtaggggcggccaggcagaggcacccctcacctcccagatggggcagctggccgggcggggggctgactcccccacctccctcccaggtggggtggctggccgggcagaggggctcctcacttcccagtaggggcagccgagcagaggcgcccctcacctcctggatggggcggctggccgggcggggggctgagcccccccacctccctcccggatggggcggctggccgggaggggggctgacccccccacctccctcccggacggggcggctggccgggcggggggctgacacccccacctccctcccggacggggcggctggcctggcggggggctgacccccccacctccctcccggacggggtggctgccgggcggagacgctcctcacttcccagacggggtggctgctgggcagagaggctcctcacttctcaaacggggtggctgccgggcggaggggctcctcacttctcagacagggcggttgccaggcagagggtctcctcacttctcagacagggcggccgggcagaggcgctcctcacatcccagatggggcggcggggcagaggcgctccccacatctcagatgatgggcggccgggcagagacgctcctcacttcctagatgtgatggtggccaggaagaggcgctcctcacttcctagatgggatggcggccgggcggagatgctcctcactttccagactgggcagccaggcagaggggctcctcacatcccagatggtgggcggccaggcagagacactcctcacttcccagacggggtggcggccgggcagaggctgcaatctcggcactttgggtggccaaggcaggcggctgggaggtggaggttgtagcgagccgagatcacgccactgcactccagtctgggcaccattgagcactgagtgaacgagactccgtctacaatcccggcacctcgggaggccgaggctggtggatcactcgcggttaggagctggagaccggcccggccaacacagcgaaaccctgtctccaccaaaaaaatatgaaaaccagtcaggcgtggaggcgcgtgcctgcaattgcaggcactcggcaggctgaggcaggagaatcaggcagggaggttgcagtgagccgagatggcagc

SEQ ID NO: 15064 - DNA, 1081 bp, Artificial sequence
  DNA replication origin
ctggcttgcactcagggtgcgtgcctcacacacagagtcaccccaaagtggcaagaaggcccctaaaagaaggggacatgacgtcatgctttaaagggtaccatgaggcacccagggaaaaaatgttctgaggccaaaggggaccctgaaggcctcccacggaggcccagatcttcccggcagcccctgggctgggcccggagggtttgtgctgtccctggcttgcagcaagggtatgtgtctcacacacatggggcaccccaaagcatcaagaaagcccctgtgggaagaggacagcacatcaggcttgaaacaggacgttgacgcagccagggaaataaagccaccaggccgagggggatgctgaaggcatcccactgaggccagggccttcctggcaacccctgagcctggtctgatagggtcgtggagtccctggcttgcaccagtggtgcatgtcttgcacacgaaggggaccccaaacaggcaaggccaccaggggaaggggacagtgcataaggcttgaaagggggcattgagtcaaccagagaaaaaaagcggccaggccaagggggacgctgaagccctcttacagaggcctgggccttcctggcagcctctgagtggagtctggggggatggtggagtctctgccttgcaccaaaagtgcacgtcttgcacacagtggggcatcccaaagcagaaagaaggttaccagggaacagggacagcatgtcagacttgaaagtggacatcaaggcagccagggaaataaagtgggcaggcagagggggaggctgaaggcctcccacggacacccagaccttcctggtaacctctgcttcaggcccgggggattcgtaaagtccctcccttgcacccaggttgtttgtctcacacacaggggcatcccaaagcagcaagaaggcccccaagggaaggcaacagaatgtcaggctttaaatgagaccttgaagctgccaggaaaataaagtggccagcctgagggggatgctgaaggcctcccacggactcccgggccttcctggcagcctctgcatcagcccgggtgttcgtggta

SEQ ID NO: 15065 - DNA, 2234 bp, Artificial sequence
  DNA replication origin
gatctgataaaaggtcacatgtttaaaatttgccctaattttccccaaatccaccacaaatttccctgcatgagccacttttgtgacactatgtgcatttaaggagttcttggtggctggatgtggtggctcacgcccataatctcagcactttgggaggccatcacaggtggatcacttgaggtcaggagttcacaagatcagcctggccaacatgatgaaacctagtgtctgctaaaaatacaaaaattagccgagtctggtggcatgtgtctgtaattctaattactcaggaggctgaggcgggagattgcttgaacctgggaggcagaggttgcagtgagctgagatcatgtcactgcactccagcctggttgacagagcaagactgtcagacacacacaaaaaaagagcccttagggctgcatgcggtggctcacccctgtattcctagcactttgggaggctaaagtggaaggatggcttgagatggggagtttgagaccagcctgggcaacatagtgagatatcatctctgtaaaaaaagaaaaaatacccatgttgagacatttttgtttttaaaaaaattacctgggcttggtggtatgcacctgtattcctagccacttgggaggctgagccaggaagattgcttgagatccaggagtttgatgctgcagtgagctatacttgtgccactgtgttccagcctgggcaatagaaagagatgctgtcagagaaaaaaaaaaaaaaaaaaaaaaaaaaaggatggacacagcagctaatgcctgtgatcccagcactttgagacgccaaggcaggtgaatcacctgaggtcagagtttgagaccagccttaccaacatggtgaaaccccaactctaataaaaatataaacttatccaggagtggtggcgcatgtctgtaatctgagctacttgggaggctgagccagaagaattgcttgaacctgggaggtggaggttgcagtgagctgaatgggccattgcactccagcctggcaaaaagagcgaaattgtgtctcaaaagaaaaaaaaaaaaagaactctactttttctactcttacaatgacaataataaaggcttttctctccaggagctttaagcaaaattaatgagaattcttatgaccgtaggaagatagatttaaaaaacaaacacataggctgggtgcggtggctcacgcctgtaatcccaacactttgggaggctaaaacgggcagattgcttgaggtcaggagttcaagaccagcccggccaacatggtgaaaccccatttgtactaaaaatacaaaaattagcctggtgtggtggcatgtgcgcctgtagtcccagctactcgggaggcagaggcaggagaatcacttgaacccgggaggtggaggttgctgcagagaactgagatgaggacagtgcaatccaacctgggcaacagagcccatctaattatttgtatcttttttttttttttggagacatattttctcttttgtcgcccaggctggagtgcaatggcacgatctcagctcactgcaacctctgcctcctgggttcaagacattctcccgcccccgcctccagggtagctgggattacaggcacctgccatcatgcccggctaatttttgtattttcgtagagacggtgtttcgccatgttggcccagctgatcttgaactattgagctcaggtgatccattctccttagcctcctgaagtgctggaattacaggcatgagtcactgcgcctggagagttctcttttctttgtgaagggcaaggcaaactgaaatggattcacccaaaagtggtgcgcatgccctggaaagcatcatggttagacccatgtgagacaggttagttttactgtgtgtgttccccatgtgttttgcccatgtgatgctaccacggtaatctgctcagtacaagaggaaccacaggttcagacatttggtgtgtgtgcttggttgaggagccaatggggtaaagccactatctgtgggattatgacccaacgcccctaagtcagaatcccacggaaggatatggcagggctgtggggccttggttggcctcggatagccggtcctctgctgtccctgctggcggtctgccctgccccatgcggggcatgtcccaacgcgcggcgggaactgaggtccggtgcagagagccccccgtcctgggaaatgggctgctgccagaaatgcggtg

SEQ ID NO: 15066 - DNA, 717 bp, Artificial sequence
  DNA replication origin
ctgtaaagccccagtcttcggtgcagggtgccttcctctctcaaggaagactcccaaaaaagacaatagggcggtaggatggtgtgggcgggccacagggactcagggggatgttgaggtaggcaggggggaaaccacgagactgcagggaatgctaggagcctcccaaaggggcctatcccatcctagaagcccacggtactgtcccggctggaatgtaaagcaccaggctttggaacagggtgcctgtgtctcttgcaaaaagcacccacaagagaaaacagggcttcagtgtggggcgggcgggttgtatgttgccactggcgggccgcagtgactcagggggatgttgaggctggcagagaggagaagcattgagaccagagggaatgctgggagcctcccaaggagtcctcttccatcccagaagcctccagggttgtcacaggtgggctgtaatgccccaggcttggagcaggctgcctctggctgaaggcaccaacgtgcaataacggggcggcagggtgctgttgaagggccacagggactcaggggaactttgaggcaggaagaggggagaagcagtgagactgcagggaatgctgagtgtgtcccaaggaggcatctcccatcccagaggcacttcggtgtgtttcaggtatgctgtaaagcttcgggttttggagcagagtgcttgtgtatcccacaaaggccccc

SEQ ID NO: 15067 - DNA, 1375 bp, Artificial sequence
  DNA replication origin
caacctcggcaaagtgcagaaaaagagcattgcaggtgagaccctggtgggagagctgtgggttgaggaggagaaggcaggtagggcggccactgtggagaggcagagagaggcggtgaagctaggccaggcaggtccttgtagaccaggagagtcctaagcataagggaagcagagagtagggcaagctggaagccagtgctcagcaggctgcgcagggctcaggacaggaagggaaggcaggcattgggtccttctgccagggtgcatgcaagacacaaggaggcttgaatctgactggtggcaaaatgggcgaagaccctgagtagtttcaggacatattttaattataaacaacaggacttcatgatagagctcaagagagagaagcataggtggcttccagactgcaaacttgagcaataggtagttacgggtataatttatcttaaatggggaagacttgggggagggtaaggtgtggggggaagggtgcattgtggggttgtgaggtgaaggggtgcatcgtggcaagggggtgcattgtggtggtggagggtgcagtgtgttggggaatgcattatgatgggtggggtgtgctgtggggagggagagtacattttggtgggaggagagtgcagtgtgttggagaaagttgcactgtggtgtgtagggggcgctttgtggggtggggtgtacattgttggggagggtacattatgcggggagggtgcagtgttgtgtgggagaaacaggtttttgggggagggtgcggtgtgatgggggtgtctttggacctgggccagcagagtgtggagcccagctggagggaagagctggggatacaaaagtagaggccacagctgggagggtctgcaaagcctgaggaggaaggaagcaggcagccatccaggaggaaggtgcgagaagggaaagtgtggccaggactgccttgggggaactcaggcctgctgaggtctgcagggaaagatgtgtcaaccacaaagactaagaagcagcaaagcagccgggaagccagcggggccagggtgtgggtccctgagcccaggatggaagattctgggaggagccttggctgtggctgagacccctagatccagggctgaaatgtgagggatgcctgcatgggcacagaggaggtggtcgcctgcccagagcagcctgggccgaggactaaaccaggtggcgagggaaggcagccccagggctgatttggaaagcctttctatgaaggggagaggaagacaggacaatcaaaaagagatgcaaaatccagtggaacttttgttttagcaggtgtggctgcagcaagtctgcacagggggtgcccaagcgagggctgaaatcagcctta

SEQ ID NO: 15068 - DNA, 725 bp, Artificial sequence
  DNA replication origin
gaggaggaaggaagcaggcagccatccaggaggaaggtgcgagaagggaaagtgtggccaggactgccttgggggaactcaggcctgctgaggtctgcagggaaagatgtgtcaaccacaaagactaagaagcagcaaagcagccgggaagccagcggggccagggtgtgggtccctgagcccaggatggaagattctgggaggagccttggctgtggctgagacccctagatccagggctgaaatgtgagggatgcctgcatgggcacagaggaggtggtcgcctgcccagagcagcctgggccgaggactaaaccaggtggcgagggaaggcagccccagggctgatttggaaagcctttctatgaaggggagaggaagacaggacaatcaaaaagagatgcaaaatccagtggaacttttgttttagcaggtgtggctgcagcaagtctgcacagggggtgcccaagcgagggctgaaatcagccttagagaggaatgagcccccccacaccccaacaccaggcaaggttgttgggaggctggggaagatgctagtgtgtctggatttcctgatgggagctggggctcttcctctgacagtttgtgcgtctccagagaaatgtagcctgtccaccgcacatacgtccaacaccacctccactgtcaccactagctgggtgcaagactgacttaggcctcagtgattctgaaaccaccactgc

SEQ ID NO: 15069 - DNA, 713 bp, Artificial sequence
  DNA replication origin
acacagccggccctgcccgggtggaccctgccccgccagctgccggcccagggggccctcgccttgcaaggagccagcaggctggcgggagaggcgggttcacgaccctgggggggggtcatccccaggtcggaaggtactggcagagcgggggtaccaggacctccaggcaggagacggccctggaccacccaggccagcgcagagccctggcgctgatccttcagagccaggatggagccgggatgggaggagatcgggggacgctgcgccacaggctttgagacgaggaaggagccaggacccgaagagtagaggaaggcaggaagccaggctgcccccagagcctctgcaggaaccagccctgcgcgcgcctggattttagacccttcagacgctgacctccagagctgtaggataatacatgcgtgctgcttcagccattcagcgtgtggtcattgttatggtagccgtagagagctgatatggccagatgcggcggtatggaggaaggagcactgccatgtcagatacatctagtttcaatcatgcagtgaaagaagcgtgggaacccagggcctggcgagtggcttttaagtgttttcgtgtgcgtgaaattgcctagacgcagattaaagtttgccctcgttttcttgcccgcaggaactgcacagagtgcacattggaaaccatggtgatttgatacacgctgc

SEQ ID NO: 15070 - DNA, 909 bp, Artificial sequence
  DNA replication origin
tagacttgatgaggttcaatttttaccttaaaaatggggatgataatgccttctctgccttataggacatttgttagactcagtaatattattatgataataataatgatgatgctagtgatgatgatgatgttggtgatggtgatgatgctggtggtggtgaagatgctgagggtggtgataatgctggggatggcgatggtgttggtgatggtgatgatgttggttatggtgatgatgctggtgatggtgatgaggctgaggatggtgatgatgctgaggatggtgatgatgctggggatggtgatggtgatgatgctggtgatggtgatgaggctgaggatggtgatgatgctgaggatggtgatgatgctggggatggtgatggtgatgatactggtgatggtgatgatgatggagatggcgatgaggctgaagatggtgatgatactggggatggtgataatgctggtgacggtgatgacgctggggatggtgaggatgctggtaatggtgatgatgctggggatggtgatgatgctgcggatgataatggtgatgatgccggtgatagtgatgatgccggtgatggtgatgatgccggtgatggtgataatgccagggatggtgatgatgccggtgatggtgatgatggcagggattgtgatgatgccagggatggtgatgatgctggggatggtgatgatgctggggatggtgatggtgatgatgttggtgatgatgaccttggggatggtgatggtgttagtgatggtgacaatgttggtaatggtgatgacgctgggaatggtgatgatattggtgatggtgtgatggtgttggtgatggtgatgatgctgatgatggtgatgacactggtgatggtgatgatgctggtgatggtgatga

SEQ ID NO: 15071 - DNA, 1045 bp, Artificial sequence
  DNA replication origin
ccccagccccggggaaggaagctcgactctccgcggggcactccttccgggctccgggcccgactaggccatccgggaggccctggagcgccggggccggagaagccctgccccccgccgaagccccgccctgcgcccgagcgcccgccaatggcagggcgcggtgcggcgcgccgaggtgggacggcggcgcgctgaggaggcggtgcgctcaggcggcgctcccggagatgccccgcggcagccgcgctcggggctctaaggtaggctctggggcgggagtgggcgccgcgccgtttcccgcgttgcggggaagcggcgggccggcgcggggctggccccgttgtgctggggtgagagagggtgggcgttgggggtgaagggctaggtggtggcgggtcccgtctgcgcgcgtggagcaagcccgcgcagtggggtaccgcccccaggtccggctccggtccaggcgtgcgggccgggccctcagcggcggtacggaaagcgaggggtgggaccgccgagggacgcagcgggcgggagcatatgtccgcctcgggggtacttggccttactcttgtctctttttgattctggtgtaatgtaccaaaccgcagggaatcctggcgtggttttacccgtctccgcggataatccactgtcaactctgtctctcttcctgccgcactcggaggggactgtgcggctgactgcccaatccgtgggcaccgcgctgcctcgggttccagaacgggagcgggtgcctaggaatcgttgcttgaatggtgtttgattgcacctgtatccgcgagtgcatccttttttgttctgctaattgtgcttgtcatggcatgtgtcctttatcgttttaaagtttcttctaacttccttgctttcaaatacgtttgtctcatagtaaaacggtttttaaaaagcaaacacaggacctcctttcttgactcttgcctttacttgaaaacttcctggaaaaaatagaccacatatactggttcaacttctttaccactaccatgctttctcgcttctc

SEQ ID NO: 15072 - DNA, 1177 bp, Artificial sequence
  DNA replication origin
tctcagtgccaaccagtcacagcacgcgcggcgcccagcccctggtttctaaaccccattctgtcgtcccgggacgaatgtcttgggatgtctggctgggtccagggcaaacatcctgcagtgacaaaatgtgtgaaagtgaagttgagcaacaagaggaacagcatagcagcagattgtaacccaacagataaagacattgtctgagtcaatgcgtacagacccattattctccgtgagggaagtgcgcgtcttccctagccgctactgtcctctttctgcgccgccgggctgggctcagtccgcagtgacccagtctcgtgtaggtgggaccagcatcttcaccggccgaggagacgcccctggaccacctgcgtgggcaggatccaggcaggcgacagggctcagggctgcagccaagtcccccagaaacagtccccctgggacggtggcttcacgctggcccgagaggattcagactggcccggccacgccagaccaagtcttctaaggcagttccttgcaatgaacctcctagtgtgtgtgagtgtgtgtgtctgtgtggtgtgtgtgatatgagtgtggggtgtgtgtggtgtggtttgatgtgtgtggggtaattgtgtgtggtgtgtatgatgctgtgtgtgatgctgtgtggagcctgtggtgtggtgtgtgtggtgtatatgtgtgtgtcatggtgtgtggtgtggttgtgtggtgtgtgcgtgatggtgtgtgtggttgtgtgatggggtgtgtggtatggttgtgtggtgtgatggggtgtgtggtgtggtgatgtgtgtgatgggatgtgtgtgatgtgtgtgtggtgtgtgtgtgatggggtgtgtggtgtggttctgtgtggtgtggttgatggcgtgtgtgatgtgtgtgtggttgtgcgtgtggtgtgtgatggggtgtattgtgggtgtgtgtggtgtatgatggtgtgtgtgtagttgtgtgtgttgtgtgtgtgatgggatgtgtttggtgtggttgtgtggtgtgcgatggggtgtgtggtgtggttgtgtatcgtttgtgtggtgtgtgatggggtgtgtgtggtgtggttgtgtgtgcccctctcccttaccgctgcctgctctgggcctagcccctgacgctctgcagcgttgaaaacgttgtgtctcgccct

SEQ ID NO: 15073 - DNA, 1285 bp, Artificial sequence
  DNA replication origin
ccaccgctaaagaatctatttgtgattggagagtatttggctatctcttccaagctatctgtgaggtctttggagagggattggtaataggaaatggagatggttaatcccataatcccagttccaactcctgtagttattccaagggctactaatagaggtatgaattgtatagcacggcagtgtcggataggggtattggtaggggttggtctcctgggcaacattgatttttggactgaggaaaaccagggtgcaggtgcccgtccagttagaagggaggcaaatataagttgaggtaccacataggaaaagtataccttagcttggtagacagaactgattgtgtgtgctaaaaagatgtattattttgttattctcatgcatccatactcctagggtcctggctagggctgctggtgtaagtggttgtaaaggggtgtttggtttagtccgggaggcttttgggttctttttccttgtgtaaaaggaagcattttgtgtccactaagatccatgtgggagtgttgctgaatgttgggataaggagacagtcgcaggtgatgggtgcagggatggtgcatggagagggcagccaagggaagagggataaacaggggaagtgtcagccattacagtactctgaatttttattaaggaggtgggaggtgtcaagggccagggggggctagagaaatgaagcctgtctttattgttggcagctttgagagtagtatgttcagtggaaggtttgagtcgtagggtatagttgcacagtttggaattcaggttgccgaggggaatgccagagggtagatgtcattggacgcccagtggtgctgcataggataagattgtgtgggttgttatggctcctaatatgggtttatcatggctgtggtagggggatacgttgcgtaagtagggatgtaaggttgtaagagccagaactcgctagctaagttgggggagatttctgttaatgccggcatgtcgagttcgaggcggctgttaatgaggatttcgggatggtaggttacttgggtggaagtccagttataggctgaggcagggattgcattgtatgttgtggagaagagggatacgcagagccagcagtctcttgccagggaggaattggagttttttagtaaggagtgtgtgagactaagtgttctgtataggtgttcaggggttataggtattggttgggctgaaagaagggttggggtattgattctgagatgggttagaaaggaagagagtgagcagaaaagtaaatagt

SEQ ID NO: 15074 - DNA, 1061 bp, Artificial sequence
  DNA replication origin
gcttgcagtgagccaagatcgcgccaccgcactccagcctgggcgacagagcaagactccttctgaaaaaaaaaaaaaaaaaaaggagagagtgaaaggttgggagatatcaggtaaggacagagctggtgcagtgacaagagcagtttgaagtttgcggaagatggggaatatgttatgtgagggatttaggggctcattgagggggcctttggctgcttcatacagggggtgagctaggagggcaaagttgggaatccatattctaaaaaagcccgctagtcctaggaaggaaaggagtttccttttggtggggcgggggcagattatctattagtgcctcttgggcagggtcatagcctggtccccagaggaaagttgaactcttaggtaagttactacggagctggaaaattgagctttggagggggagactctataccctttggtggcaagaaagtttaagagagagactgtgtgggtttgagagtcttctagagaggggctgcaaaggagaagttcgtccacgtaatgaagaagacagctgggggaaaggtttaaggaggtgagatttcaagctaaaacttgtctaaagaaatgagggctatctctgaagacttgagggaggacagtccaggtgagttgttgtgactggagggtgtcagggtcagtccaggtaaaagcaaagaggttttgggaatcagggtgaaggggaatagttaaaaaggcatctttcaggtcaatagcagtgtagtgggtagtgttggagggaatgaaagagagaagtgtataggggttagggactatgggatgaataggaaggatggcctgattgatggcttggaggtcttggatgagttggtatgagccatctgatattttaaccaagaggatgggggtgttatatggaaaatgtgttggcctaagaagactgcgtgagcagagcttgtgactggctgtgagcctttttggtgggttagggagatgggatattggggggacattgagaaatttagaggggtcttttaactggattttgatggggtcacggtgagcagcta

SEQ ID NO: 15075 - DNA, 730 bp, Artificial sequence
  DNA replication origin
agggctatctctgaagacttgagggaggacagtccaggtgagttgttgtgactggagggtgtcagggtcagtccaggtaaaagcaaagaggttttgggaatcagggtgaaggggaatagttaaaaaggcatctttcaggtcaatagcagtgtagtgggtagtgttggagggaatgaaagagagaagtgtataggggttagggactatgggatgaataggaaggatggcctgattgatggcttggaggtcttggatgagttggtatgagccatctgatattttaaccaagaggatgggggtgttatatggaaaatgtgttggcctaagaagactgcgtgagcagagcttgtgactggctgtgagcctttttggtgggttagggagatgggatattggggggacattgagaaatttagaggggtcttttaactggattttgatggggtcacggtgagcagctagggaaggggtggtggtgtcccatactattgggtttacaagagaggtgggaagtgggtactggggagagggctcaggggccagactagcgcaaaggagtaggagggactctggttgaggaaggcagaaaaaggtgatagaatctttgaatttggctaaaaggtcttggcctaggatggggggtagggcaatgaggcatgataaggaaagagtgtgagaaaacagtatcaaacagagagcaagtaaggggtctggtggcgcgtggactaac

SEQ ID NO: 15076 - DNA, 898 bp, Artificial sequence
  DNA replication origin
gggagagggctcaggggccagactagcgcaaaggagtaggagggactctggttgaggaaggcagaaaaaggtgatagaatctttgaatttggctaaaaggtcttggcctaggatggggggtagggcaatgaggcatgataaggaaagagtgtgagaaaacagtatcaaacagagagcaagtaaggggtctggtggcgcgtggactaacatgagatgagtccgtcaagccccacaactgagatctgggaggcatgagtgggtcctgaaaattcaggcaaagcccagtaggtggccccgctatcgattaaaaaagagatcggcttacctgctaccagtagagttacactgggctccatgcagtgatggcagtgggggccaggggccctgggccttgtcagtcttcagtggctaggccgaggagctgtgggagtgcaagcaattcttcactttttgtcttgctgaaggggtggtggctctgaggagcaggcttgtctgtccgtttgctgagaggacagagggacttccagtggcctgtctgctggcagactgggcaagggctctttggtactcgagggttaggacatgcccatgcccagtggccttctttgccacacttaaaacaaggcccaggaggtttgctgctatcaggtctttgtgcccttgggtaatatggctgggttgatggatagccgctgctagaagttggtatttagcacgatctctttgggctttctctaatttattttgctcatccctgctattaaagactttgaaagccaggttaaggaggtcttgttgtggggtttgagggccatcttcagcctttttaaatatgcgctggatgtcgggggcagattggggaaaaaatgggtgttaagaacaatagttccttcctggg

SEQ ID NO: 15077 - DNA, 778 bp, Artificial sequence
  DNA replication origin
tcgaaatgtacacccttatgggcagttttgttaaggcctgcaatgaggcaagtaatcatatgattacgggaggcccggctggtgtctgggggttaatattcccaggtaggctcttcccagggggactgcagcggcccctactggccagtaaaatcttgccaatggaagtcatccgcatgggcctgggctgcaagtcacattgtttccttctcatccagaaggagggtagaatacagaataatatagagatcatgccaagtaagttcataagtctgggtgagatatttaaattctttcatataagtgtcgggatgggaggacaaggaccccagacgttcctcagtttgggagaaatcagagagggaaaaggggacgtggacacagacaatccctttggcccctgccacttcccggagaggaagcaagggagcgggctgctgggcatgctgggctcgaggacgagtaaggggtggagacggggaggactcagagtaggaggcgggatggttggagagacggaggtagagccggagtggaggcatacggtgggggggtcatgctgttctggtggaggattaggatgttgtcaaggaggggaaaaatcagtgggatcaaaggaggcgaagtcatcggctggggctattggggtgaggggagcaggaggcgagtggagtttggagcgggcgaggataatttgaaaagtagagcaagactggcagagggaaggatgactacagagagtaaagaaagccagaacataaggaatctcagaccactt

SEQ ID NO: 15078 - DNA, 2156 bp, Artificial sequence
  DNA replication origin
ttcatagcagcattattcacaaaagcaaaaaagtagaaacaacctaatgcccatcaactcattagcatccccaggagcatattcatgcaatcgagtatcacttggccataaaatgaatgaaactgtgggtaattctacaatgtggatgaaccttgaaaacattatgctaagtaaaaagacagttgcacaggctcacatattgtgttattctgttcataggaaatacccagaataggcaaatctatagagataggggagagctctctatggagccgttacctagggcagaggttgttgttgggggtggggcttggagacagtgtgaggaatgactaatgtttatagggttccttgggggaggggtgatataatgttataaaactgattaaaatcggctgtgcgcaattatgaatatactaaaagccattcaatccatcaccttaaatgggtgaatcttatctagggcatccattttgagactggggcagatgtagtgaaaaagggaaaaaaatgagtaaatgtttgaaatggagacagaaacaaagagaatgagacgtcctgtgaatggaagaaacagagagaagggaacatggtcatatttacaaatcagagatctgaaaatggaggctcacaccaatagtgtcactgacagacaggagggtcacccgcagggctgcagacagactggggttcacactgccatgggcgctggcagccacatcggcaggcaggagggtccagatgcccagctgaggggtaatgataacctgggtggtgatgtcggccattagaggggcctcttctgctggcaagtgtgtgacagtagcaagaaggacaggcctgcgtggaacgcaggaggggctcttctgtggctggatgtgggaccctgaccaggaatgtggggaaatggacaggtaagcggatcatgctggccagtagattggccagcactataagctgaaggacaataatggggagtggctgtgaggccctgggagtgtctgagtgtgaacggagatgggtgcgggccactggggaatatgtgggggccactgcagtgtagacggaggttgtgggagaataaactggtgaggtctgtgagtttctaggggtctcctaggtgcctggggctggctcctgcagaaaactgaagatggttggaccagagctgggagacacaggagtccctaaggaatgggggtgaagaggtgagagagatgggggaggatctcagggaggtctgtgggtttttaggtgattcctgggtgtgggggggttcggaatctggggatggttggagaggagctgggagacatgggagagtccctgagggctgggagtggagacaggggggaggattccaggaaggcctgtgagtttctaggggtctcctgggtgttaggggctgcccccaggagaaatatggggatggctggagaggagctgggaggcactggagagtcccaaagggctgcaggagaagagatgagagacagcgtggaggagggcactcagatttgcgtctgtaggtgattcttgagtgttggggggcaacagtcagttggagacatctggggatgattagaaagtaactaggagacatgggagagtccctgagggctggagctgaaggggtgggagtcataggggaggatcccagtgaggtctgttagtttctacgtaattcctgggtgtgacgggctgactgtgtcagaaattcacagtggtttggggagtagctgggagagacaggagagtccctgagggctgggggtgagctgtggggcaatggcagtaagaacacgtggtatattactgatgcacatggtgactctgaagaagctccagggaagggcagagcccagtggcttctgtgattgtccctcatggttaggaaagggaaatgggatattgtgggattttggtaaagacggaagtgagtgtggtgaagccttaggtgatgatgaaaagtaccccggggtcctggtgaggagccccctcctgggtctgagtttctgagaggggagaaggagaagctgggtgaggctggcatggatcttgaggccaggctggggtactgctcacaggaggagccaggtgagaccccactgttcttagatgcagacatgattagaaacctgcactcccagggtccc

SEQ ID NO: 15079 - DNA, 1208 bp, Artificial sequence
  DNA replication origin
aggaaggaggaggtggaggaggagaggaaggaggaggaggagaggaggagaggaaggaagaggaggagaggaggagaggaaggaggaggaggagaggaggagaagaaggaggaggagaggaggaggaggagaaggaggatgaggagagggaggaggaggagaaggaggatgaggagagggaggaggaggaggtgaggaaaggggaggaggaggagaaggaggatgaggagagggaggaggaggaggaggtgaggaaaggggaggaggaggaggtgaggaaaggggaggaggagaggaggagaggaaagaggaggaggagaggaggagaagtaggaggagaggaggagaagaaggaggaggagagggaggaggaggagagggaggaggaggagagtgaggaggaggagagggaggaggaggagagggaggaggaggaggacagggaggagaaggaggaggaggaaaaggaggaggaagagaggaaggaggaggaggaagagaagaaggaggaggaggaggaggagcaggagctgggattggagggcagacgcctgttttgctactgtagacactggacttgtcttgctctgctgcctgggcctatgtgtccattgccccccactttctggatgtgccctttcagagcccagaactctcacttctctgagcctaacctcccagcctcaggcatacacagagtagaaatgccggatgctgggggtcctctgaggagggtgaacggcagttttcctgagaacatggcattcttccacatcacccccattgcaggtagggttgggcaaacaagagactgagttacaggaggcagaaggcagctgccctgagagcaagataattcagctggaagggtgacaggaagcttcagtgcatggaggcagcagggagtggccagggtcacctggacagggaggcatggacagcacaactgtatctaagtgatacagggacagtgtatctccccctcctgaattccccagaggaacattgcttctaattctggaacttcacactcaaaccatcaaggagcctgaagtgaagaggtctcttctggtcccagatagcccactgaaggcccatctgtgaaggctggcttctcgtaggtgggtctgtaggctgctgcagatttgggcaagaccactggagagcttctttgtgctttccaagaccctggatctagttttgcagtg

SEQ ID NO: 15080 - DNA, 1234 bp, Artificial sequence
  DNA replication origin
gtgcagggacctgctcggtaaatctccattagatcaggctgagtgccctgggtggagggacagagttgccagaaatagctcctttcctgcaacggcaggaaagatcgcagctgccataaggcctgtgcagagggggcgccccggtggagggcggagggcagagaaatggagtctgcaccgagaggcggggaccaggaggcgggagacagcctgggagccgctttgaaaggatctcataaaagtgccgtttgttgggagcccggaggaagtggaggcagctttggcacacgtggccacggtgctaaattaactgctaacacaaataatcaaagtgcaagacccatcgagaggctggcgccagcgaagcgcgggggcggcggtcagcggggctggcgggcggcctgcggcaggtgaaggcagggcgggggcgggggtgcgcggggaccgggactccaggcagagggatgtgggggccgccggcggatgtgctctgggacccagggcagtgggaggaagggacttggggagggcgcaccgcgggaaccacggcggggggaggccggtggaggtgagagcagggggagctgcggggagtcacccggagactctcacccaagagaggggatggtgtgccggggacgtgccccgggactcaggcagggagaggtgggagtggcagacttgtcctgggcctccgagtagttgagggggagggggagaggggtcacacccgggcaggggaaggcagagcagtgcgtgaagcggagggggacaggacgtatattgtccgccgacctgacctgtggccgggaaaggcagggctggggatgtgcccccggactcaaggcaggggaacggctggtggaggagccctgatgggaccgaaggcaggggtggccgtccccggcgtggcgctgcagtgagctaaggttcttccttctgcacaggtgtgcataaggcgcacagctgctctctgatgcccctcgccgccacctggccgtgatggtggcagggggccttacttggcgatgaggcaggcggtgtaactgagggagcaaaacaggtcaaatctgaggcctggccgtcggagctttgttgcgggcaggcctggtggcttggccgacctcccactgactagggcgccctgacctcccggacgaggctcccagggagagtcccgtggaggaacgccatagggaacctgcttcctgggtatacactccttgtttccacc

SEQ ID NO: 15081 - DNA, 1188 bp, Artificial sequence
  DNA replication origin
ccctgacaatgggaggggcccagcctccagccatgcaagaatgaggtgaggttccaaatgtgtagggatttgggcctcatccagggctgagacactctgcgctgacagtgaagcagattggagcccccagcttatgctaaaatcggcccaggctcactgtgatcctttaggccagaaaagaccagctgtccactgtgtgcctgccagctagcaccagggccccctgcttgagcacttaggaagcccttcctgagccctctcaagcagcgctgggcttgcaaagtccctccccacactagctccatgagcataggggtgtttattgcaaacatgactagagttctcttcataagtaaaagcctacagagtattattattctggaatatcactcatattagaaatctaaggagaggggaaatcaggttatctgaaagagaaaaagagcctgagcttagaaaactcagatgaatctcaaggacctcctctttggaattatttggagaagcaacctagttctctgaggtgcggaatatctcatctcagctaggaagaagcactgggtatgaagggatttagaccaaaacacaggcttggagacacccaggcagtgttagcacagaactctgcgagggaagaggcagaggaaagttagacctgggaggtgagtgggatgttaacagaagaggtgaaagggatcagaaatattctgcaaaataatcacaataaagcctgccaagggtgccatagcagtcagccatctgctaggaccccagactctgaaattttctgacccagggcccacgaggcctctgcgcgcaggagagtgccctggggagtgcagggacctgctcggtaaatctccattagatcaggctgagtgccctgggtggagggacagagttgccagaaatagctcctttcctgcaacggcaggaaagatcgcagctgccataaggcctgtgcagagggggcgccccggtggagggcggagggcagagaaatggagtctgcaccgagaggcggggaccaggaggcgggagacagcctgggagccgctttgaaaggatctcataaaagtgccgtttgttgggagcccggaggaagtggaggcagctttggcacacgtggccacggtgctaaattaactgctaacacaaataatcaaagtgcaagacccatcgagaggc

SEQ ID NO: 15082 - DNA, 1249 bp, Artificial sequence
  DNA replication origin
cggcagtcccagcatgcctttttcaatacactgtttgcaattaattgggagaaccagagctgggagaattaggagacagaccagtccctgaaacacgtgaggagaaaagtgcagggccttgtctgtttgcaggcacggagaacaggtgccaagggcagcggctccttggctggcccgcgggtccaggggacgtgagcagaccaggccggtggcgggtggccggcctgggcgggaggccgctgtttgtggagggccggcctgccagcccccggacgccagggtggactcggcggcctggcggggctcaagcccagctatccatcactagccgcctagcggctagcaccccggagcaggagccgccccgcccacctggctccgcccagccgctggccagagctcatgcgcgcgggctgacgtcagcaccccgcccccgcccgagtcagacacccgggtccgctccgcctgagactgaagggcgccgggtgtctgcgggggcgggggaagcttggggcttcaccagggggccagctgcctgggggtctctctccctccaccagttctcctggtcctggagggagccatcctccgcataaaataccttcctgaaccgcgatgttgctgcctgcaggatacaacccaggctctttatagcactcctcacacaactgcctctggacctacttttacaagagggggtggggtactgagaggaggtaactgttccttgtggcacaggaggaatttggccaggaggctgctcgtcatgttactggaactgtgtgggctgggccagatgagcttgctgagagtcccaacaaggacctatccagaaccagaaggagccccagagagtggcggccctggcctcgctcacacagtgtgcacacacaggcagttttatacctccagcatgttcacgcaaataaatagcaaccccaaagaaaaccttcacagtgtctgccaatgagcatctcatacaatttatagtatgctgtctacaattaattgaaccaactccaggacctcatggtggggacacgggggtcacaggcagaggaaaggccaggttatgcaacagtgttgtatagtgcgcatctggctcatcttatgtgctgaatatactgcaggagatggcaggcttggaaatgtcagccatggccaagatcctggccaaaggaggcaaagatgctggaggccactggattcacacaggactaccctcacagggctctggggctatgatggg

SEQ ID NO: 15083 - DNA, 1277 bp, Artificial sequence
  DNA replication origin
gagtgctataaagagcctgggttgtatcctgcaggcagcaacatcgcggttcaggaaggtattttatgcggaggatggctccctccaggaccaggagaactggtggagggagagagacccccaggcagctggccccctggtgaagccccaagcttcccccgcccccgcagacacccggcgcccttcagtctcaggcggagcggacccgggtgtctgactcgggcgggggcggggtgctgacgtcagcccgcgcgcatgagctctggccagcggctgggcggagccaggtgggcggggcggctcctgctccggggtgctagccgctaggcggctagtgatggatagctgggcttgagccccgccaggccgccgagtccaccctggcgtccgggggctggcaggccggccctccacaaacagcggcctcccgcccaggccggccacccgccaccggcctggtctgctcacgtcccctggacccgcgggccagccaaggagccgctgcccttggcacctgttctccgtgcctgcaaacagacaaggccctgcacttttctcctcacgtgtttcagggactggtctgtctcctaattctcccagctctggttctcccaattaattgcaaacagtgtattgaaaaaggcatgctgggactgccgagcagggttttccgcggagggaggagcggttccctgctggcgatgcccgcggaggccagcccctcccggaggctcgggaggagggttttggggaggagcgccatgcagacgcagccaggactgagaacggcttccgggccttcattcccaccagcatcgccttctctccacgcatctgttttcattttcttagtatttaaacttgattccgcccccacctccgtgtcctcccaccactcccatgaaagacagaagatggatttcatctgtgtcctgaaagagggcagagaacacgcagtgactggataccctagggaatgcgaagtgcaaactgtcgcctgggctgtctctggagaaaagtaaaggaatgtaacaagttttcattaagaatccaactgaaagcatcatcatttttccccgcttaaacacgctttaccaatgacatgtgagacctatgaactagaagtttctcagatctattgccttttccccccttcatttaaactttaacaccgataagctgtgggatcatgagacactcattccatctctttgtacctcagtatttggatgtttagaaatggcacaaccctatttacttcacatgtttcgtgtaca

SEQ ID NO: 15084 - DNA, 1514 bp, Artificial sequence
  DNA replication origin
ttggcgccacgtgggtcttttgctaacagaacacagccccttcccagctgggcggtccccgcagtccaggctcccctctcagcctggggatgcagcctcgccaggcgctccttgccacccttgcgagggacatgggttgctttctcttgcattccaccgcccccctgctcatttgagcactttggaaacccgctggtggtggctaaggcagatggaggcagggctggaaggggaagaaaaagcccagggagtaactaagtgtcaaggaactcattgtctgctctccacctgttgttattctggtcccaatcaacctgctcgccaggctggagccagcggccatctggaaacactgctctgtttataaacttggcatgaagcagcactcccgggccctgacctcccacacgaatctggaaacaattagagcaagatgataggcaggcggggagcgctccggggaggggagggagggggcgccacagaggggggcgagcgggagccaggggtgggaggccggtgggggaggaagttgggatggatttgggaggagcggcggtgaatggggattgggtggtaggggggcgagggaagcctgggtctgggctggagctgagggactgggaaagagtctggggatatctgggtctgggcggggtccgggtgggagccagggatggggtgagccagggggaagggtggggatccccaggacggtggttttgggggcccttgtgggtctgggagagtcagggaggagtctggtgaggtctgggccctgctgggaactggggacggccagccctcctggggtgtgaggaccaggagaggggcctgggctgtttgctgaagatggtgtgatggcagccaggctccacactcccctgcggcctcagcctcacagggtgcccttcctgggaccccctcaggcaacaaaacatacggggtggggggtagggggaaggaagtcattcctgcctgtgccttcgctttgagcagcgagcaagtggactctggtgaatgaagttctctctcaccttgtaaggaatgcattgtagagtttcaagtcattttattagtttcagaaacacattcttgaagagcactttttaaccaaaggaagtttaagcgtgtcccgttttgctggagaaaagctgagattcttgggccatggggggacattcctatacttgcagagcgtacaatctaatctgtgtagacgcatgccatgtttctgtgtctggggagctgattcaggctttcagagtcctgagtatttgtgagatgaatgagtctcttcctcttttctcaagaaacaatctctttcgctcgcttttttccctgcagttttgaaatgtgattcttagctccgagtcgatgctgttttcacgctcagctgggtttctaactcctgaaatattaatctgtgggagttgctggcaaaccaataattggcaccaattaacaagctcctcgttggccaaatgatacttgaagagggaagttgactgtgc

SEQ ID NO: 15085 - DNA, 998 bp, Artificial sequence
  DNA replication origin
tggcagggttctgggaagggcgggagactgggcaatgctggcctccccactccagccagaccttctccctccctcccctcggagcagggaggacctgattcaaacagcccaggaaacctctggtgtccccagcagcctttcggggccagggattttattttagagctttgtcagcagtggaccgcagggactcccagtgctggtccccagtcgtacaacctgagttaggagctgggcgccaactgtgtgtgtgagagttgtgagtgtgggtattcatgtatgtggatgtaagtgtgtgagtgtgtgtattcatgtgtgagtgtgtgaacatgtacgtgtgtgagcattgtgcatgtgaatatctgtatgagtgtaagggtgtgagcatgtgtgtgtggacatgcatgtgtctgtgtgtataaggatgtgtttatgagtatgtgtgtggtgtatttttatgtatgtgagagtgaatgtgtgagtgtgatgtgtgtaaattggctgcgtgagtgtatgagaatgtgtgtagtgtgtgcaagtgtgtgagcatgtgagtgcgagatgtgtgtaagtgtgcaagtaagcgtgttagtatgtgtgatgtgtaaatgtgtatgtgtgtgagtgtatctgtgtgtgataggttgtacaaatgagggtgtgcgcatgagaggtgcgtctgcaagtgacaaagtgtggtgtgtatgtagtgcatgtttgtgtgtgagcatgtgtgtgaggtgtgtgcaagtgtttgtgtgtgtatgctcttgtgcaagtcagtgtgtgagcatgtgtgggaggtgtgtaagtgcgagtgtgtgtgtgtgtgagagagagagagagagatggatgaggaggagagccagtggatacaagaagccgggctgtggggtatctgaggaagaaggggccttgctgaggggtcacgggggctttggaattgcaggtgatgtccagagggcatcggcgtctgtgtgtgaggacctgggacacca

SEQ ID NO: 15086 - DNA, 1199 bp, Artificial sequence
  DNA replication origin
gattttccagtaaccaaccccaaagaaatggaaatccttgaatttcctgacaaagaattcaaaatgattggtttagagaagcttagtaagctgtaagctgcacacttgcactcctcagcccttgggcagttgatgggaccaggcactgtggagcagggggcaggcctgtcggggaggttcgggcagagcgggagcccacccagacaggtcgggtggggcttgggcatggcgggatgcaagtcccgagccctgccccgtggggaggcagctgaggcccagtgagaattctagcactgcttgggcgggccggcagtgctgggggacccagcgcaccctacgcagctgttggcccgggtgctaagcccctcactgcctggggccggcggcacccgcaggccagccggccgctccaagtgcggggcctgccgagccggcgcccacccagaactcgtgctggcccataagcaccacgtgcagccccggttccagcctgcgcctctccatccacacctccccacaagcagagggagccggctctggcctaggcctgcccagagaggggatcccacagtgcagtggcaggctgaagggctcctcaagcgcggacagagtggacttcgaggccgaggaggtgccgggaccgagtgagggctgatagcacattgtcacctttcaagagaacacagtcagacaactcaatcaggaaaacaacacgtgaacaaaactagaagttcaacaaggagataaaagtcattaaaaaacccagaatttctggagctggtaagtacaatgaatgaaacagaaaatgcaacagacagccttaagaacagattcaatgaagcagaaggaggaatctgtgaatctgaagacaggtcatttgagattatccagttggggagaaaaaggaaaaaaaaaacagtaaaaaagaatgacgaaatcctacaggatttatgggccataatcaagtgaaccaatatatgcattgtgaaagtatcagaaggagaagagaaagagtcaagaattttacttaactaattaatggctgaaaacttcccaaatcttgggagagaaatgaacacccagattaaagaaatgcagaggaccaggctgaccaatatggagaaaccccatctctactaaaaatacaaaatcagccaggcatggtggcacgtgcctgtaatcccagctacttgggaggc

SEQ ID NO: 15087 - DNA, 855 bp, Artificial sequence
  DNA replication origin
tagggggaacagactccgggtttctaagcagatggagtgaacagctgactgagaagctcaagcctgaagcaggtggcggattctcttagcagcaccaaatcaccctgtcaggcagcccagccagggcagctcaggagtgggccacagagcaggacctgccaggacgtccagagagtgtgggtggaagctgcttcccagtggagcctggccagggggcgactgccagacagtgaggcggatgagtcagccctgaaagcgatcctggccatgacctagtgggagaggagagaacagaaggggcagtcaggaactgacaggtgggctgtgcaacaggaaggggtcacagacccagcaggtggcagggcagatggaggagatcaagggatgtgtgatagtgggggggcacccacctgggtgtggggggtgcaggttggggtgggtggctgtggggcagggagcagggcaccaaacggggtggtgggttgaggggacacggggcaggtgggcaggacaccagccaggggatgcggggtgggggatgggcaggcgggagcccttctgacccctgtggctgcacgtgctgtttggagcacacagaggccagaggtgccaaggtgcaacctgttctttcaggttattgatctgtttttaaaggaaatggcttgggatggctggaacaatattcacttttaaatgaacagctttggactctttcgttgtgtgatctcaaagtgccaaagggaaccaaagaggaccaaattattccaaagaattatagcagcccagttgttagggatacaatgaagctcggcttcccttactgaggcgttttgagtggaatgaaatgcttcattt

SEQ ID NO: 15088 - DNA, 1591 bp, Artificial sequence
  DNA replication origin
aggcccagcctctgggaccgtcgtgcctgacgctaaggagaggtggggcctggaggagcctttggagccttaaggactggtttcccaagaattgcagcccaggcctggcccgagcgaccccgtagaggccttgcggggcccacagcgcgcatagtcactgggcccaaagatgatgatctatggcctgaaaagcaaatgcagtctgcactggtccttctgggtcctgacagggcccgcggtgtgggcggagagggaggttagcggtggccgccatacccggacctcaccctgtcccaggaggaactgggaggaacccaggcctaggaggaactggcctggctccagaccacccgcctgcctccaggagcagcaggctcggtattgctctgggaggcagtggccccctggcctcccctggacgcatccttcagtctcgtcccgcaggtctggggctccttgggagctctcctgacctccagtcctgggctaggcagcctggcccgagctgaccctaaaacaggctccttctgagaggggaggccaagagttggcccgtggccaagaaggccctggcgctgacccagtggcagagaaaaagcagcccaaagctgtgcatggcttccggaggccccctccaactgcaggcagcccctcgcatgcccccttctggctcactccacccccggtattcctaggggagacggggtctcgtcttgctgctggctgaccgctgttcccatcttcctagtcaccgcagtgccagttcttcaggcagagacaacctcggggctgggacacccggtctcacgtaggtcctgtttacagtcctcagtgccccacaccggggaccccctgaggacacctctgccttaaccttgatttcccagaaggctgcctcttcgtgacggacagactcagcccaaagccccttccttctgtctttggagaccctgggcttgggaaatacgaaggaagtgtggctgggggcagagcatgtgtctgcaaatcaaggcctttgctgcttgctgctggcccagcggacttaggcttcaatttaaattttacttccggtgaatttttttttttctggccacaaagcttggtattttcacggctttagtttcctgttggctggtgggaggggatagggtctgtggctctaggcttggccatggagaccttcggcgttgccgccaaggaggaggcagcctgggctggagaagcacagttgccggtgccgaggcgtctcaggagggaggcagtctggtctttgctttattcccggcaagctttgctgtctctggggcgtgcctctgccgtcttggtaggttccccagagtcccgagtggtgttaacaggggtagcgcctcttgtgtacaggctctggagctctggaggggattaggagctgcccagagcccagtgttctggaagactcagctggtggggtgagtcattaactgcggtcctggtgctggttcataaactctaaaggtgcagtggccctggtctccccttaccagagcacaaaatggcgtcaggctgcccctggggttaggaggggtaaggaatgtcagatagcctgggaggg

SEQ ID NO: 15089 - DNA, 1048 bp, Artificial sequence
  DNA replication origin
gcagaagaattttttcttattacagaacaaaatggagcctcctatgtctacttctttctacacagacacagtaacaatctgatctctctttcttttccccacatttcccccttttctatttgacaaaaccgccatcgtcatcatggcctgttctcaatgagctgttgggtaaaccttccagacggggtggcggccaggcagaggggctcctcacttcccagacctggcggccgggcagaggcgccccccacctcccagacggggcagctgccgggcgggggcacccccccacctcccagacagggtggctgccaggcgggggcgccccccacctcccagacagggcggccgggtggagacgctcctcacttccagatggggtggctgggcagaggcgctcctcagttcccagatggggtcgcggccgggcagaggtgctcctcacattccagatggggtggccgggcagaggcgctctccacatcccagatgatgggtggccaggcagagacgttcctcacttcctagatgggatgacggccgggaagaggcgctcctcacttcccagactgggcggcctggcagaggggctcatcacatcccagatgatgggcggccaggcagagatgctcctcacttcctagacggggtggcggccaggcagaggctgcaatctcagcactttgggaggccaaggcaggcggctgggaggtggaggttgtagcgagccgagatcatgccactgcactccagcctgggcaacattgagcactgagtgagcgagactccgtctgcaatcctggcacctcgggaggccaaggcaggcaaatcactagaggtcaggagctggagaccagcccagccaacacggcgaaaccctgtctccaccaaaaaatacaaaaaccagtcaggcgtggcggcatgcacctgcaatcccaggcacttggcaggctgaggcaggagaatcaggcagggaggttgcagtgagccgagattgcggcagtacagtccagccttggcaacagagggataccatggaaagcgggag

SEQ ID NO: 15090 - DNA, 1503 bp, Artificial sequence
  DNA replication origin
ctcacagtggaggcaaggaattgcaactcagaaatatgttgctacttggctgcctctactctattattgtacaccttgaaggcaaggttaattaagacctgttgtggggtttgagggctggaatctaatttctggagctttatttaatgtcaggagtggattgggtaataaaatgcatattgagaataagacagccttctgacccttcagggtctagggctgtaaagcatctcagggttgctgccaaacaagccatgaactgggctgggttttatatttggtgaaaaagagcctaaatgctaactgatttgggagaggtcagataaagaaaaaggagcattaaccttgactatgcctttagctccagccacctcttcaagaggaaattgttgggcatgttggggagggctagttgtggaataaaactgtaacccaggaccaggtgtgaggaggggaggtgatagaaggattatagggtgggggagcagaggctgaggaagaattggagcctgattcagcaggctggggagcaacctgaggaggagcagtctggggaggaggggagaggtcagatgggtggtagaaaaagaagattgaaaagactcagcaatgcttggggttgggactgaggggacaggtgggagggaaagaagtaggatttgggatgagtcccattgggagcagagactagggagggactgatgtgtaaaagaatgcctggacgtcaggcacctcagaccatttgcccattttacgacaagaattgtttagatcttgtaggatggaaagattgaaagtgccattttctggctaattggaaccattgttgagtttgtattggggttaagtggtatgacagaagaaaataagacatttagattttaggtcaggtgtgagttgaagaggttttaagttcttgagaacacaggctaagggagaagaaggaggaatggagggtggaaggttgcctatagtgaaggaggcaagcccagagaaaagagagggtagagacatggagagaaggggtggggggtgcttgccccccaggaaagtggtgcttgccactaagcatgaaggatcaaggcaggcatccccacagtgattggagacctctgaaacgtgggtgaataatcaagcaggcatccccgcagtaattaaacacaaagggaagacttcccaagtccgtgaccagcactggagttttgggttcacggataaaacgtgtctcctctgtctctaccagaaaaggaaaggaactgaaattaagagaagggagagattgaaagatggcaccaagatcgaaaggagaaagaggttgagggatagtgagagaggttggagaagagagtaaaaagaggccgcttacccaatttaaaattggtgagatgttccttgggctggttggtctgaggacccgaggtcatagatggatctttctcatggagcaaagagcaggaggacaggggattgatatcccaagggagatccccggatccaagtcat

SEQ ID NO: 15091 - DNA, 1245 bp, Artificial sequence
  DNA replication origin
agctgttgagtacacctcccagatggggtggtggccgggcagaggggcttctcacttcccagtaggggcggccaggcagaggcgcccctcaccacccggacggggcggctggccgggcggggggctgacccccccgcctccctcccggatggggtggctggccgggcggggggctgacctccccgcctccctcctggatggggcggctggcctggcggggggctgacccccccacctccctcctggacggggcagctggccgggcagaggggctcctcacttcccagtaggggtggccaggcagaggcacccctcacctcccggatggggcggctggccgggtggggggctgacccccccacatccttcccggacggggcggctgggcgggaggggggctgacccccccacctccttcccggacgaggcagctggccgggcggggggctgacccccacctccctcccagacggggtggctgccgggcggagacgctcctcacttcccagacagagtggctgccgggcagaggggctccttacttctcagacggggcggttgccaggcagagggtctcctcacttctcagatggggcggccgggcagagacgctcctcacatcccagacggggcagcagggcagaggcgctccccacatctcagacgatgggcggcctggcagagatgctcctcacttcctagatgggatggcagccgggcagagacgctcctcactttccagactgggcagccaggcagagaggctcctcacatcccagacgatgggcggccaggcagagacactcctcacttcccagacggggtggcggccgggcagaggctgcaatctcggcactttgcggggccaaggcaggcagctgggaggtggaggttgtagcgagccgagatcacgccactgcactccagcctgggcaccattgagcactgagtgaacgcgactccgtctgccatcccggcacctcgggaggccgaggttggcggatcactcgcggttaggagctggagaccagcccggccaacacagcgaaacccggtctccaccaaaaaaatacgaaaaccagtcaggcgtggtggcgcgcgcctgcaatggcaggcactcggcaggctgaggcaggagaatcaggcagggaggttgcagtgagccgagatggcagcagtacagtccagctttggctcggcatcagggggagaccgtggaaagagagggagagggagaccgtgggg

SEQ ID NO: 15092 - DNA, 1056 bp, Artificial sequence
  DNA replication origin
ctgggaagtgaggagcgtctccgcccggcagccaccccgtctgggagggaggtgggggtcagccccccgcccggccagctgcctcgtccgggaaggaggtgggggggtcagcccccctcccgcccagccgccccgtccgggaaggatgtgggggggtcagccccccacccggccagccgccccatccgggaggtgaggggtgcctctgcctggccacccctactgggaagtgaggagcccctctgcccggccagctgccccgtccaggagggaggtgggggggtcagccccccgccaggccagccgccccatccaggagggaggcggggaggtcagccccccgcccggccagccaccccatccgggagggaggcgggggggtcagccccccgcccggccagccgccccgtccgggtggtgaggggcgcctctgcctggccgcccctactgggaagtgagaagcccctctgcccggccaccaccccatctgggaggtgtactcaacagctcattgagaagggccatgatgaccatggcggttttgtggaatagaaaggggggaaaggtggggaaaagattgagaaatcggatggttgccatgtctgtgtagaaagaggtagacatgggagacttttcattttgctctgtactaagaaaaattcttctgccttgggatcctgttgatctgtgaccttacccccaaccctgtgctctctgaaacatgtgctgtgtccactcagggttgaatggattaagggtggtgcaagatgtgctttgttaaacagatgcttgaaggcagcatgctcgttaagagtcatcaccactccctaatctcaagtacccagggacacaaacactgcggaaggccaaggccgcagggtcctctgcctaggaaaaccagagacctttgttcacttatctgctgaccttccctccactattgtcctgtgcccctgccaaatccccttctgcgagaaacacccaagaatgatcaataaaaaaaaaaagaaagaaaaagaaaaacaaacaaacaaacaaacaaacaaacaaaaacac

SEQ ID NO: 15093 - DNA, 1056 bp, Artificial sequence
  DNA replication origin
taggctgtttgctggttgatctgctctcgtgcatagactgaatccaccgtcgcagagggacggccgctggcacacgcggggctggagcgcgcgaagagcatgcagggcgcgtgggtgccccgggggtcggcgtgccgggtgttcatggggaaacaaggagggtcgttggtgcagacggagctgcacggccgcccatccgagaagcgggctgtgctcagcgcaggcactgtgtggtccaagtcgtgctctagaaaccagccccagtgcatgagcatgcgcgtgtagctgtggtcgggggtgacggccgccgcgcgcgcccacactgtggcgaccagccggggcggcgggaggggctggcgggagcccacaggaaggccgagcccgcggggcgcgcggatgccgtcccggtaggctggctgcagcaggcgcgcgaaggcggtcagcgccgcgccccacgtgggctgctgcaggttgttgcacgtgccgtcgtgggcgcggtacttcgcatggaaacaccggttggagcagtttggcagaggcctgcgagctgtgcatccagataaattggcgatgaggctgagggagcgcggggacaccaagtcattgtaccggaattctgaaaggcaagcggcgaaagccgtgaggagggcgggcctgggagggcgcgggcaacttggaactccagatgctgcgggaaccacctcccaccccgcccgccctgagtgaaaagaggcctttcttacttccaaaaacatttcgttagctcacaacaaaaggggggatcattctataacactaaaagatgtttccagaagatcccgggattacttttgagcgttcatcctgtaaacaatggctagctgctagaaggagcaaaatggaaggagagcagatgccagccagacactaaaagatgtttccagaagacccgggattacttttgtgctgttcatcctgtaaacaatggctagctgctagaagaagcaaaatggaaagagaacaggtgccagccagctcctaacttctactctgtgcctttacaagaacgatgttggc

SEQ ID NO: 15094 - DNA, 1289 bp, Artificial sequence
  DNA replication origin
ggctgacccccccacctccctcccggacggggcggctggccgggcggggggctgacccccccacctccctcccggacggggcggctggccgggcagaggggtcctcacttcccagtaggggcggccgggcagaggcgcccctcacctcccggacggggcggctggccagtgggggctgatccccccacctccctcctggacggggcggctggccgggcgggctgacccccccacctccctcctggacggggcggctggccggtgggggctgatccccccacctcctcccggactgggcggctggccgggcggggggctgacccccccacctccctcccggacggggcggctggccgggcagaggggctcctcacttcccagtaggggcggccgggcagaggcgcccctcacctcccggactgggcggctggcctggcgggggctgacccccccccacctccctcccggacggggtggctgccgggcgtagacgctcctcacttcccagacggggtggctgccggacggaggggctcctcacttctcagacggggcggttgccaggcggagggtttccttacttctcagacggggcggccgggcagagacgctcctcacctcccagacagggttgtggcccagcagaggcgctcctcacatcccagacagggcggcggggcagaggtgctccccacatctcagacatgggcggccgggcagagacacgcctcacttcctagatgggatggcggcggggaagaggcgctcctcgcttcctagatgggatggcggccgggcagagacgctcctcactttccagactgggcagccaggcagagaggctcctcgtatcccagacgatggggggccaggcagagacgctcctcacttcccagacggggtggcggctgggcagaggctgcaatcttggcactttagggggccaaggcaggcggctgggaggtggaggttgtagcgagccgagatcacgccactgcactccagcctgggcaccattgagcactgagtgaacgagactccgtctgcaatcccggcacctcgggaggccgaggctggcggatcactcgcggttaggagctggagaccagcccggccaacacagcaaaaccccgtctccaccaaaaaaaaaacgaaaaccagtcaggcgtggcggcgtccgcaggcactcggcaggctgaggcaggagaatcaggcagggaggttgcagtgagccgagatggcagcagtaccgtccagctttggctcggcatcagagggagaccgtggag

SEQ ID NO: 15095 - DNA, 938 bp, Artificial sequence
  DNA replication origin
agtgaggacccctctgcccggccagccgccccgtccgggagggaggtgggggggtcagccccccgcccggccagccgccccgtccgggagggaggtgggggggtcagccccccgcccggccagccgccccgtccgggagggaggtggggggatcagccccccgcctggccagccgccccgtccgggaggtgaggggcgcctctgcccggccgcccctaggaagtgaggacccctctgcccggccagccgccccgtccgggagggaggtgggggggtcagccccccgcccggccagccgccctatccaggaggtgaggggcacctctgcccggccgcccctactgggaagtgaggagcccctctgcctggccagccgccccgtccgggagggtggtgggggggtcagccccccgcccggccagccgccccatccgggaggtgaggggcgcttctgcccggccgcccctactgggaagtgaggagcctctctgcccggccaggaccccgtctgggaggtgtgcccagcggctcattggggatgggccatgatgacaatggcggttttgtggaatagaaaggcgggaagggtggggaaaaaattgagaaatcggatggttgccgggtctgtgtggatagaagtagacatgggagacttttcattttgttctgtactaagaaaaattcttctgccttgggatcctgttgatctgtgaccttatccccaaccctgtgctctctgaaacatgtgctgtgtccactcagggttaaatggattaagggcggtgcaagatgtgctttgttaaacagatgcttgaaggcagcatgctcgttaagagtcatcaccactccctaatcttaagtacccagggacacaaacactgcggaaggccgcagggtcctctgcctaggaaaaccagagacctttgttcacttgttta

SEQ ID NO: 15096 - DNA, 1057 bp, Artificial sequence
  DNA replication origin
gatgagaaaaggaaaaatcaaaagtgaaaccagactcagatgctggcttcccagaactcgtgccgtatcaggtaaaagagacactagacaggcagtcctgcacgggcgatatcagcctcaagcaagccctgagccaacccaactaccctagtccagaatgttaggaaaggctctgctgtggcccaaatggagagaagttcatcaaggagagaaacacattgtgtgcatttcctcagtcacagagacctgggagggctccactgtgacagcagttcagggtccctatgtggcgggagcaattcagcagtgagccacctgccgaaggtgggccctgggctgcgggagcaccagcaggtcgacaaagttcctctgagcgaggtggggctgtttcctaagggcagtcgacagccactgaaaacattaggcagggagggggcgcggtcaggcttgcctttatagaaagtttacttttgttgacaatgagaggactgcattgcggacagtaaaactggtagcagggagtctggtgggagccacttggaataatccaggagagagatgatctgcacctgaacaagacgactgtaaggcaggggtggagaagaggaaataagatggaggagtttgagggttgaattgaataggagtggaaggtgcagaaaaggaaagagggaggcatggagcggaacaggcctctcttggctatcgccggaccaggggtgggggtggggtgctactcacagagcagtgacccatctaagacaggagcaggttgggaggacgggtggagactgttggccagagctcaggagagagtttggggctacaatggctatttggggaatctctgcaaggttgttaattgatggcatccaagtagaagaggccacaaagggagcgtatgtagagaaaggatcctagaggacaggcctataaggaacagctgcttttaagagcaggcagagtaagagatgtcatcagaggagattgggaagcacacccggggctgctggagaacagagaccccatctgtttggttctccattgcagtctcagg

SEQ ID NO: 15097 - DNA, 1063 bp, Artificial sequence
  DNA replication origin
tttttttttgagatggagtttcgctcttgccgcccaggccaggtgccatctcagcactgcaacctccgactcccgggttcaagcgattctcctacctcagcctcccgagttgctgggactacaggcgcacggcaccacacccggctaatttttgtatttttagtagagacggggtttcaccatgtaggccaggctggtctctaagtcctgacctcaggtgatccgcctgtctcggcctcccaaagtgctgggatgacaggcgtgagccactcacccggccctcttctcgactttctatccctcctcctcaacaccctttccttctggaaatgggctttggggtggttaaccaagcccagggaaacttgcgtggcccagcatcttccgtccgctgcaggaggagcacacgcccccggcccgggtcagcaagacgcgagaaagcggccacgccgggcgtccgggagctgaggctggagggcgcctggcaggcagggcggggcccaggcggcgggagtgcttatgaccggcgctggggggaacttctggacgtcaaggggccactataaagcggcacagtcttgagccttcgctcttcacctaagtcagtgagcgcccttcgcaaagcctctgtggaggtaaccattgggggttcgcctccaaatccaggaatgcacctcaaaaatgctcctacaccgtaagaccgtgtccttcaatgcaaaggggactgtgcggcgaggcaccgacaagccgtagccctgagaccactgaaagcctgcaccccagcgccggtgcgagaacgtggagatggcggtggggaggagaggtggaggccatgctctcgcgtgatctcccctaccgccatcgtcttctggcctgtcaaggcctcgcgttgtttgggcttgggggcggagcgagccctgaggggggcggggccagatgggggcgtctcccggccttgttgactttggcgtccgcggggagctgcccctgtgcccgtggttctctgcgcatgcccggaccccggcggctccggagtccgggaggctctggctgctccagtcgc

SEQ ID NO: 15098 - DNA, 1359 bp, Artificial sequence
  DNA replication origin
tataacgcatctccatttttaaaaataatgtacatctctccattatctcctactactccctccacccactgttcctcagataataggtctgtgtagtgattctagacactgattcggaaattaacttcctccaagtacaaagtgtaaaacagagtaactatttgtataataaggaacctcacttcaaaactgaaacctcaactagtgcctcccaaagaggagaactggatttccaccttacagatgaccaccattttccaaagctactcattgaatttgggggtagggagatgttctttgtgcctacctaatttcattaggataaaagccctgtgtgggttcctgctggggtttttctggggagggagggggttgtgagagtcacaaaataactggatagccattagttccgtatgactacccacgcggtgctagtctgatgctgttagtttaaacaaaggcctacaggatatgtactatgagtccttttgaatacagtttttcagaggggtgtgatgtttgtgtcatgtgttcatggtatgtagctagcggatgtgtttgtgtatgagggtgtttatgtggaatgagcatgtggtgtgtgcggagtgtttctgtgtggtggaggctctgtgtgtggcatgcgaacgcatgttgtgtgtgtgtgtggtgtgtgtggcatatgtgtttgtgtgtgtacggtgtgtgatgtgtatggtgaatgtgtgttgtgtgcatgtggtgtgtggatgtggtatgaatgtgtggcacgtggtgtgtggggggtgtggtgtgtcgtgtatgtggtgtgtgtagtgtgtgaggtgtgtgtattctgtgtgtgttgtgtgtggtgtggggtgtgtggagggtgtagggggttgtatgtgatgtggtgtgtggtatggctggtgtgacgcgtggagtgtgtgggggaggtgtgtgtggtgtgtgtgtgtgtgcagtgtgtgggatatgtggaatgtgtatgtggtgtgcatggtgtgtagagtgtgtgtgatggatggggtttgtgtggaatgtgtgtgtggtgtgtagaatgtgtgtgtggtgtggggagtctgtgtgtggtatatgtgtagtgtgtgtgtggcatgtgtgtgtatggggtgtggtgtgtgtgtgtggtgtgtgtgacgtgtacatgtgtggtgtgcatgtaatgtgtgtttgtgcagttgtggtgtgtgtgtggtttgcgtggtgtgtggtgtgtgtgcaatatgtggtttgtgtggggtgtgtgcatggtgtgtagtgtgtgtgtgcatggtgtggtgtgtgtgtaatgtgcgtgtgtggcgtgtgtgtgcatggtatggggtgggtgtgtgtgtgtgt

SEQ ID NO: 15099 - DNA, 1084 bp, Artificial sequence
  DNA replication origin
acttcccagacggggcggccgggcagagcctctccccacttcccagacggggcggctgggcagaggctctccccacttcccagatggggcggccgggcagaggctctccccacttcccagatggggcggctgccgggcagagacgctcctgaattcccagatggggcagctgccgggcagaggcgctcctcacttctcagacggggtggccgggcagaggctcctcagttcccagacggggtggcggccgggcagaggcactcctcacatcccagatggggtggctgggcagaggcgctgctcacttcccagacgatgggcggccgggcagaggcgctcctcacctcccagacggggcggctgggcagaggtgctcctcacttcccagacggggcagccgggcagaggcgctcctcacttcccagaagcggcggccaggtagaggagcgcctcatttcccagacgaggcggccgggcagaggcgctcctcactttccagacaatgggcggccaggcagagacgctcctcacttcccagacggggtggcggccgggcagaggcgatcctcacttcccagacagagcggccgggcagaggggctcctcacatcccagacgatgggcggccaggcagagacgctcctcacttcctagacggggtggcggccgggcagaggctgtaatcttagcactttggaaggccaaggcaggcggctgggaggtggaggttgtagcgagccgagatcaggccactgcactccagcctgggcaacattgagcattgagtgagcgagactccgtctgcaatcccagcacctggggaggccgaggcggccggatcactcgaggtcaggagctggagaccagccggtcaacacggcgaaaccccgtctctaccaaaaatgcaaaaaccagtcaggtgtggcggcgcgtgcctgcaatcccaggcacttggcaggccgaggcaggagaattacgggagcccgaggcagggaggttgcagcgagctgagatcatggcagtacaatccagcctcggcaacagagggagaccgaagaaagaaagaaagaggggagaaggaggg

SEQ ID NO: 15100 - DNA, 1124 bp, Artificial sequence
  DNA replication origin
gcccctcggctctgacaggccgcggccttctgtcccccggccccagacccagagccgaggggcctgctcgcgtccttgtccgcccggacccctccctgcctcctagagttcggggccgcggcgggcgggcgcccgggacgccggcggttgtgtcggcttagcggtgccgaatgggcggttggtaaccgctgccgaggactaggcggcggcggaagatggtgccgggggtcgctggctctgctgctgccgccggcgaaggaggaggcgttgccgggtaagtgtcgccgccgcccgcgtccccttcccccatctggcacagcggtcgcgcggcgggccctggcacggtgggccggggtcgcatggtccagggttccggtcggcctgagcccggcccacgcgcaggtgtgtgcacgggagggccccggcgcctcccgccccggcaggtgttgcccactggccgctttcccggcgcgacagcccctgtggagacaaaagcggttcgagtcgatgctccactaggctgccggaggtgtgggtcggactcgtgctgcggggctgcctgcggcttcctcggccggagccttgggatccctccctctgcgctgccgcttagtacccggcctagttgccggagtggccgagggcgagggacgtccgaacctcccaagacgcatcttgacttgtgctcatcgctgccagggatcagcccttaattctgtgttggactcgagaaacgggagagtggagtttggccgaggccgaacgaagctcaccgaatgggaggaacggagagatgatgtctttgtcccgaccccagagtgcgaggatcggtataaagttactcctaggaatgactcagcctgcgcccgccccacggatagatttgggatgggtgtgcacgcggatttcacagcttccttggtagaaacaaaaatacattaaccaacagtagaaatagcagcttctgaatggaatatctctatagtttcttccaccgcctggtggatgtgctgtgtttactgtttatggtttcgtaatctagtcgtttccatcatgactctttaaagtgtggtcataccttgaagtagtgtagacttggctgccaaggaagactcatgtgctca

SEQ ID NO: 15101 - DNA, 1131 bp, Artificial sequence
  DNA replication origin
cgcctcctccttcgccggcggcagcagcagagccagcgacccccggcaccatcttccgccgccgcctagtcctcggcagcggttaccaaccgcccattcggcaccgctaagccgacacaaccgccggcgtcccgggcgcccgcccgccgcggccccgaactctaggaggcagggaggggtccgggcggacaaggacgcgagcaggcccctcggctctgggtctggggccgggggacagaaggccgcggcctgtcagagccgaggggcccaggcgactgggggattctgaggcaacgccgagggctcggcagggccgcggacaccgccgcggcttggtttgttattgtcgactccgtctcttcctccgcggcgcatgccgggaaacggcctgccgggggaggggcgcgcctggaggcgcagagaggcgtctacgcaggtccggaagtcggcagcctgccgggaagggggcggccccgcctccggctctccggccggcaggttggctgtcctggcctgaccctgggagactccgctggggccgcctgttatggtgctagctgccgtcccggtgcgtactttcccaaggtgaatttgaccttctttgcgacagctaggccctgactaaggtcgacccaccaaacactggatcgtccccaggcgaaagagagcttgttcccctcagcctgtcgcggaggagcggagccaatcgagggtctggtgtccccgtcgcctctccaggggcaacctgcggactaggccaaggtctgtaacaggataacgtaccagcgcctggcccaggcgttcctgccgccacctccccgcatatccggaccgccgggactgcacgcagctggcaagcgtccccctgttaactctgcaagggtggggcggcaccatttctcagaccaggtaaggcaagaaaacatgcaagagagaagagagggaagcctaggccaatcggaatgaaaatgtaaacgccacaaccacgttttcagctttacaaatactgaatcttgtagtgggtctagtgggttaggggttagcatgagcaccctaatggttgggagacagtttcaggggactcttgcatttgtgaagatgatcagtcacaggcaatgacttgaagccacg

SEQ ID NO: 15102 - DNA, 876 bp, Artificial sequence
  DNA replication origin
gcgcgcctgctggccggaaaggcagcgagaagtccgttctccctgtcctgcccccggcgacttgcggcccgggtgggagtccgcaggctccgggtccccagcgccgctggccagggcgcgggcaaagtttgcctctccgcgtccagccggttctttcgctcccgcagcgccgcaggtgccgcctgtcctcgccttcctgctgcaatcgccccaccatggactccccgatccagatcttccgcggggagccgggccctacctgcgccccgagcgcctgcctgccccccaacagcagcgcctggtttcccggctgggccgagcccgacagcaacggcagcgccggctcggaggacgcgcagctggagcccgcgcacatctccccggccatcccggtcatcatcacggcggtctactccgtagtgttcgtcgtgggcttggtgggcaactcgctggtcatgttcgtgatcatccggtgagcgcggggacagcgcagcgctgggggctgggcggggcagggagtgagggtcaggccccgccactggagcagcagtgggggcagccagccaggtggtggggactctgttccgtgaaggatcctggaaatgctacagggtggcttcctagaagaggtgaaggattttctgggagtttttggtggagtgctgagaggttcacacaggcgaatccgagcggccaggggcgtctggaagatttcagagtaaccccccgaccccaccctagggcccagtgtttctgctgaaaactctatgcgcagggcaaggtgccagggtgctgacaacagggtcaggggttcctggtaaaggaactaatccatttgcctgcgccagtttggagcactttgttatgccctttgca

SEQ ID NO: 15103 - DNA, 1821 bp, Artificial sequence
  DNA replication origin
gagggctccctcccgttttcttggaccatggaaaggaaatggcccaggaaaaagtagcttggagtgtcttcccgcggggaggggcggtgtcccgggagccgccaatgtcccgtcctaggacttgcccagccacgtcccggccttcccgaccttgccaccctccctactgctagccccagcggagcgggtcagttggggttaggaagaatcgggagaggctggtgtcctggggaggctgggtgtggggcgtagtggagaccacggtactcaccggcataggcgagctctgcccagcggtggcgtcttcttccctgggcttggctaccggatgggggggcctcagcggacgaccccccgagggtcggccgggcagtgccagcgccgccccgagcaggagcgagaggcggcccggcagctcctcgtgccccctcgagagccgggcggccggcagggcgggaagcaggggggagaagtccaggcgcctccggggagcctcgggagggggtcgccggagaaggtgagagaagaaccttgcgaggctggaaagcgggctagaaaggaggccgaacagcttcggggcggcgggcgagtctgggagctgtgcaggcgggaaggactggggtggggagagagaaacaaaaccagcatacggttactgtggtgtccggccgcttagatggggctctttactacagaattttgaagcgttactttgggggtgcaagagaaggtcggtgaaagcagaaggaaaggcctatagttagattctttcccctcccactcctgtatttcctaactccgtgctacttgaagtgtggtccgtaggccagcagcttcgccaacacctaggagcttgttagaaataaagactcttgagccccacccagccaatgcatcggaatctgcatggtaacattcccaggggactaccatgcgcgctgaatgtgacatgcggtatgcagaagggtctgtgttcacatcgcctggttcttcagaatttggatgaaaatcttagttcacttttgtaactgttgctcttcccctcccttctctggtcttcccttgttccccctgccctttcccatctccctaagtgcccagggctctgcctgccagaggcacagagttggccttggctactagattctattgggattgttgtctatggaaggtccagatagtggctgaaggtggctgaagggcctcagaccctccacaggctggttggaaaaagggactggccagtgcggctgtaggtatgttgcgtggagctggggacaccgggattccatgttagggctgctactacaagtgaaccctctgcagacctcctttccaaactccatgtgtccttcttattcccgggaacaccggcctttccaccttccacttgttgcttaggagacctaagcaatgagatattttttttcttttggaaagtggagggaagcactagtttagaagtcagaaacccacggttctacactcaaccttgccactaacttaatggctaaccttgggaatgtctctttattttttgagttcatttataaaggggttgaactcagtggctttttaaggtcacctgccacgttcagactgtcatctttgagacgctcttagtttcttggtacactaacgtttagtgtagttacaaaccggaatgtagctcggccaatccaaacaccccctcatgccaaacaaaaaacaatttaatctgtctgtgaaaaacaagagcggtggttgccaaaaaaaatgaaggtggaggcgggaagcagcgaataaagtgctggggtggtgaggcgcgggaggcgagcgcgg

SEQ ID NO: 15104 - DNA, 1078 bp, Artificial sequence
  DNA replication origin
tgggacttgctaatgcggggctggagcagtggggctgcggccggggtggaggtcgcgccccgcgtggggcctcgggggtacccctagcacccgcggcggtggagtgcgccgccgctggagggaggcgagacgtgggattgcccggccgggtaaaaggagtgagggggcggggaggaggcagagcaaggggaggaagaggccgggagaagagggctagagcaaagaccgagagccggagaaaggcgaaaggcgcggtgagcaatcgccgacgtagagagggcagccctccgcgctgcaatattgagaaggcacccgcgggacgcatgcgcacggcggacggaggcgagccggccggggcttcctccccggccggcagggtggacggtgggctcgtgagtatcccagttcctcgaactctctttcttcgtctcgggctcgccctgaggcttcgtgctggaaagtggccgaggctgggaggggcgcgccgctcgtccggacctcagggtgtcgccgttgctgcggggcgggagccggtgcgagtcgggggttccttcccgcagtgcgagtttgggggagtggggctgcgagtgcgtccgcgtgcgaagaggggcatcgcgccaccaggatcaatatgtcccgggcctgccagggcgtccgcgattccacctctgcggcttcgcgtcggtgtcttggtggggaacgcgggagtctagtctttagaccctagaaatcgcattgaccacccgaagcgtatttcggaaagaccaggcgggtggaagcgtcggctttctcacgggatagggagaggacaaggaaggggttgggcgcccggggctggtggtttgagcgccgctgggaagggtaaggagacagagcctcctggaatcgtagcgcctccttttaggagaagtgcaaccagggcaggggcaccgaggggcagggtgaggaagtggacgccccacgcgtggaccctagaagaccgactaggtatgggcgttcactcggagcctctgttcacgctcttgaaaaccgaatgaacagagaagtgccctccacccttcgcctgcgccagggcagt

SEQ ID NO: 15105 - DNA, 1160 bp, Artificial sequence
  DNA replication origin
gcggtgttcgattgtcgctgcctggggaggaggagccggagccgccgccgccgccgccgccgccgcgggcttcgttcgtaaggaagggggcctaggcccgggcctgcggtggtgggggttgctgcgcgccgggggtcgctcctgctgtgtcttccgctccagcttcgcccacttccccttgccagcggggtgggcgcggagaagacctgccggagccatggaggacgaagtggtccgctttgccaagaagatggacaagatggtgcagaagaagaacgcggtgagcgcggcgagcggcgcgggccgggagggaggccgggccgcggtccggcccgagggggccgccccctccctccttctccctcccctccccctgcagcctcccgtctgggagccgggcccgccgcgcccgcgtccccggggagggtgtccgggcccggggcgtcgggtcccgcggcaacctgcgttaggacccgctcgctcttgtatttccagtccctgctcgctggtgccgtgtaataaacctaatcgatttagggattagggcacgctctccgttgactttaaactttcgtgctagtaaaaccttggcaatttagcttaggaattgaagcgtagaaagtcctcagaacttgaaagaatggagtcttccgtgatccgtggccaacatctagaaagagcatcaaatagaggcttgtgatcggtattagacatcgggctggtaaaatgtaaaacttctgtgtcttatttttgaagagggctgaacgtccgcctggttatctcaactgtgctacatgtttgcttagcgattaaaaaggtaaagtgtgccagtttcttggcgagttgctaaacgttttataaaaagcgggttttgtcctgtcgtaatgtacagaagagttaggactacagcacgcacactcaccggaatgctggtagagggatttggacaaattatattgttgggtattttctaagtggtttacagttaatactggtggcattttttttgttattgatgaatattcatgtaagcatatgcttttgtggtttgtaagaaatcctcatacgaccagtttctacagcttgcccatttgtgtggcactttcagtcccttgcttcagactcatctgttcttagctaaacatattttttcgagacgg

SEQ ID NO: 15106 - DNA, 956 bp, Artificial sequence
  DNA replication origin
acagacagtaacaatctgatctctcttttccccacatttccccgttttctattcgacaaaaccgccatcgtcatcatggcccgttctcaatgagctgttgggtacacctcccagacagggtggaggccgggcagaggggctcctcacttcccagacggggcggctgggcagaggcgccccccccacctcgcggacggggcggctggccggccgggggctgccccccccccacctcgcggacggggcggctggccggggtgggggctgcccccccacctaactgacggggcggctggccgggcggaggggctcctcacttgtcagacagggcggctggtcagagatgctcctcacctcccggacggggtgacggcggggcagagacactcctcagttcccagacggggtcgcggccaggcagaggcgctcctcacatcccagacggggcggcagggcagaggcgctccccacatcccagacgatgggcggccgggcagagacgctcctcacttcctagacgggatgacggccgggaagaggtgctcctcacttcccagactgggcagaggggctcctcacatcccagacgatgggcggcggggcagagacacttctcacttcctagatggggtggcggccgtgcagaggctgcaatctcggcactttgggaggccaaggcaggcagctgggaggtggaggttatagtgagccgagatcacgccactgcactccagcctgggcaacattgagcactgagtgagcgagactccgtctgcaatcccggcacctcgggatgccgaggctggcagatcactcgcggtcaggagctggagaccagcccggccaacacggcgaaaccctgtctcaaccaaaaaatacaaaaaccagtcaggcgtggcagtgcgcgccttcggcaggctgaggcaggagaatcaggcagggaggttgcagtgagc

SEQ ID NO: 15107 - DNA, 966 bp, Artificial sequence
  DNA replication origin
cgcctggccagccgccccgtctgggagggaggtggggggggtcagcctccgcccggccagccaccccgtctgggaggtgaggggcgcctctgcctggccgcccctactgggaagtgaggagcccctctgcccggccagccgccccgtccgggagggaggttggggggtcagccccccgcccggccagccgccccgtcggggagggaggtgggggggtcagcccccacgcccggccagccgccccgtccgggagggaggtgggggggtcagccccccgcccagccagccgccccgtccgggagggaggtgggggggtcagccccccgcccggccagccgccccgtccgggagggaggtggcgggggtcagccccccgcccggccagccgcctcgtccgggaggtgaggggcgcctctgcccggccgcccctactgggaagtgaggagcccctctgcccagccaccaccccgtctgggaggtgtgcccaacagctcattgagaacgggccaggatgacaatggcggctttgtggaatagaaaggcgggaaaggtggggaaaagattgagaaatcggatggttgccgtgtctgtgtagaaagaagtagacatgggagacttttcattttgttctgcactaagaaaaattcttctgccttgggatcctgttgatctgtgaccttacccccaaccctgtgctctctgaaacatgtgctgtgtccactcagggttaaatggattaagggcggtgcaagatgtgctttgttaaacagatgcttgaaggcagcatgctccttaagagtcatcaccaatccctaatctcaagtaatcagggacacaaacactgcggaaggccgcaggatcctctgcctaggaaaaccagagacctttgttcacttgtttatctgctgaccttccctccactattgtcccatgaccctgccaaatccccctctgtgagaaacaccc

SEQ ID NO: 15108 - DNA, 934 bp, Artificial sequence
  DNA replication origin
aacttgcattgtaaagacttgactcatcaaaccatatacagcaggtcctcgagtaatgccattttgttatatcgttgatgagaaaaaataatctattcctgcaggggccgctgtctgtgtgaaggttgcacggtctccccacatctgcggggagtttttgggttctctagtttcctaccatgtcccaaaggttcattggcgtgtctaaacggtcccagtatgagtgtgagtgtgagtgtgggggtgtgtgagtgtggaagtgtgtgggagtgtaggagtgtgttaatgtgggagtgtgagtgtgggagtgtgtgagtgagtgtgagtgtgggagtgagtgtgggtgtgggagtgtgtgagtgtgtgggagtgagtgtgagtgtgggagtgagggtgagagtgtgtgggagtgagagtgtggaagtgattgtaggtgtggaactgtgattgtgggagtgaggtgagtgtgggagtgtgtgggagtgagtgtgcgtgtgggagtgtgattgtgggagtgtgagcgtgggagtgagtgtgggtgtgggaatgagtgtgtgggagtgtagaagtgtgcgaatgtgggagtgtgcatgtgggtgtgggagtgagtgtgagtgtgggagtgagtatgggagtgagtgtgggagtaagagtgtgggagtggagaagtgtgtgtgaatgtgggagtgtgtatgtgggtgtgggagtgagtgtgagtgtgggagtgtgggagtgagtatgggagtgagtgtgagagtaggagtgtgggagggtagaagtgtgtgtgaatgtgcatgtgggtgtgggaatgagtgtggatgtaagtatgaatgagtgtgttgcagtgtgtgtgggagggtgactgtgggattgtgtgggagtgtgtgtgggttagagtgtgagagtgtgtggggagtgagtgggtgtgcgcctg

SEQ ID NO: 15109 - DNA, 1512 bp, Artificial sequence
  DNA replication origin
acaatccaggtgtgagtccaaaaaatgtacatatacagatttagccctgtacactttcttcatcctcatgctcttcctcacccagctcattattgggagaggtgcgcttgggagccaagaaggtggagaaaatgatggggaagaaaacgtggggtttccatattttattgatttatttacttattcatttattgagacagagtttccctcttgttgcccaggctggagtgcaatggcgcgatctcggctcgctgcaacctccgcctccccgattcaagcgattctcctgtctcagcctcccgagtagctgggattacagacgcatgccaccacgcctagctaatttttgtatttttagtagagacggggtttcatcatattggtcaggctggtctcaaactcctgacctcaggtgatccgcccgccttggtctcccaaagtgctgggattaccgtcgtgagccaccgcgcccggccgggtttccctatttttatttgcccttgttcttggggactgatcttggtctggtaagagaaatcaggtgaaagtacacaatcataggttggagtaggagcttcagattttgacgcccctccccctacttcttataacaccctccctgagatcataaattcacagtttacaaatttacaggggaggaattgtggtggctttccaagactagtcccttttacatactgtgacctagttagatctcatttcttctgatcattcgcttgtcttatatttcggggggcagtgtggagggcggcgacgtcgctgacccgcgcgcggtgtgtggagccttctatttcagtctcttcactttaatacgtggtgccccgggacgttatcagagccagccacagatgccacatgtaaagcagcaaacatccggagtggcttcctgcaagccttgcttttctcaacacaagagatttacgcagggggttgggggaaacaactttcacaagtaagagccgagtacaccgctcgcatagccgttcgggtgcgttagcactgcacggtccagggtcgcagggctcctggctactaattgcgctcacgtccccgggtccttgggccggacccgaggctctaaaggctgggcaaggaagcgactagcgcaccaagaagctgtgcccgttgccagttggggcctttggtcagcgggcgcagaaattaactcgggtaggtggcgaaccgtggggctgacctggaggaatcagagccacgcttatccgtgggcccctgagtgaccaggcaaaggctgggtgatttccggcaggcttttgtgttttcgatgctgggaaagcaggggctggaggaaggacactcaagtcgatcgggaaggacccgtgggcacctaggcagatccgggttggcgctggagagcaagtctgtgggggcgggggaggggagtgcgcgccgcaaaccctgggaaaactccaggctgcccgtggatgactagacaatggtatccctgaacaaagaacaacaataaggcctttg

SEQ ID NO: 15110 - DNA, 1271 bp, Artificial sequence
  DNA replication origin
cgtgggactcggaccacggcctgggcgtgggcctaacgacgcgggaccggcccgccctcgccgctccattggccacatctgtgcagaaaaggccccgcggcccaggggcgcccgcagtgtcactaggccggctgggggccctgggtacgctgtagaccagaccgcgacaggccagaacacgggcggcggcttcgggccgggagacccgcgcagccctcggggcatctcagtgcctcactccccaccccctcccccgggtcgggggaggcggcgcgtccggcggagggttgaggggagcggggcaggcctggagcgccatgagcagcccggatgcgggatacgccagtgacgaccagagccagacccagagcgcgctgcccgcggtgatggccgggctgggcccctgcccctgggccgagtcgctgagccccatcggggacatgaaggtgaagggcgaggcgccggcgaacagcggagcaccggccggggccgcgggccgagccaagggcgagtcccgtatccggcggccgatgaacgctttcatggtgtgggctaaggacgagcgcaagcggctggcgcagcagaatccagacctgcacaacgccgagttgagcaagatgctgggtgagtccgagtcgcagacccaggcggccgggcgcgctggcgcgaatcgctaggccgatttcttaaaccccaaactgttctttgcgagcctgacgcccaaaaccaggggtgtgtagcggccacgtcctttcttaaggctctgggttcccttcccgcttcccgccctccgaccctccaaagcagctttccgccttgctctccggctcccggattccccaggtggccgggggcgcgggtccaacggctctgggaaggcgacttcccggcacctccgggcggcgcgagagcacccttggccctgaactgggccggttgtgtccatccctcgaccccttccctagttaggtgtccttttctgtttttcgaacgaccgggtgatgggtgagcggaaagccgcttccaggagaccaaaagaaaggggtgcctttagaggacgggtgttccccaagggctcggactcaggagtcccagatctccctctttaacttcaccccggttgcgcaattcaaagtctgaggggggaggtgcgtccaggtggggccaggtggggcctggagcgggagcgcagccgataagccctgcgcccctctcccccttccttccactgtgcaggcaagtcgtggaaggcgctgacgctggcggagaag

SEQ ID NO: 15111 - DNA, 964 bp, Artificial sequence
  DNA replication origin
aagataagacacatacattccctgtcctaaaggagcctgtcatcctgtagaagggaaaggtgtatagacaaataattgtaatggtgtgttcaatgcaatgaaaagtataaaaactatcctttggcaaaaggcagagtggtggattccatgtaaaggggcatgggataaaggtaactatggctgacagtaactgagcattactatggaagaggaaggcctccagagagtgctgatgtgtgtgtgaggccttgaaggaggagagaacccaatgaagaaggtgagtgggagatgggatggggaaggtttttctgggttgaggttgggggatttggggatgagatggtggaggagctgagggggctcccttctgttttctttgtaaaatcagagtggggtgaaaacctgagagggcacagtgctgggtgttgggaggggcaggggcattggcaggggtgggcctgagaaaagcagtgagctctgttctgcaacattgaaggccctgataaaggtgagttcatagatcagcatccctcttcaggctcttgtgagcagaagctcccatgtaaacagagatgagactataggattcatccgaagctgtgctttcagcagcaggggtgaaggcagacaagagggccagagagtgttggtgagactggggttcgagagttccaatttccatatggaggaagtgagatctgaagagagcttgggaaaaagggagggagaagctgggatgacaggagaaagtatcagaggggaatttcagagacaagtaggtcagggtgaccaaaatgtgcaggatggactgctgagggggtgactgtcactggagttgtggagctctgggacgtggatgctgaaaccccccatggtggggaggggaagactgtgatcctctctgtacatggttcatgagatgcccaccagtgggtccacccagaggggaaggcaagtctagtgg

SEQ ID NO: 15112 - DNA, 755 bp, Artificial sequence
  DNA replication origin
ggccgctcctcccggcccttgggacccgccagggcagtcccccaacccccgcccgccgctcctctcggtcccggcccctcctccgggtccctcctcctccctcgcccctcccgagccagggtgggagcgacggcagctggaagagaagggatgaggtcatcctctccctcggagtcagctggtggaggagaggaagcgggaggagggagcgcgcgcgaggggaggagaggaatgtgcaggtccgaggagcgccgcggcggccgctgctgctcctgctgctggcggcggcggcggctcgggcggcagcagcgaagccgggacggcgaggagcgcgggcggcgggcaggggcgcgcgcggggcgccgcgagcagcttggctccgcgcaggcagccaggcggcgctcctgccggccccaggcgcgccgctagcccggcccagcgcccagcccggcgggcggcgggcggcggcggacggcaggcgagccgacgcaggagcaggaggagggggagccgcaccgcctgggagggaagccggggcgaggcgaggaggtggcgggaggaggagacagcggggaaaggtgtcagataaaggagggctctcctccggtgtggaggcatcatggccgctaaatcagacgggaggctgaaaatgaagaaaagcagcgacgtggcgttcaccccgctgcagaactcggaccactcgggctcggtgcagggattggctccaggcttgccgtcggggtcgggagccgagg

SEQ ID NO: 15113 - DNA, 1286 bp, Artificial sequence
  DNA replication origin
cggcgggcggcgggcggcggcggacggcaggcgagccgacgcaggagcaggaggagggggagccgcaccgcctgggagggaagccggggcgaggcgaggaggtggcgggaggaggagacagcggggaaaggtgtcagataaaggagggctctcctccggtgtggaggcatcatggccgctaaatcagacgggaggctgaaaatgaagaaaagcagcgacgtggcgttcaccccgctgcagaactcggaccactcgggctcggtgcagggattggctccaggcttgccgtcggggtcgggagccgaggacgaggaggcggccgggggcggctgctgcccggacggcggcggctgctcgcgctgctgctgctgctgcgccgggagtggcggctccgcgggctcgggcggctccggcggcgtcgccggcccgggcggcggcggggcgggctcggctgcgctgtgcctgcgcctgggcagggagcagcggcgctactcactgtgggactgcctctggatcctggccgccgtggccgtgtacttcgcggacgtgggcacagacgtctggctcgccgtggactactacctgcgcggccagcgctggtggttcgggctcacgctcttcttcgtggtgctcggctctctgtcggtgcaagtgttcagcttccgctggtttgtgcacgatttcagcaccgaggacagcgccacggccgctgctgcctccagctgcccgcagcctggagccgattgcaagacggtggtcggcggtgggtctgcagccggggaaggcgaggctcgtccttccacgccgcaaaggcaagcatctaacgccagcaagagcaacatcgccgcggccaacagcggcagcaacagcagcggggctacccgggccagtggcaagcacaggtctgcgtcctgctccttctgcatctggctcctgcagtcactcatccacatcttgcagctcgggcaaatctggaggtactgtaatgggtgggggaaaagggaggcttgctgctgctactacatccccactgctttgcttttgcacggaaatctttcagggttgctttggtagtaaccctagtcacactcttccagttttttgggtttcttttgaactggggcttgcatttttaaaatttgcaatctcagtctagggtgggagggaagtgagaagcaagggaaggacagcaaagtggtttcgatcacctcatcccttctgtcttcccactctgccttactggcttcttgctcttggcatgccacaacccccctccccgcttcccc

SEQ ID NO: 15114 - DNA, 1180 bp, Artificial sequence
  DNA replication origin
ggaaaagctacaagtcttctttctttttttgtttcctactgagtttccacttttagcgaggaaggctatagtattttgacctattgcccaattgagccagccccctctagcaccaaagtttatgaattccgtgttgaacttcaggttggtaaaattactgttcttactgactgagggggaggaaggatggaggtagtctttgcgaagagggccacagattcctgctgcctttacctgaagctctataacattttcaagaacagccaggcgggccagctggctgagaagatggtgtctggagcccgggccgccgccgcagccgcagccgctgcggccgccgcggagcgaacccggggtgtcccgggtgtgcggtccagggccaggcccgggccatgagcgcgcagccctcgagtccccgagccgcggagcccgcccagcgtccctccccatggcgcggatcacagactacttcctgctggtggcattcaggccgcacccgcgcgggagtgggaaaggccagggccagattctgcagttcttcccggagaaggactgggaggccaacccattcccccagctgttttgccagtccagcgggtggcagatgtgtcccgagaggaatccaccgaccttctttgttgctgtcctcaccgacatcaactccgggcgccactactgtgctgcttgaccttctgggagcaggaaacgacacgcgctaaggatgccactgagtgggaggaagaggaggatgagggaggccttacgcacctgtcgcccacagagcctgcccatctgcccagatgtttgccccaaagacgctggtacctgtgtcgcgacttgaccatgcggaggtgttcaggaacagcctcggcctcatctatgccgtccacgtggagggcctgaatgtgttcccagggaacgtaattgggaacctgctgacgtgcaccgtgcccctggctgggggctagtagaggacgatttatttgggggctggtgaccggcaggtcatccagactccactggccgactccctgcccatcagcagctgcagcgtggcctgctcttccgccagctgggcatcaccaacgtactgtctttggtctgtgccaccctcatggagcacgaggttctcttcctgtcccggagctaccagcagctcaccgatgcctgcaggagcctc

SEQ ID NO: 15115 - DNA, 1454 bp, Artificial sequence
  DNA replication origin
tgcggagcctcagtccccgcgccctggctcccccgggcccggtcacccgtcggctgaagacatctaagagccttcgccgccggagcccagaggcggtgcggccaggaagccgccgcgggccgcgccgatgcccccggccccgagtctaccctgcgcccgggactccggctggtggcacagccgcggcccctgcacccactgcccgcgtgcccgcgcccacccctgggctcgcgcagaggactcacccgctcgcggtgaaagtttcggggcggcggagctccacggtgacttgagttcagagtggggggcgcgacggggcggcccagcaggacctgcgtatggggaggctgctggccgggaacgctggacgcgcggcgaggggctgctggcgcggggccgggggtggcgcggccgccccgcttgccgcgggctggaggctgcagcgcgtctggcccggaggcgccacggccggggagcgagcggcagcgcggcccggcgcggcgggagaggaactggctgtctctgggctcggccgagaggtcccagctacttcctggtgctcggatttgcatattgagcccggagggcggggaagtgaccgtttggtccctgcccaaggtttgggtgtttggtgtggccgtcgcgcagggctttgaaggcacagaaacctggcgactcagtctgcagctccggggagtggagcagcccgggccagccttctcctgtagggacggacggaaggatctccagaggagcctgggcttcgcaggcacatcgactacacctctcgcgtctcctttcctttccttccgacccatccccaaggtattattaggaagggggtgctcccaggagcggaggaggtgcgctctgatcccttccaacattaggggttctctagagaaaggatgcgatatgccgaggtgatgctcggggtctcgctgagttcttaataatcattacaaagtaagttccttaagggtgtacaggaggctgttcagggcattgatgggggaggggatgacgtagagtcaaatggcccggcaagttctccgtttctcaaagcctcagtttcctcccaggacaatggatgtgaggatgcctatctcgtgtacctttctgtacagggcccgcactgcccgcatgcaggaatgctggcgttatttcattcctactacagctgcgtcccagcatgtagggcagtgcttgcacgtagcagctggtgcctaaccagtgtttgctgaaagaatgtgtgaccgcgtgctcaagctcatgttcaactcaataaatgccacttacaaatccaagatgtaagattaggctcgggcaccgtggatacccacttcttctaagccagattctgttcactgggatctcagcattgcattaatagcaaacatttacagagggcctgatgggccagacactgcccaaagcacttcctttctctcatt

SEQ ID NO: 15116 - DNA, 1026 bp, Artificial sequence
  DNA replication origin
caggggtgggcgcgggcacgcgggcagtgggtgcaggggccgcggctgtgccaccagccggagtcccgggcgcagggtagactcggggccgggggcatcggcgcggcccgcggcggcttcctggccgcaccgcctctgggctccggcggcgaaggctcttagatgtcttcagccgacgggtgaccgggcccgggggagccagggcgcggggactgaggctccgcaggtgtccgccgcggagccgcgcaggggagcggtgggaggtgcgggcgcgggggcgggctcaccgcgtgtccttcccggtgagggcccgagggccggctgctgtccctgctccggccgcttctcgcacacagtggggaagccgctgcccttgcggagcgggcgcgcggcggggatactggagaggactcctcggattgtgcaatctgatctcccctctggaccctgggtctcctggcagtgggagatggggctcggccggcgccctctcgaggcccgcggacagttgccctccctggtggccccgggcaggagcgtgacgtcgaggggctgcagcggaggctggaactcaccctcccgctgcggcgcctctcggcctgccgaggagcagtccggtgcttttgccggctgagaggaagcgagagttattttaagaattcaggggttgcctttccttcgccttgggggaagggcgtaagagtcagttcccactttcctgcattctctgggcccatggtggcatcttttgcttgcggtgcattcgtaactttccaacagcctgcctgtcatgtggattagcggttgtgtttttgtatatccgagtgtgttaattatcccaaattcgcccttcttcgccagctcagaatctaggccttgcacttttctggctgtatatttaggggaccgattattgaaattccctgtttgagtttcttcatctttgagagagcatatatacctcaggggctgtttagtacacacaaagcccctagtacgtaccaagcatttcataaacgatgttac

SEQ ID NO: 15117 - DNA, 1755 bp, Artificial sequence
  DNA replication origin
ccagatttaattaaggatctcaaaatgaaatctcaccctggatttagggtgggccctaaatagaaccactggtatctttatgagagaaggcagaggaaggtcagaggccaccggaagacagaggtgggaagaggagcagtgcggtcaacaagacatggaatggaacatcggagctgccagaagctggaagaggtacggaaggattcttcccaagaacctggaagcacagccctgcctataccttcattccagacttctggcctccaggactgcaggaaaatacatttctattgttttaagcgccctgacagccccaggaaattaatacaatgctttcaatggaatcacttaggagacttagtgtggagaaaaaataggttgaaagagtgagttctgggacattgcaaggtttaaccactgggcaaatgagaagctggctggtgagggggaaggaaaagcagagaacagtgtcccagaagccaaatgaggaaaacgtgccatgagggagtgagactgacaatagcagaccctgctggtgggcagctaggaagatgctgagagatgggtgccctttggatgtagtgtcctgagggtcactgctgacttgtgctgctggggtcgaggggtgggaggttcaagagagggcgggtggggaagaactgggggaaactgagcatagttcctaaaacacttctgttgtcagggggaggagacacctggaggctgaggtagctggagagggatgtaggggaaagtgaaggctttactttgattcctatgggaagtgcagaagtgagggaaaacgctaatgcggaatttctagaacagtgtcttgaaacagcaagagagcacaagacctgatgcatgtcagggctcttggctggcagcttctcttgtctcagggaaagagacagcagggaatccacagagagaggcaagtaggggaaggtttgagggcagagaaagggaaggtggggcattgtttctagcaggcagtgagagggagcagactgggcacatgtcggggttcatgaggctcctcaggctggtgctcttgaactggaaatgcagaaagctgctaggcatctcagtgcaggtcacagctgttgtgtggacatgagggcaaaataggtgaagggtcggacttccatagggctggcattttaccaggtgcgtgtgacatgggggaggggcaatgagtgtctccaagctaggggaggagagaagagaagcaggagcggaggggcggtagggacaggcaggttcaagggacgggaagtgctggtgacaggctgaggctgtaggggctggagcggctgcaggagggtgagtggacagaagggaggcaatggctgaagtggaaacgatcaaatgaagcaatgagcagcagaattggtcagcctgcagagtggctcgaggggagaggacagagtcttggaggggaggaagtcaagacacagagaagccagcatttgaaggtggggatggctacaaatgatggaatgatgacagggctgtgctgggaacagcaagccagccggagctgaccacagcaaggaggagtgttcggggatccgaggaccacagcagtgaagtgagtcagactggcacagtctgatggcgtggactccaaagctgggggtcctgggtgggggaggtagaaggtctggaaatggaaaagaagatcaagccgtacagctccttgtaatgcatcaaaaatacctcagcacaccattggttccattgacaatacta

SEQ ID NO: 15118 - DNA, 1065 bp, Artificial sequence
  DNA replication origin
agaagtagacatgggagacttttcattttgttctgtactaagaaaaattcttctgccttgggatcctgttgatctgtgaccttacccccaaccctgtgctctctgaaacatgtgctgtgtccactcagggttaaatggattaagggcggtgcaagatgtgctttgttaaacagatgcttgaaggcagcatgctcgttaagagtcatcaccaggccgggcgcggtggctcacgcttgtaatcccaacactttgggaggccgaggtgggcggatcacaaggtcaggagatcgagaccatcctggctaacacggtgaaaccccgtctctactaaaaatacaaaaaaaattagccgggcgtgatggtgggcgcctgtagtcccagctactcgggaggctgaggcaggagaatggcatgaacccggaaggcggagcttgcagtgagccgagattgcgccactgcactcccgcctgggccacagagcgagactccgtctcaaaaaaaaaaaaaaaaaaaaaaaaaaaagagtcatcaccactccctgatcttaagtacccaggggcacaaacactgcggaaggccgcagggtcctctgcctaggaaaaccagagacctttgttcacttgtttatctgctgacattccctccactattgtcctatgaccctgccaaatccccctctgcgagaaacacccaagaatgatcaataaaaaaataaaaaataaataaaaaaaagaaatacctgagactgggtggtttaaaaagaaaaggtttaattggctcacagttcctcaggctgtacaggaagcatgatgctggcaactactcagcttctggagaggcctcaggaaacacacaatcatggtagaggcgaaggggaagcagggatgtcttaaatgggtagagcaagagcaagagagagactggggggggcaggtggtgctacatacttttaaacaaccagttctcatgatagctcactcatttcctgtcatgagaacagcaccgagaggatggtgctaaatcattcacagaggatccacccctatgattcaatcacctccaacc

SEQ ID NO: 15119 - DNA, 892 bp, Artificial sequence
  DNA replication origin
cgccctgtctgagaagtgaggagcccctccgtccggcagccaccccgtctgggaagtgaggagcgtctccacccggcagccaccccgtccgggagggaggtgggggtcagcccctgccaggccagccgccccgtccgggagggaggtgggggggtcagcccccagcccggccagccgccccgtcagggaggtgaggggcgcctctgcccggccgcccctactgggaagtgaggagcccctctgcccggccagctgccccgtccaggagggaggtgggggggtcagcccccaacccggccagccgccccgtccgggagggaggtggggtcagccccccacccggccagccgccccgtccgggagggaggtggggggtcagccccccgccgggccagcctccccgtccgggagggaggtgggggggtcagccccccgcccggccagccgccccctccgggaggtgaggggcgcctctgcccggccacccctactgggaagtgaggagcccctctgcccggccaccaccccttctgggaggtgtacccaacagctcattgagaacgggccatgatgacaatggtggttttgtggaatagaaaggcgggaaaggtggggaaaagattgagaaatcggatggttgccgtgtctgtgtagagagaagtagacatgggagacttttcattttgttctgtactaagaaaaattcttctgccttgggatcctgttgatctgtgaccttacccccaaccctgtgctctctgaaacatgtgctgtgtccactcagggttaaatggattaagggcggtgcaagatgtgctttgttaaacagatgcttgaaggcagcatgctcgttaagagtcatcaccaggccgggcgcggtggctcacgcttg

SEQ ID NO: 15120 - DNA, 1458 bp, Artificial sequence
  DNA replication origin
ttgggtacacctcccagaaggggtggtggccgggcagaggggctcctcacttcccagtaggggtggccgggcagaggcgcccctcacctcccggagggggcggctggccgggcggggggctgacccccccacctccctcccggacggggaggctggcccggcggggggctgaccccccacctccctcccggacggggcggctggccgggtggggggctgaccccacctccctcccggacggggcggctggccgggttgggggctgacccccccacctccctcctggacggggcagctggccgggcagaggggctcctcacttcccagtaggggcggccgggcagaggcgcccctcacctccctgacggggcggctggccgggctgggggctgacccccccacctccctcccggacggggcggctggcctggcaggggctgacccccacctccctcccggacggggtggctgccgggtggagacgctcctcacttcccagacggggtggctgccggacggaggggctcctcacttctcagacagggcggctgccaggcagagggtctcctcacttctcagatgaggtggccgggcagagacgctcctcacctcccagatggggtcgcggccgggcagaggcgctcctcacatcccagacggggcggcggggcagaggcgctccccacatcccagaccatgggtggccgggcagagacgctcctcacttcctagatgggatggcggcggggaagaggcgctcctcacttcctagatgggatggcggccaggcagagacgctcctcactttccagactgggcagccaggcagaggggctcctcacatcccagacgatgggcggccgggcagagacgctcctcacttcctagatgggatggcggcggggaagaggcgctcctcacttcctaggtgggatggcggccgggcagagacgttcctcactttccagactgggcagccaggcagaggggctcctcacatcccagacaatgagcggccaggcagagacgctcctaacttcccagacggggtggcggccgggcagaggctgcaatctcggctctttgggaggccaaggcaggcggctgggaggtggaggttgtagcgagccgagatcacgccactgcactccagcctgggcaccattgagcactgagtgaacgagactccgtctgcaatcccggcacctggggaggccgaggctggcggatcactcgcggttaggagctggagaccagcccggccaacacagcgaaaccccgtctccaccaaaaaaacacgacaaccagtcaggcgtggcggcgcgcgcctgcaatcgcaggcactgggcaggctgaggcaggagaatcaggcagggaggttgcagtgagccgagatggcagcagtacagtccagctttggctcggcatcagagggagactgtggaaagagagagagag

SEQ ID NO: 15121 - DNA, 1795 bp, Artificial sequence
  DNA replication origin
caacttgctgcccccgctccccggcggcagcccgcccaatcggcgcgcgccgccgccagactgacagccgcgcggggccctgggccgcaggggcggtcgggcctcgccccgcccccgcctggcgaaaggagggccgaggcgggaggagtgggcggggcggtgagcgcgaccccgccccctcttcccccgccccaccgcgccccccagccgcggcccgtctcttaacacttcggcttgacgggcggcgtcgcggcccaatgggcgggccaactcccgccagcggcggctccgagtggccagctctcgggcggagcgcgcgcggggggcgggcgcagcggcgggcggggtttgggggcgggccgacgggaggcgggggcggtggccgaacaggcagggggaggcagcggtgggcgcgacgtcggcggcggcggcggcggcggcggcggcagctgcaagttgggctgcaggggcagcgcatacactacaatggctgctggaaagaggcgtaaggaaacaatttccaggcccgccgcgtccagcccgaaatatgagaaaaaaattattagaaattccgcgggcggtgtagaggcggcggacgggccggagggaggatgttaaagccccgcggtgagttctccgggggtccggggcggcggcgaggcgtttagcgggagaaatatcagggttatttaaattatgggactagccgagggggcagaggagcagcggcggcggcaggaggaggaaaagtttgtgctactctcagcccctgctcaggaccccagagagaaaaataataataaaaaataaaataaaataattacgcggggctgcgaggactcccgaagtcgcttctgacagggcagggggcgatgcggctggggacccgaaggtgaggtcggtgggaaaaaaaaaaaaacctttattcagggtctggaaagtttgaaaagttttcctcctcctcctcctcctcctcctctctggtgctgtgaatattgtgacagcggcagcggcagcagcgagagcggaagacattagagacccgaaaaataagggaaaaattaatataaattcagttttgagagtaaactctccgcattttccaccaaaacatcccgggggaaggtcgcttcccaaagggcctggcggaaacccgcagtcggcaatatttggggggcactttgagtgacttggggtaactttgcccctttttcaaaagaggtttttcttttctggagaaatgaatttgtttttgccctttcctcaggtgggcaagccggggtcggggtgcggggtctgcagggaggtgtgagcccggggtgtgtggctgcgagggggggtagggggagggggtgctaaatgaaagcaggagatcggcacagagcagggacagcttgttgtcagtatcataaacaaccaaaatggagggagaactcaggcatataaccaaataaaaatttttaaaaaatcgcaaaaaatccctaaaaatccgggatgctcccccttttctcgctaaaggtaaaagtatgtaccgcctttcccctgaagtccattttgactttgcagggaccaaggagttaatatttatttattttttaaaactttcgaagggcaaaagccttttataactcaaccgacaatgagaaaacgtgaaaatccgatgcaagagaagcagggggagcgaggggggaggtggtagtgcagaaactgctaaacttattggtaatgtggactgatctcagataagataaacactatatttgctattttataactctcttttaatgatctttgc

SEQ ID NO: 15122 - DNA, 1086 bp, Artificial sequence
  DNA replication origin
tttccttacgcctctttccagcagccattgtagtgtatgcgctgcccctgcagcccaacttgcagctgccgccgccgccgccgccgccgccgccgacgtcgcgcccaccgctgcctccccctgcctgttcggccaccgcccccgcctcccgtcggcccgcccccaaaccccgcccgccgctgcgcccgccccccgcgcgcgctccgcccgagagctggccactcggagccgccgctggcgggagttggcccgcccattgggccgcgacgccgcccgtcaagccgaagtgttaagagacgggccgcggctggggggcgcggtggggcgggggaagagggggcggggtcgcgctcaccgccccgcccactcctcccgcctcggccctcctttcgccaggcgggggcggggcgaggcccgaccgcccctgcggcccagggccccgcgcggctgtcagtctggcggcggcgcgcgccgattgggcgggctgccgccggggagcgggggcagcaagttgggatgcgcgctacttaaggtcctgctgcgtgagccattgacgtgtttggagctggagacggcctgggtgctggcgaagcggaggccggaggtgagtggttcccccgccctacctccgaagcggccgcagaaaagcggggagagaggggtgcccttgggccgtagcggggcccgaatgcacttctgcggcgcggaggcgctcccgccaggcttcgccgcagcgcggacctcttcccgttgctcttcctcccgccacacgggtctgttcgctccgggggcgaggaagatgacctctgcctagtccgggcaaccccagctcttcttccactctcctgtgtagcctctgaagcgcagttaccggccccacccccagttccctgcgttttcctcgccccttgtctctctcggcatggtctcggcacagcaaggtgtgttcacctgtgcgcgccgtccaggatcagatgctgacgggctacaccgcggaaggcggcgaggcctcgggttcgcccttcgtttctccttgccctgcgcgcccacctccggcaggccacccttgacttcttgcccccttcc

SEQ ID NO: 15123 - DNA, 1002 bp, Artificial sequence
  DNA replication origin
ccgccccatctgggatgtgaggagcccctccgcccagcagccaccccgtctgggaagtgaggagcgtctccgcccggcagccacctcgtccgggagggaggtggggggatcagccccccgcccagccagccgccccgtccaggaggtgaggggcgcctctgcctggccgcccctactgggaagtgaggagcccccctgcccggccagccgccctgtccaggagggaggtgggggggtcagccccccacccagccagctgccctgtccgggagggaggtgggggggtcagccccccgcccggccagccgacccatctgggaagtgaggggcgcctctgcctggctgccgcccctactgggaagtgaggagcccctctgcccggccagctgccccgtccaggagggaggtggggggggtcagccccccgtccagccagacgccccatccgggaggttaggggcgcctctgcccggccgcacctactgggaagtgaggagcccctctgcccggccaccaccccgtctgggaggtgtacccaacagctcattgagaacgggccatgatgacaatggcggttttgtggaatagaatggggggaaaggtggggaaaagattgagaaatcggatggttgccgtgtctgtgtagagagaagtagacatgggagacttttcattttgttctgtactaagaaaaattcttctgccttgggatcctgttgatcggtgaccttacccccaaccctgtgctctctgaaacatgtgctgtgtccactcagggttgaatggattaagggcggtgcaagatgtgctttgttaaacagatgcttgaaggcagcatgctcgttaagagtcatcaccactccctaatctcaagtacccagggacacaaacactgcagaaggccacagggtcctctgcctaggaaaaccagagacctttgttcacttgtttatctgctgaccttccctccactattgtcctgtgaccctgccaaatccccct

SEQ ID NO: 15124 - DNA, 1080 bp, Artificial sequence
  DNA replication origin
tggccgggcagaggggctcctcacttcccagtaggtgcggccgggcagaggcgcccctaacctcccggatggggcgtctggctggacggggggctgaccccccccacctccctcctggacggggcagctggccgggcagaggggctcctcacttcccagtaggggcggcagccaggcagaggcgcccctcacttcccagatgggtcggctggccgggcggggggctgacccccccacctccctcccggacagggcagctggctgggtggggggctgacccccccacctccctcctggacagggcggctggccgggcaggggggctcctcacttcccagtaggggcggccaggcagaggcgcccctcacctcctggacggggcggctggctgggcggggggctgatccccccacctccctcccggacgaggtggctgccgggcggagacgctcctcacttcccagacggggtggctgctgggcggaggggctcctcacatcccagatggggcggcagggcagaggtgctccccacatctcagacgatgggcggccgggcagagacgctcctcacttcccagatgtgatggcggctgggaagaggcgctcctcacttcctagatgggatggcggccgggcggagacgctcctcacttcccagacggggtggcggccgggcagaggctgcaatcttggcactttgggaggccaaggcaggctgctgggaggtggaggttgtagcgagccgagatcacgccactgcactccagcctgggcaccattgagcaccgagtgaacgagactccatctgcaatcccggcacctcgggaggccgaggctggcggatcactcgcggttaggagctggagaccagcccggccaacacagcaaaaccccgtctccaccaaaaaaatacgaaaaccagtcaggcgtggcggcgcgcgcctgcaatcgcaggcactcggcaagctgaggcaggagaatcaggcagggaggttgcagtgagccgagatggcagcagtaccgtccagcttcggctcggcatcagagggagaccgtggaaagagagggagagggagac

SEQ ID NO: 15125 - DNA, 1439 bp, Artificial sequence
  DNA replication origin
ctgcaatcttggcactttgggaggccaaggcaggctgctgggaggtggaggttgtagcgagccgagatcacgccactgcactccagcctgggcaccattgagcaccgagtgaacgagactccatctgcaatcccggcacctcgggaggccgaggctggcggatcactcgcggttaggagctggagaccagcccggccaacacagcaaaaccccgtctccaccaaaaaaatacgaaaaccagtcaggcgtggcggcgcgcgcctgcaatcgcaggcactcggcaagctgaggcaggagaatcaggcagggaggttgcagtgagccgagatggcagcagtaccgtccagcttcggctcggcatcagagggagaccgtggaaagagagggagagggagaccgtggggagagggagagggagagggagagcccaaattgttacctttgaaaaagtgaatatagtattccttgcttttcacatttaatatatgacatgattttattggtttgagaaggggtcttgctatgttgtgaggctggactcaaactcctgggcttaagtgtgatccttccacctcaggctcccaagtagctgagattacaggctcacaccattgtacccagatcacgtttaatacattcttgaattgctgggaaagatggcagaataggcacagctccagcctgtagctcccagcaagaccaatgcagaaggcaggtgatttctatatttccaactgaggtaccctcttcatctcattgggactggttaggcagtggatgcagcccatggagggcgagcagaagcagggtggggtgtcaccttgcccaggaagtgcaaggagcggggtaggggggtctccttttcccagccaagggaggctgtgagggactgtgctatatagcccagatactacactttccccatggcttttgcagtccacagaccaggagattctctcatgtgtttacaccaccagggccctggtttcaagcataaaactgggcagctgttcaggcagacactgagctagcacaggagtttccagtggtgcctggaaccccagtgagacagagctgttgactcccctggaaagggtgctgaagccagtgagccaagtggtctttctcagcgggtcccactcccatggagtcgaccaaactaagaaccactggcttgaaattctcactgtcagcacagaagtctaaagttgacctggtacaattaagcttggtgggggagggggacatccaccattactgaggcttgagtaggcagtttttccctgacaacactaaggaggcctggaagtttggactgggcagaactcaacacagcacagcaaagtggctgtggccagactgcctctctagattcctcctcaatgggcagggcatctccaaaagaaagcagcagcccccgtcaggggcttaaagataaa

SEQ ID NO: 15126 - DNA, 838 bp, Artificial sequence
  DNA replication origin
cgcgtactgttgcggaaactctgtctcacaaggtgcgcaacactcgccgcgcgcaacactcaccaggaagttgatgtcggccgggcgcactaggcggtagctgcacgtcgcgcaatcctggctgcattcggcccgcacggtcgccaggagcccggggccgagcaacagcagccaagtgcaaagtgtcaggaaccgcgccatggactgcgaggagagagggacgcgtgcttcgagcctgcctgggcgcagaacggggtccctcggcaggaccctcgccgcgacagcctcagcaggggatcgtcgagcaaaagcccgcaggaatgctcctttctggggccccgccctcccggccgacagcttttaggtagacgtggaggcgactcagatcgcctcgcggttcccgggatggcgcggtcgcccccaacgcgaggctgcctggggcacccggctcttttcctgggcgtccgcggcccagggcaagattccggagagaacgccgcagaccaggggcgagagagcgggagccgggggaggcaggacattgactggggtcacaaagaagaaccagggaacgctgttggggaacccatgcaatgaaatgtgaagggaaagagggcgggcagacgtccccaaacccgctcagcaaagacaagcttcgggcaaattcactcacgttgacgctgttcggatggagcaggccaattggaaaagccgggttcagacacgactctagagggaagagaagaaggcaagtgtgaggagggcgggcgtcggggagaagcgggcccgggtgtgctggcggacgtagggcctcaccgtcgcggtcctcagcgtctct

SEQ ID NO: 15127 - DNA, 1625 bp, Artificial sequence
  DNA replication origin
tgcaatgaaatgtgaagggaaagagggcgggcagacgtccccaaacccgctcagcaaagacaagcttcgggcaaattcactcacgttgacgctgttcggatggagcaggccaattggaaaagccgggttcagacacgactctagagggaagagaagaaggcaagtgtgaggagggcgggcgtcggggagaagcgggcccgggtgtgctggcggacgtagggcctcaccgtcgcggtcctcagcgtctctgcggggtcacgggccaggctgcggggctctgagcgcctgcctcgccgtcccggggcttaacggctgctggagccactttataattagccccaaaccgaaggaggcgcgcgcgccccaatcgccggcgggctgcagctgacgcaggccctacgccagccccgcgccgacgccttcgcgggaggggtcggtcccccagcacccgcgcgccgctccccccgccgagctcgggtgggggccacagggggcgctcggtggctccccacacggccaggtgacaaacccaaggcagttaggaagtttggggagagtgagataggatcaagtttctccgcataaagtcactgaaattgcaccgtgggatgcgggctccagggagggaagcgaggtgggggcgtttggaaggatagatggactggcttagacttctggaatgtgctggagacccagcgggccggtgaacctgcccctttcccgcctcctccctgggccccctcgcgggtccccgtgggcaccaagcacagccgtccggaatgtcgtcatttattgaccaacctgtcccccacacttgactccgagttccttactgcagcatctaacagcgtcaaggtgcgcagtttaggcgctcaattaatggttacaggaactgaacgattgaaagtttctgggaatcttaaaatctcaggacagaattttcacctttccagttagagacccttggccaagcgtagaagcaggtaaaccctcaggttccgggactgcgcgcttttcagccactgtgggagaggatccgtgtttaaccagctccccggggctcccaagtcgaagacctactgccttgagagcgctgtccagggtgtccgggggtgttggatcagtgagaggggggtgccggggcgggtgtaatgtcagcgcgccaggagtgtggtggggagggagggatgagggacaccctacccgggacgccggggcttggaacctcttctccaccgggagggggccgagggcacactgtggaggctggtactgtccattaagacacgctttcccgcttcctggctctgcaaaagattgctaagcggcaagctgcttacattgcctgaggcctcagtttccctatttgaaaaataggaacagaggtaatatgccattcataaggttctggagagaatcaaatgaaatagtggacgaaatctcttagccttgtgcctggcactatagcaagccctcaaaacatcttctaaccatccgtcatccgtccgtccacctttccatctgtgaccattgtctgcttaccttatagctaccatcgatgtatccaatccacctatgcatctatgtctcctagacctagggggaaaccataaacagttcctggg

SEQ ID NO: 15128 - DNA, 1150 bp, Artificial sequence
  DNA replication origin
ttagaattaagatgaatttgtttttgtaaaatcccagaatataattaataaaaatggtaagtgtcttctcattccccttcataagtatgatgccaggaaacgacatttgcaatctcatgctggggaaagacactgtcatgggagagggagaacactgggcaggaacagaatggggaggaggagggagggcaatggtgctagtaaaattcccctgcatgggaataatgtacttggcacagcctggcgttctcataataaaaagaataactatcattctcctttccccatgaggcaaaacagatgctgtctctatgacgaagtgctcactcttcagtggaacagccatttccacagccaaatgtctcaacagcaaactggaattcctaagccaggttccccattctgtgcggcacacccctgaagcaggtggagactgtgttcacctcacagtggcagctggaatatgagcgtgctcgggggtggcagttgcagagggagggaggaagggagagaaaggaggagactgagggagagaaagagagaaagacacagagagaaggagagagagagagggagagacagcaggagagagagggcggccagagaagcaagcactgtcacatgcacacacacacacacacacacacacacacacatgcagagagagaaagggagggagagacagaggggcagggagagagggagagacagtggaggggtgggacagagaagcacacacacacacagaggcagagagagggagagagatagaaagagagaggcagacacagaggcagagagagagggagagacagtgcagcggggagcagagaagcacaaacagacacacagaggcagagatagaaaggcagacagaaggagaggaaaagacaagggaggagagagagagggagaggcagagggagagagaggcagagatgggagaaagagacagagaggcagaggaggagagagagagagagagggagaaagcggggagaggcagggagagagggagagagagagggaagagaggagacaaaggcagacagagagaggcagagagagagggagagacagtggcggggcagagaagcaccaacatacacagaggcagagagagatgggggtagggtgggggagagtggtg

SEQ ID NO: 15129 - DNA, 1051 bp, Artificial sequence
  DNA replication origin
cgcaagtccacggtgcccccatcggccgcggccgcgggccccgccgcgccgccgccaggctcgccgcccaggccgaagaggctgaagcggccggccaagaagcccgagtagaggtggtagagcacgccgagccccagcaggcaaaacactgccacccccagtggggaaaggcggatgcccatgggggccatggcgtgggaagccgggcgctccgggctgcggctctcacaggcctccagcgcccgccgccgccgccgccgcagccgccgcgctccgggccaggcgccgcgcgggctacactggcgcccgctccccggccccggtgcgccccatcactccctcccaggaaaggccgagttgcgccgcgaagaccaccaacgccgccccgcgcgcctgactcgccaggcagcgcgctctaggttcttccgccggccggctggtccgacttccacgttagcctacggccgcgaggtgaaaggggagcgtgggtgtgtatccgggttacgcgacggggcggggcgagggcgagggcgaggggcggggagagctgggcacctccccttggggcggggcggggcgggacaggaggcgctggactgagctgccttccttggtctgggtgggaaggtattcctggaagtggcgagcagcaatccgcacaggacagtgtgctgtgctgagtgccttgtgggtgtttaaattaaatatcccattgtacgactatggctggctgtaataaacccacagtaacagtctagtcttctcatcactctcagattattgaggaatggaggaaaacacaataaaccattttaaaagattgatttgcaagcttttttagccagcgggggtgtagacagcctgtacctttaagtcgcttctccgcgctcttcccggcaggacggggaactgggcggtgaggggaagaattgtacttggctcttcattctgttgacatctttgtcgtgccctaaatgcttatgtgtgtatagagtttctctcctccacctgccagaataaaccatcctcgaagcagctgaaaaacatgcct

SEQ ID NO: 15130 - DNA, 1306 bp, Artificial sequence
  DNA replication origin
cagaggagcctctcagctcccggaccgggtggctggccgggcggggggctgacctccccacctccctccctgacggagtggctggccaggtggcccccacctccctccagatggggcggctggctgagccccccacctccctcccggatggggcggctggccgggcggggggctgacccccccacctccctcccagatggggtggctggccgggagggggcgctgaccccccccacctccctcccggacggggcggctggccgggcagaggggctcttcacttcccagtaggggcggccgggcagaggcacccctcacctcccggacggggcggctggccgggcagaggggctcctggctgggcagaggggctcctcacttcccagcaggggtggccgggcagaggcgccccccacctcccggacggggcggctggccgggtggggggctgagccccccacctccctcccagacggggcagctggccgggcagggggctgacccccccacctccctcccggacggggtggatgccaggcggagacgctcctcatttcccagacggggtggcagccaggtggaggggctcctcacttctcagacggggcagttgctgggcggagggtctcctcacttctcagacggggcggccgggcagagacactcctcacctcccagacggggtcgcggccgggcagaggcgctcctcacatcccagacagggcggcggggcagaggctctccccacatctcagacgatgggctgccaggcagagacgctcctcacttcctagatgggatggtggccgggacgaggcgctcctcacttcccaggtgggatggcggccggttagagacgctcctcactttccagactgggcagccaggcagaagggctcctcacatcccagacaatgggcagccaggcagagacgctcctcacttcccagacggggtggcggccgggcagaggctgcaatctccgcactttggggggccaaggcaggcggctgggaggtggaggccgtagcgagccgagatcacgccactgcactccagcctgggcaccattgagcactgagtgaatgagactcggtctgcaatcccggcacctcgggagaccgaggctggcggatcactcgcggctaggagctggagaccagtccggccaacacagcgaaaccccgtccccaccagaaaaacacgacaaccagtcaggcgtggcggcgcgcgcctgcaatcgcaggcactcggcaggctgaggcaggagaatcaggcagggaggctgcagcgagccgagatggca

SEQ ID NO: 15131 - DNA, 960 bp, Artificial sequence
  DNA replication origin
ccccccacccggccagccgccccgtccgggaggtggggggcgcctctgcccggccacccctgctgggaagtgaggagcccctctgcccagccaggagcccctctgcccggccagccgccccgtccgggaggtgaggggtgcctctgcccggccgcccctactgggaagtgaagagcccctctgcccggccagccgccccgtccgggagggaggtggggggggtcagcgccccctcccggccagccaccccatctgggagggaggtgggggggtcagccccccgcccggccagccgccccatccgggagggaggtggggggctcagccagccgccccatctggagggaggtgggggccacctggccagccactccgtcagggagggaggtggggaggtcagccccccgcccggccagccacccggtccgggagctgagaggctcctctgcccggccgcccctactgggaagtgaggagcctctctgcccggccaccaccccatctgggaggtgtacccaacagctcattgagaacgggccatgatgacaatggcggttttgtggaatagaaaggcaggaaagggggggaaaagattgagaaatcggatggttgccgtgtctgtgtagaaagaagtagacatgggagacttttcattttgttctgtacaagtactaagaaaaagtcttctgccttgggatcctgttgatctatgaccttacccccaaccctgtgctctctgaaatatgtgctgtgtccactcagggttaaatggattaagggcggtgcaagatgtgctttgttaaacagatgcttgaatgcagcaggctccttaagagtcatcaccactccctaatctcaagtacccagggacacaaacactctgcctaggaaaaccagagacctttgttcacttgtttgtctgctgaccttccctccactagtgtcctatgaccctgccaa

SEQ ID NO: 15132 - DNA, 858 bp, Artificial sequence
  DNA replication origin
gccgccatcccatctaggaagtgaggagtgtctctgcccggccgcccatcctctgagatgtggggagcacctctgccccgccgccccgtctgggatgtgaggagcgcctctgcccggccgcgacgccgtctggaaggtgaggagtgtctctgcctggccgccccatctgagaagtgaggagaccctccgcccggcagccgccccgtctgagaagtgaggagcccctccgcccggcagccgccccatctgggaagtgaggagcgtctccgcccggcagccaccctgtccgggagggaggtaggggggtcagccccccgcctggccagcctccccgtccgggaggtgagggaagcctctgcccggccacccctactggtaagtgaggagcccctctgcccggccaccaccccgtctgggaggtgtacccaacagctcattgagaacgggccatgatgacaatggcgtttttgtggaatagaaaagggggaaaggtggggaaaagattgagaaatcggatggttgctgtgcctgtgtagaaagaggtagacatgggagacttttcattttgttctgtactaagaaaaattcttctgccttgggatcctgttgatctatgaccttacccccaaccctgtgctctctgaaacatgtgctgtgtccactcagggttaaatggattaagggcggtgcaagatgtgctttgttaaacagatgcttgaaggcagcatgctcgttaagagtcatcaccactccctaatctcaagtacccagggacacaaacactgcggaaggccgcagggtcctctgcctaggaaaaccagagacctttgttcacttgtttatctgctgaccttccct

SEQ ID NO: 15133 - DNA, 901 bp, Artificial sequence
  DNA replication origin
gcacagcaaccatccgatttctcaatcttttccccacctttcccccttttctattccacaaaaacgccattgtcatcatggcccgttctcaatgagctgttgggtacacctcccagacggggtggtggccgggcagaggggctcctcacttaccagtaggggtggccgggcagaggcttccctcacctcccggacggggaggctggccaggcggggggctgacccccctacctccctcccggacagggtggctgccgggcggagacgctcctcacttcccagatggggcggctgccgggcggaggggctcctcacttctcagacggggcggctgccgggcggagggtctcctcacttctcagatggggcggccaggcagagacactcctcaccttccagacggcgtcgcggccgggcagaggcgctcctcacatcccagacggggcggcggggcagaggtgctccccacatctcagaggatgggcggccgggcagagacactcctcacttcctagatgggatggcggccgggaagaggcgctcgtcacttcctagatgggatggcggccgggtagagacgctcctcattttccagactaggcagccaggcagaggggctcctcacatcccagacgatgggcggccaggcagagacgctcctcacttcccagacggggtggcggccgggcagaggctgcaatctcggcacattgggaggccaaggcaggcggctgggaggtggaggttgtagcgagccgagatcatgccactgcaccccagcctgggcaccattgagcactgagtgaacgagactccgtctgcaatcccggcacctcgggaggccgaggctggtggatcacttgaggtcaggagttcaagactagcctggccaacatggcaa

SEQ ID NO: 15134 - DNA, 958 bp, Artificial sequence
  DNA replication origin
caccttattcaggaagtcagcccagcagctgtaggagggcaggagctggtgctcagccccatcccagtggctgcacagtgcccagtgccaggatccctcgctttgggcgcttgtccaggaggaagaagggggtggtgcagtcaagcgggccctggggcaggcctggcccagcgctccgttcttgggagccctgccagcccacaggcccatctgcggcaggcacgtggtgccgcgagaacttggctcagggacggtttttccgccatgcgcagattctcgcctctcgcgggggcgccagggggcagctggttgaggtgcgcatgcgcactggcacctaacggctcttcttcgagtcttctcagaggttggagattccctgtcttctccaacctctgccaagtcttcagagaggttggagtgcgcctgtcggaggtcggggccagcccaccttgctctctggtgctgggctgggtggggtctgggtgggggttgggcagggggaagggcgagggcaagttgtggcctctctgaagctggtagcggggccacaaagatagtggctgtggagagccacaagggccaggtgcccttgagcaacttgggtaaccatatctttactgacgtcaggtactagaccccagatgaggatctcaggaagatccacaaagctgcgtccaggggaacgaacgtgtggaagctgcagcggagcctcctgctcaagagtaaaggaccggtctgaaacctacaagaacaggtgtcgggggctgcaggctgcgggctgcgggaggaggtgggcgggtggggagaagcacccccttcagagttggggcttggggagtgggggcgaggggaggcatggaaagaatgggtgtgcggagcgggccgttctggtgcccagggtgctgggctttcttcccggacgggctccgcagcgcctgagatgtggacgccttggagg

SEQ ID NO: 15135 - DNA, 1354 bp, Artificial sequence
  DNA replication origin
tgcgggcttcggcgcgtggctgcctggccgcggggtccccgtgctggtggtggcagcagggtcggcagttgcctccactactacagcgcactatgtgcaggtgacagctacagctgagcctaaggcaaaggatgacagggctggccccagagggcctcagggtctccgagtgcaccgccctcccacccaagggtccactttttcttgattcgcgcccagagcacggagtcgtgggcgctgggcactctgaagccccggggttgggctgagagcaggttccctcactcctgcagatgcgggagtgggggccgcctaaactgggcgtcttcacagagtctggccctggggtccgcgctgctggtggcgccggcagggccgtgggttgccactgcggctggagcgcaccatgtgcaggtggcagctgcagctgagcccaccatagtggctggccgggcttgtccccgagtacagtcaagtgcacccaagggtcgccgagcgtactgccctccctcctccctagggtccactctgccttggcctgcgcttacagagctaggtagtgggcgctgggcactgtgcagcagccgcctggatggggctgagaggcctgttacctccttcctgcagctgctgggcggactgcctgatttaggctcagcggcctcctctggccctgcggtcctccctgctggctgcacaaagggttgagggttgccactgctgattttgggcgccatgtgcaggtgttagctacagttgaggccacagcggaggctgtcagggatgggcacagatgacttgaaggtcgcagagtgcagcgccttcccgcactagggtctgctcttccttggcccaggcccagagcacagtgtccccggcgctgggcactctgcagccacctggaaggggcttggtggccggttcccgccctcctgcagttgtggggccgacagcctgacttaggcgccacagaggtgtctggccctcgggttcctgctgcttgtgatggtgggcagggtcaggttagccatcgctactgctgtgcgtcatatgcaggtggcagctgcagctgaacccacttcggatgctggcagggctggtcccagatgtccagaggatcactgagtgctttgccctcccaccctagggtctgttctttcttagccggtgcccagagtgcagggtcctcagagctgggcattgtgcagccgccaggatgaggctgagcatctggtacctgcccttctttagctgtggggccaaaagtctaaattagtcgctgtggcgacgtctggccctggggtactcgctgctggtggccctggcagtgttgagtgttgcccccgctgctgcc

SEQ ID NO: 15136 - DNA, 853 bp, Artificial sequence
  DNA replication origin
ggtccgctctttcttggccccccgcccatattgctaggtcgcgggtgctgggctttgagcagccacaggaatggggctgaacgccagttctagccctgctgcagctgcgaggccgaccgcctgaattaggcgcctagaaggcatctggccctgcggtccctgcagctggtgatgcctgcaaggtcaggggttgccagctttgcggctgtccgccatgtgcaggtggctgctgcaaatgaccccacggcggtgtctggcatggctggtcccagatggcctgaaggaggccgagtgctcagccctcccacaataagttcggctctttcttggcccgcgccccaagcatggggtcacgagcgttgggcactgctcagccgctgggttggggctcagcagtcggttcccgccctcctgcagctattgggccgaccgcctgacaggcagggtcgggggttgccaccgctgctgccgcagtacctgctcttctttggccggtgcagaagcgcggactcgcaggccgtgggcattgtgcagccatggggtttggctgagcgccgattcccgccctcctgcggctacggggctgactgcctaaccgaggggtcatggcagcgtatggtcctggagtctatgctgctggtggctgctggccgagttgggggttgccactcccgcggccccgtgccatgtgcaggtggtaactgcacataagttcagggcggaggctggcagggctagcccagacgtcctgagtttcgccaagttcactgccctcacaccgtgggatccgctcttccttggccccagtccagagctctgggcccagggcgctggactctttgcagccatcgcg

SEQ ID NO: 15137 - DNA, 1110 bp, Artificial sequence
  DNA replication origin
aggttggggcgctgagcactcggcgaccctcaggccatctgggtccattcctgccagcctctgccatgggttcagctgcagccgccacctgaatatggcggggtcagcaactggggcaacccgggctatttccgtgactactatcgcggtccacagggccagacgctgccgtggcgcctaagtcacgcagttgcaaccgcagctgcaggagggtggaaaccagtgcccagtcccatcctggtggctgcagagtgcccagctccagggacccccaactttgggcgcgggtcgagcaggagcagtggactggggctgcgcagtcacctggggcctggggcagaccgcaccatgagctcagtttggtggtcggcgcctcagctgcagctgccacctgcatgctgtgcccacgagagcgcgactcagggcggtttctggccacgcgcagtttgtggccacgcgcggggccattaccttccgaggtgccagtgcgcgctggggcccaatggctctgctccgtatatttcttctccgagagtttggagacgtccctctcagagaagctggagggtccctgtctgaggtctgggccagaccgtcttgctttatggtgctggtcagggtgggggctgggcggcgggaagggcgagggctagttgtggcgtctctgaagccgatagccgggccatgaagaagatcttggctgtggagagccagaagggccaggtgcccctgagctcctggaataaccgcatcttttctgacccctggtaccagaccccagatgaggatctggaatatccacaaagctgcgtccaggggaacgcgtggaagctgcagcggagcctcctgctcaagagaaaaggccagtctgaaacctacaagaagaacatgtgtcgggaactgcgggctgtgggctgggggctactggaggaggtgggcaggtggggagaagcacccccttcagagctgggggcttggggagtgggggcgaggggaggcttggaaagaatggagtgtgtggggcgggccgtcctggtccccagggcgctgggctttcttccctggcagactccgcagcgcctgagatgtggacgccttggaggcggaggg

SEQ ID NO: 15138 - DNA, 1019 bp, Artificial sequence
  DNA replication origin
agatgccccagcagcgcctaattcgggcggccggcccttcagctgcaggaggggggaaccagtggctcagccccatgtaggcggctgcacagtgcccagcactcaagacctcgcgctcaaaagagggcacaggaggagcagctgcagggggcagcgtcgttaggcgggccctgagacagctgggaccgcgcgctcggctctagggagctcggccagtccacaggcgtctcagcagcagctgccacctgcatgcggtgccggcgagtgctcggctcagggcggtttctggccacacgcagtttctggccacgcgcaaggcggttgccttttgaggtcccatgggcgctggggcccaactgctctgctccgtatattatttattctccgagaggttggagacgtccttgtccgagaagttggagggtccctgtctgaggtctgggccagactgccttgctttctggtgctgggccggatgggggccgggtgggggctgggctgggggaagggcgagggcgagttgtggcgtctctgaagccaatagctgggccatgaagatgatcttggctgtggagagccagaagggccaggtgcgcctgagctcctggagtagtaactgcatcttctctgacccctggtaccagactccagatgaggatgtcgggatgatacacaaagctgcgtccaggggaacgcgtgggagctgcagctgaggctcccgctgaagagaaaagaccagtctgaaatctacaagaacaggtgtcgggaactgcgggctgcaggcttgggggttgagggaggaggtgggcaggtggggagaagcacctccttcagaattgggggcttggggagtgggggccaggggaggcgtggaaagaatagtgtgtgcggggtgggccgtcctcgtccccagggcgctggctttcttcctaggaggactccgcagagcctgggatgtggacgccttgggggtggagggcccaggccatctttatgagcagcaaaataaacccaaaact

SEQ ID NO: 15139 - DNA, 989 bp, Artificial sequence
  DNA replication origin
cccgggacgtgcagccaagccgagcgcagagggggcgcggggcaggcagcggcgctgcgcctcccccggcagcccagaaagccggacggggtccgcctgggccagtgaggccgggctcaacggagacccgggccgggcggggaagctgcaggcgcagagccggcttagctccgcgccgcctggccgcgcgcagctcccgcattgtccgcagtcggggcgcggcgcgaccactgaacccgaatcccaacccccgcccagcagtctctctcccggcccccacggcccagtcttacctgggccgctcaccccagtccctggcggtgcggcccgagccgggagccaggctccgggggactgcaaggagggagagtcggggcccgcgagggacgaagggccgagagcgggctgtaggggccgccgagtgttcacggtcgccgccgcggggccgcgggtagagagcagacggggctggcggaacgggcccaggacgcgcggccgcgaagggcccggctggcggcggccgcgatggttcggtctgcaccgagtgggagggctcaggcaggcttcgccggagagtgagggagggaacttggagccagttgctgtggccgagagcgcgtgtccctgagccagtgtacacgcccctcgtacaccccgccccgcctccatcccgcccccaccccaccttccgggtccccacccttctcgcacctccactccaagccctgcctctctctcaacatctccaccccgctactgatgcccatcccaccccatccctgacccaccccccattccactcggtcggcgcctccatttcctccctatcccccactcccacctatgtccgcacgcaagcacccccaccctgctcccacccggtgataccgctggatctcggactgccaccccagtgcagatcgctcagcactggagacgtagagcctgtgccctgaatgagataaccccacctggtagtccagccatcc

SEQ ID NO: 15140 - DNA, 1314 bp, Artificial sequence
  DNA replication origin
gctctcggcccttcgtccctcgcgggccccgactctccctccttgcagtcccccggagcctggctcccggctcgggccgcaccgccagggactggggtgagcggcccaggtaagactgggccgtgggggccgggagagagactgctgggcgggggttgggattcgggttcagtggtcgcgccgcgccccgactgcggacaatgcgggagctgcgcgcggccaggcggcgcggagctaagccggctctgcgcctgcagcttccccgcccggcccgggtctccgttgagcccggcctcactggcccaggcggaccccgtccggctttctgggctgccgggggaggcgcagcgccgctgcctgccccgcgccccctctgcgctcggcttggctgcacgtcccgggctcggctaggaggctgggcacggggccggggctggagccggggttggagccagggcggggggaagctggccgcgctgcggagcggaggtgggctccgaaagcgcgccgccggttgctgctggaggagtgggactacgaaggatggggactccgctcggccaccgctcctgaatggtctctaatctcggtgttaaatactttatgagagtatcaataccacctaatcctttgctgagaattactgctagaaatgtagattctgaggttccgaaagtttgtttttggttaccccctccagctcctcccgtggcctcaattgtctctattttctttgaaagcatacagatttgaaatagaattaaattctccttggctcactcgtgtctccatcacccagcggagctcataacttggcaacaaagcccatacaggctgtgggaagccgcgatgcctgctgcccagcctggtgccctcctattgtttagagctggagctgtacagtgtaaatggcagtgacaggtctcccttaagctggctcgtggggaaggaagggagataactttgcagtgtgcttaaattactctggaaagtggaaagaaaacacctggtgctcagctttttaaccctttcaagttgttattcagatttattgacacacacacacagaaaagtgcaggctttctttcctgcctaaaaaataggcaacctctgtgttcttcctcacagccaacttatgtcctctgcaaaatctggcacacatctgtgacaacattgcacttctggcgtaactggtctatttctcaaaagggaatatgatagtagaataagcatttttgcagtatggatagtaggacttccattttcttcgtttcctttgttggtgaagaaggtatttattattttccccccagt

SEQ ID NO: 15141 - DNA, 1199 bp, Artificial sequence
  DNA replication origin
acaaagcatatcttgcaccgcccttaatccattcaaccctgagtggacacagcacatgtttcagagagcacagggttgggggtaaggtcacagatcaacaggatcccaaggcagaagaatttttcttagtacagaacaaaatgaaaagtctcccaggtctacctctttctacacagacatggcaaccatccgatttctcaatcttttccccacctttcccccctttctattccacaaaactgccattgtcatcatggcccgttctcaatgcgctgttgggtacacctcccagacggggtggtggccgggcagaggggctcctcacttcccagtaggggcggccgggcagaggcgcccctcacctcccggacgggacggctggccaggcggggggctgacccccccacctccctcccggacggggtggctgccgggcggagacgctcctcacttcccagatggggcggctgctgggcggaggggctcctcacttctcagacagggcggttgccaggcagagggtctcctcacttctcagacggggcggcctggcagagacgctcctcatatcccgacggggcgacagggcagaggcgctccccacatctcagatgatgggtggccgggcagagacgctcctcacttcctagatgggatggcggccgggaagaggcgctcctcacttcctagatgggatggcggctgggcagagacactcctcactttccagactaggcagccaggcagaggggctcctcacatcccagaccatgggcggccaggcagagacgctcctcacttcccagacagggtggcggccgggcagaggctgcaatctcggcactttgggaggctaaggcaggctgctgggaggtggatgttgtagcgagccgagatcacgccactgcactccagcctgggcaccattgagcactgagtgaacgagactccgtctgcaatcccggcacctcgggaggccgaggctggcggatcactcgcggttaggagctggagaccagcccggccaacacagcgaaaccccgtctccacccaaaaaatacgaaaaccagtcaggcgtggcggcgcgcgcctgcaatcgcaggcactcggcaggctgaggcaggagaatcaggcagggaggttgcagtgagccgagatggcagcagtacagtccagcttcggctcggcatcagagggag

SEQ ID NO: 15142 - DNA, 1459 bp, Artificial sequence
  DNA replication origin
gcctcccgcgcccctcgcagcccggcacacgcgctcgggctctaggtactgggcgttttattggagattctgagttgttctgcttgtagtttattttctccaccttggaggcccgggatgtggggggtgggggggtggggcggggatccagaagggacagggcgggaggggggcgagcgtcccgggccgggcggggtagggagcgcggccggacgcgggctcgtcaaggcccaatggctgctgttcggaaccagaggccggggaccggagaaaggaggagcggagaaggagaaggaggagagcacggcctggctgggacagaagcggtgggaccctgggaggcctccgctgtgcccgtgccgcgctcctcgggaccagcgcgtcgcacacaaaggggctgccgagccagagccaccagcggcctcagggcaccgtggggagcgcgcagctagggggcgctgtggcgcaccccgccccgcagccccgcccccggccctccccggccccaccccactcccaccgccctctccgcggccgtccccacccctatctccgcgacccccactcctcctcggctgttccccaaccctgtcactgtgctcccctccctactcccggcccgtagtggaggtgactttcctgcgcagcgccgcttctgagggcggagaacccacagggagtgcgacccctttgcacgctgtgagtgggcaactgtccgagggactcgagccgatcgaagggtgaggaccagctcgcctgggggtggacggcctggaaaagccgcccctctttggcttccctctgccgcctgcagcccgcacccctccgagattcgtgccccactggacggtttgcgaaggctgaggctgccttggggactcacaaaagaccacaggggtgattcgaagtgtaaatagggaaacaatcatcagcacacaatccggctaaagggataacatatgagtttgcttgttgtccttcatgggattcttctctttttatagctggacgccctatagggctcttggcagtccacgaaagacctggagtccgcctccccatttctccggtcggtgagtggcaggaggaaatcgccaaacatgttttcccgctttgcctccccaactcggaaacttgcaacttgccgtgtcctggaggttgagacaatttggggtctcttggctgccgtccaacagatttatctctgagggcagtgtccttggtgagaggtccaagtaggtgtgggcgacattgtcctccatctcatgagggagcagccctgcacactagggcccaaaactctgcgaaggagcttggaagttcttcatccgttccacttgttttgctactccacacacccttctaggacatgttgattgccaactgctctgtgcagctttcccatagctgtctgttcccgtgcatttcggagcaccaagcaaatacgagcagagagacc

SEQ ID NO: 15143 - DNA, 805 bp, Artificial sequence
  DNA replication origin
gtcaatgggactggacaccgtggagcaggaggcggcacttgtcggggaggctcgggctgcgcaggagcccaaggggggggacagggtgggagggtaagggagatcagggaggaggggacagaggaggggggaaggggggtgcgggggagggcaggggtacacggggggctgctaaggcctggtgagaaatcaagctcagctgctgctggcccaggtgctaagcccctcactgcccggggcttgccgccacctggctgctctgagtgctggcccgcagagcccacgcccacccggaactcgcactggcctgcaagcgccccatgcagccccagttcccgcgtgcacctctccctccacacctccccacaagctgagggagccagctccagccttggccagcccagaaaggggctcccacagtgcagcggtgggctgaagggctcctcaagcatggcaagagtgggcgccaaggccgaggaggtgccgagagccagccagggctgcgaggactgcgagggctgccagcacgctgtcacatttcactatgtgagttctgggaattgtttggcttgctactttgtagtagtgtttcccctagcctgaaaaggtttatcccctgtgtgtgcagatgaatatttagccaaagactaaaaggggaccatctgcagatatctagaactttctgtctctgcaactgtctgtccctcccctctggtactctggccacaaatagtgactgcttctgcctccccaaactacaacttctgtctctacaagtcacaaacccactgactccatttggatt

SEQ ID NO: 15144 - DNA, 1484 bp, Artificial sequence
  DNA replication origin
gaggcatggagacagttaagagacgggcataagtctatctatagattatggatcttgaaactaaggcactggtgatgggaatcagccaagtggatgcatttgggagatttttgagaggtggaaagggcaggacatagctcttcgttgtttgtaagggaagaggatgatggaagagatttctggcttgggttccatcaccagaggtgggaactgaagacaaagacacagtccgaggggcggtggagggaactcagctgttaaatgctaactttaaaatatcccactggagatattttactgggcagtttaataaagggatatggtctcgggacagaaattttgatttaaaatgctggttttggagtcatgagcatccaggtgaggattgaagacatgtgagtagataagaacagccatcaagaacatgctcagagagaagaggtgttagggcggaaccctgtgaggggaagagaaccagtaatggagcctgcgatggaactgctgttgaagaagaaggagaccaggagagtgtggcaccacgaaacccaggggaaggggcagtgtgagaaagacaggcaaggctaccggctgctgcagagcaggtgatctggtctcccaggcgaaaacgtgatttagtggggaacatggtgagaagtttcagacgagatcgggcgcgttcagggtggtatggccgtagacggtgagcagtttcactaaactgatgggacaagagacagatttcagtagatagcagaggaaatgggcaaggaggaggtggtgatgggagtggagataattttttaaacagttacctgtgaagagaaagtagtaggagggtatgtgaggtccaggaatttttttttttttttttaaagaggagaaacatctatgcatattaaatggtgttgagaaggagctaaggggagagaggttaaaggctcagaaaagagctggtggatgaaagacccttgagtgctgtggcagaaaggagcagatgtttactcctggaaaagaggaggagggaggaaggactggcaggaggtcctggcaggaagcagagacagttccttctgatggttttattttctctgggaggcaggtgaccttggtgttagaatattagtgatgtgtatgtggggatgctgactggtgggcctttgggctggatttaaggacggctccagctggcactgtatttcgtaaattgtagagtttaaacacttggaggcatggccccaattcttcagtttttcacagctctgctgtcctcacttctggagacatttgacattggggctctatggcggtgatctggctttctataatggaatgcattattagttatctttaaactgtaagaaagtaagtagatgagttcagcggcataatgagaagatagccctactgaaggtaagtgaccataactgtgttttctaaagtggggcgctagacctttcagtgctgcccacctttctgtcgccaga

SEQ ID NO: 15145 - DNA, 1313 bp, Artificial sequence
  DNA replication origin
gcagtgcctgcgccttcgctgggcgcggggctggagccggagcggagcgcgcgtgggggagtgtgagcacgcgtgagcggcagtgtgagtgcgagagcgcctccgggtgtgaaccgcagtgtgagtgcaagcaggcgtgcgttcggaccgagtgttccagagacccgcgtgggaagcgcgtccggaggccccagcagagcgagggagcggctgtggcctggggagcgagcgcctggcgaattttatacccgaccggggcgtgtctggtacgcgaggatccgcccccttctctctctggccgttggggccaggggagccgacagttagaatgcgcctcggggcgactagtcccaagtcacggaaacctcggcgcatccccgcccgcccttcccccggggtcgcccccgccgcctcctggcgcttcctcgctgcggcgactcctgcttggccgcccgagccttccttccagaagcccgcaagtctcccaaggtcactcgggacccctgtgtgcctggcctagcccagaggctgctcacctattcattttcatccgtactccaggaaataccaaaaagaaggggtcctggaggagagagatgggctgccgtgggtaggagaaaggagagggctaggagaccccgtaacacaataaaaagagactctccagcggaatcttcttagtatcttctgagtatttactttttaaatcgtccgttcagcgcagtggaaacgagtttggaaatttttccaagaaagttctattaattcctaaaaacgtttaagaaaagaaaatggttgttatctagagaagtagctatgatttagggttgtgttttttttttttttttttccagaaaagggtattgtttcaaagcagggctagcagaaggcagtagacagagggtgttcgctgtcagagtctggggcgctgctgcaggctcacctggctgtgtacacagctcccattcacctagtgaaatcgtgtaaataatgaagtgcacacattgcataacaaacaggaactcttctgatccaaagaggtggcattgttacccttaaacgtgcttctcagtctagtgttaacgacttcagccctctgttcctgtgccttttaaaagccctggtcagtaacccctaagtaggttaactccacatttttagaagatatatgtgcacaataaactcgagttaggaccttaagtacaatttgttttttatatgctctggtcattcatgaagatatctatttgcactttgaataacctgttcctaaatcacaccagccttatgaatgcataattcctcaaataagg

SEQ ID NO: 15146 - DNA, 1604 bp, Artificial sequence
  DNA replication origin
cccaaagtgctgggattataggcatgagccactgtgcccagccgtcatgactccttttaaagcttatttgtgttaataaagcctatttttattccacctagtacaaaacatatattgattgattggttttgggaaagaggaaaaaaaggtgaaacatagaataaagctaagggtaaagttgctactcagaaatacaacagaaatgggttgaaatttggttctgagattcatggcaagcaaagtaaagaggaaagcaccttcagttaaaagagtcctagggctaagataaaaatgaaaactagataaaataaaataagataaaaatgaaaacttagtcctagggctaagataaaaatgaagaacttactttggaagagcacaatctttttttcttctttctttttcaaagacgaggagagatgggggaggaaagggaggaggatgaggaagaggggatgagaaggtaagaaggaagaagaggaggtgaagaaggggaggagaggggaggaggagaaaggaggaggaagacaggaggagtggataaggaagcaaagaagggaggagggaaggaggaagagaaagaggaggagaaagcaggaatagagagaaggtgaagaggaggagaggaggggaggaaggaggagagaagaggaggaggaggaataggaggcaaggagaaataaagagacaagaagagaggaagggaggaggaagaggggagggggaggagagaggagcaagaagaaaggagaaggagaggaggtaaggagaaagaagaggaggagagggaaagaggaggaataggaggcaaggggagatgaagaggaagaggtggatgaggaagggaagagaaagaagggaaggggaatgagagactaaggaacacaatgctttttggcactgaagcctgggagaaaaaaaacccaccctcatgcttagcatatcatattactatatgatataatggatgtcttaggttggatttcctggaagtgaagtctaaaatagggtttcttgcacaaataattgagggagagttctcaggagaaacctggaaggaagtgaggaaagaaggatgaagcagaggaagaatcccagcaaagatgtggtttcagctgacgacaacctggtctcatgaggacggctctgaagtctgaaaggcaccatgaagttgtcctgtcttgaggcaagaagcctgggcttttgtgcctttatacactggagtggggtctggtatataatttcccagacatctccagatgacaaggctcctgatagttgagaacagttttctggagaagagttatagctttgagctgttacaagttgatgtgcgtggatgctatggatgggcagaagtggtgggtgcattagcatggtaaagggttgtgggtagggtaccactagtgtcttctagagtgaacaacatcccattgatatcctcgacaaatgcacagggagaataacagcttattgaagggtctttctaggcaaggcaggagcatgggaccaacacaactcaccaaaagcaattctattaagtgccaagacaatgtggcaaagtataagtctcagggaagacttattttgactcagagacataa

SEQ ID NO: 15147 - DNA, 928 bp, Artificial sequence
  DNA replication origin
gctcctcctccgcgccccaaccccggtgccgctcagcctcgaaacgccaggcgccgcccgccgccgccgctgctgctgtcagccgccgggagtgaggggctgtgaggaagccggacgaactgacacccgcagagccgagggagacagcgcccgaccgagcccagccgaacaataacagccgccgcggcgcctccgccccgcctccgcgccgacccggaagttctgcggccgccggcgccgccggaggaaaggggaggagccccgcacgctggcccagccctgcacgctggccgcgccccgccagccggagccccgccccgccccgccccgcgcctgccttgcccggtccgccctgtcttccagcagggcggggcccggctccggttgttccgccacgtttgagcgggcgagcccggcggccgggagacgccagggaacggggctggtgggggtacaaaggctcggttccgtcgccttcagccctgcggtgggggcacggggcaagtgaggggacggcagaggcggcgttcggtgtgaggctgcgccctgggctcctgaaaatgtgtgtgaaaatgtgggaggcacacggcgagggggtgggggtggcctggtatttctgtgtttggcatcggggcttgaaggtgaaaatggcagtatttataaattggaaaccgtaaatctgggactgcaaagtaaatcatggtatgcacgcacagtggagtactacgttgctctcacctgaggtcaggagttcgagaccagcctggccaacatggcgaaaccgcgtctctactaaaaatacattagccgggcgtggtggtgctcgcctgtaatcccagctactcggagtctaaggcaggagaatcacttgaacctgggaggtggaggttgtagtgagccgagattgaaccacggcactccagactgg

SEQ ID NO: 15148 - DNA, 1034 bp, Artificial sequence
  DNA replication origin
ccggccagccgccccgtccgggaagtgaggggcgcctctgcccggccgcccctactgggaagtgaggagccactctgcccggccagccgccccgtccgggagggaggtaggggggtcagccccccgcccggccagccgccccgtccaggagggaggtgggggggtcagccccccgcccggccagccgccccatccgggaagtgaggggcgcctctgcccggccgcccctgctgggaagtgaggagccactctgcctggccagccgccccgtccgggagggaggtgggggggtcagcccccccgcccggccagccgccccgtccgggagggaggtgggggggtcagccccccgcctggccagccgccccgtccgggaggtgaggggcgcctctgcccggccgcccctactgggaagtgaggagcccctctgcccagccagccgccccatccaggagggaggtggggggagtcagccccccgtccggccagctgccctgtccgggaggtgaggggcgcctctgcccggccgcgcctactgggaagtgaggagcccctctgcccggccaccaccccgtctgggaggtatagccaacagctcattgagaacgggccatgatgacaatggcggttttgtggaatagaaaggggggaaaggtggggaaaagattgagaaatcggatggttgccatgtctgtgtagaaagaggtagacaggggagacttttccttttgttctgtactaagaaaaattcttctgccttgggatcctgttgatcggtgaccttacccccaaccctgtgttctctgaaacatgtgctgtatccactcagggttgaatggattaagggcggtgcaagatgtgctttgttaaacagatgcttgaaggcagcatgctccttaagagtcatcaccactccctaatctcaagtacccagggacacaaacactgcggaaggccgcagggtcctctgcctaggaaaaccagagacctttgttcacttgtttatctgctgaccttccctccactattgtcct

SEQ ID NO: 15149 - DNA, 1328 bp, Artificial sequence
  DNA replication origin
gctggccgggcggggggctgatccccccacctccctcccggacggggcggctggccgggcagagtggctcctcacttcccagtaggggcggccgggcagaggcgcccctcacttcccggacggggcggctggccgggcggggggctgacccccccacctccctcccggacggggcggctggccgggcagaggggatcctcacttcccagcaggggcggccaggcagaggcgcccctcacttcccggatggggcggctggccgagcggggggctgacccccccacctccctcccggacggagtggctggccgggcagaggggctcctcacttcccagtaggggcagccgggcagaggcacccctcacctgccggatggggcggctggccgggcggggggctgatccccccacctccctcccagacggggcggctggccgggcggggggctgacccccccacctccctcccggacgaggtggctgccgggcagagacgctcctcacttctcagacagggtggctgccgggcagaggggctcctcacttctcagacagggcagttgccaggcagagggtctcctcacttctcagacggggcggcagggcagagacgctcctcacatcccggacggggcggcagggcagaggtgctccccacatctcagacgatgggcggccgggcagagacgctcctcacttcccagatgtgatggcggccgggaagaggcgctcctcacttcctagatgggatggcggccgggcagagacgctcctcactttccagactgggcagccaggcagaggggctcctcacatcccagacgatgggcggccaggcggagacgctcctcacttcccagacggggtggcggccgggcagaggctgcaatcttggcactttgggaggccaaggcaggctgctgggaggtggaggttgtagcgagccgagatcacgccactgcactccagcctgggcaccattgagcactgagtgaacgagactccgtctgcaatcccagcacctcgggaggccgaggctggcggatcactcgcggttaggagctggagaccagcccggccaacacagcgaaaccccgtctccaccaacctttttttttttttttttggtgtggattgaaaactactaatggatagaaaatgattggggattggagctacttcacatggaatggcaaaggacggcatctgtaatgtggagtgtctgtctacgtggagagaaagggggaggatgtgcacaggccttgttcttggtgcagaatgaaagccattggcaggagatagttttttccccccatttcaaattgggt

SEQ ID NO: 15150 - DNA, 805 bp, Artificial sequence
  DNA replication origin
gcccagggtcgcaccgcggcggccgcggcatgtgccgccacccgcctccgcctcgcagactccggggccgggacgccggggccagcacgcgggtcacgaacgctcagcctgcggggccgcgcggcgcgcgcccgcctcaggaccgccccacctcctgcgcgtgcccagggggcggggcgctgctgatcagccaatcagcgccagactccagggaccgcccctgaagtcttcttagggggcggctctggagggggaacttcgtcgggggggagcggcggctggctgtgggtgtggaaaagcgggcgcgccagaggggctgggaaggtgggagcagaggggctgggaaggtgggagcggaggcgctggccccgactcctaagctgtgcggaagtgaaaggggcgggagcggcggggaagggcgctggccgcgcgtgagaaccggcgcgggcgagccgggggcggggaggcgccgggagcaggtggtgcagcccgaggtgtgcgggaggggctggcatgtcctggagatgggaaaagcggggatggatgtgctgagctaataagcgtactgccagagctgtcaaggtttatttatgcaggacagagaacttagagaagttattcactgactggtggacacacgttctaagattttcctccgttcggtttaagagaaaagtgcttacatgtttctgatgcctggtgatatttattaaaattgaaagttggtcacttgatattttatcatagggttgggagaaagaggaacaaaaggcatttataaagcaaaagccatttctgcaatgca

SEQ ID NO: 15151 - DNA, 1522 bp, Artificial sequence
  DNA replication origin
agaattcatatagtatgcttgcttcatgaagagtcaggaaaagaaagagaacaataaaagagtctaggtcgggcacagtggctcatgcctgtaatcccagcactttgagaggccaaggcaggcggattgcctgagctcaggagttcaagaccagcctgggcaacagggcaaaaccctgtctctacaaaaaaaaaaaaaaatacaacaattaacaggcctatgtggtgcgtgcctgtagtcccagtgacttaggggctgaggtgggaggatcgcttgcgtctgggaggttgaggctgcagtgagccgaattcgcaccactgcactccagcctaggtgacacagtaagtgacaccccatctctaaaagtttaaaaaataaaaaaaaatgtctaaactttgtaacagcccaagagacctctgagggttgaggtggggataggactgggaggggctgggatgagaaagctgtggaaggagcagatggtatcctaaaccaggatggggaggggaggggagggaaagaagggaagcttgtttcggagcggcccaaaggagaggcaaggagataggtagaggctgcacacttaggactagccaggtggagtctaagagagcacttggcacctctctggaacagaagcaacacagatagccagactgagctagggcccgacaatcaagggaggttacgacagatgtcagtgatggccattcccagaagctatgcctagaatgtccccttttccaatcaggaattatgcggagggtcaagtagcccagagaagctccccttggggtgtgagtcctggacctaactgatgcaaataatcctatgggcttgcactgttgtgggtaccaccccatccctaggcactcagaactccaccctggaggggagacgccttgttaggaaaatacctcaggggaaacgatggttgtgggagtacatgatgacagattggggacaatgagcagaaaatgaaagatggggaccaggtggtgccctgaccaggccaggccagcttgccagcagacccagtggtgatgtttgggcatgtgacaatctgctggaaaggaactcccgaagggtggtctcagaaccaagatatgggcatggatttcccagagagaggtaccagattctgccccaatgtgaaatgaccacaaggaagcctgcagtcctctcggcttaagtaaccaccgaatcaaaaatcatctatataggtgaaatgataggatggctgggaattgctttataattctccagcaaaccaaacaaaatgtgggaggggatagaatgaacagagtggggaggtgttgtacatattgaaggtgggagagggtacgcggagatttattggaccagtggatagcagtgtcctttccaaaccagaagcagcaccacctgagggctctaacaagttgcaaattctcaggagggagctgaccccagatctgcttaaaaatacacaacaaaaaactctagggctagggcccagcaatctgtgttttaacaagccctc

SEQ ID NO: 15152 - DNA, 906 bp, Artificial sequence
  DNA replication origin
ggggggtcagccctctgcccggccagccgccccgtctgggaggtgaggggcgcctctgcccggccgcccctactgggaagtgaggagcccctctgcccggccagcaccccgtccgggagggaggtgggggggtcagccccccgcccggccagccgccccgtccgggaggtgaggggcgcctctgcccggccgcccctactgggaagtgaggaacccctctgcccggccagccgccccgtctgggagggaggtgggggtgtcagccccccgcccggccagccgccccgtccgggagggaggtggggggggtcagcccccccgcccggccagccgccccgtccgggagggaggtggggggggtcagcccccctgcccggccagccgccccgtccgggaggtgaggggcgcctctgcccggccgcccctactgggaagtgaggagcccctgtgcccggccaccaccccgtctgggaggtgtgcccaacagctcattgagaacgggccaggatgacaatggcggctttgtggaatagaaaggcgggaaaggtggggaaaagattgagaaatcggatggttgccgtgtctgtgtagaaagaagtagacatgggagacttttcattttgttctgcactaagaaaaattcctctgccttgggatcctgttgatctgtgaccttacccccaaccctgtgctctctgaaacatgtgctgtgtccactcagggttaaatggattaagggcggtgcaagatgtgctttgttaaacagatgcttgaagacagcatgctcgttaagagtcatcaccaatccctaatctcaagtaatcagggacacaaacactgcggaaggccgcagggtcctctgcctaggaaaaccagagacctttgttcacttgtttatctgctgac

SEQ ID NO: 15153 - DNA, 1297 bp, Artificial sequence
  DNA replication origin
cccccccacctccctcccggacggggtgctggccgggcagaggggctcctcacttcccagtaggggcggccgggcagaggcgcccctcacctcccagacggggcggctggccgggcagagggctgacccccccacctccctcccggacagggaggctggccgggcagggggctgacccccccacctccctcccggatggggcggctggccgggtgggggggacccccccatctccctcccggacggggtggctggccgggctgaggggctcctcacttcccagtaggggcggccgggcagaggcacccctcacctcccggacggggcggctggccgggcggggggctgacccccccacctccctcccggacggcacggctggccaggcggggggctgacccccccacctccctcccggatggcacggctggccgggcgggggggctgacccccccccacctccctcccggatggggtggctgccgggcggagacgctcctcacttcccagatggggtggctgccgggcggagaggctcctcacttctcagacggggcagctgccgggcggaggggctcctcacttctcagacggggtggttgccaggcagagggtctcctcacttctcagacggggcggccgggcagagacgctcctcacctcccagatggggtctcgccgggcagaggcgctcctcacatcccagatggggcggcggggcagaggcgctccccacatctcagacgatgggcggccaggcagagacgctcctcacttcctagatgtgatggcggctgggaagaggcgctcctcacttcctagatgggatggcggccgggtggagacgctcctcactttccagactgggcagccaggcagaggggctcctcacatcccagacgatgggcggccaggcagagacactcctcacttcccagacggggtggcggccgggcagaggctgcaatctcggcactttgggaggccaaggcaggcggctgggaggtgtaggttgtagcgagccgagatcacgccactgcactccagcctgggcaccattgagcactgagtgaacgagactccgtatgcaatcccggcacctcgggaggccgaggttggcggatcactcgcggttaggggctggagaccggcccggccaacacagcgaaacccggtctccaccaaaaccagtcaggaatggtggcgcgtgcctgcaatcgcaggcactcggcaggctgaggcaggagaatcaggcagggaggttgcagtgagccgagatggcagcagtacagtccag

SEQ ID NO: 15154 - DNA, 981 bp, Artificial sequence
  DNA replication origin
ccgcggctggagagcagtgcgagcccagccaggcggtggggagggtgggaggcgggcggagcgccctgttcacccgttcgccccttgccgggagctgcggaaccgcagagggagtcgcagaggccggtcctggagcagggacctgtcctggggcaggggccctcggggcactcaccaactgcagcgcgcagaggcagatgagcgagcagcgtccggtgcagcagcccatggtgccggcggcgtccgagcggcgctgactgccagagatcctcgtcctccgccgctgctgcctcctgactccggagtagtccccgcccggcccggcccaggctcctcggccccgcggccgccgctcgcggctccagggctcggggctcgcgcccgcctttgttagtttcccggcggggcgggccgaggtcagtgcggtgcgcacgacccgagcgtctggcgggggtccctgcgtcccactgtgcaggtctgtttcttggggagggggagccaggcgggcggggcggggggttggaaggaggctacagatggcgagtgggtgaatgtctgtttaggggaggggagtatgtaggaggtgggcgtctggaaagtggagtgggctgtctgggtccgggtgtgtgtgtgtgtgtgtgtgtgtggtgggaagggaagaatgaaagggagtgccgctggggaggatcggcctgtctagttaagagtctttggggagaaaggaagagggacagagagaaaagagaatgaatatgaatgagcgtgaattagggcggccggcggcgatggagaccctcgttgaccggtgtaactgggtagacccagctgggctttcttgctgagggttgtgctgggggttgggagggtggtcggacgcgtttgcaagggaggggacacggcttagttgagctgccccagaggtggcgaggatgggagttgggttagcttgggttccggggaggaagggccgggacgcgagac

SEQ ID NO: 15155 - DNA, 911 bp, Artificial sequence
  DNA replication origin
ttggacttaagtttgagtaccacaactctaacctgccacttcagctgcacgggcaggcttgtggggacccagcaactccgtccagagagcggctgagtcagccagccgtccccacggctttgggcagccgccgaaggctcctgctaggcccggctggctcaccgggaagttccctgcctccgtcccgtcagcctccaggagggcgccgccggccgccgtgacttcagcaaggcactactatctccgtcagccgccgcctcggccatcttcctgcccggagtgcaacaaaatccggctctggccagccttccagctgacgccactctgccagggccctgcagcctcggagcgggatagaaggaagccgcagaaaagacgctgaaagttggcgctcgctgacgccccgacgcgctccctccatgacgcatgcgcccaccggccgtgagcgcgggtccggtctccggtgacgtggcggtgaggaggcggagccaagatcagcggcgggagggtgggggaggaagagcgaggtgagcgcggacgtcagagtggagagcggaaggtcagggaggctcggagcggaagtgagactagggagtctgtccgccattgtggacccgagaagcagagagcgagagggggaagaggagcgtgcaagcggaaaagacgggcctcttcctccgactcccgagcgcgaggccctcattttgggttctcagcgaacggcggcagcggcggcggctggaacaatcactcggccaagggcgacagccaactgctgtgagtgcacggggagaggcccaggcagcggcggcggcggcggctctcgggttgcggtgaagaatgtcagccactagcgtggatcaggtgagggagcagaggccccaggcttggcgaaggcccgagccccggag

SEQ ID NO: 15156 - DNA, 916 bp, Artificial sequence
  DNA replication origin
gctcggagcggaagtgagactagggagtctgtccgccattgtggacccgagaagcagagagcgagagggggaagaggagcgtgcaagcggaaaagacgggcctcttcctccgactcccgagcgcgaggccctcattttgggttctcagcgaacggcggcagcggcggcggctggaacaatcactcggccaagggcgacagccaactgctgtgagtgcacggggagaggcccaggcagcggcggcggcggcggctctcgggttgcggtgaagaatgtcagccactagcgtggatcaggtgagggagcagaggccccaggcttggcgaaggcccgagccccggagctccaccctcgcgcggggcttcggctcctccccgtcgccgccgctgccggccccataacggtgccccgggcgcaagttgctgcggtgtagctacccgggccggggcgtgcgccctggccccgtagcttgcgggcgggcgggcgcggtgccgcggcgggtgggggcaaggaccggtcttaggggccttaggacagatcctgagggcggcagacatggggcggagaccgggcgagctctgggagacggattccgagtggcgggtgggaggtttaaaggctgggggtggttgggaaattggtggctgtggaggatatggtgggtttttactcctacgcggatagtctaaaataacttgtctttgataatgcctttgattaacacactttttcttttcttcctttttctcctctttaccgcatctttcgtcttgcaacacagagacctaaagggcaaggaaataaaggtgagtttggatttttttttttcttattgctcaatgttgccttaatgttacttttaaactctgtgagggtattttgtttgtttttgctccctcttgggaaaaaatgtagg

SEQ ID NO: 15157 - DNA, 916 bp, Artificial sequence
  DNA replication origin
agaagtgaggcgcccctccgcccggaagccgccccgtctgagaagtgaggagcccctccgcccagcagccaccccatttgagaagtgaggagcatctccgcccagcagccacctcgtccgggagggaggtggggggggtcagccccccgcccagccagccgccccgtccgggagggagatggggggatcagccccccgcccggccagccgccccatccgggagggaggtggggggatcagccccccgcccggccagccgccccgtccgggaggtgaggggtgcctctgcccggccgcccctactgggaagtgaggagcccctctgcctggccggccgccccatccggggggaggtgggagggtcagccccccacccggccagccgccccgtccgggaggtgaggggcacctctgcccggccgcccctactgggaagtgaggagcccctctgcccggccaccaccccatctgggaggtgtacccagcggctcattgagaacgggccatgatggcgatggcggttttgtggaatagaaaggggggaggggtggggaaaagattgagaaatcggatggttgccgtgtctgtgtagaaagaggtagacatgggagacttttcattttgttctgtactaagaaaaattcttctgccttgggatcctgttgatctgtgaccttacccccaaccctgtgctctctgaaacatgtgctgtatccactcagggttgaatggattaagagcggtgcaagatgtgctttgttaaacagatgcttgaaggcagcatgctccttaagagtcatcaccactccctaatctcaagcacccagggacacaaacactgcggaaggccgcagggtcctctgcctaggaaaaccagagacctttgttcacttgtttatctgctgaccttccctgc

SEQ ID NO: 15158 - DNA, 1317 bp, Artificial sequence
  DNA replication origin
gatttctcaatcttttccccacccctcccccctttctattccacaaaaccgccatcgccatcatggcccgttctcaatgagccgctgggtacacctcccagatggggtggtggccgggcagaggggctcctcacttcccagtaggggcggccgggcagaggtgcccctcacctcccggacggggcggctggccgggtggggggctgaccctcccacctccccccggatggggcggccggccaggcagaggggctcctcacttcccagtaggggcggccgggcagaggcacccctcacctcccggacggggcggctggccgggcggggggctgatccccccacctccctcccggatggggcggctggccgggcggggggctgatccccccatctccctcccggacggggcggctggctgggcggggggctgaccccccccacctccctcccggacgaggtggctgctgggcggagatgctcctcacttctcaaatggggtggctgctgggcggaggggctcctcacttctcagacggggcggcttccgggcggaggggcgcctcacttctcagacggggcggttgccaggcagagggtttcctcacttctcagacggggcggccgggcagagatgctcctcacatcccggacggggcggcagggcagaggtgctccccacatctcagacgatgggcggctgggcagagacgctccccacatctcagacgatgggcggctgggcagagacgctcctcacttcccagatgggatggcggccgggaagaggcgctcctcacttcctagatgagatggcggccgggcagagacgctcctcactttccagactgggcagccaggcagaggggctcctcacatcccagacgatgggcggccgggcagagacgctcctcacttcccagacggggtggcggctgggcagaggctgcaatctcggcactttgggaggccaaggcaggctgctgggaggtggaggttgtagcgagccgagatcacgccactgcactccagcctgggcaccattgagcactgagtgaaccagactccgtctgcaatcctggcacctcgggaggccgaggctggcggatcactcgcggttaggagctggagaccagcccggccaacacagcgaaaccccgtctacaccaaaaaaatacgaaaaccagtcaggcgtggcggcaagcgcctgcaatcgcaggcactcggcaggctgaggcaggagaatcaggcagggaggttgcagtgagccgagatggcagcagtaccgtccagcttcggctcggcatcagagggagaccg

SEQ ID NO: 15159 - DNA, 1089 bp, Artificial sequence
  DNA replication origin
tataataaagtttctttaaaaaaaaaaaaaaaaaaggctgggcgtggtggctcacgcctgtaatcccagcactttaggaggccgaggcgggcggtcacgaggtgaggagatccagaccatcctggctaacacggtgaaaccccgtctctagtaaaatacaaaaaaattagccgggcatggtggcgggcgcctatggtcccagctactcggcaggctgaggcaggagaatggcgtgaacccaggaggtggagcttgcagtgagcagagatcgcactactgcactgcagcctgggcgacagagcaagactccatctcgaaaaaagaaaataaaagagaggagagcagaggacaggggaggggaggggaggggaggggagaggagaggagaggagagggacgggcgcggtggctcacgcctgtaatctcagcacgtttggaggccaaggcaggaggattgcttgagctcaggagttcaagaccagcctgggcaaaattgcaaaaccgggctctactaaaaaaagggggctgggtggatttccacctagtgtgataaggatgtgcatcctaagacaaaggtgggtgttacaggtaggtaagagctcagtgaggagggggatggataaggaaaaagatggagaaaggacatgttagaagaaacagcaaaactgtaaatagaagagaatgcaagatgtttttagaaaatttccagcttctcaaatgtatttgtaatgtttgttgaatgaatgaatgaatgaatgaatgatttagaaaagcccgtatagaggtgtactgtcaagaactctgagagcctggactttgttgagtttaggaagatttagaaaaattaatgtggtatagttagaatgcggaatggtttgacagcaggaaggaataatgtggtatagttagaatgtgcagaatggcttgagagcaggaaggaatctagtgtgaaaactcaagttgagataattagtgccagagcaaggaattgaaggtaagagaaaagccaatgagaataatctatgaggtcaaattgctaatgtttgcaactgactgaatataagggatcagtggagaggaggcaaaaat

SEQ ID NO: 15160 - DNA, 1449 bp, Artificial sequence
  DNA replication origin
ctgaagaggcgaggcggctggagcggcccaggcccaagcaggcctggtcgtctccctgcgacctcgcctcgccccgctgcccccaccggcaccccctgccccaagcccgtcctgcggaagtcggctcctctggccgaggcagaaactagaaagcctgccccgggccaggtgcaggaaagcaaagcagaagtaagtctcgggccgcagatgcggccctggcgggcagggcctcggcgcccattcccgccgcgacctcgcccggctgcgtacgccaaggagcgcaggatagaggcgctggtgtctgcggggccgccccgggctcggagagcggaggagcagggaaaggctcggggaaggaatgttaaagggggacactggcagcgacggcgcgctccgcccgcccgcggactagccggacccgccacttcccagccggccgcgaggagctgcgggccgggccggcagcccctcggccgcgaagcccgcgccaccccggtaaccccggcgaggaaacgcgctctttcctttttcttctcccctcccccctcccctttctccctagaggcagctcccgtcctctaaatgcattacacacacacacacacacacacacacacacacacacacacacacacacgggaaatctctggggctctcctttttccaccggtctcgcctcctcctaacactggtgttggtcgaacaagcgcgaaactcacagaagtttccccgaaaacgaacagctttaaatgccaggagggaaaatgtcgggggaaaaagtggaggtcggtgtttccctaaatgcaaaacatcagagaggaatctgaaaagagctttactttccctgcgaaatctccattgttgctcagcaaacaatgggagcctgggcgactggagggctgtgcgaatgaataggcgatccgcgggatgtgtgcgggtcagtgcctggggtcccgggcctaaagcccctttctcagcttgccacaataaaccagcgcaaggtttagtccttactgggtcaccggccatcctctattattcaacacttcacaacaaaaaacacttattaatcagcgctgaccagaggccccttttgaaacaagagaagaggggagagagagagggagtgagagagagaggggtgaaaagaagattgagaagccctggacagatctttctaaagccagagcaaccatggggtactttcctccagtggccaaagtttatttgacacaacaaagtttctaatcaggccacggagacctggatttctcctcatttgcctcactcccggtctcttcctctgaagatgctggagactttgttgcaagaaaggatggctttaggtcatgttgctgaggcctgatcttaaagatctaattgctattggaagagaatcctgtttcccaactgggcctcccctctggagatggagcaaggaagactgtc

SEQ ID NO: 15161 - DNA, 1655 bp, Artificial sequence
  DNA replication origin
ccccgggaccacccgagcggacccacagcttctgaggaaacagctgcctcgggcctaagggtctttgctttcccccaacgcatgcaagcgtgggtcgccagcccagcatgtctggcgtggaggccggaggagggtggggagctggcggtgccctatggccagacgagtaaaagtcggttagtgttttatgcgcctgggggaggcgaagggcgcgggcttgcggggcccgggctgcgagtattgggagggggcgcctcgtgaggccgtgcgaggccgccctccccggcaggcctcgtccacgcccttgtggcctcccagacccgctgcgctttggctaggcgtccctacgcgcctccaccttctccaggtgcacgcctgggcgcggagctaggctgagcccccagcgaggggcgtggggcgaggggcgaggggcgagggcgtgggcgccacgcaggccgcggagcctggtgggcggcgtgaagcgtgcactgcgcctgcctgcccggtcccagcctgccgcccagagctccccgaccaagccttgacagctctcggagcagcgagaagaagaagaggaggaaggacacaaagaggaggaggcggcggcgggcggcgaactgagggcagctcagggggaggaggactcattgtccggtccccccagtccaattgatatgctaatctcttttctgatgccacaacaaagaacacctttgcacttttaaaagacttttgtgccctggctacagaagtttattatccactaattagcaacaacttctggcaacgagttgggttacattttcataagttccaggcctgagcgacgaggtgcgcagggcaggaggaggtttgagagcagggcaaacccgaaacctggcgctagaaaggaatcacccgctcactttcctaggcatagggcgccaggcggggatcgaaagcgaaaagtgtccggaaaaaggttcttaaggctggggatggggtgaggtggggtggagttgatcgatttgggcccagggtggctgatgaccttattggacccgattctgtgatccccatcccgagagctgcacggaggcggagactgtggctgccgtgcaggtgtcccggcccagccatctgtatggggtgggggtggggtgaaagtcttggactaatggtggggtgcttgcctgtgatctctctcacgttttcctttgaggcctccactcggaataagccgccggcgagggagcggcccattcgtgggaaacgcgcccaccgcttgggttctttcctaaggcctccccaccaacaaggctgaaattccaaggccctggaagatgaggcaaagctagcattgccagagtcgggggagaggggaggatgctgggtaaagtgcccacccggggtggtctaaagtcgtcaccccacagagcagattctgctgctaaccagagcagagagccgcaccttcccagcggcgggccccagtgcgcacagcgtgactttgcctcccccaggctcagcaagtcgttgacgatctttagcagtcccgcatcccaggtcaataaactggaaacggatagaatgagaatcatggatgagagataaagggcagcggggtgatgcgcatttcttgtagtgcctccaaaaaaccgtggtctctcgccgct

SEQ ID NO: 15162 - DNA, 1258 bp, Artificial sequence
  DNA replication origin
ttgtttttacttatgtcataaggatgaaaaccagctgctaaataccatgtgtacccagagaccgaactcaggagtgagatgaccgcgtgtaccagtgcccatccggagaggagcacttgtttttacattctcccttcccgaaccctccaagaacaaccgaggctgatccagatgtccttaaatggcttccgggtaaataaatatgcataaatgcctcacttcgtgtgggagcggatttgactcctggtgaagttgactcttttgaagcaatcagattttcatcttaaggaaagtttgagaaaccggtttgtttgtttgttttcttcctgtttaggaaattgtgtacttcacaattaccatcactgtaacagttatttggagaccactgcaaaatcactgccaccccaccttaaaaaaaaatgggctgcatgatcacttgctcttcattttgcttttttctttctttttttccaatctgggtaggaaatgggcagtggcgggtgtggaaacgaggcagagtgttcggggggacgactgctttgctctctgaccagctgaaaacctagagtgaattttgggcaagccagctgggacaccaccttctctcggaaagtcccatccccaaatccagaccagtcatcctacgaacaggggtggagtataattctcgcccggaagggtaatttagcacaagctgagacagcagtggcgagggaagggcagtggggggtggggtgcggtgggtgggggcgtctgctttccacaggactcccaggcttcgccgccgatctacaatttgctgaaggagcaaagaacatcctcggctctaagtagggcttttagtgtgctcattgatgagtgaaagtcgccacacatgtcaagctaaaggcagttgttgggttactaacaggacccagcgccttgcaaacatatgcgctaagctgtgtatacagatggcaggcagaataatggagcaggcgccttttataaagctctagctgctgcctgtcttcagacctgggaaatgaaactattcagacttgcggccagatagcgcctgcgattgtttgttaccgttttaatcctattaattaaaacgttaacctgattgggtagaaagcgctgtcccaacaggcgagtcttcttcataataacctactcagagataatgatgtaaaagactcccccgtctgtggcggcggctgtttgatgggtccggaaatctcttgaaggtgaatccaagcaagataaacggtgc

SEQ ID NO: 15163 - DNA, 1375 bp, Artificial sequence
  DNA replication origin
ggggggcctgggcggcggcggcggcgggggtagcagcagcggtagcagtggcggcggtggcggtagcggtagcggcagcggcggcagcagcagcagcagcagcagcagcagcaagaaatccaaagagcaaaaggcgctgcggcttaacatcaatgcccgagagcgccggcggatgcacgacctgaacgacgcgctggacgagctgcgcgcggtgatcccctacgcgcacagcccctcggtgcgaaagctctccaagatcgccacgctgctgctcgccaagaactacatcctcatgcaggcgcaggccctggaggagatgcggcgcctagtcgcctacctcaaccagggccaggccatctcggctgcctccctgcccagctcggcggctgcagcggcagcagctgctgccctgcacccggcgctcggcgcctacgagcaggcagccggctacccgttcagcgccggactgcccccggctgcctcctgcccggagaagtgcgccctgtttaacagcgtctcctccagcctctgcaaacagtgcacggagaagccttaaacacacccccgaaaaacacaagaccgacccaaaatctagaggaaagcgaaaagctgctccccaccccctttattttggtcctctcgtagttgtgaaacacttgcagagcaaacaaagcagaggcaagaactgaggagaagtatcagagacaaacgggacttttagccttgacatccccagaatctcggtctttggggtggggagggagggaggagggaggtggagttgggatggagtatggatgtcttttttttctcagaaaagtggcaactttggtggcagcctagaccgcgaggaagtggaatcttccttaaaggtgaaacataagttgagaagtagtgcttggttattaagcctggagagtgtttgaatggcaaaatactaatcctactaataattgtggatttggctagtgctgagggggagaggaggggttaggggttgggtagcatgagagatggaatattcattcagacaaatcagaaagggcacttgaaaataaattttgattctgagccaggagaaaaacttgaaatgttgacttaagtgagggggaaataaaacccagagagagagagagagcgagagagagagacatgttactatgaaagacttgtattttttattgtctctgaactttaatcctgtgaaaatgctcaaagttttggcgagagtgatataaaaaaactgactgtggctgaaagaattgcatttaaaaatatttatgtgcaccttgttactttctactctgcaatgatgtattaacaattcatggtatttatttgttattcttcaatgacccttccacatcaacagtat

SEQ ID NO: 15164 - DNA, 929 bp, Artificial sequence
  DNA replication origin
cgtctgggaggtgaggggcgcctctgcccagccgcccctactgggaagtgaggagcccctctgcccggccagccgccccgtccgggagggaggtgggggggtcggccccccgcccggccagccgccccgtccgggagggaggtgggggggtcggccccccacccggccagccgccccgtccgggaggtgaggggcgcctctgcccggccgcccctactgggaagtgaggagcccctctgcccggccagccgccccgtccgggagggaggtgggggggtcagccccccgcctggccagccgccccgtccgggagggaggttggggggtcagccccccgcccggccagccgccccgtccgggagggaggtggggggggtcagcccccctgcccggccagccaccccgtccgggaggtgaggggcgcctctgcccggccgcccctactgggaagtgaggagcccctctgcccggccaccaccccgtctgggaggtgtgcccaacagctcattgagaacgggccaggatgacaatggcggctttgtggaatagaaaggcgggaaaggtggggaaaagattgagaaatcggatggttgccctgtctgtgtagaaagaagtagacatgggagacttttcattttgttctgcactaagaaaaattcctctgccttgggatcctgttgatctgtgaccttacccccaaccctgtgttctctgaaacatgtgctgtgtccactcagggttaaatggattaagggcggtgcaagatgtgctttgttaaacagatgcttgaaggcagcatgctcgttaagagtcatcaccaatccctaatctcaagtaatcagggacacaaacactgcggaaggccgcagggtcctctgcctaggaaaaccagagacctttgttcacttgtttatctgctgaccttccct

SEQ ID NO: 15165 - DNA, 1249 bp, Artificial sequence
  DNA replication origin
catctgtttaacaaagcacatcttgcaccgcccttaatccatttaaccctgagtggacacagcacatgtttcagagagcaccaggttgggggtaaggtcatagatcaacagcatcccaaggcagaagaatttttcttagtatagaacaaaatggagtctcctatgtctacttctttctacacagacacagcaacaatctgatttctctatcttttccccacattcccccttttctattcgacaaaaccgccatcgtcatcatggcccgttctcaatgagctgttgggtacacctcccagacagggtggccgccgggcagaggggctcctcacttcccagaaggggcggctgggcagaagcgccccccacctcccggacggggtggctggccgggcgggggctgccccccgcctccctcctggatggggcggctgccgggcggagacgctcctcacttcccagacggggcagctgccgggcggaggggctcctcacttctcagacggggcggctgccgggcggaggggctcctcacttctcagacagggcggctgccgggtggaggggctcctcacttctcagacagggcggccgggcagagacgctcctcacctcccagacggggtcgcggctgggcagaggcgctcctcacatcccagacggggcggcggggcagaggcgctccccacatctcagactatgggtggccgggcagagacgctcctcacttcctagacgtgatggcggccgggaagaggcgctcctcacttcccagactgggcagccgggcagaggcactcctcacatcccagacgatgggcggccaggcagagacgctcctcacttcccagacggggtggcggccgggcagaggctgcaatctcggcactttgggaggccaaggcaggcggctgggaggtggaggttgtagccagccgagattacgccactgcactccagcctgggcaccattgagcactgagtgaaccagactccgtctgccatcccggcacctcgggaggccgaggctggcagatcactcgtggttaggagctggagaccagcccggccaacacagcgaaaccccctctccaccaaaaaaatacgaaaaccagtcaggcgtggcagcgcgtgcctgcaatcgcaggcactcggcaggctgaggcaggagaatcaggcagggaggttgtagtgagccgagatggcagcagtacagtccagcttccgctcggcatcagagggagaccgg

SEQ ID NO: 15166 - DNA, 834 bp, Artificial sequence
  DNA replication origin
agcgtctctgcccggccacccatagtctgagatgtggggagcgcctctgccccgccgccccgtctgggatgtgaggagcgcctctgcccagccgcgaccccgtctgggaggtgaggagcgtctctgcccggccgccctgtctgagaagtgaggagcccctccacccggcagccgccctgtctgagaagtgaggagcccctccgcccggcagccgccccgtctgagaagtgaggagcccctccgcccggcagctgccccgtctgggaagtgaggagcgtctccgcccggcagccgccccatccaggagggaggcggggggcagcccccgcccggccagccaccccgtccgggaggtggggggcgcttctgcccagccgccccttctgggaagtgaggagcccctctgcccggcggccaccctgtctgggaggtgtacccaacagctcattgagaacgggccatgatgacgatggcggttttgtcgaatagaaaagggggaatgtggggaaaagatagagaaatcagattgttgctgtgtctgtgtagaaagaagtagacataggagactccattttgttctatactaagaaaaattcttctgccttgggatgctgttgatctatgaccttacccccaacctggtgctctctgaaacatgtgctgtgtccactcagggttaaatggattaagggcggtgcaagatgtgctttgttaaacagatgcttgaaggcagcatgctccttaagagtcatcaccactccctaatctcaagtacccatggacacaaacactgcggaaggccgcagggtcctctgcctaggaaaaccagagacc

SEQ ID NO: 15167 - DNA, 1101 bp, Artificial sequence
  DNA replication origin
agtggacacagcatatgtttcagagagcacagggttgggggtaaggtcacagatcaacaggatcccaaggcagaagaatttttcttagtatagaacaaaatgaaaagtctcccatgtctacctctttctacacagacacggcaaccatccgatatctcaatcttttccccacctttcccccctttctattccacaaaaccgccattgtcatcatggcccgttctcaatgagctgttgagtacacctcccagacagggtggtggccgggcagaggggctcctcccttcccagtaggggcggccgggcagaggcgcccctcatctcccggacggggtggctggccaggcggggggctgacccccccacctccctccaggacggggcggctggccgggctggggcctaacccccccacctcccttccggacgaggtggatggccgggcggggggctgacccccacctccctcccggacggggtggctgctgggcggagacgctcctcacttcccagacggggtggctgccgggcggaggggctcctcacttctcagacggtgtggctgccgggcggaggggctcctcacttctcagacggggcggttgccaggcagagggtctcctcacttctcagatggggcggccgggcagagacgctcctcacatcccagactgggcagccaggcagagaggctcctcacatcccagacgatgggcggccaggcagagacgctcctcacttcccagacggggtggcggccgggcagaggctgcaatctccgcactttggggggccaaggcaggcagctgggaggtggaggttgtatcgagcccagatcacgccactgcactccagcctgggcaccattgagcactgagtgaacgcgactccgtctgccatcccggcacctcgggaggccgaggctggcggatcactcgcggttaggagctggagaccagcccggccaacacagcgaaatcccgtctccaccaaaaaaatacgaaaaccaatcaggcgtggcggcgcgcgcctgcaatcgcaggcactcggcaggctgaggcaggagaatcaggcagggaggttgcagtgagccgagatggc

SEQ ID NO: 15168 - DNA, 924 bp, Artificial sequence
  DNA replication origin
ctgcctggccgcccatcgtctgggatgtgaggagcctctctgcctggctgcccagtctgggatgtgaggagcgtctctgcccggccgccccatctgagaagtgaggagaccctctgcctggcaaccgccccgtctgagaagtgaggagcccctccgcccggcagccacaccgtctgagaagtgaggagcccctccgcccggcagccaccccgtctgggaagtgaggagcgtctccgcccagcagccaccccgtccgggagggaggtgggggtcagccccccgcccggccatccacctcgtccggaagggaggtgggggggttaggccccagcccggccagccgccccgtcctggagggaggtgggggggtcagccccccgcctggccagccaccccgtccgggagatgaggggcgcctctgcccggccgcccctactgggaagggaggagcccctctgcccggccaccaccctgtctgggaggtgtactcaacagctcattgagaacgggccatgatgacaatggcggttttgtggaatagaaaggggggaaaggtggggaaaagattgagatatcggatggttgccgtgtctgtgtagaaagaggtagacatgggagacttttcattttgttctatactaagaaaaattcttctgccttgggatcctgttgatctgtgaccttacccccaaccctgtgctctctgaaacatatgctgtgtccactcagggttgaatggattaagggtggtgcaagatgtgctttgttaaacagatgcttgaaggcagcatgctcgttaagagtcatcaccactctctaatctcaagtacccagggacacaaacactgtggaaggccgcagggtcctctgcctaggaaaaccagagacctttgttcacttgtttatctgctgaccttccctcca

SEQ ID NO: 15169 - DNA, 962 bp, Artificial sequence
  DNA replication origin
gatagtattagccaataggaaaaatatatttgattaataaaagtgatcattagccataacttctggcagcagaaagtgagggcactcagttcagatgtaaacaaaattcttttcacctctctgttttaagtctgacaatcaaaattagccaaacctaaggaattgggccaacggcatcaccacaggaaaaaaacagaaatgctcaggagcaactggtattggaccactcaaagtcttcccatgagtgtacatcagtagtttctctcctaaaatctccttatcaaattaaaaacaaaactgattcctggctatgaactttgcagacttgttcctctgatacccagtacagcccagccacagaaacgaaggagtcggggagactacagcaacggggcatctaggcctattgttcagagggaaccgcaggaccaggcgagcgccgcggggcgcgcgggagctgggggaggagaggcgcgaaccccgtacagttgtgtgtatgggaagggggacaggtatgttgcaaggcgggggagcacaggtgtaccctggggccacgactaaggaataaagactcaacttccagaccgaaaaagacaagggcggtcattcctgaggcttaaactgctgggcacagagggtgacgagcctggggagggtctgatgagaggatcccggaacccaccagggtggggttttggggaggctggagaactgaggggggacagccaggaatattcaaagaaaaggctctgcaatcgaaaggccagcctagaaatccccagacaatggacaatgcgcgggctgggggttgtagaggaggtgaagctgggtgggcagagggaaacaaaagagagaagccctcaagtgtgggcccggcggcggcgattacctgagagagctgccggggattggggcagccgaagagagcggagctggagctgaagctgatggctcctcggcgg

SEQ ID NO: 15170 - DNA, 905 bp, Artificial sequence
  DNA replication origin
tttgccagcaggggagaggttgttcaggctgaaatcccaaaggctggaatgcattagaaacaattagttgatgctgaaagctttgaccgtttagtgagaaatgtgacaaaatgaacactcaaattacacatctagcttacaaaacaggtcaagagctctttatcttttctcgctttcgaaaaatcgaaagtcaacaaacaacacttttggtagaggggcatgcagtctactttttccctttgtcttctcagtatcatcctttctcattcttttcacccatactctcacttctttctcagtcttggttttttccctttgtctccgggtccccttctcacttccgaattctcggctcccctctccgcccctcgggctcgggatggccccggggccgcatctgccaggcgagcgctggagcctggccccaccgagggactggcagtgacgtagccaggaggacggtgctcgcgcggcccgctgacgtcactgccgcagcggtctctagcgaaacccatgaatgggaattcaaggagggaaaagccagcagtgaccccgcggtcagggctgaggacggcgactgcgccgggtgctttgggtttctggggtcggcaggccggaacgccgcctctagcgcgggacgagcacaccccatagcctaggcgcgctggaacgcacgaatttagcgctcggggggatgccccgaaacggtggggcctcgtgcgcacgcgccttggctggcgaggagctagggaagggagtcacggcggggcgcgaagggaactgcggatgagatagatgggggaaaacgtttgtcgggaggcgactccaacagagccccagggtgcagaacacaaggaaggctactgtcgccctcggccgcttgccagtctccctgggcgctgcgg

SEQ ID NO: 15171 - DNA, 864 bp, Artificial sequence
  DNA replication origin
gccaaggcaggcagctgggaggtggaggttgtagcgagccgagatcacgccactgcactccagcctgggcaccattgagcactgagtgaaccagactccgtctgcaatcccggcacctcgggaggccgaggctggcggatcactcgcggttaggagctggagaccagcccggccaacacagccaaaccccgtctccaccaaaaaaatacaaaaaccagtcaggcgtggtggcacgcgcctgcaatcgcaggcactcggcaggctgaggcaggagaatcaggcagggaggttgcagtgagccgaggtggcagcagtacagtccagcttcggctcggcatcagagggagatggtggaaagagagggagagggagaccgtggggagaggcagagggagacggagagggagagggagagggagagggagagggagagggagaggagttcttttaattttgatgttagggggtcaatttgagatctttcctgctttctcttgtgggcatttggttctataaatttctctctagaacacactgcctcaaatgtgtcccagagattctggtacattgtgtcttcattctcattggtttcaaagaacatctttatttctgccttcattatgttatttacccagtagtcattcaggagcaggttgttcagtttccatgtagttgtgcggctttgagtgagtttcttaatcctgagttctaatttgattgctctgtggactgcgagactgttatgatttccattcttttgcatttgctgaggagtgttttacttccaatttatggtcaattttagaattagtgtgatgagatgctgagaatgtatattttgttgatttggggtgaagagttctg

SEQ ID NO: 15172 - DNA, 1231 bp, Artificial sequence
  DNA replication origin
cccagacggggtggtggccaggcagaggggctcctcacttcccagtaggggcggccgggcagaggcgcccctcacctccagggtggggcggctggccgggcggggggctgatccccccacctccctcccggacggggcggctggccgggcagggggctgatccccccacctccctcccagatggggcggctggctgggcggggggctgaccccccacctccctcccggacggggtggctggccgggtggggggctgaccacctcacctccctcccagatggggcggctggccgggcagaggggctcctcacttcccagtaggggcggccgggcagaggcgcccctcacctcccggacggggcggctggccgggcggggggctgacccccccacctcccttccggacggggcggctgggctggcgggggctgacccccacctccctcccggacggagtggctgccgggcggagacgctcctcacttcccagacggggtggctgccgggcggaggggctcctcacttctcagacggggcggctgccgggcggaggggctcctcacttctcagatggggcagttgccaggcggagggtctcctcacttctcagacggggtcgcggccgggtagaggcgctcctcacatcccagatggggcagcggggcagaggcgctccccacatctcagacgatgggcggtcgggcagagacgctcctcacttcctagatgggatggcggccgggcagagacgctcctcactttccagactgggcagccaggcagaggggctcctcacgtcccagacgatgggtggccaggcagagacgctcctcacttcccagatggggtggtggccgggcagaggctgcaatctcggcactttgggaggccaaggcaggcagctgggaggtggaggttgtagcgagccgagatcacgccactgcactccagcctgggcaccattgagcactgagtgaaccagactccgtctgcaatcccggcacctcgggaggccgaggctggcggatcactcgcggttaggagctggagaccagcccggccaacacagccaaaccccgtctccaccaaaaaaatacaaaaaccagtcaggcgtggtggcacgcgcctgcaatcgcaggcactcggcaggctgaggcaggagaatcaggcagggaggttgcagtgagccgaggtggcagcagtacagtccagcttcggctcggcatcagag

SEQ ID NO: 15173 - DNA, 1371 bp, Artificial sequence
  DNA replication origin
gtctgggaagtgaggagcgtctccgcccggcagccactccgtccgggagggaggtgggggtcagcccccgccagcccagccgccccgtccggaagggaggtgggggggtcagccccccgcccggccagccgccccgtccgggaggtgaggggcgcctctgcccggccgcccctactgggaagtgaggagcccctctgcccggccagccgccccatctgggagggaggtgaggtggtcagccccccacccggccagccaccccgtccgggagggaggtggggggtcagccccccgcccagccagccgccccatctgggagggaggtggggggatcagccccctgcccggccagccgccccgtccgggagggaggtggggggatcagccccccgcccggccagccgccccaccctggaggtgaggggcgcctctgcccggccgcccctactgggaagtgaggagcccctctgcctggccaccaccccgtctgggaggtgtacccaacagctcattgagaacaggccatgatgacaatggcagttttgtggaatagaaaggggggaaaggtggggaaaagattgagaaatcggatggttgccgtgtctgtgtagaaagaagtagacatgggagacttttcattttgttctgtactaagaaaaattcttctgccttgggatcctgttgatctgtgaccttacacccaaccctgtgctctctgaaacatgtgctgtgtccactcagggttaaatggattaagggcggtgcaagatgtgctttgttaaacagatgcttgaaggcagcatgctggttaagagtcatcaccactccctaatctcaagtacccagggacacaaacactgcggaaggccacaggatcctctgcctaggaaaaccagagacctttgttcacttgtttatctgctgaccttccctccactattgtcctatgaccctgccaaatccccctctgcaagaaacacccaagaatgatcaataaaaataaataaataaagaaagaaagaaagaactctccaaaaattatactaaaacccatttatcacttttgcagacatttttaaattcagtgcagtgaaatagggtgttaatgaaagattgtaatagagtagaagtcagtaaagtgatgaaaacattttctaaaacttgacatgatcatttactggtaaaatcactctctggtagccgatacttttttcttttctgtatgcccttatagatgaaatacaaaacaagtgcttaataaaatatatcaccaaaattaaaagaactacagaagcaacagcaaacaaattcaaaagctagcagaacacaagaaatgactaagagcaaaactgaaggagatagaaacacaaa

SEQ ID NO: 15174 - DNA, 1955 bp, Artificial sequence
  DNA replication origin
tgcaacttctctgcctcgtcctgctctgcctttgcgagcagctcctccacgctctggccctccatggctccggctcggctcactcgctttggggctgcagctgaagttacttttcctacagtggcggcccaaactccggcagcataaccacgtgcagatgccgggatgcccaatccggaaaagaaaggttcgcttccggagcgtccggaagcggctcgcaatccgggcgaccagaggaaaggccggcagagggcggtatggagagatgatgggattagaagcgggacctttaggctggcgccagatagaggcggagctggcccgagcaggccgcactgctagttccagagcaggattgggactacgattcccaggatgcagggggcgggaggcggtctagagggcggtccagggacagctcggggggccgcctagggggtggtccagggggcggtccggggacagtctcgcaggcggtctagagagggcggtcccggggggcgatctagggggcggtcttggggggggcagttcagggagtggtcttaggatggtggtccggggacagtcttggggctcaatccggaggggcgggccggagggtttgtccaggggcgcggtccgggaccggggcgggtacaaattcctgggactgcctgtggtgtggggttccaatcaagtgcgtgttacaatttcagtgtaaatccgttgtgaagatgtttagacaatcacccttcttagggccaaatagtttcactggagtcatagtcggctttcagggttcctagttgtggcccgagaaagataacatcccaaagatacacatagagctaattgtagaagattcgttttgttttgggagtcagtggctctggcaatgaagccaccccgagtgggcgcgggtgtgcaccgaccctagtgagctagctgactcggagatccgggattctgcagttacagaacctagtctagttcaattaatctagtacagtgctgaaactaagccacgctctgcagttacactgcctgggttccaatcctgactgtgccactgttggtccttcagcaattttacttgttgaggccgttttaaggcctgcgagataatgataataatacttcctagggtggttataagataaatgagttaatatcgtccaagggagggttagacgagggcctggagcgtatgagtactcagtacaaattagccaaataccgattattatttcattttcataggctctgggaggtaagtgctacatggtgttaagtatgagtcaaacggcctacaatcaggtatcaggtcaccattacttggagaggatgtttgatctaagccttatttataaattgacaaacataaaacattagttactgctacatggtaagaactcagtatgtgttagctattagtattaactatgttattaattattgtattaactatattattttcacagatgaaacaaggagggctcagagaggtgaaatgacttatctaaagttatgcagttagggaatataagaacaagagatatcttaactctggttttaagtctgtagatctattctctgcaatgtcgtccaagctcttgatactcattaaagtgtggtctgcataccagcagcataatatcccctgggagcttgttggaaatgcagaacgtcaggcctcactctagatgtaatttatcagaacctttattttaataagatctgtaggtgactaggatgtacatttgagtatcagaggcactgttgattgcgtggtttacagggtttatcttcctttcactgggggccaggtttatcctagagggggttatgctggagaattaaccaatgaaattaacttaatagcaattagcaaatagactcagtttagtttcagcattgtgctagcctttctcatccagaagcattttagaatttgctgttttttttttcccctt

SEQ ID NO: 15175 - DNA, 960 bp, Artificial sequence
  DNA replication origin
ctggcagcagttcgcgcgcctcaagggcatccgtcccaagaagaagaccaacctggtgtgggacgaggtgagtggccagtggcggcggcgctggggctaccagcgcgcccgggacgacaccaaagaatggctgattgaggtgcccggcaatgccgaccccttggaggaccagttcgccaagcggattcaggccaagaaggaaagggtggccaagaacgagctgaaccggctgcgtaacctggcccgcgcgcacaagatgcagctgcccagcgcggccggcttgcaccctaccggacaccagagtaaggaggagctgggccgcgccatgcaagtggccaaggtctccaccgcctctgtggggcgctttcaggagcgcctccccaaggagaaggtgccccggggctccggcaagaaaaggaagtttcaaccccttttcggggactttgcagccgagaaaaagaaccagttggagctgcttcgtgtcatgaacagcaagaagcctcagctggatgtgactagggccaccaataagcagatgagggaggaggaccaggaggaggccgccaagaggaggaaaatgagccagaagggcaagagaaagggaggccggcaggggcctgggggcaagaggaaagggggcccgcccagccagggagggaagaggaaagggggcttgggaggcaagatgaattctgggccgcctggcttgggtggcaagagaaaaggaggacagcgcccaggaggaaagaggaggaagtaatagtttctaactgtcggacccgtctgtaaaccaaggactatgaatactaaatgttaagttctaggcaattatacggggactcagaaggacctggccgctgccttcattgagtttaaagggacaggattgcccttccgtcaagaaagtatgtaagtgttggactgcacaaattaatgtttttcccacaaccgagactttgg

SEQ ID NO: 15176 - DNA, 1075 bp, Artificial sequence
  DNA replication origin
tcccggctccttccccgactcccgcgagttccagtcccagcttccagctccccagccccgccctcagccgcgcgcgctctcccctccccgccctcgcttcttcgcgtgcggcccccacagccaatgaggttcagggccgcgtgcgcagattcaaacggcggctcttgagggaggctgggcgcgagattcggcggtgcggacaaaaccctgcaggagactgcgagccctgcagaactgctagctgcgggggagagggcaggggtcgggcgcctgtggcggagccgggctggggccagggcagggaggctgacaagcggcgggagaagccggcggagggcgggatcgcgcctcctgacatgttgggggtatccctggccgggccgggccggggctaagagcggcgctgcgggccggggtcggggtcgggtcgcggtccgcccccgctgtccctccgtcctgccctgtcgaggacgtgcgttccgcactcggccgcctccagagggagcgagggaagcggctagaggatcggggagaaggagcattcgccggaggctggaggaggctgacccgcgtccccgcccagcctgctcctatgcggtacttgaaggatggcgaagaggtcgcgcaggtgggtggcacccctttcgcccaggcctgtcggcgccgtctcggctcagattctctttcctatcccgctgccccctcccgccataaggccctccctggcgagggcagaggtttttcttcccgcgtccccgcggccgcttggcctcgatgaccggagggcagctgcgacgtgtggagagttggggaccagggtgtttgaggcgcgggacgtaagagatgcccaggtttctcggtgactctccccgtaatgcgcgtccagatttctgacctcatgctgccacttcttcgaggcaggtttcttgccaggtaagtcgagcgcttttagggagtccgctacgcagagaaaactgactgtgtcctgccgggaggacttgaaaatggtgttcgggcgactcttttctgaatgacggtacagtcaaaataggaactccgcggtgaacctgggcgg

SEQ ID NO: 15177 - DNA, 1049 bp, Artificial sequence
  DNA replication origin
gctggaagactctaattcccagagggcagagcggaagctgcgcctgcgcacactcaatgagggcgtgtatgtctgtgtctgagggagagagagcgagagtgagtgagtgtgagtgcggggtggggtggtggccgttacgttcggggcaacggctacggcagtggagaagtaagaagagaaacaacgtccggcgcttccgccttcgcttaggaggaggaagagctggtagggaaaggaaagtgcttcgccctgggcctggactggaccgagtcgggttggtgggggtctgggctatgagcttttgagggtcgcctgggacgcggagcgagacacgagagccaggagctatgtctcagccgccgccgccgccgcctccgttgccgccgccacctcctccccctgaggctccacagactccgtcgtccttggcgtcggcggctgcttcgggggggcttttgaagcggagagaccggagaatcctttccgggagctgcccggatccgaagtgtcaggcgcgtctatttttcccggcctccggttctgtcagcatcgagtgtaccgagtgcggccagcggcacgagcagcaacagctgctgggggttgaggaggtgaccgacccggacgtagtgctacacaacctgctgcggaacgcgctgctcggggttacgggggcacccaagaagaacacggaactggtaaaggtgatgggcctttccaactatcactgcaaattgttgtcgcccatattagctcgctatggaatggacaaacagacaggccgggccaagcttctccgggacatgaaccagggcgaactgttcgattgcgccttactgggtgaccgcgccttcctcatagaaccagagcatgttaacactgtgggctatggcaaggaccgctccggaagcctcctgtatttgcatgacactctggaggacattaagcgggccaataaaagccaggaatgtctcattccagtgcatgtggacggggatggacactgcttggtgcatgctgtgtctcgggctctagtaggccgagagctcttc

SEQ ID NO: 15178 - DNA, 1084 bp, Artificial sequence
  DNA replication origin
ggagcagagggaaacaccagagtctgtgactccagacaggacccactgtgtcctcttgaactttgcacagcgcgtgacgggggcagacggtgcaccgtggcccggcctttcgcgggggtcctcggggaagagagaggagcgcgggtttcctcggaggcctgagcgggacgcagcctgcagcccctccccgcacgggctgcccccggcccgccgctcgcgccgctctgctgggatccggcgccttccccggctgtcctcggcctcccgcgcgctccgcgggaggagccgccagcggccgtgacgcgtcaaggaggaaacgccggcgcccggcggccctgccgggaaggaggaagcgcagtgcgttcggctccgcgcccgccgcgccgggagcagcaccgcggggccaggtaggtgcggggccggcgggagggtccgcgcgcccgggactccgacggcggcccggggcgggaggagacggggcggggcgagggctgcccgggcctcggccgctgcctgtcctcggaaaaagccgtacctccgcccagcccccggctcccggagagtttgtggtctttgtttccacgaggtgaattcagatcctgcctcgagattcctaaacgcccaaggggcgtcggtggctggaccttgttaacccccacgcagccgccgagcctggaggaactgggaacgccgagcagggagaccctatctgaggtcgaaagtgggtgcaggtcacctgcgagggtcggggagggggcagccgccagagtggggtggatggaatcgtttaacctgttgtcagcggatctgtagtaaaagaccttaatacgttgcgtcttttaagttctctgtaatttgaacccttacgtctcttcaagtgaatctggccctattaattctcacagttttagctttggaatgtacccacaagaagtgctttgagatttttagattctgtcatttttagtcatcgttacttggaaagagaaaagagaaaggaatcatctcttgaaacttaaaacgctttcattgagttgtgcacagtgacttctgaaccatgagtagaatttcagtcctgcaccag

SEQ ID NO: 15179 - DNA, 1197 bp, Artificial sequence
  DNA replication origin
ttaatagcccctgggcacagcaggagaacgagttgaccaagtccccggccagcgtactggcgaaccgagagcagcgggcagctatgcggcctccaggacagcagggggcgatgtcttgccgcgcggccgcctgcagtgggggcggggccgtacccggcggttggcgaagggcgagcggagggctgggcctgaggggcggagccccggcccggaggtctgtcatgctgttcccgctccaggtggccgctgtaacctcttcggtccgcgacgatcctctagagcactgtgtgtctccccggacgcgagcccgctcccctgagtaagagtcagccagccgcggatggggagcgtgagtggcgaggtgtggcctggggtggtgtaggttgagggtggagggtcctggggctgcattcgctgccccggagcgggggcaggggcagtggctccctcggggcgtaggtctcgaggcaactaggccggcgacgtgccagagttacaggctctggaatctgggggtgggggtggggtttcttgtcggcagggggtctcgtggcggctgggtgcggtgggggaggtgcccgagttaagggtgtggagagttgggatttcgccgccgtgaggccggcatcggtgactacgagttatgagggttgggggcgggagttctgtgagcaggggtcttgcagctgccggggtcggggaggttccctggttacacggtccggattcctgggccactgcggtcgctgctgcccgcggtgttgttgatagctggttgcctgacgacgcttcctagtcagccacctccagggcccgggggcgagcggttccttggttcccatgcgccttctctccccaacggccaggccccccctgctccgtcaagcctccccgagcgcctttcttgcccctcggtgcttgttattgttaacgtgggagcgcttgtgcgcactgctttgctagtaaaacttatttaatcttcaccgtagctcgtagctcgtactgttgtgaccgtatttccccccgtgattgcccgactgcttgagcttgaacctcttgtttctaactgccttgattttaggaatcttatgtgggactcaaatccagttgtcagtacatgttattaatgggactcatcttttgagagaggctagctctcaagattgtaggattaagacgcttaactaggattgcggg

SEQ ID NO: 15180 - DNA, 1308 bp, Artificial sequence
  DNA replication origin
acacagcacatgtttcagagagcaccgggttgggggtaaggtcatagatcaacagcatcccaaggcagaagaatttttcttagtacagaacaaaatggagtctcctatgtctacttctttctacacagacacagcaacaatctgatttctgtatcttttccccacatttcccccttttctatttgacaaaaccgcaatcatcatcatggcccgttctcaatgagctgttgggtacacctcccagacggggtggcggctgggcagaggggctcctcacttcccagaaggggcggccgggcagaggcacccccacctcccggatggggcggcggctgggcggaggctgccccccacctcccacccggacggggcagctggccgggcgggggctgccccccacctccctcctggacggggcggctggccgggcgggggctgccccccacctcccggatggggcggctgctgggcggaggggctcctcacttcccagacggggcagctgccgggcggaggggctcctcacttctcagacggggcggctgctgggcggaggggctcctcacttctcagacggggcagctgccgggcggaggggctcctcacttctcagacagggcggccgggcagagacgctcctcacctcccagacagggttgcggccgggcagaggcgctcctcacatcccagatggggtggcggggcagaggcgctccccacatctcagacgatgggcagccgggcagagacgctcctcacttcctaaacgggatggcggctgggaagaggtgctcctcacttcccagactgggcagccgggcagaggggctcctcacatcccagacgatgggtggccaggcagagatgctcctcacttcccagacggggtggcggccgggcagaggctgcaatcttggcactttgggaggccaaggcaggcggctgggaggtggaggttgtagccagccgagatcacgccactgcattccagcctgggcaacattgagcactgagtgaacgagactccgtctgcaatcccggcacctcgggaggccgaggctggcagatcactcgtggttaggagctggagaccagcctggccaacacagcgaaaccccgtttccaccaaaaaagtacgaaaactagtcaggcgtggtggcgcgcgcctataatcgcaggcacttggcaggctgaggcaggagaatcaggcagggaggttgcagtgagccgagatggcagcagtacagtccagcttcggctcggcatcagagggagaccgtggaaagagagggagagggaggccgtggg

SEQ ID NO: 15181 - DNA, 1310 bp, Artificial sequence
  DNA replication origin
gggcggctggccgggcggggggctgaccccccacctccctcccggacggggcggctggctgggcagaggggctcctcacttcccagtaggggcggccgggcagaggcgcccctcacctcctggatggggcagctggccgggcgggggggctgaccccccccacctccctcccggacggggcggctggccgggcggggggctgacctccccacctccctcccggacggggcggctggccaggcagaggggctcctcacttcccagtgggggcggccgggcagaggcgcccctcacctcccagacggggcagctggccggtcgcggggctgacccccccacctccctcccggacggggcggctggccgggcagaggggctcctcacttcccagtaggggtggccgggcagaggcgcccctcacctcccagacggggcggctggccgggcggggggctgaccccccaacctccctcccgggccccacctccctcctggacggggtggctgccgggcggagaggctcctcacttcccagatggggtggctgccgggtggagaggctcctcacttctcagacggggcagctgccaggcggaggggctcctcacttctcagacggggtggttgccaggcacagggtctcttcacttctcagatggggcagccgggcagagacgctcctcacctcccagacggggtcgcggccgggcagaggcgctcctcacatcccagattgggcggcggggcagaggcgctccccacatctcagacgatgggcggccgggcagagacgctcctcacttcctagatgtgatggtggccgggaagaggcgctcctcactttccagactgggcagccaggcagaggggctcctcacatcccagacgatgggcggccaggcagagacactcctcacttcccagatggggtggtggccgggcagaggctccaatctcggcactttgggaggccaaggcaggcggctgggaggtgtaggttgtagcgagccgagatcacgccactgcactccagcctgggcactattgagcactgagtgaacgagactccgtctgcaatcctggcacctcgggaggctgaggctggcggatcactcgcggttaagggctggagaccggcccggccaacacagcgaaaccccgtctccaccaaaaccagtcaggcgtggtggcgcgtgcctgcaatcgcaggcactcggcaggctgaggcaggagaatcaggcagggaggttgcagtgagccgagatggcagcagtacagtccagcttcggctccgcatgagagggagaccg

SEQ ID NO: 15182 - DNA, 1260 bp, Artificial sequence
  DNA replication origin
gtcagccccccgcccggccagccgccccgtccgggagggaggtggggggggtcagcccccccgcccggccagctgccccatccaggaggtgaggggcgcctctgcccggccgcccctactgggaagtgaggagcccctctgcccagccagccgccccgtccgggagggaggtggggggtcagccccccgcccggccagccgccccatcagggagggaggtgggggggtcagccacccgcctggccagccgccccgtccgggagggaggtgggggggggtcagccccctgcctggccagccgcccagtctgggagggagatgggggggtcagccccccgcctggccagccgcctcgtccgggagggaggtgggggggtcagcccccccgcccagccagccgccccgtccgggaggtgaggggcgcctctgcccggccgcccctactgggaagtgaagagcccttctgcccggccaccaccctgtctgggaggtgtgcccaacagctcattgagaacgggccaggatgacaatggcggctttgtggaatagaaaggcgggaaaggtggggaaaagattgagaaatcggatggttgccgtgtctgtgtagaaagtagtagacatgggagaattttcattttgctctgtactaagaaaaattcttctgccttgggatcctgttgatctgtgaccttacccccaaccctgtgctctctgaaacatgtgctgtgtccactcagggttaaatggattaagggcagtgcaagatgtgctttgttaaacagatgcttgaaggcagcatgctcggtaagagtcatcaccactccctaatctcaagtaatcagggacacaaacactgcggaaggcagtgtttcctctgcctaggaaaaccagagacctctgttcacttgtttatctgctgaccttccctccactattgtcccatgaccctgccaaatccccctctgtgagaaacacccaagaattatcaataaaaaaaaaattaaaaaaaaaaaaaaacaacacacaccagaatcaaaccccagaaaactaaagacaaaacaatcttgaaagcaggtagaaagaaatgacataatatcgatagaagaaaaatgattacagtgacagtggacttcttattggacaccatggaagccaataggagctgtggcacaacatttccaagaggtgaaagaaaagatctgtcacccagagttatatagataatctgtgaaaaatcctaaaggaataaaggtaaaatca

SEQ ID NO: 15183 - DNA, 1331 bp, Artificial sequence
  DNA replication origin
cctcgacgcccttcgccgacaccgcggctggtcccgctcgcccgccccttcctgatcctgccgctgccctccacgcctccaatcccccacctccaccccctctcctttctctcttctcttccttcctctcctcctcctcccctccagccgctgggagccgcgggtcggacgagccgccgcctccttctctgcgtccatgtatgaggggaagaagacgaagaacatgttcctgacccgggctctggagaagatattggccgacaaggaagtgaagaaggcgcatcactcccagctgcgcaaagcttgcgaggtggcgttaggtgagcggggaggaggcccgggggatggggtgcttgttgtggggcggggaggggggcgcctgtgggggggtggggtcgcccggggcttgcccgaggcccgcgcctctgacctcgggaagccctcgcggagccctctgttccctgtctggagttgacaggaactcggctggatgtggggcagaggcggggtagaggaggaagggcagtgagctgggctcgggaaacgcggcagggcttaggatcgcggggcacctgggttcgagggatcgacttgagagtgagaggattttgttggtggtccgtgaggtgcggactggataccaccctttgtgatgaagcagaagatgagctgttgtttattagcttggaaattgaggtggggctggtatgtcaagattgggtgtgggaaaggttccgtatcataattaacaataactttttcgtttggcgaggtactttggggagataggctgctgaagttgtttccttgttgacagtcttgagaaggggtttgcaagaggtgcagcccgttctgacatctctccgcctccgccacaggaaaaacatagagtaatattgtatctgactgggctgacctggaagaacaagaccggtggttaaggggtgagggtgggggtggcggcatgaaagcagggaagcaaagaacctttagataaaatggctttaggtgacaagggaagggagggtttgaaatgaggaaaatgaaaaagacaatgacacccaccagccacatgtctggacagtggcagctgctctcaagcttgaattgtgatttatagttcagatggaagagatctagtgtaatgaagcccgcagcagggaaaatccaaacaatacctcctacctatgaggttaggcagatgaggagttgttaaagggggaacattgttagatctattgcatccatcaaagttgaaatcgtttgagagaccagaacatttaacacaaagatacattcctaatgtttacactttatagcactggaaatac

SEQ ID NO: 15184 - DNA, 1371 bp, Artificial sequence
  DNA replication origin
caggggccctctctgctaagagcatttcttgagaaggaaggtcctcaggaatgcagtgctgtcttccatcctgggatattcctaagagaggaggaggcagcaggaggaactccatagtcacaggtactggaaatgtgctgcttacactgtgaagatcaaaactgtgctcccagacagcatgccgtgctgtgaaattgtaaaacctttctgaagcttgaacctaaaatatggaaggtacagttcttgaattgatggtggttcatgcatgagaacatcctgattgtgcaaatggccctgtaaacatcaatctgcctatctttttagcaacatcaaaggaaacactgaactcattaatctgctttggagaaactcccagggaaaggttaacaaaacaaaaaggtcttatccccaaataaaaactgcaattttgcaataaagaaatgcacagggtgggtgtggagagaggtgtattgggagggacaggactttagatctactatggataccacaagcccaaacttactgccacctttattcatttacccaacaatgacttgtggaaggctctctgtgcatcaggtactgccctcagcatgttggggaacatcagtaaacaaaacaaagattcctgtcttccgggaggttacattccagtgagaggagaggtcaacagtgaatacagtaagtcaattatgtaatgttgatagatggtaaatgtaactgaaaacaaaattgagcagtgtaagagggttggaagtttcagaggtgaactgaagaatggattaccagttgtaaccaggatgatcagaacaggcctcactgaagctggcatttaagcagtctggaaggagtggaaagttagaaatgtgagcatctggaaaggggtcatttttggcagagggaagagccagtgcaaagccacagggctggtgtgtccaaggaacatcaagaaaaccagtgtgaccagagcggcagtgagagggaggcagaggaggcaggattggagaagcaatgcaggcagggagggcacagatcctgaaggccattgaaaggatttggctttgaccatgagtgaagtgtacagccactcaggacaactgtgggttggtcggtagcagcaaagataccacttacaggagagatggcagtggctcacccaaggccaccagcagtagaggtagggaggaaaggctgcatgtttgaaggtaaagccacaagaatggtgtgagagaaagggaagtgaagagtgtattcgaggttttaggctgagcaatggggaggatgggcataagcccgagatagagaagacagcagaaaagcaaactgcaggagcactggggtggggcaggggaaggatcaagagctgatttg

SEQ ID NO: 15185 - DNA, 2088 bp, Artificial sequence
  DNA replication origin
gcaccttcaccattggctttttaagcggcgctgtcgctagggagcggctggtagggcgagcagcctcggggagcagcccgggctgtttgttccgtcaccggggaaaggaggtacacacagtcgcgcgcgcacggacacacacacacacgcacgcacgcacacacaccggtggcgagttcgagccccgcggcccctgtccgcccgcgtgcgcccctcgacacagctcgcctcccgccccctgattcctgctgctgccgcccagaggagaaaggaacctctgcctcgaatttccccactgcgccgggcgctgcggagagcggcgagggtgggcgcgaggcggagaacgcgatgaatgagttctcccctcgcctcggagttgtctgagttggcggcgctgcgcccaggcttccggctctcagcgccccacgcgcgcgtggctccccgggctgccacccacgcccgcggccggggccgagccagccacgcagggcagccgaggctccggagctcctgtcccggccccagtccgggtaaaaggagggttgtccccagcggaggcgcacagccgcgcgttctccctgcactctcttcgcggtcccatctgttccccatggcgtctcatccgcaaacccggatccaggcttacctggagaagaacaagatcggtcccctgtttgaggtaaggcgctgtggaggagggcagtcccgttgtctttaggggaaggggtgcagtaatgaaaacagaacactcccaatcccacccctcccagggaaggagggctagagaaccaacgcgcgggagagggcgccctgggattcactggcattcgctctgtcccggccaggtgtcctggaacgcggccgggcgggcacttagccagttacctgaacgcggacaggtgagctcgggagggcccagcctcagcctggcaggggaagttttggccctctgactgtcctgcacctctcagctacatgttcaggacccgggcaggctgaggcaggcgacgcatacggatgcacacactcagactgtgttgcacacgcacactttcttttttgaattcacgctatcttgagtgttcgtgttggattttcttttttcttttcttttctttccttctttttttttttttttttttttttttttttaatgagggcggtaatagaacccgaaaaggtggaggaggtgcttagcagttaatacaattaactggaagacagctgaactggtgaggagtaggcttcagtcggtgcgggcgtgatgaatgaaattggcaaactgagagactgccatttggtcactggacgaaaggagagtcctttgcactgcagaccccacatgtgttagcaggagaaagggacggagaaaggttctgaaaagcacacacgtatttgtggaagaagactatagctctgagctggttttgtttttttttctctctctcgccattaaagaatttaagacaaaaatacagtagaaggaagagcgcgaggacacgagaaaatgagaacaagagattgaagcctggcaccagcaaagcgtcccgcgggttgccagggtgctgagcaggggtggggcgtgcggaccgtagtcagaagtggaggcccttgcggagggactcccttggtcccatccagttcagggggcactgaccggcggcgagagttcgcgggagggtcgaggtgctcccgccttgcccccgccttgcccccgccttgcccccgccccccacgtctcccagaagcagttgtagctgttcttaacagcttggtttggggtgagggcttggtatggggaggaggttacgtgtcagtgtctgagagaggcagaatcgcggcaagtggaaggggctgcactggagatcgcggaaaacctagcaaagactgaagagaagcaagtgagaactgtggagaacaaaaaaataatgcgagttaatgaccctgcaaaaaaagggcgcggaggacaaaggtgtggtccaataggtcttttgggaggacgggtttcacataacaagatttgcaagatctcctaagtttttttgcccaactttaacgttgatctgtcttagacgataagaccattgt

SEQ ID NO: 15186 - DNA, 1159 bp, Artificial sequence
  DNA replication origin
ttgatgaaaaagagcctaaatgcttctgatttgggataaagaaaaaggagcattaaccttgctatgcctttggctccagccacctttttaagagtaaattgctgggcaggtgggggagggctagtcacggaacgaaactgtaagctggaccaggtgtggggaggggaggtgataaaaagattatagggtggaggagcagaggctgaggaagaattgggacctagctcggcctggtgaggagcagcctggggaggaagggagaggtcagatgggtctgtagaaaaggaagattagaaagactcagcgatgcttggggttgggactgaggggacaggcaggagggaaagaaggaagatttgggatgagttgcactgggcacagagactaggaagggactgatgtgtaaaagaatgcctggacatcaggcacctcagaccgtttgcctattttacgacaagaattatttagattttgcaggatggaaaaattcaaagtgccattttctggctatttggaactgctgtcaagtttgtattggggtcaagcggcattgcagaagaaaataaggcatttaggttttaggtcaggtgtgagttgaagaggtttttaagtttttgagaacacaggctaagggaggaggaggaggaatggaaggtggaagcttgcctatagtgaaggaagcaagcctagagaaaagagagagtagagaaatggggggaaggggttcgggggttcttaccttccagaaaagtgggaaaaggggttggggtgcagagataagaggtcggggtgtggaaataagggattggggcacagagatataagaggttggggttcagaaataagggattggggcacagagatacgaggctggggcacagaaataagggattggggcacagagataagaggtcgaggtgcagaaataagggattgggcacagagataagagatcagggtgcagaaataagggattggggcacagagataagaggttggggcatggaaataagggattggggtgcagagttaagaggttggggcgtggaaataagggattgggggttcttgccctgtagaaaagtgggacttgccactaagggtgaaggagaaggggttgaggggtacttgcccctctcccagaaaagcagagaagagg

SEQ ID NO: 15187 - DNA, 1348 bp, Artificial sequence
  DNA replication origin
ttcccagtaggggtggctgggcagaggcgcccctcacctcccggatggggcggctggccgggctgggggctgaccccccaacctccctcccggacgaggcggctggccgggcagaggggctcctcacttcccagtaggggtggccgggcagaggcgcccctcacctcccggacggggcggctggccgggtagggggctgactcccccacctccctcccggacggggcggctggccgggcggggggctgacccccccacctccctcccagacggggcagctggccgggcagaggggctcctcacttcccagtaggggcagccgggcagaggcgcccctcacctcctggacggggcggctggcctggcggggggctgacccccccacctccctcccggacggggcagctggcctggcggggggctgaccccccccaaatcccccccggacggggtggctgccgggcggagacgctcctcacttcccagacggggtggctgctgggcagagaggctcctcacttctcagacagggcggctgccgggcggagggtctcctcacttctcagacgggcggccgggcagagacgctcctcacctcccagacggggtggcggccgggcagaggcgctcctcacatcccagacggggcggcggggcagaggcactccccacatcccagacgatgggccaccgggcagagatgctcctcacttcctagatgtgatggcggccgggaagaggcgctcctcacttcccagatgggatggcggccgggcagagacctcctcactttccagactgggcagccaggcagaggggctcctcacatcccagacgatgggcggccaggcagagacgctcctcacttcccagacggggtggcagccgggcagaggctgcaatctcggcactttgggaggccaaggcaggcagctgggaggtggagattgtagcgagccgagatcatgccactgcactccagcctgggcgccattgagcactgagtgaaccagactccgtctgcaatcccagcacctcgggaggccgaggctggcggatcactcacggttaggagctggagaccagcccggccaacacagcgaaaccccgtctccaccaaaaaaatgcgaaaaccagtcaggcgtggcggcgcgcgcctgcaattgcaggcactcccaggctgaggcaggagaatcaggcagggaggttgcagtgagccgagatggcagcagtatagtccagcttccgcttggcatgagagggagaccgtggaaagagagggagagggagaccatggggagagggagaccgtggggagagggagaccatggggagagggagagcagaa

SEQ ID NO: 15188 - DNA, 907 bp, Artificial sequence
  DNA replication origin
ggaagtgaggagcgtctccgcccggcagccaccccgtccgggggggatttggggggggtcagccccccgccaggccagctgccccgtccgggagggaggtgggggggtcagccccccgccaggccagccgccccgtccaggaggtgaggggcgcctctgcccggctgcccctactgggaagtgaggagcccctctgcccggccagctgccccgtctgggagggaggtgggggggtcagccccccgcccggccagccgccccgtccgggagggaggtgggggagtcagccccctacccggccagccgccccgtccgggaggtgaggggcgcctctgcccggccacccctactgggaagtgaggagcccctctgcccggccagccgcctcgtccgggagggaggttggggggtcagcccccagcccggccagccgccccatccgggaggtgaggggcgcctctgcccagccacccctactgggaagtgaggagcccctctgcccggccaccaccctgtctgggaggtgtgcccaacagctcattgagaacgggccaggatgacaatggcggctttgtggaatagaaaggggggaaaggtggggaaaagattgagaaatcggacggttgcggtgtctgtgtagaaagaagtagacatgggagacttttcattttgttctgtactaagaaaaattcttctgccttgggatcctgttgatctgtgaccttacccccaaccctgtgctctctgaaacatgtgctgtgtccactcagagttaaatggattaagagcgtgcaagatgtgctttgttaaacagatgcttgaaggcagcatgctcattaagagtcatcaccactccctaatctcaagtacccagggacacaaacgctgcggaaggccgcagggtcct

SEQ ID NO: 15189 - DNA, 1884 bp, Artificial sequence
  DNA replication origin
aaaaccagcgcctccctgggtgtccagctccatgaccctgaaactggaaaaacaccagctcctccctgagtgtccagctcatgacgctcaaactagattaaaatcagctccttcccaggtgtccaggtgcatgaccctcaaactagaaaaatccagggagtttttttagtttgctgctgtttttccagtttgagggtcgtgcagctggagaccgaggaggagctgacgttgttctagtttgagggtcgtggagcttggagacccagagaggagctggtgtttttctagtttcagggtcatgtagctggagacccggggagaagctgatgctgttctaatttgagagacgtggagctggagacccggagaggagctgatggtgttctagtttgatggttgtagagctggagacccagggaggagctaatgttctagtttgagggtcgtgtagctggagacctggggaggagctgaagatctggtttgaggttcgtgcagctggagaccctgggaggagctgatgttctagtttgagggtcttgcagctggagaccctgggaggagctgatgttctagtttgagggttgtgcagctgcagacctggggaggagctggtgttgttctagtttgagtgactgggtcctcaaatctgagggtcctggagctggaatctatgggaggagccaatgctgccactgatgtcttaggttgtggagctgaagacccgtggagaagccagtgttggtgttttagtttgtgggtcatggtgctggagacccagggaggagctgatggtatcctagttgagggtcatgtagctggcaacccagggaggagctgatccttctgttgtttaagtctgaaggtcgtcaagctggagatccggggaagagttggtgctgcggttcaagtctgagggtcctggagcttgagcccccaggaggagatggtgctgccactaatgtcttaggttgtaaagctggacacccatggaggagccagtgttgctgttctagtgtgaggtttgtggagctggagatccaggggtgagtggcgttgttctagtttgaggatcgtggagttggagacccagggaggagctgatgttgttctagtttgaggctcgagtagatggagaccctgggaggagttcatgttctagtttgagggtcatgcagctggagaccctgggaggagctgatgctctagtttcagtattgtgcagctggagaccggggaggagctgatgttgttctagtttgaggttcatgcagctggaaaccctgggaggagctgatattctaatttgagggtcgtgcagctggagacccgcggaggagctgatgttgttctagtttaagtgtcgtgcagctggagttccagggagcaggtggttttgcagttcaatctgagggtcctagagctggaatctatgggaggagccaatgctgccactgatgtcttaggttgtggagctgaagagctgtagaggagccggtattggtgttctagtgtgaggtttgtggagatggagatccaggggtgagcactgttgttctagtttgagggtcatggagttggagaccctgggaggagctgatgttgttctagtttgagggttgtggagctggagacctggggaggagctggtgtagttctaatttgagggtcgtggagctggagacccacggatgagctggtgctgctgttgtttaagtctgagggtcatggagctggagatccagggaagagttggtgctgtggttcaagtctgagggtcctggaactggagcccccgggaggagtaagtactgccactgatgtcttaggttttggagccgtacacatgtggagaaggtgggctggtgttctagtttgaggttc

SEQ ID NO: 15190 - DNA, 1118 bp, Artificial sequence
  DNA replication origin
gccccaagccgcagccgctcttcgctgaccgccctctttctgctttgcaggtcggcagcttcactcccgagggtgccgcgagcccaggcggcgaacacccggtacccctggcgcagcgaggtgggatgctgtacggacagcagcgctaagtgcccccccacccccggcgcagggtgcactcgctcctggccgcgggcccagcggcggcggcggcggcggcggcggaggggatgagcccgggacgcgcgaggcgcctgcctcaagctaccgcccggagagggacgccgagtagggctcatcgcagtaccgcgcggacccctgccccctgtggcacgcggctgcggagccttgaagccgtgtctgtgatcaggatgcactgggcgcctcgcagctggtgaggatgccctgctgcgcggccctgcgcccccagccccagtcccaggtgggcaagactgactgggcccggcttcggcccctcgtgccggtggatgaaacgtgccggagtgcttgggtgccatcagctatcaaatctgaattctaagcgccatggacgaaggcactggactgcagcccggggcgggagagcagctggaggcgccggccactgcagaagctgtccaagagaggtgcgagccggagaccctcaggtctaagagtttaccggtcctcagcagcgcctcctgccggccaagcctcagtcccactagtggagacgccaacccggcctttggctgtgtggattcttcgggccaccaggagttgaagcaaggcccgaacccgttggcccccagtccctctgccccgtccacttcggcggggctcggggactgtaaccacagggtggacctcagcaaaaccttctcggtgtcctccgccttggccatgctccaggagagaaggtgcctctacgtggtcctcacggattcccgttgcttcctggtgtgcatgtgctttctgaccttcatccaggcgttaatggtctctgggtacctgagcagcgtaattaccaccattgaaaggcgctacagtctgaagagttccgagtcggggctgctggtcagctgctttgacatcgggaacctggtggtggtggtgttcgtcagctacttcggcggccg

SEQ ID NO: 15191 - DNA, 1199 bp, Artificial sequence
  DNA replication origin
cgttttgtcttaattgtgggagcgggctggcgggatcggactgggggcgtttatcctgttcccttggatctggggctggctggggtggaggaggctggtggggaggcgcgggtcggaccccgggaagctcccgcgcggtgtcctcagcggcgcccgcttttctgcagagccgccgagcgtgcggtcccgggatggctctaccccggccaagtgaggccgtgcctcaggacaaggtgtgctacccgccggagagcagcccgcagaacctggccgcgtactacacgcctttcccgtcctatggacactacagaaacagcctggccaccgtggaggaagacttccaacctttccggcagctggaggccgcagcgtctgctgcccccgccatgccccccttccccttccggatggcgcctcccttgctgagcccgggtctgggcctacagagggagcctctctacgatctgccctggtacagcaagctgccaccgtggtacccaattccccacgtccccagggaagtgccgcccttcctgagcagcagccacgagtacgcgggtgccagcagtgaagatctgggccaccaaatcattggtggcgacaacgagagtggcccgtgttgtggacctgacactttaattccaccgccccctgcggatgcttctctgttacctgaggggctgaggacctcccagttattaccttgctcacccagcaagcagtcagaggatggtcccaaaccctccaaccaagaagggaagtcccctgctcggttccagttcacggaggaggacctgcacttcgttctgtacggggtcactcccagcctggagcacccagccagcctgcaccatgcgatttcaggcctcctggtccccccagacagctctggtaaagggagttcacaccatttgggagtcgaattggacgggaatgcaggcgggaacgggagtgtccgggaagaggcgcttccaggtggagctgaggctgcagagtgcgggaagggggaagtacctccatgagagccagggctgttctaggctcacttctgaggccctgcttgcttaactgcatgactaaggttggttttagtgagagctgaggaccaagagagaaatggttcctgcagcgaactcccaggtaggttcagattctatgctaacatgcaatgacagccttcagcagttcacacctaacag

SEQ ID NO: 15192 - DNA, 872 bp, Artificial sequence
  DNA replication origin
gaacttgctgcctgtctattaaaacgccatcctttcccggcggtgcgggggcgggaggactggcagtcgccgaggctcttcgctcccacctggccagggctcgtccacgcggctcccgaggggctaccccaggccccaatagtcctggtagaatgattggagtttccgaggaacccggggaatgtggcggacgctgcccgcgagggaaaagaggttcaggcggcgcatcctagggcagccaaaagtggcgcgcccctcccctgcgggcagtcaggaccgccaggacccgcggggtcacaccgctgggccagagcaggtcgcggggtccctggacctgcccgggggctctgggagcgcgtctccatctgcgcggtgcgacccagggtcctcggctcttccctcccagccgagggcccaggagcgcctggagctgtcgcttgctccattgccctccgaccgcctgcgctcggctcccggcccagccccgaggttggcagggccccgcggctcccacagaccctaccaacgagttttgtaggactgagaagaaggaaggaaagggaacttcaatgggttttgcaggaaccgggttgggggccgaaagcggagagcgggtgtgggaaggcggccgggcttagggaaggggtgcttggagagggaaggggaaggcaacactaacccggaatttagagtagggcaggatcccggcagatttccgtttggggcttttttgtgtttgcttctattgctgttttttcgttttgtcttaattgtgggagcgggctggcgggatcggactgggggcgtttatcctgttcccttggatctggggctggctggggtggaggaggctggtggggaggcgcgggtcg

SEQ ID NO: 15193 - DNA, 1056 bp, Artificial sequence
  DNA replication origin
ggacgcgagtccggccttctggactccggttcagggtgtgtgtgcgcgcggaggggcttatctgggggccctgggtagcacacgtgttcggtttttttctccccgactccgcacgcctggagcggcaatactgcctgccctagaaggccagcggcgagtgctcgccactagggtcccagggagggtttggaaaactgatgagttaagtgagcgaccccaggggacagagggcgagtcgagagtcggccaatggctgcggtgggcggggagaagacgacgcggggatctgcgtgggccgggtcaattccctaccctcgacctgtcgatgccccgcggccccgcccgccctcttaagcctggctcagccctcagggcccgcccgaagtctaccgagcccgagtggcctaccgagcccgagtggccccgcagcgtccaggaggcgcccgctccgcggtggcgctcttggaggtggtgtcggaggtaggcacgggacaggacgcgcctggggcccggggcggtggtcttccagggccgttggggagggcggcagcactcgctggcgcagttcgttttggatggtcgttctgccctctcgggggctttgaatcccaagttgcagatccctgaggtcggaggaggctaggagaagggcgcctttggaggatcgggaggagacgggccgctgcctgtgtcgtggctgacctcttctcctgaccccgtgttctttaatttctgagtcatgaccctgcttggttttcttattgggctcattgatctcaagacccgccggccctgaaggggcttcattcttcagcctcggtgaacttgctgcctgtctattaaaacgccatcctttcccggcggtgcgggggcgggaggactggcagtcgccgaggctcttcgctcccacctggccagggctcgtccacgcggctcccgaggggctaccccaggccccaatagtcctggtagaatgattggagtttccgaggaacccggggaatgtggcggacgctgcccgcgagggaaaagaggttcaggcggcgcatcctaggg

SEQ ID NO: 15194 - DNA, 1366 bp, Artificial sequence
  DNA replication origin
gggctggccgcgggcagcgcggaaccacgcgaaggcgtcgggggcgggcgggcgcggggaccagggccacccggtgcagcaaagggggcaagcaggcggcagggcgcgcggggagacaaggctgagtgcacgccgcccgcgccctcgaaggctctagtcccactccttcctcccttcttgcagccccgccgcgccctggcgaaggctacagggtcaggttccccgcaccgaggagcccagaagcccggctgcgggcgctctgaagatccgggaccccggcctccgtcccccgccagctttagggactctggcggcgtctcttagccgggtagatgttcctcctttccctctctcttccaagccgctgccaggccgggggtgaggctgcacctcagtcttcagccccgaaggccgcgcccggggcgggtcgctccccattcagctaagaggaagcagcggccggggggcaggcgaggaacctgtcccggctcacccggcaagactgcgtttcccccaccctcggcgcttctttctgtgaatgtgaatggaactaagcgttcctttctctccctcaatggccggcgaggagaattcaaatgcggtctttgggcgctcggtatgggtctggaccttggttttcagagcctgcgcgtccaaggtcgctagcctttcccgaaggaagtgacagctgcggcggcgcgggaggcccatcctcggtcgtttaaagccacttaaggaataaaagcccccgagagagcaaaacgaccacccgaaacctcggaagcgtcgggggtgccgggcccaacgctcccacgtgtcactgccggggactcgcgaggcgaagcttcccagcgctcaaggcgctcccgcctcgtccccaggtatcaggaacagacacccaccaggtccaccagcgggtcagacgccgccttcgggcaggctgggatcttccgaactgggagcggagagtaaggggctcgaccccgggacgcgagtccggccttctggactccggttcagggtgtgtgtgcgcgcggaggggcttatctgggggccctgggtagcacacgtgttcggtttttttctccccgactccgcacgcctggagcggcaatactgcctgccctagaaggccagcggcgagtgctcgccactagggtcccagggagggtttggaaaactgatgagttaagtgagcgaccccaggggacagagggcgagtcgagagtcggccaatggctgcggtgggcggggagaagacgacgcggggatctgcgtgggccgggtcaattccctaccctcgacctgtcgatgccccgcggccccgcccgccctcttaagcctggctcagccctcagggcccgcc

SEQ ID NO: 15195 - DNA, 1344 bp, Artificial sequence
  DNA replication origin
ccgcgggcggacgggaaggagctgcggcgggcggggcgggcggcgcgctggggccgagcaggccgggccgtggtgggggcggggagccgggggccgggccccggcggcgccgagccgggctcgcccctgactgaactttctgggtgcgggcgtgtatgcaggaggcgcgctggggccggggccgggggcgggaggcggaccgggaggttccgggttggctcgccagcgcccccttttctcgcccccttctctccgcccctgaagggacaggccctcggggccccaggcgggaagcgggaggggccctgtggccgcctcgcgacggtcacgccccgggcacggggacccggccctctcgggcccctggggggtgctgggggagggggccggggtcgtcgctgccggctgcgctccccgcctcctcccctcgggggagtcccagaggcgcctcttccgagaccgggggtgggtcggtccctggttagatggcccctccctcttcccctccctctagtggtttccggggcctgcgggaccgaggggcgggaatcggggactggagcccccttccgctggcccggagctggactgggcctcccgcgttctgggtccgtcactggtaggggaaactttcccaaaccagagaccgagcctgaacaccttcctccgccacctcgtcctctaatcccactccctctccacctcctccgacgccttcccctcccaccgacccgaatctcggtgcgtctgactgatggggcagtgagccaatcgaaggcagggagctgacctgccgggtgtcggtgagccaatcgtgcggaccggaggaaggaagggggcggggtttctcctgaccagttagagcagagttgcatgcggggcgggggagtcatggagacgctgagagccagctactcttgtccatccccgagtcacccgctccttgatttctggggttgtgtcacttataggggctccgacccgcagaggctgccgaggcactcgaggtcctgtatgtctttcgtaccgaaatagacgttgtcttagacacgacgaagtctaaagccactttaggatgtggcagtaactcaccgaggccggtttctaaaatggcatatgctgtagtgatcatgtcctggacctcagcgtccggtttacatgctaagggtcacagaagacagaagttacccgtttacctcttatctcggtttcactcagctatgccagaatggggacaatgaaatttgaaagggaaccctgagaatgaaggcatgggagcagtatcacgtcaactgattattggtagtagaaagcatcattgttcataatggcttcactggtttc

SEQ ID NO: 15196 - DNA, 1185 bp, Artificial sequence
  DNA replication origin
gctctgtcggagctcggcgcaggaagggcagtcgcggccgggggtggggacgcggcgccccccgcctgccgcccgccccccgcccgccctcgcggccccgggggaaggcgcggttaccggctcgggtcggtcacgccgtcaggtgccggctgccgtcggcgctgaccttcgccgccgaagctgtagccgaggctgcggccgccatgttcccgtgttaataactgctgcctggttgtttatttcaatggagatcctcccccaactccctcctcctcctcctcctcctcctcctcctccgcgtctccgcacttgcggagagacagacagcgcgagctcgcgagcaggggagggggctcgggagccaggccgtccctccctctgcctccccggcagtggccgccgccaagtcctgtcaccgggaaaaggacggggcggaaacttgcctctcgcgcccccgaggaaggggcaaaggtggacgcagggttgtccggggagcagcccctggccgcggggtccgcagcatctccgtcggcagagtcctctgagaaggcggcccggggagaggtgaagaagagtaaggggacaggggacaaaatgggtgactgtggtagagggagggtgacctagaggtgactggaactgaagagagagtcaacagaggactgcatgggagggcaaagggcaatgccaaaaagaaaactagcgactgggacgggcctgggccgctgagttagaggcagtggggcctgggggctgcagacggcagggacggtgccccaggacgaagatcggggagagccgagttccagggtcgccagcagaggaccctcgcgcccgtccggccggacccttcggccagcaccctgcaccccctcgggcgcacctcaccctacccaactcccggtcctgccgctgctccccggaggcgccccgcatccgtcaagtcccctacggctccaacagggagaggcttctcccattgcagtcctagctccagaggggatggagaggcgcgactgtgggagctggaaggggcaccacccggcaattgcgggataaagcaaatgctgcacacagagtgtgaaacttaacctggttgagaattttcggcacatcatgaaatcataagtttgtattggaaagtccattctctagacatccgtgaacaaagtactgaggggacgt

SEQ ID NO: 15197 - DNA, 1350 bp, Artificial sequence
  DNA replication origin
actggggctccctcgcccttgacttcccattggaatgggactggaagtctgtggaagacactagccaaaaaacagagggtttggggatttctttatactcccatcatccctccttgccttactatggttccaacagtgactatgtttgttctcctgtggccactgcctgtgtcaggtagcttttctgttactgtttcagctctaagtgggctccagggacctcattctctcccccgccgcttcaggctgttggttgtaatagcttcccatgctcttactccccgcatacttcaccatcccttgttggttcattcaacctgctactcctctgtgaataagcccttcattaagtgctctccagctaaattcttttgaatgggccatctattccttgccagttctctgacagagacagaggacagagaaatagtgctagggcctctgaattggaggcacctatggggctgaagaattgttgtggaggggggctggctgaggaggaagtggtgagagagtgggatgctggaaatgatttcagaggttgtgcagtcactggcaatgagatgcacagggtagaaaggtgggagtgggtagctgaggtgaatggaggaggagagctttgagagtgagaagtcaaggcagtaggaggctaaggtgctcagcacatggatgctaaatcaccaagaatgagtgaaggagaagaatggaaagggagccagtgagggagctgggcactaacatctgctgcaaatgaggaagagcctgagaggatggcagatgattgccacaggagggtagtgggtggtgtagtttcagggcatggacttccagaaaagctggggtttttgagcaagggaggagaattgtctgtcagcagcaatgaggaccatgaaagacacccattccacccctaggctctgtggtatgtggtgcgtgggagggaagaaacagccacctcttgagaaggctccagggaagcaggtttcagttttcagttagagctgcctccaggtttctgagcgagaaggtgaagaaaacattcagaaagaggcagagggtgttggggatttggtagatggcacacctggagctttgggggatacactgcaagagtttgggggctgcgaaggggcttttggcttaagcaaaataaaaggatgaatagagctttgtggggaggagattgtggtgatgatggataacaatggaggtttgactctggaggtgactaaggtggaaagagttttgaagcattacagaatgatcctgaggtcttttaggggaatgtggaggtttaataataattttagcttcttttttaggattagcctcttaagtttatagtgaaag

SEQ ID NO: 15198 - DNA, 822 bp, Artificial sequence
  DNA replication origin
cccagctagggacaggacgcggcgctctccactgcccgcgcagccgcgatcagtcaaagcccgggctccggggccggctgcgaacgttggggaggttggagagggacgtttacctggggccggtccccactaggtaggtgttggtgccttggagggtcatgggacccgggttacagcccaacacacgcacgactcgattggacagccgctcgacgcgctgcagtacagcagccattcccgcctcagccgcccgccggcgtgtcgcctatctggatactccagcgcggaagaagccaacaggccggggatagcgagtagcgtccacgtgatgcctcgcaacccgggagggaggggattggccagcggctggtccaggtgtcatgtgacaccgcggacgagccggggcggggatccggcagctaggccggggggtggggggggcggtgcggaactagaggtcacgtgacgccgcgcgggctgcgcgggcagtggtgggaaggctggcgcgaggcgtgaggtggcgtgaggcgaagctggaatctgcctctgtcacgggggctggtgcctcacgggtttgtgtcctagacaggcgagtggatccaagtgggcgagagacattttaatctggaagagtcttgtgatttgggagacaggtttggtaaccgttcgttattcagtaataaatgtcaggaaggattgccagatttttaggcagtggctctgtgtgtgtgtgtgtgtgtgtgtgtgtgtgtgtagtagtagtagtagtagcctgttcattttttttttttttttttttgagacgaagtctcggtctgtcgc

SEQ ID NO: 15199 - DNA, 1390 bp, Artificial sequence
  DNA replication origin
ctcacagtggaggcaaggaattgcaacttttttctgttattgtacaccttgaaggtgaggttagttaagtcctgttgtggggtttgagggccagattccaatttttggagttttatttaatgtcgggagcagattgggtaataaaatgtatattgagaacaagacagccttttgaccttttagggtctagggctgtaaagtgtctcagggttgctgccaaacgagccatgaactgggctgggtttttatatttgatgaaaaagagcctaaacacttctgatttgggataaagaaaaaggagcattaaccttgactatgcctttggctccagccacctttttaagagtaaattgcagggcaggtgggggagggctagtcacggaacgaaactgtaagccggaccaggtgtgaggaggggaggtgataaaaagattatagggtggaggagcagaggctgaggaagaattgggacctggctcggcctggcgaggagcagcctggggaggaggggagaggtcaggtgggtctgtagaaaaggaagattagaaagactcagcgatgcttggggttgggactgaggggacaggcgggagggaaagaaggaagatttgggacgagttgcactgggcacagagactaggaagggactgatgtgtaaaagaatgcctggacatcaggcacctcagaccgtttgcctattttacgacaagaattatttagattttgcaggatggaaaaattcaaagtgccattttctggctatttggaactactgtcgagtttgtattggggtcaagcagcattgcagaagaaaataaggcatttaggttttaggtcaggtgtgagttgaagaggttttaagtttttgagaacacaggccaagggagtagaaggaggaatggagggtggaaggttgcccatagtgaaggaagcaagcctagagaaaagagagagtagagaaatggagttgggggttcttaccttccagaaaagtgggaaaaggggttggggcacagagataagaggtcagggtgtggaaataagagattggggcacagagatataacaggttggggcgcagaaataagggattggggcacagagatacgaggtctgggcacggaaataagggattgggacacagagataagaggtcagggtgcagaaataagggattggggcacagagataagaggttggggcatggaaataagggattgggggttcttgccctgtagaaaagcgggacttgccactaagggtgaaggaccaaggcaggcgtccctgcatagtctgacacccttgaaacgtgagtgtataatcagagaggcatccctgcaatgattaaacaccaagggaaggctgccttcccagtccgtcaccggcgcca

SEQ ID NO: 15200 - DNA, 977 bp, Artificial sequence
  DNA replication origin
ggcgtagctgcgctctacgccgcggaggggcggcctcttggaggcggggaccgggtactcccgctgcagcccccgaagctccatctcctccggatcactcaccgagcccgtggacatcccgttgtcccccttgcccacacgcgtcctctttcctcccccctggccagtctcgctgtctccgccttccgctccctggcggaggcggaggccagagagcgctccaaggaagactaaaaacccaggccgggaagcgcggggtgagaaagcgaggtgggtggcgagagcgtgagcgcccctctgctgaccccggggagcgtggactacgagttggcgcccaagtccagaatccgcgcgcaccgcggtaagctgcgccttttgaaaaggctatctgtactccttggaacaaaccaccccgggcaaagaagagggggttgtaaagggggccaagaggtggggcaggggcgtggaaggggtggggaccgcttttctgcatgccgaagagcggttggtggaggcgggggaaggggacgtctctgcagagccgagatttgggctctgaagcccgacggcccttcaacatgtctgcgcaggataagtgagctttcggggagtgaaggggcacatcttgttcctaccgacggtgcttctacccccaggtaatcttagcagtggcaaagattaccagacacttagaaacgacgggattccgacctctgcttgcctgccagtctttccagtagaactcagttttcaagttaaccattcatgatgtatgattgtctacccaagccttgctggacaagagaaaaagcagaacaggcaaacaacatccaacaatgcacaagttacctctcattttcctcctccttttcttataatataccttcatggtttacaaaaatggttacaatggttcgttgccttttcaaataacatctgtaacttaatgatattatctccaatttgcagaacttgaa

SEQ ID NO: 15201 - DNA, 1502 bp, Artificial sequence
  DNA replication origin
agcgctgtccccggccgagcgcacagctccggcgccgcgaggcagagccccggcgtccccggcggtgcgctgccggctcgcgcagcccagccatcccgccccgccgcccaccttgacagccgggagcgctgaggaggaagagggggagggggaggaggaagagaaggcggcggccgctccagcccgcgggtgcgcggagcgcgggaggaggcggagcgggaggctggggtggccgcagccctgtgtgcgcgccgggccggctagctgcggggcgggggagcggcgccccagagcgccccgcctagcctcccgcgcgcagcctctaccctgctccgccacagacacacacccaccaagcacccaccgccctccgccctccgccctccgcccccgcggccgccgccgccgctgcgcctcgggcagccccagcgagcggcaactcccgggctggcgcggctcgctttctggctccttccgcgcggcgagctcagccccgctcgatttttcctcttctgttccagccctctcttgtctgggtggctgtggcggcggcagggggatggggaccccgtgtggggaaggggttgaagatcgatgaagattattgttcttttaaaggatgccttagcttcctcccgccgcctttcctctgagccttcctactagagaccgtgaaccagagtcagggatgtaaagacagggggaaagcacgccgggagctccagccagccggggagaccctcctctctgtggaggggagggggatttccagcgacaggtcattggcgaaggggatcgtcgcggggagaggctccccggagggagcggggaatcccacagccctttgtggtgcccgagcccgtgccgcctgctgagcggggtctgtgggagctaggtaagtggcgggggcattgctgctccccgaagggggtcttcctttaagaatgaatcatcgcggcagcctagccagacttgagttgctaaaggaattggaaactgccatatggcgcccagtggacttacacacaaagctgacttagccctgagagggtttttaatgtcaggctccttcccggtggggaaggcgctcaagtattagcccctgaaaagcttcccagcagcctgactgggaagggatggggatgttatttctaggagccgagctcttgttgccttccgtccatttgttggtaaatgccacactcacatgcacacacttgtgggactggatttagggagtgtgatgtctctgatgtatgaacgatcctcagaacacagagacatgcgtgcattttattcttcaagcggtgcgcggtctccgttctgtagcacgattcctgagagggagaacgggtctctaaggaaagagcttcatggctgtttccaacacactctgctaggggacttgggaatacgtttgccctgaatagcaccaaaagacatcgaccatttgcctcatcatttgctcccgatgcttaatgatcctcttcaaaatagtatgc

SEQ ID NO: 15202 - DNA, 1007 bp, Artificial sequence
  DNA replication origin
aatttgaaaagatcactctggttttggagtggccaatggaggggccaggaatcggctcattaatgagccagagaccatacaaggctcacagagaaataaatgaaaaagctgatgtgttgatctgcattgaatccaatagggcaaaacactgacttctcaggatagcaaaaaccatatgtttctcataggaacgtggaaatttcatgtcaacacaatccttgtcaagccattttgtttcttcttttttttcacacacaaatatttattgagagtctacttgatgccaggtgctgggctggcgctggggtcacgatggttgatgtggagaaaagttgatgtggagcctgctgtcaggtagatcacagcctagtgagaggggtgcaattatcagataatccagggaattaatggatttacagctgcagtaattggtgcagctggtagcaaacgagtgagaggtgcagggagctctcagcgggtgtaatcaggtgattcccctcggtcttgggggagaaggaggaggaggggctttcctggagatggagctgaggtatgtggggctgaggtgtgtggggctgaggtatgtggggctgaggtatgtggggctgaggtctgtagagctgcccaggcaggcagactagtgtggttaaacctgatggccaggtgtagagggtttgagggatttgggagctgatcaagggaaaagctatatccatgagaggcagtagcacagcgaagtttactgggctgtgcttggacagggctgcatgagagaggacgtcctcacagcatgagactgttcagaggcttatggtgggctggggaggagggcacagcaactcctgggggagagggagattggaaaggggccttaaatgtcaaggtgaggtcatccagcagcacagtggggagtcttttggtcagagacctcagaagggcagcagcatcttggggtctgataacacaaggcctatcagtggccaacagatgctgggtatagtttcaca

SEQ ID NO: 15203 - DNA, 1549 bp, Artificial sequence
  DNA replication origin
ccaccccgacccccgccccgccagcacctgcttttccgctcccgcgccccggaggtccccgggctggagctggggcgcgagctggcagcggggagtgggtggcgcccggaccgtcgattgcgggcccgtcccgggaactgcagcgccctccccacctgggcagggcagccccgccacccgcccgggcctcgacgggcgcgccgccagggctggggaggggcggcgcggagggcgggggccgggcgcagggcagggcccggctgtgcctcgccggccgctcgggcagctcccgggccgcggccagccgaggatcagagcgcttgccccgggggtctgtcgcgtcgcaggcgccgccggagccctggccatgaggaccctgtggatggcgctgtgcgcgctgtcgcggctgtggcccggggcccaggccggctgcgccgaggccgggcgctgctgtcccggccgggaccccgcctgcttcgcccgcggctggaggctggacagggtctacgggacgtgtttctgcgaccaagcctgtcgcttcaccggggactgctgcttcgactacgacagggcgtgcccaggtgggtggtcaggccgagagtggggcgccggccgttagcctgcaaccaacgggcacagggcagggcgctgtgccaaggacctcagtccctgagccaggtgtcctccagaccctttatccccacccatccccaccaccgccatccaggtacgcccggctccgttcatcctagggtctcccagtcccctgctagacatcgaagtgtccccccacccccaagacagaccagagcccggatggaagggctggatcccgctgttctccagcgggatggaagggagccgagagacgaaatctccgactcagaaactccagctggatagggccacctctggccggcagagatggcactgacagataaggggcatgcccctgggccaggctccaccaccttcattctgtcaaccctcggggatctttggggctggtgaggggtgatgagggcaggattgtgtaatcttcccactttgtgccaagggcgtgctctgggaaggtattaatactttcttctggagagcaaggtcttaaaaatctgaagatgtcctcatctctggaccccaaaatgtagaacagcctctttctcctaggaggtgtacagtatgttcttggaatttaattttctctgtacagcatgacaaggattttatctcgaggtccctattatgttgtaatcttgctggttttcctttagggtcagtctttttcaactttaaatttcccacagtatctcacagttccttgtccccgtaagggctcaataaaagctggtttaattgaattaaaagataaaggaacaaatgatgagtacagccttgaggaacaaggtgtacctgagagaagccagccatggaagtggaagtcgccctgctcctgttaatcacatcatccccaaagccacacagatattagggttcgagctgaaggatcccgacatgtgggagcctcagcattttctggggctatgccatt

SEQ ID NO: 15204 - DNA, 810 bp, Artificial sequence
  DNA replication origin
ccgtagaccctgtccagcctccagccgcgggcgaagcaggcggggtcccggccgggacagcagcgcccggcctcggcgcagccggcctgggccccgggccacagccgcgacagcgcgcacagcgccatccacagggtcctcatggccagggctccggcggcgcctgcgacgcgacagacccccggggcaagcgctctgatcctcggctggccgcggcccgggagctgcccgagcggccggcgaggcacagccgggccctgccctgcgcccggcccccgccctccgcgccgcccctccccagccctggcggcgcgcccgtcgaggcccgggcgggtggcggggctgccctgcccaggtggggagggcgctgcagttcccgggacgggcccgcaatcgacggtccgggcgccacccactccccgctgccagctcgcgccccagctccagcccggggacctccggggcgcgggagcggaaaagcaggtgctggcggggcgggggtcggggtggggtgccggggcgtagccaggagcccggcgggggaggccacatttcctggctctaaactgtacttctaacgcctggggacacattaacgagcgggcattttcactctaaagccatgagaccaagagcactcgatgggcaccaaacgtgtctcagcagcactctgcgcgggccaccccgccttcgcccgggaaagctcattcaaatacaaagtggacaccagctcgcccaccctctcagtccccgcaggccgcagagaagctaggagataagtccaaagaagcatcctttctttctgctgca

SEQ ID NO: 15205 - DNA, 1216 bp, Artificial sequence
  DNA replication origin
tcgagtagtctaactcgcggctgtcaccgccactgcagcggagccggccggccgggcgctgcgggacgggcgggcggctgccggcaggaggcgccgagccgggtgactgccgcggcgggcacagtccggggccacagcgccgagcccgggcgggagtggccccgcgcaggcagggagcggcgccgcgcactccaacccggcgggcacctcgggggcgggcgcggggcgcagccttctcgtcccggcctctgtgacaagcgccccggagccgggagcccgattgccgggctcggggtgggcgcggacgcaggcactgggctcgtgcggggccccgggcgtcgcgatgaacatcgtggtggagttcttcgtggtcactttcaaagtgctctgggcgttcgtgctggccgcggcgcgctggctggtgcggcccaaggagaagagcgtggcgggccaggtgtgcctcatcaccggcgccggcagcggcctgggccgcctcttcgcgctggagttcgcccggcgtcgggcgctgctggtgctgtgggacatcaacacgcaaagcaacgaggagacggctggcatggtgcgccacatctaccgcgacctggaggcggccgacgccgctgcgctgcaaggtaacctggacccgcgcgggagcattgttgggtcaagcctctttccaccccgcgccctaccacggcaggccccaaaccccgctgcctggtcagccccgctgtggaggaaaggaacaccccaccggtcttttgggagacgagtggaattcgcttcctgataaaggaacgcgatcacttctgtattaccagggagaaggtgccctgtcctcgcggaggttcggtctctggggaccacggcggggggagggggcgggtttcctaagccctccggggtagggaaggcggagggaacttgttaccacaggtttggatcccaaagaaatgtcttgctccgacttacaagcggcgcgatgggaaactgaagcgtctttgggaagttgttctgactagactgaagaagtgtctgtcttactgtggtctgaaccccttagacgagggcagtattgacggtttcattataagtttagcctgaggaacataattacattgtttcgccagcgataagtgctttagttacattccctgagcgtgattgaaagacgccttgcttcctaagagaaagctcttggaggatttaggcttcg

SEQ ID NO: 15206 - DNA, 1425 bp, Artificial sequence
  DNA replication origin
gactcatccacgtcacggggctggaagatgacccacctggccttgaaccctggttatctgtttcccaaatcagagttggtggacagagcaacgacaatccagctggagcgatggttcagggtatgtgttcacccagccctttcgggacgtcgcgtgcctgcactgtgggaacgcaagtggacagccggtccctgccgtgggcgctaggggccagtgctcagcgcgggaatattcccaccgccacgtgcgcgcggacagcgggtactctgaggaggggcctgcagcccggctggggctgggaagacttcctggacgaggggcagcccgggttttcctcaaggatgagctggagtcggcccccggcgcaggagcaaggtgccgggagagggccgagctgggtgagaggcctgggccagccaacagcggccttcgagcagggaccgcgcagctccgtgtccccgcagtgggagggcggcgggcaggggccgggcgagttaggccgcaagcatctgctggggccgtcgcagcaccatcccacagaccgccactgaatcaacagcagccagttctccctgggctctggaggccggaagtccaagagcaggcatcaggatgggtccctccttggcctgcaggtggcggccttctggctgcgtcctcccagggccttccttctgggcagcacacctggctgctctgtgtcctgatcccctcttctgaggacaccaggcagattggattggggccaactcttatgatcttatcgccactttacctctttcaaagattttatctgcaaatacagccacattctgaggtactgggggttagggcttcaacggatgaattacagaggtgggggcacaatccagtccgtaacaaggcttttgtgtcatttccaggggcacagattctcccaggcaccaactggaaccagggcagcagcgagctcagatttgtttttggaaggcctgtctgccctggggctgggtgggcagtgggaccaccggcaagaggcctgcaggacagattaagctccctcttgactaagctcctacaccagcccacccctttcttgttacaaccacttttgctgcttggctctctggactcctgaggcccaggagggcttagggtgggggtgaggcggggagacacctctcctggcagccccctcactactcctgcctctggcaggaggagctctgcagggtcactatctggacccagcccgttgggcaccttctgcagactcagaagggagcagcacttccccaccagggctacagggagggccagataccttccaagaggcagtcctggacaaaggcagcaggatatgccgggctggcagaggcaagggatcagtggacaaccaaatggccttcaaaccaacagaggatgggtaaatttggatgcatggat

SEQ ID NO: 15207 - DNA, 2015 bp, Artificial sequence
  DNA replication origin
aatcagagcacagggtgcggaccagaaagagcagacggtcagtcgggcggggaaggaagttgccgagttgcaggtgtggaaggggctgccccaggcccacccttggcagacgagggggcggggagtcgcgccggggacgaggagactgcggaccgggcgcgctccttgcgcagtcgctcgcccgcgtgcccaagccccccgggaatggccctcgcccaggggcccagctcgccgccgctagccccgcagagcctgcagctgctggggcccggcagccgccagggggcgggagctgcgtcgcgaacaatggccgcgcttggtcgcgggccggcgggaggcggagtggaggtagagccggtgccgggcgcgcgcgccggccgggcgtgctggggcgcgggagcggctgcgcaggcgggggcgcgcggcgcgagcgcgggagggcgcggcgggagcgccggggaggcgggcggaggcgggcggaggcggggggcggggagcccgaggggtggaagccggcggcggccgagcggggtcagttctctgtagtgtttgccaatgttggagccgtctgcaaagtgtccccggcaagaaggtaaataccctcatcgggggcgtccgggagaccccgacttccgcgccgccggcgaagaaggcagagggcgctggggagccctgcagttccgcagcacggggaacccggagaaaagcagcccccttcgcggcctcccctcccccgcgccttccctcccacatcgggctctcggggcagcagcggggaggggagaccggcgggggagggaggacagggaggcgaaggaattggggtggggggtgcgtgtgtggtggagggggtgggacgacacaggtgtcctgaggggaggagccgggaggaaggcgaggaggccgggccaagtgggggtgcggaggtcggggagacaggaacgcggctgcgggcgcgggaggctggggttctagggggccggggtggtagcggccggaagagaggacggcgagtgcagccacggtgtggctgcgagggagagggagcgcctagagtagggcaggggagggcggcccggggagggtctgcgggaaatgggcctgggggcgctggaggcggagcggcggggccggggcgcgccggagggtggcggcggcagctatttctgtagaatgggctagtggtaaagacgtaacttgccgaaatggggagggtaggtggggccgaggggacaaaatatatcctatgacaggcaagttctgctgtggctgttacgaactcctaccgtgatggctcggcttaaaggggtagttggcggtagtgaccttgccggggtgaagggagttgggcgaggagacaaagctcagttacggaatccgctgtgtgagagcaggaactctagtctcttcggggtcgagccgggggctgtggcttgggggctgggggtgctccgcagaggccattgagaagcacgccactctgggattcttagggaggcggtgggggtaatggccgtgggattctggaagtctttggaaatgtgtgtagaattttgcatttgtgaataattttctttggtaagggtccatatttgctgtgatgtccccttacccccatccccactccaaagggttaagaactgcttgagcagatagagagggaccattcaattagggtagacctgggaatttaccaaaggattttaaagtgggtggatcctgcagaaagaaaggctagagatgatcctttaaagatattttactgttaattgaaaacgttttttatttaatgtttgctttcacaattttggtgaacttttgctgagcattacttggcttctgatgcatcctgtgtttcagaccagcatcgtgaatacttgaaatcaaaattgtgatggacaggcagggtgatagtaaccttggaggagaaaagatttcaacatttctccaggatatttcttccccgtccttgctttctttagatgattcaagtacactgttgtgaactcagctgc

SEQ ID NO: 15208 - DNA, 814 bp, Artificial sequence
  DNA replication origin
cggcaccggctctacctccactccgcctcccgccggcccgcgaccaagcgcggccattgttcgcgacgcagctcccgccccctggcggctgccgggccccagcagctgcaggctctgcggggctagcggcggcgagctgggcccctgggcgagggccattcccggggggcttgggcacgcgggcgagcgactgcgcaaggagcgcgcccggtccgcagtctcctcgtccccggcgcgactccccgccccctcgtctgccaagggtgggcctggggcagccccttccacacctgcaactcggcaacttccttccccgcccgactgaccgtctgctctttctggtccgcaccctgtgctctgattccccgctcgtacctttcccaggctctccggctgcccctctgtgctgtgcaggggacgcgcgaccatcccgcgtctgctccggccgccgctgtgcaacgcacggtttagcggatcttgcacctttctagacgggggagggggcggggaggaggttgcttcaccgtctcgcccagcaaacaccagggatccgtgatcacctgctcgccaagacccgcggcgtggccagacctcctcttctaccgaaaatattagtcacatgaaaaagaatccttggagccaaaaatgagaaccattgaaaacaatgccctgaatcctagatttatgaggcaagagtgccagaaaacagaaattacgtcttaattcgtcctggttttgatgtggattacttttgtctagataacttcaacccagttaagctcaatgaaactgaacacttcgtttagtaaccggc

SEQ ID NO: 15209 - DNA, 1268 bp, Artificial sequence
  DNA replication origin
agtatcaatctgatctttcttttctccacatttcctccttttctgttcgacaaaaccgccatcgtcatcatggcccgttctcaatgagctgttgggtacacctcccagacagggtggtggccaggcagaggggctcctcacttcacagacagggcggccgggcagaggcgcccaccacctcccagacggggcggcggccaggcgggggctgccccccacctcccagatggtgcagctggccgggcgggggctggccacctcccggatggggtggctggccgggcgggggctgccccccacctcctggacggggcggctgcagggcggagacgctcctcgcttcccagacggggcggctgccaggcggaggggctcctcacttcccagaccgggcggctgccgggcggaggggctcctcacttctcagacggggtggcccgtcggagacgctccgcacctcccagacggggtggcggcggtgcagagacactcctcagttcccagacggggtcgcggccaggcagaggctctcttcacatctcagatggggcggcggggcagaggtgctccccacatcccagacgatgggcggctgggcagagacgctcctcacttcctagacgagatgacggccgggaagaggcgcttgtgacttcccagactgggcggccgggcagaggggctcctcacatcccagacgatgggcggccaggcagagacgctcctcacttcctagacggggtggcggccgggcagaggctgcaatctcggcactttgggaggccaaggcagacggctgggaggtagaggttgtagtgagccgagatcatgccactgcaatccagccagggcaacattgagcactgagtgagtgagactctgtctgcaatcccggcacctcgggaggccgaggctggcagatcactcacggtcaggagctggagaccagcccagccaacacggcgaaaccctgtctccaccaaaagatacgaaaaccagtcaggtgtggcggcgcgcgcctgcaatcccaggcactggcaggctgaggcaggagaatcaggcagggaggttgcagtgagttgagatggcggcagtacagtccagccttggcttggcatcagagggagtccgtgcagagggggagggggaggggaattagctctttttaattggtgttttatgctttcacagtgatgtttaagtttggatttcttgtttatgctgcttagaattaattgggcttcattgacctgaaggctgatgtcttt

SEQ ID NO: 15210 - DNA, 875 bp, Artificial sequence
  DNA replication origin
ggttagaaacctgctgtgttggaggggcccaggtactcccagactgctggtcacaacactctaatgggtggtgccagccaaagcacttcaaagggcagtggcagtggaatctgtcttcattcacatataccagcaacagtggcaagggcagtgcagtgcactgcacactcatcagctggggcaaggtgctagtatgtgctggggtactggctttcatgtggatgttcacagtagtcgcattagcagcatggttggggtggtgctgtccccttcaccagctactgggtgtccgttcttgctgatggtggtgttaggatagaggcagggcactagtgggagcaggacagtgtgtatcctatgcgcacattcgagtcagtggcagtgactgttcagagccaggacggctttactgttctttttgcctagttttgtgctggcagcagtgttagcacaggcacagggtgctggtggggtggtgggggtggggagcagctagtaggggtggggctggtaggttccctgcctgccaacagacaacaatggcagtgtggcaaggggagaggggcagagtgccctcacactggcagcagtgacatggtcaggtgcacgtgcacacatgtgttggtggggaaggaaaagtaaggtccactggtgcacagctgtgccggccaagggatgttgggggtggccgtggttgagtgtatgcaggcaaagtggcaggtgggaggctgcagtacagggagggcgtgggtaggctggtgtgtgtctatgggggcttctctgctggtacactctaccagtcaggtgtggtcagccagcacaggagctatgatgtgggcccccaggagctacctggaggctgcaccgcaagcagg

SEQ ID NO: 15211 - DNA, 1132 bp, Artificial sequence
  DNA replication origin
tgatccaggaaactcttagagcatactttaaacagtctagtatacactttggaaatgtgaaaaactttgtcacattcaaaacaaaatttgtctgagagattctggaatttctgatttaaattcctggcactggaggaaaaattgctcctggagattgatacgtattgtgattttgaattaaattctggacatcacttaagtgtatattttgtcatgaggagaaaaaaatagaaaaaatgagggcaagagaatctgagaaagaaggaagggaggaaggatggaaggaaggaaggaaggagggaaggagggaaggagagagggaaggagggaaggagggaaggagagagggaaggaaggaaggagggaaggagggagggagggaaggaaggagggagagaggaaaggaaggaaggagagagggagggaaggaaggaaggagggagggagggagggaaggaaggaaggaaggaaggatggagggaaggagggagggaaggagagaagggggaaggagggaaggagggaaggaaggaaaggtagttggaaagaaggaaggaaggaaggagggagggagggaaggaaggaaagaaggaaatgagaaaggaatgaaaaaagaaaagagaaaggacaagggatgatagtgaagcctcagattagcctaaagaaccagaaacatctgacatcctagactattcccaagcacccatgctgtgcccctcttgcctgacaaaggaatttcaatacaactgtgtaatggaaatgttgcctggtatcagggaatacattccagagaagattagcctggccttcccatttcagtcttttgtttataatttagatacagaggccaaagcaaatgccatgaagcaaaaccctagagggaaaggcagtcttgttgctaagagggaaagtgaatattgaacttagattttaaaataatggtctgccacattcctggtgttggttactaattgattccccagacaaaattgagagagtgtcaactatgattttaaagggctactgttggctattattgttcctgatttcaaaaggggtagaggaagaaagccatatttgttcaagtactgaagcaatttccaggctttccgtgcaaaccagatttgggctg

SEQ ID NO: 15212 - DNA, 1439 bp, Artificial sequence
  DNA replication origin
ttgtttagtaaatcgataggactgtgagagtcaggccgctgccctgtcgccattgagcaaagctaatattctcccagcatatggtctaaaatctttgctagagatcgggaaaaagaaacaaacaaacaaacaaacaacaacaaaatccttaagcttcctctcccaagtccccccatccccacccccacttcccacctcctcgctttcagcaaacttcccagcctgggaaaagtgcggcgcgggacagcgcgacggggtgggtgggggacctgctgccgggagatgcggcggcggccgcgcggctgactgcgactcgggagctccgggagcggcccgcgcaggtaagtttctccgccgccgcccggggcccgggctggccgcagcgcaccgccccggcggctgccgggcaggaggagcctcggttcccctcgggcggctgaaggaggggctgagcctcaggacccctaggccaggccgtgttgaaagcagataccccgaggcctcgcccagcctgcgctggagggaagaaggcgctggaggtgcggcagcgggcagtggggggaccggggaattgaaaggtgccagtcctctaccttagaaaagaaagaaagagagaaggagagagagagagagagagaggagagagagagagagagttgtatttgtttgggtgcagagaaagctttggtggctgtagcgggtcatgtgattcccaggtctctggggggtcttccgtgtaagtacttctgtggcctggggcaaggccaggacaaatggatgttcgtggaccctggaggtctgtgggtaggtgcttggtcctgcagcatcaccccatgcatggcctttgctcaagtctcagcttccatccatctctcatggacacatcttgggagtgggcatctgccggtgatgccgttgggggatattttaaatatagtattgagatcttcctagttaactttgggatgaaatgtcctttggaagcttagttaacaacgtgccagttaagcaataaccgttctgtgtctaactgaaataagccagcacgtgataagatcttagaatggaatgaatatatgtgcttcatacctgatgatctgtgcttataaatcttgctcggaactgagtcaaagcactgtacaacaagcaaaacaatcagcatgagttttcacttgcgggcaagggcaagagaatacagaatccagaagctcaaaagtgaatgggatgtcccggaaactaaacactcattgagagcaccatttcctggttttgtttttgttagtttcttctgctttctcgttaattttacaggtttcccttctctctttagaagcggttatttgtcattaaacattcttcctgtctagctgtcaccgtttttccttaggagtcctcctgtccccacctcctcaccaccactccctctcttttcatgtcct

SEQ ID NO: 15213 - DNA, 1071 bp, Artificial sequence
  DNA replication origin
attcactcaagtttctgcaggctgtacaggaagcatgatgctggcatctgcttgtcttctgcggaggcctcaggaaacttacaactatggcagagagcaaagagggagtagatgcttcacatggcctaagcaggagcaagagagagcaagaagggagatgctacacacttttaatcaaacagatctcataagaactcattcattctcatgaggacagtaccaaagaggacggtgctaaaccattcatgagaaatccatccccatgatccactcacctcccactgtgtctgtaattggtggttcttgctctcactgacttcaagaatgaagccgcggaccctcgcggtgagtgttacacagttcttgaagctttgtgtccggagtgtgttccttctgatgttcagatgtgttcggagtttcttccttctggtgggttcgtggtctcgctggctcaggagtgaagctgcagaccttcgcggtgagtgttacagctcttaaggcagcgcgtctggagttgttcgttcctcccggtgggctcttggtctcgctggctacaggagtgaagctgcagaccttggcggtgagtgttacagctcataaaggcagcgtggacacaaagagtaagcagtagcaagatttattgcaaagagcgaaagaacaaagctgccacagtatggaaggggacccaagcgggttgccactgctggctcgggcagcctgcttttattctcttatctggccctacccacgtcctgctgattggtagagcccagtggtctgttttgacagagtgctgattggtgcgtttacaatccctgagctagacacaaaggttctccacatccccaccagattagttagatacagagtatggacacaaaggttctccaaggccccaccagagtagctagatacagagtgttgattggtgcattcacaaaccctgagctagacacagggtgctgattggtgtgtttacaaaccttgagctagatacagagtgcggattggtgtacttacaatccctgagctagacataaaggttctccacgtccccaccagattcaggag

SEQ ID NO: 15214 - DNA, 1013 bp, Artificial sequence
  DNA replication origin
ccgggcgatcccgcctcctaacggacctgcctttcctccgcggcgcccgcgcccgcgccgccgagagcagccctcggtagtgcctgccgcgcccgctccggtgggcgggtgtctacctgcagccccagccccagcgttcaccccagcctcttggaatcccctccccagagctcacgaacccccgggcctccgccagccccgcacactaagcgaccttcggggaacttgagaaggggaagaggggcgggtggtaaaaggaggaagaaaaacgaggctgaataaggtggggtggggggtggagggtaaagcagggaaagagcagggagagaggggctcccagccccaccgaccaacgtccaaactttcagaggatgagtgcggaggaccagtcatcccgatcggggtgcaggggcgcggggcgagcggagacccctggcagtgcccgcgccgttgcggagctgacagcttcccccagccactagaatgcccggggctcgcggggaaggcaaaacccgaaaagacagggaaaaggagagaaaactgcccaagcaaacgtagatgatcctccgccacttaatccaaaagttaaatccggaaaaacgcagcccccctaaagaaagtggaaaatcaggtccctcagtgccccctccctccctcagcggagcaaaaccttgagccaaaaaaaaggggaaagagatagaaaaggggggcagagcggaagagatggtcgggatgaggggatgtgtgcgacagcgagcaggagcgagcgaggtaggggtagagaggaagagaggcggagagggagagagagggagcgaaatatcaaagattgtgcaagatcaggctggaaagataatcgatactcgacctaaatttaacagaaactactcaataaaagttaaagaaaaaacttactttccatttcccctgcagttcctactcgatcttcgcctcttttttgttttgcttttattttacttacagctgatcacatccaagtaaaacgagagggt

SEQ ID NO: 15215 - DNA, 866 bp, Artificial sequence
  DNA replication origin
tggggttttccggagacctgttcccctagggtttaaaagcgcgtcccgtgggagcttcgctttcacttctctagggagttctgagctgcaagagcccagctactcgccgaacccgggccgcctgcgtgagtaacttggggcggccaggagcacgggaagggcgccagacagagagcctttggctgcttctgagaccggctgtgggctgccaccgctgagcggcgcggaggctgcagcgttccctctcaggacagaaagcaggcgttggggactgttactcgcagcctgccaggggcagcagccgccccaggttcaagtggctatgtgccaggatactcaggcgcggctgttggctgcccatgggagagccagtgctctccgcaggtccaaagtgcaaggccgggctattcccggacttgcctaggagcaggggcccccagcgcgtctgggattgccccggcgcgtcgggcgcgcgaacttgtgcgcaagggagaagagcgcttaccatggaacatggtctgcgggaggcgggcgtagtcatgatgaccgcaactggagcaggagcaagctctcaccgcccatagtcactcccaggaccctggtcttccgcggagttgccgagtctgtgttgggcagggtgatctctgcagctggttcctcttacccacgccgcgactgcagtttcatccatcccaaggggggcggcacacactacggcgtggctctgcgctttgccttttccataacttccgtaggatccgccagcagtgtactttcagtttctactttgcgcttggtctgcaggttcaatctttgggatcatcagcatggaatcttcattatcccctctctcctgggcacctgct

SEQ ID NO: 15216 - DNA, 859 bp, Artificial sequence
  DNA replication origin
cctttttaagagtaaattgctgtgcaggtgggggagggctagtcacggaacgaaactgtaagccggaccaggtgtgaggaggggaggtgataaaaggattatagggtggaggagcagaggctgaggaagaattgggacctagctcggcctggcgaggaggggagaggtcagatgggtctgtagaaaaggaagattagaaagactcagcgacgcttggggttgggactggggggacaggcgggagggaaagaaggaagatttgggacgagttgcattgggcacagagactaggaagggaccgatgtgtaaaagaatgcctggacgtcaggcacctcggaccgtttgcctattttacgacaagaattatttagattttgcaggatggaaaaattcacagtgccattttctggctatttggaactactgtcgagtttgtattggggtcaagcggcattgcagaagaaaataaggcatttaggttttaggtcaggtgtgagttgaagaggttttaagtttttgagaacacaggctaagggagaagaaggaggaatggaaggtgggagcttacccatagtgaaggaggcaagcccagagaaaagagtagagacacggagaaggggtggggggttcttgccctccagaaaagcagagaaggggttgacgcaaggaaataagggatcggggcacagagataagaggtcagggtgcggaaataagggattggggcgcagagataagaggttggggtgtggaaataagcgatttggggggttcttgccccctaggaaagcgggacttgccgctaagggtgaaggaccaaggcaggcgtccctgcgtggtctgacacctttgaaacgtg

SEQ ID NO: 15217 - DNA, 1147 bp, Artificial sequence
  DNA replication origin
attgtggaaagcgggggtagctcaggacactgcgcagaaaccggtctccccggctgcaccgcgggggcgagcgcccaactccggggaggggagcgcagggcgcggcgcggggctctgcagggctggctgcgctccacacacccagtcgccacgtgcgcccccacccggccagcggtaggcggctctgggcctcagctgggaggggtggggccgagccgcgccccgctggaggagcgagggtctcccttagagaagcccctcgcggggtctccattctggaaaatcatagagaacagagggtgggcggggggcttgggctgggggaaaaaaagccccgagctccgcggaccgtgggtgggcgagaagagacagccctccctgaatccctgggaagggggtcacctctgcggtctcgcgcccgggctgggtggggccgcgcctttgtgtggccgggcggggctcgagccagcttttctgcagagccacccgcttggctgggaggggctcggtgctggggctgagagccacgccgggggtctgcgcacatcaaggggtgctcgggccgttgtggactgcggggctgaaaaaagaggttccaggactgcatacagctcaactgcccctcccatattcctcttccccgccagtctcggagcctgaggtctccccggctccgcggggagggtagggcagggcggagccgcgcagatggagtcctttcggcagctttccctgtctccgcatcctgcaaccaagtcccgggggacacgtgcttccagctgccacaggaccccaggccccaccctgccttttcaccccggggccactgagcgccagaaccgtgggcactcaaggcacaagaccaattgcggatgaaggccctgaatccagaatcttttccggtcatcctgtgtctccactgtcttgtctctctgagcttatgaaattgccgatatttggcactgtctgacccacaaaacggaaatttcgcgtggcttaacttaagactttgacctcttttgctttatatacgatttcatgtcatctctattattatacatacacatgtctaggttctagaagcttttcccgcaaacgatcaaaggtcttcaaagaaccctttatctgtgtctatgtctaaacactc

SEQ ID NO: 15218 - DNA, 1100 bp, Artificial sequence
  DNA replication origin
ctccgccccctcgcccgccttccccactcccccgccctccccagggccctgggaaggggctcagcgtgggaaaggatggttgagttttaaccagaggcaaagcgtgagcgggatcagtgtgtgcggaacgcaagcagccgagagcggagaggcgccgctgtagttaactcctccctgcccgccgcgccgaccctccccaggaacccccagggagccagcatgaagcgagctcaccccgagtacagctcctcggacagcgagctggacgagaccatcgaggtggagaaggagagtgcggacgagaatgggtgagctggcggcggcggagcggagccgagccagagcgggaggcgagcgcaggcctgccgcggtgacagcgggctaggacccttggcgcgccggtgccctgcgctgacctccgcgcgtcgcaggctggcggcagcctgcggccagggaacccctaggtgccttccagcccaagtggcaaaaaaagtctgagtgcggggagggtgtgggggcgacctctcagatcacctctcctcgtttaacggcgatttcagtttttgtttgttctttttctcttttcagaaacttgagttcggctctaggttccatgtccccaactacatcttcccagattttggccagaaaaagacggagaggagtgagtctctttacactctccttttatttttgttattgattaacggaaataaccacctttttttttgtctttgaaatttacagtcgtaatggtaatgccttcctttgttttgcttgccttctgcagataattgagaagcgccgacgagaccggatcaataacagtttgtctgagctgagaaggctggtacccagtgcttttgagaagcaggtaatggagcaagtaggtaaagctctcagcatagctatctgcaccttctgaatcttcccctcattaatctcatccgccttggaaaatagctgtgttgcttgtgcctagatgaattcgtacacagataccagcgtattttgtgaagacaactgattttgctttagtccatgctttacgatttacaaagcatgtatctttgtatatatgtttgcatattttaaattgt

SEQ ID NO: 15219 - DNA, 1300 bp, Artificial sequence
  DNA replication origin
cccagagtagctaggacacaggccaccatgcccggttcatttttaaattttttctagagatggggatcttgccgtgttgcccagtctggtctggcactcctggcctcacgcaaacctcccacctcagctttctacgaagctaggactacaggtgcatgccatgcctggctaatttttaattttcttttttaagaaatggggatcttgctatgttgcccaggctgatctggagctcctggactcaagcaatcctcctgcctcagcctctcaaagtgttaggattacaggtgtgagccactgcgcctggccgtagagaacctcctttttgacataaaagtaatcatgaacatgtgagcaatatttcatttggatgccaatgtagagttaagcatccctaaccccacccggtctcgtctcactcaacatctgcagcttgtccacgcctctccacagcagcagaaatgagccaaagcaggaaaggctgactcattgtaggtgccagaggctgggaaaatctatagagccagaggggaagtagacacgttggttctggggaagggtggcctgtcactttggggaaagaaatggaaggtcagagggacttctggaaggcagaggggagcaggtgggatggtttcctatgcctggaccatcagtttctgggagggaagaggcaggaagtagtgatggatgccctggactgaagactgggagggccaggaaggagccttaaaatttgcacttccagagagaaagtcggctggtgggattgacctcggactgacaactaacaggcagcatgcggtggagtttcaggaagccagaggtctggggtgccagcagcaacaaacccaggctggctgatggaagggcccagcctagacagggaagcagaggggctgcatggaaaggctcagggctggaggtgatgtgaagtggaataagcttcagtgggagccaggaggttgtatttcccgttgggggcggtggtggagggatgggggtgcccagagaggaactatggattaggcccaggccggccactcagagtgcttggcatccaggatgtgttaagatggcattgaggccgagcgcggtggcttaggcctgtaatcccagtactttgggaggccaaggcaggcggatcacctttggtcaggagtttgagacaagcctggccaacatggtgaaacctcgtttctactaaaaataccaaaaacaattagctgagcatggtggcgcgcgtctgtaatcccagcttctggggaggccgaggcaggagaattgcttcaacccggga

SEQ ID NO: 15220 - DNA, 1358 bp, Artificial sequence
  DNA replication origin
catggccgagtccatctcctcgccgtcctcttccctcctcccggccgacttccagccggtgcgggagtcggggtgcgcccggccctcctagcgctgcgccgcccgcgccgacgtggcggagcgcacaggtcgaccgggtcaggtggttgggtgacgccccaggaaagcgctccaggccgagggcgggcggcgccgccgcgcccgacgcctctgggggtggggacttcgcgggagtcgccggcggaggcgaggaggagctctgcgcggcgcggcgggcgatccgagccgggacgggctgcaggcgggggtgctgcagaggacacgaggcggcgggctggagacatggaccgcggcgagcaaggtgagggcgcggacccagcgggcttgggctcgggcttggactcgggcttggactcgggctttggctcggcgcggggctgagcgcggcccggcggctcgagcaggtgccgagcctcctgggccggcgccgcaagttgcatctcccggatccggatctggcatcctggggccctggaaggagcggctctggcgggggcagatgggactgcatgtgtgagtgtgagtgtgcgtgtgtgggggagagggagagaaggttctgggaggtggcgaaggggctagcgtcaggggctggcggccgtgatgcgctttgggtggaaagccgcgtgaagggagcacggcgcagccagctcctgtaagtgactggaaccaggaacagaggacagtgagtcgctctcgtccctccaggtgggaaacccctctctccctcataaattaagactttctgccttcttctaagttcaggtggttaggatttttggtggcgtatgacccatggggggtttgggaggcagatatttatcatactagaaacccccagattgtggagtggtgtctgtgggtttgagggaagagagcttttcgtaggaagggtgaaatcccacaacacaaaaccttcagtctaatttaccatagcgttgggtgcacttgcttctgaaaacagctcaagtgaaattacccccaaatagagcaatagtaggccatggttttcagatttaaatagtttcatcctagagatctctgctgatcataagcctgtgactgtacgcagatgtgtgtggcacgcttttaaaaagatacataaatgctgaaaaaagaaaacaaggtaggtaatcttgggaagtgaggataggaatcactcctgttttgagccctgacacaagttttcatgtattgcttattttcctccagtatgtgccgtcatgtgtgcatttttatgtaaatcaaaccatattccaaatatactatcttgtactttatttttttcagactctggtgtt

SEQ ID NO: 15221 - DNA, 957 bp, Artificial sequence
  DNA replication origin
atggcgggctgcggtcccgaggcctgccccgtgggaaggcagctaaggcccggcgagaaatcgagcgcagcgccggtgggctggcactgctgggggacgcagtacaccctccgcagccgctggcccgggtgctaagcccctcactgcccggggccggcagagccggccggccgctccgagcgcggggcccgccaagcccacgcccacccggaactccagctggcccgcaagcgctgctcgcagccccggttcctgctcgcgcctctccctccacacctccctgcaagctgagggagccggctctggccttggccagcccagaaaggggctcccacagtgcagcggcgggccgaagggctcctcaagtgccgccaaagtgggaacccaggcagaggaagcgccgagagcaagagagggctctgaggactgccagcacactgtcacctctcactcccacttcggcctcccaaagtgcttggatgactggcatgagccactgtgcccggctcagaatttctttttggggtgatgaaaatgctcaaagttagattacggtgatggttgcgcgcctctgtgaatatactcaaaagccttgaaaacaaaagttgaggtgctacaaactaaaggatctaatcgcagtcacagaacagttgcccatgcttagtggcaagaggctgtatcctgaggacttttgtgtttccagatttctccaaaggagaattacagtttggcaggtggaatgagggtcaggtagaaaaggctgacgatgcaactaactttaaggagggggaggacaaagggtgaagaccaggtcagtgtggagaaagggaggttgtaggatgttagtgcttcagaggaaaacaacaacgagcttttctctcctctctggggatcctggtcagcttcacattggtggcccagaaatcagtctcagcccctcccagtatggaccgctcc

SEQ ID NO: 15222 - DNA, 1226 bp, Artificial sequence
  DNA replication origin
cggagaggtgaggagcgagcctgcagcgagcgaggccttcgaagttgagcagcggagtgcggggagaccctccgctgccccctctttaaagccgcgcgcgcacacaccgatcctccacacagatatccttcctccgcgcgccgaggagtcccgacgccgccgccggcttcgcaggcgctgagggtgagaggcacgctaaactgctcggctccgccacataacgaagcgacaataaagccggcggagcgtttccgtccgaccaggccctggcggaggtcgaatggcaaatgaacaacggaccgtgcgcccacaatgcaccggggtagcagtaaccgctggagggggaaagggtgggggccgggctgggggaggggggctgggcttggggctgggctggggtggggtgggggcgccaggggaccgggaaaggggctgggctgcgcctccggcctgggggcgggggtgcggccgcggggaaggaagtcggccgaggggttggggacaaaaggccgggcggcgggctgggggtctcagggagggggcgggcgtgtgcggccggggccgggctacgcggaggacaaacagctggcgagtgtcagggtctggccgcctccccgctgcccacacgcacctacccgcgcccgggacgcgcattttccttctctcgccacgagttcacctgggactttgcaaataactgtgcggtgggagctgcgctccagccttgtcatttgctgagggtgggtggcggtgcccaaggaagtgaacttattttgttccttcacaaagactggaccaggcggtgcctttcacgcgaagaggttacgaccacggacacaacctcctttgatgcattgtgcgaggcagcacctcgggccccggacagtagtcatttcacagaaaatgcaccgccccgagtgtcttattgctgtgatgaaatggaaatttaaataaaaggtcgaacacgtgcgttcactgggaagtattgacatgggtgttacatcaccagcagccaatcagataactccagtcgtgtttatacttctacaaccaccttgtgagtattacagtatgtcataacgttataaatattaggcagggttttccccaggagcggggaggagtctgcttctacggacgttgtgagcggctccgaagattgtgtgtttaaagtcaacaattcatttttaagacttttttcgaactgtttacattacatggacttt

SEQ ID NO: 15223 - DNA, 1268 bp, Artificial sequence
  DNA replication origin
cggcccgaggccgtgcgcgagccggggcaccgggcggcggcggcggcggcgcgcgccatgtcgttcagtgaaatgaaccgcaggacgctggcgttccgaggaggcgggttggtcaccgctagcggcggcggctccacgaacaataacgctggcggggaggcctcagcttggcctccgcagccccagccgagacagcccccgccgccagcgccgcccgcgcttcagccgcctaatgggcggggggccgacgaggaagtggaattggagggcctggagccccaagacctggaggcctccgccgggccggccgccggcgccgccgaggaagccaaggagttgctgctcccccaagacgcgggcggccccacctcgcttggcggtggcgcggggggccccctgctagcggaaaggaaccgtcggactctggccttccgaggcggcggcggcgggggtctcggcaacaatggcagtagccgcggccgccccgagacctcggtgtggcccttgaggcatttcaatgggcgagggccggcgactgtggatctggagctggacgcgctggaggggaaggagttgatgcaggacggcgcgtccctgagcgacagcaccgaggacgaggaggagggggcgagcctgggcgacggcagcggggcggaaggcggcagctgcagcagcagcaggcggtcgggcggcgatggcggggacgaagtggagggcagcggtgtgggagctggcgaaggagagactgtccagcacttcccgctcgcgcggcccaagtctctaatgcagaagctccaatgctccttccagacctcctggctcaaggactttccctggctgcgctattccaaggatactggtcttatgtcttgcggctggtgccaaaagacccctgcagatgggggaagcgtggaccttcccccagtggggcatgatgagctttcgcgagggacccgcaactacaagaaaaccctcctcctgaggcaccacgtctctaccgagcacaaactccacgaagccaacgcccaggtacagtatatcctgctcctacttttttgagatcttttagggaaaggtttatcagcactcccttcacccccacccacccccgaaaaaaaacctcaaaaccattttcctgggtgaagacatcgttccagttgagaggtgcgggaagcttaggcgtgggggtttagaaagcctgggaacaagttttataaaagttctgtatgtgttgtggggggaaggggatggaatgacaattgtcgtgg

SEQ ID NO: 15224 - DNA, 1317 bp, Artificial sequence
  DNA replication origin
ctggaggccgccgctgccgccgccgccgcgcagcgccgggaccggcccccctcgggccaccggggccgccgccgccgcctcgtcgccggtgctgctgcttctaggggaggaagacgaggacgaggagggcgggagcaggcggcggagggggctcgggcgtgtggaggagaagccccgagggggcgcggaggaggaggatgacgacgaggaagaggaggacgaggaggtggtcgtcgaggtggtggacggcgacgaagacgacgaggacggcgaggagcgtttcgtgcccctcggacccggccacgcagtccccaggggcccggcccggggcgcgttgaaggtgcgtgttgggcgcggtggcgcgcgtgggacccgccagcccggggagggggacgggcccgggccccggggcaaggcgcctggccgaggacggtcagcggcgccggggagagacccggccaggaggggtgtgtcaggcggcgcgggcggccgcgcggggcagcgcgaggaactgttgatttgcctgcgccttgggcccctgcgtctctcccaggcggcggctcccgctttcctcaaaggccgtgtcgggtttgttgtttggtgtgggtgccgggaaagggcgcttctccccagtgaggtggggaacttgggtgatgggaccacggaggcgccggttcgtgcccggtggggacgggtgaggcaggggagagtgagattttattctcccccaaggaaggagtgtccccttctccttattttgagggctattcaagcttattgaaaccagaaagcggtgtttcttgtcaatctctcagccccttcttccaaccaagaacaattgtcgatgagtttccatcacaggcgcttgtgagagaaccggtaaacccagtacagcaaaatccaagcccttggtttccacatgcattttgctagcagtttttggcattgaccctcgccctcccgtgtttccactcgacatcatttagcgtttgaggtttttttccctcctcaaaattgcaaatgagaaaaaaagaggaaaccaggaaaagggggtggggggtagcatttaaattggatgtgagtttctgctgagaattctagcgaagtcccctgtacactgaagcgccgagagatttttccgtttgtgtatcttcaggagataaggggtttattattacacaactgactggttgggctttcaggcatgctattggacaaagcaaaccacgttgagattcatgcacggtgtatgttgctaagaagttttgagggcagcaagtggtaagcaatggagtgagtgatttttctcaagagtgg

SEQ ID NO: 15225 - DNA, 1124 bp, Artificial sequence
  DNA replication origin
cgccggccaggacccgcggctgccactggctgcagaggcgcgggcgccgccttcgctggaccggccggcggggacgccggcggccggcggctacggcggggcggcgcggcggccgcgggcgggggtgggtgtgagcgagcggcgcgctgccgcctccgccgccgccgccgccgcccgggagccgcgggccgcgctgcgctccatgcggccggcggccgagcccgcgcgcgcctctcccggccggctgcgcccgcgcgctccgggcctaccgctgccgtgcctcggcgcgagctgtttgtgttgtatgttttccaccaccgcccccctcttcgcgagccattcctcacaaccctccggtccccccgctcagacaaaacccggactggattttttttttctcttacccacagtctccgaaagtctggcgcttcgaagcagttggccctgacaccagggcaaacgcttaaccgcagcccattcttccctccggagggaggggagtagacttcgctggaagtaaggttgtctgtcaaagttagactttgaacgtagagatttgctacaagtcattttaatggacactgatgtgcatggcagctactcctgagcttgtgtgaaatcaaggaaggtgtaccaatctgaggtttgggatgaattcctaatatgaatcatcagagtcgcttagattttcgaaacactgtttcatgagcgattgtctaccaatctcacactctttgaacgcaccactctaggccctgcgattgagctgccttggctctgtgctgagtgtgtaggtctttcagcttttactcctgctattctaccttgagtgcctgattttaatggctgaattccaagaagctttctgtttgcactgtctgatctgtagactctcttctggcattgttcaggactttgaagaaacaaatgggtgggagttcaagatcgtttgagttggttacttaagaaattaatatgaagtaagaccaaatctggaaatcaagcacataacatgactaattttgccattttctgacgatttttaggtgtgataaagaaaatatatttgctattgcgtggggttaggctatgtagtaagtggtatttcttcttttatttatttt

SEQ ID NO: 15226 - DNA, 1164 bp, Artificial sequence
  DNA replication origin
ctgcaccagtcgccttggctcagctgtgccgggcgccgggcattcgccagggcacacgactcagcgaggcggcggctgggactgaggctactgcacccggccgcgcggacccgagcgctgcagctgcctccagccccggagcgcggcgctccgagcccctggtgggtgtctctggctccaagggaatcacggctcaattagggacctgccaggagaaaaaccgatgcgctgccgcaggcagagccgccagcccgcccccagtcggctggtcacatcgcgggcgcgcagacggacaagcgagcgggagggtaccgcagccagcactcgccgccgcgccgcggagaatgacaggcgccgaggcggagcagccgcgcggggagcggggcgcgagtgcgcatgatcctggccgcagcggcacgtcacgggggaggaggggcgggccgcggggcgggagggggcgagccgggcggggccgggctgggggtgcacacgggtgaggaccggcgcggggcctggcttgctcgcgggaggatgcaggaagtcttccctgccctgattttatgaacccaaagctctgtggttgaacttgtcccaggagcccattgtcctttaaacagcaccgtttaagcggtccttaaggtccctggggagcccacaaaagccaatttaattcaggttacagcttaaccgtaaagggttgccatttgggggacagtgatcttctattgtggctgtgcattaaaataacttggggagcttgtaagaaccctttgccccggacgcatcccagaacaagtacaggacaatgtctgggtggggcccacccaggtatcagtaggtatctaaagataccaaggtacagcagtgcttctcaaaccctcagtgtgtgacagaatctcctgcggattgtgatgagatgcaagattcagattcagtaggcctgggataatgagggagacatcctttctaacaagctctcggaggatgccaatactggaggtccagacccccatccttgctacttaacgtgtgatctagagcctggagcagagcttctgaaacagttggcctgtctgacagtcacccgaggggcttataaaaaacgcagaacaaatgcccaggccgtacccccagtgatagtggttctggctcagcccctggcaa

SEQ ID NO: 15227 - DNA, 1002 bp, Artificial sequence
  DNA replication origin
cgccgagcatctcctgccccagaatctggcacgctgacggggacctagggacagacgaccgcacaacacgccacgttgcaggcgctgccaggccgggtgcctcacctagctccttcatgtattcatcaaagcctttgctgtccaccaggcgccatcttccttccagctgctgaactgtggccatggtgggtgcgggcgggctggcgtgcagagaggggtctgcgtcggcgtggcagcgtgctgtgaggcacccggcgccggcggctgctttataacggcggcccgcgctgggcggcgctatgcggccaatgggaggcgggcctcgcccggtccccgccccgcccgccgggcgccccctgggccttctcggggtcgggaggtgctaaccagctcctcttgccagggtacgcgacggcctctcgggcgcctcctgcaagcagggactcgcccggcgcgccccacgcctcatggacgccggcgcctgcacgtttcggcgcctctgcaggcccaggaagccagaggggtcacctggaggcctggccccgcctctcctgcacccctccgtttgacaacatatccaccgccgtttttcctttcaaaatacccggaccaatcgattagccctcgccggactcggactgcaggaagtgattgatcggctgtttggtttattgattcattaactacggtgcctccctgaccttctgctcctcgccagcgcacaagctcacaatccacaccctcctaagagaacctgctctcgccatccgcaggtctccctggcccaatagtggggatatacctgagttgagctagaggattttatccctgttgggatgggggacgtctcgggaagtgtggtttctaaactaaaagactgcaggaagtgtcaactttagtgactgtcattgccattcaagaatgtttgattagtttatattcccttcgtagtgcacccttcaccgtttcttctcagacaccagcgggtttcttctcagacac

SEQ ID NO: 15228 - DNA, 1527 bp, Artificial sequence
  DNA replication origin
agagagagacagagacagagagaaagagagagagagagggcaagagcgagagacagagagagagagagagagagagagagagagagagagagagagagagagagagagagaaagagaaagaaaacgagcgagggagagagcgagagcgagagagagagagagagagcgtcacacacacatctctgccggaagtgatgtcacggcatgggcgcccgcccaccggaggagcgactggagttgatcggctgggcgctcaggtagcgaagataaatgtaatcttgtggcaggaaatcgacattctctgcactatctttagttttccaactgaacttctgagaaatggaggctacaatacctagtttgccaaacaggagaagactacaattcccagaaggaactgcgaccaacattggtccgtgctcatactttgcatcatgggacttgtagtcatcaccagcttgcgctgattctaacaggttatagattgttttctagaattagcagcgctttaagggatgacaatcgattagaagagtaggaagatagaacactgcttagtagctgatccgttctacataattcagaagttctcattggcagagaacccctgaaattctgtagtgtctttttactatccggtgagcaatttgatcccgatgatggaatattagccttgttagacatgcgcttctgaagacctgtgcagtagggaaagccgagttttttgataggcaaatcccaagattcagaccggtctacaggtctgttcatcattagaatcagataatgtggttgaaaaatcattccacgatttctaaggcttttgtatagtcccaatgttacccatggagggtcttgactacaagtcatccaggttcttggtttttttaacaaagaattggacaaaacgcacaaagaaagcaaggaaagaatgaagcaaggaaagcagagattgaaatgactgtacactccacagagtgggaatggcctccagccagtggctcaagagccctggttacaggattttctggagtttaaatatccgctagagatttcccattggttacttggtttacaccctctgtaaattaaggagtagcctgcaaccaatcagaggctaaagttaagttacaaagttgtactcctatggaaatgaagactaggcccagataccaagggcctagaaggttgggcagggggttgcaaagggaatagcctctggtctttttgttacttgggcttggaaagttggagttttccttttgatttagttctaggaagtcagcgtgaatgggccttaggttccctgcctccggaccctattctactgcccgactaagagtgagaaaaggtgatagtggtcattttgaaatgaaggttggaaaatagtctggtttgtgacatgatgatggttttggtttaagagattctgcccttttagtgtgaatgaaataaaaatagaattctgtagaaacaatgttaggtaggagaatagggtctggaaacaggggacctaaggctgattca

SEQ ID NO: 15229 - DNA, 1710 bp, Artificial sequence
  DNA replication origin
ggcgggctagcggcttgtaacctacaaggaagaggttatgaaatgacgacaaaatagaatgggcctgtgaggctagaaggagatattttccgtcatccaagaaccatttgccttgtgtgggaagagattgacaggtggaagtttcagtgggggagtaggtgggagtgaccagaggagaaagagaaaaactggccatgagggacagaagttggaacactaagctgcttctttagctaccttatcagcataagcactgccctgagtgatgggatctgatgccttttgatggccctcgccgtgaatgactccagcttcctttggaagtaaagtggccttgagaaaagtttttattaaagaggcattaacgacggaggacccttgcgtagtgaggaaacctctttttgcccatacaacagcatggtggtgcaggatatggaaggaatatttagagtcagtataaatattgatgcgtaattcttttgcaagagtgagggctccagttaaggcaatgagtttggcttgctgagaggtagtggaggggggcagagtggtagcctcaatggtagatgtggaagatactatagcatagcctgcctttgctagtgtgtggcaattaggcctggtggaactgccgtcagtaaaccaggtgtgatcagggtgaggaacaggaaaggaggaaatatggagaaatggagtaaatgccaggtgtatcagagagatacagccatgggggtcaggtgtggtagcaggaataatgtgggaggccagattgaagtctgggccaggaacaatggcaattgtaggagactcaacaaagagtgagtataactgaaggaaccagggagcagaaagtatatgcgtcaggtatgaggaagaaaatagattttggaagttatgagagctgtagagagtgagttgagcatagtttgtgatttttagggcctctaaaagtattagagtggtggcagccaccacatgcagacatgagggctaggctaaaacagtaaggtcaagttgtttggataaaaaggccacagggcatggtcccggtccttgtgtaagaattttgaccacacaaccctgcacttcaggtgtgtgtaatgaaaaaaaaaggtaaggatgaatcagggagagctagtgtgggagcggtctctaaagctgtcttcaaggaatagaaagaggagtggggaaaggatttaggatctatggggtcagctaggtttccttttgtgagtttatttaatggttttgttaggatggcaaaaccagatatccaaaggcgaaagtatccaagcatgcccaggaaggaaaggagttgttattttgtagaaggggttgggggttgagagatcagttggacatgatcggcagggagagcacgtgtgtttttatgaagaattatgccaaaataggtaatggatgaggaagaaatttgggcttgactgaagtaatgggggctgtcggtgaagccttgcagcagtacagcccaggtaagttgctgaggctgatgggtgtcagggtcagtccaagtgaaagcggagagatgctgggatgaagggtgcaaaggaacagtaaagaaagcatgtttgagacccagagcagaataatgggttttggaggggttgtggagggaggtattgaggataggagagtatatgggtttggcaccacggggtggataggcaagacaatttggttgataaggcacag

SEQ ID NO: 15230 - DNA, 1043 bp, Artificial sequence
  DNA replication origin
gcttcatgccacctaatttttcctggatgctaggcaagaggtcaggagccacaagtgcagatacaaaaggttgtcacgctggccctttacccttgctggcagagggcagccaccccatgcgaaaaggcaaagggcccactgagctattaacacttaagctgtgtaaacaacagagctaaaagagcactgtaacatgctctctggagcttcgggagtcacaggcacccccaccacctgctgctgcggggcctgcacacagtttactcctgctggaacccaacagcagccatttggagcccatactcacttgtgtgcttcctcccacaaggagtttgagcgtgacgagcttagtaaatggagtttgttcctgccagggcccaaaagtgctgtttcctacaccctcttgtgtccggaattggtgggttcttggtctcactgacttcaagaatgaagccacggaccctcgcggtgagtgttacagctcttaaggtggcacatctggagttgttcgttcttcccagtgggctcgtggtttcgctggctttaggagtgaagctgcagactttcacggtgagtgttacagctcataaaagcaatgtggacccaaagagtgagcagcagaaagatttattgcaaagagcgaaagaacaaggcttccacagtatggaagaagacccgagcgagttaccactgctggcttgggcagcctgcttttattctcttatctggccccacccacatcccgctgattggtagagccgagtggtctgttttgacagggcgctgattggtgcgtttacagtccctgagctagacataaaggttctccacgtccccatcagattagttagatagagagtatggacacaaaggttcttcaaggccccaccagagcagctagatacagagtctccattgctgcattcacaaaccctgagctagacacagggtgctgattggtgtgtttacaaaccttgagctagatacagagtgccgattggtgtatttacaatccctgagctagacataaaggttctccatgt

SEQ ID NO: 15231 - DNA, 1115 bp, Artificial sequence
  DNA replication origin
cttggttttttatatttgatgaaaaagagcctaaacgctatctgatttgggataaagaaaaaggagcattaaccttgactatgcctttagctccagccacctttttaagagtaaattgctgggcgggttggggagggctagtcagggaatgaaactgtaagccggaccaggtgtgaggaggggaggtgataaaaggattacagggtggaggagcggaggctgaggaagaattgggacctagctcagcctggtgaggaggggagaggtcagatgggtctgtagaaaaggaagattagaaagactcagcaacgcttggggttgggactgaggggacaggcaggagggaaagaaggaagatttgggatgagttgcattggtcatagagactaggaagggaccaatgtgtaaaagaatgcctggaagtcaggcacctcagaccgtttgcccattttatgacaagaattatttagatcttgtaggatggaaaaattgaaaatgccattttctggctatttggaactactgtcgagtttgtattggggtcaagtggcattgcagaaggaaataagatgcttagattttaggtcaggtgagagttgaagaggttttaagttcttaagaacacaggctaagggagaagaagcaggaatggagggtggaaggttgcccatagtgaaggagacaagcccagagaaaagagagagtagagacacggagggaggggttcgggggttcttaccctccagaaaagcgggaaaggggttgggacacagagatatgaggttggggtgtggaaataagggattggggtgcagagatataagaggttggggtgcggaaataagggattggggcgcagagatataagaggtcagggtgcagagatataagaggtcgtggcacggaagtaagggattggggcacagagataagaggtcggggctcagaaataagggattggggtgcggagatatgaggttggggtacttgcccctccgccagaaaagcaggacttgctgctaagggtgaaggagaaggggttgggggtttcttgccccccagaaaggtggagaaggggtagagacatggagagaaggggttggggtacttgcccc

SEQ ID NO: 15232 - DNA, 1877 bp, Artificial sequence
  DNA replication origin
ggcaaggaattgcaactcagaaatacattgctacttggctgcctctactctattattgtacaccttgaaggagaggttaattaagtcctgttgtggggtttgagggccagaatttaatttttggagctttatttcatgtcgggagcagattgggtaaaaaaaataaaatgcatattgagaataagactgccttctgacctttcagggtttagggctgtaaagcatctcagggttactgccaaatgagccatgaactgggctgggttttccatatttgatgaaaaagagcctaaacgctaactgattttgggagaggtcggttaaagaaaaaggagcattaaccttgactatgcctttggctccagccacctttttaagaggaaattgctgggcaggtgggggaaggctatttgaggaatgaaactgtaagctggactgggtgtgaggaggggaggtggtaaaaggattatagggtgggggagcagaggctgaggaagaattgggacctggctcggcctggagaggaggggagaggtcagatgggtctatagaaaaggaagattagaaagactcagcaatgcttgggtttgggactgaggggataggctggagggaaagacggatgatttgggacaagttgcattgggaacagagactagggagggactgatgtgtaaaagaatgcctggatgtcaggcacctcagaccgtttgcctattttatgacaagaattatttagatcttgtaggatggaaaaattgaaagtgccattttctggctgtttggaaccactgtcgagtttgtattggggtcaagtggcactgcagaagaaaataaggcatttaggttttaggtcaggtgtgagttgaagaggttttaagttcttgagaacacaagctaagggagaagaaggaggaatggaaggtggaaacttgcccatagtgaaggaggcaagcccagagaaaagagagtagagacacggagaaggggtggggggttgttgccctccagaaaagcagagaaggggtcggggcatggaaataaggggttggggtgcagagataagtagtcggggtgcagaaataagggattggggtgcagagataagaggttggggtgcagaaataagggattggggcacagagataaaaggtcggggcatggaaataagggttcagggcacagagataagaggttgggatgtggaaataagggatcgggggttcttgcctcctagaaaagtggtacttgctgctaagggtgaaggagaaggggttgggggtttcttgcctctcccccagaaaagtgggacttgctgctaagggtgaaggagaagcggttgaggggttcttgcccctcctctagaaaagcggagaaggggtagagacacagagagaaggggttggggttcttgcccctcccccagaaaagtgggacttgctgctaagggcaaaggaccaaggcaggcgtccctgtgtggtctgacacctctgaaacccaggtgaataatcagagaggcgtccctgcagtgattaaacaccaagagaaggctgccttccctagtccgtgaccggtgccagagttctgggtccacagataaaacgtgtctcctttgtctctaccagaaaatgaaaggaattgaaattaagagaagggagagattgaagtgtggcaccaagattgaaaggagaaagaggttgagggatagtgagggaggttggagaagagagtaaaaagaggccacttaccggatttgaaattggtgagaggtttcttgggctggttggtctgaggacctgaggttgtaagtggatctttttcatggagcaaagagcaggaggacaggggattgatctcccaagggaggtcccccaatc

SEQ ID NO: 15233 - DNA, 1339 bp, Artificial sequence
  DNA replication origin
ccgaagtccgcccccgtccccgcctccggagctcaccgctttgagatccagaacgccgtccttggcctcctgcagcagcgacacgaacttggtagtgagcagccccaggctcttctcgtgcctgctgctgccgcccccggcgcccccgagctgcggcggcgggggcggctgcggggcttgcgcctgcggaggctgcggcggcggccgctggccctgcccctgccctgccggcgcctgctggcccgagctcgcgggctctgccgccgccatcgcgtcccggccccgcggtggtcgggcccccgcgcactttcgctcgccggccccgcccgcggccacctgccgggtcggctccgctgcggccgcttccccgcccgccgagagcggtagtgcgggtcgctggctgctgcaaacaacaggtgtgcggcgcccacgggagtctgggccgcttgtcacgccgggcctccgccccctccccaagcccggggaagcgtgaatgaggcccacgaccgaggggggaggggtggaaacgaggagaaggggctgcgaggggtggggacctgagtttaaatggcaggaagtgacgccgccgcccgccgttgcctagaaacacatttttctgtaggaaggaggagcgcacgaggaggaggaggggtgttggcgcgtgtgtttcacactcgcctccctggcgttcgcgagctgacccgaggagtggtaatctcacgcggcaaagcagggaggaagaaaaaaaggagacaaaagaaaaaaagacttttatctgggcagaaagtcacaatgcctagcggccaaacgtttgtgagcggtgaagttggttgactgctcaagtttgcagagcttcagcagtaggttactttctctggacggtttctgctatctttgctcttttcgagctctagcatcgtttgcaaatatttcaatgacttggaccaagtgcagagttttacttcatagctcacccttttagattcggagtacagaaaaaggcatcgtggagttttagggttggttttcatcaatcctttccaaggcctttactttctacatggagaaacgtgtagagggagaggttgtgaattgccaaagacatgccgttagattccagatctcctgtgtttgaccaaagttcttgaccaaagttcttaatatcttatttgaaccaaattatattgtatttggaatattgggtagccacaggcccttggacttcagtgatattccaaactattgatggcaaatgacattatggagatctgagtaaaagaaagtcgttgggattttttcctcattatattacaaactcttgagaatccagactaaattt

SEQ ID NO: 15234 - DNA, 1334 bp, Artificial sequence
  DNA replication origin
agcggccgcagcggagccgacccggcaggtggccgcgggcggggccggcgagcgaaagtgcgcgggggcccgaccaccgcggggccgggacgcgatggcggcggcagagcccgcgagctcgggccagcaggcgccggcagggcaggggcagggccagcggccgccgccgcagcctccgcaggcgcaagccccgcagccgcccccgccgccgcagctcgggggcgccgggggcggcagcagcaggcacgagaagagcctggggctgctcactaccaagttcgtgtcgctgctgcaggaggccaaggacggcgttctggatctcaaagcggtgagctccggaggcggggacgggggcggacttcggaacccgtggcccccggggaagcccagcccctcgccgcgtgggtctagcggcgtggtgtagacgcgccttgcggggacccgggaccgggcaatccgaggaccatgtggcctgcgcccgggtcgtggacgccgggatgggggagggacgagggaccaggatggcaccgagcggacgcgtaaccaatggggcccggcgccacgctgggctctcgacaaagagcccaggacctcgagcgcgcccgcgtggcttctgtctccgggcgcagggacctgagggtaaccgagtgtctgttgctctgcgtccacctgtggcagaggctcacggggtaacgggcgctttgcccggagacaccgtggatatcgattttgctgttaagaatggatggttttaataggcgattccagttggaaccatgttcctgtagtttaaataaaaaggaggaaaaacaaaacccagtctgccatctctaccagatgaaagaaaaaaaaaaaagagtacttctttccacgcccctccccgataaaatagtattaaatcttccttgtgcacttctttcatcaccctgatagttaggaggggtatttgatttgtgacttcatttggcatgtgtcatgggtttccaaaagtgagatctgctgtcacacgaaaaggggatattttacaactttcacccaaagaggtggaagtgctcagtaaactctctccctgcgtcgtcctttacagcgttcagatttttcaaacaggagcaggcatcaaaagctgttctgtcatacagaatgacttaaccgatctaggaaggatttggaagaattcaacagcgctcaggataatgagaatgtggtcactccgcgcgaagtttaagaactaaagttttagaaacaaacaaacaaaaaacactaactgcccaataatcactgcaaatcccctttgactccctaaatgtggccttacttggaggattggccccagc

SEQ ID NO: 15235 - DNA, 1477 bp, Artificial sequence
  DNA replication origin
tccacccgagccccctcccccgggccgcccccgagcacgaagttggcgggagcctataaaagctggtgccggcgcgacccgcggacacacagtgcaggcgcccaagccgccgccgccagatcggtgccgattcctgccctgccccgaccgccagcgcgaccatgtcccatcactgggggtacggcaaacacaacggtgagtgccggcgacggccagcgcgggggcgccccgatccccgatccccgatccccgatccccgagcccggatgccggcccggggcccgcagcgcccgcacatgctgtttaccgcggccgcggggagtgctggaggctcaggtgcgccccgggcgctcgctccgctcgcggctccgcggcgccggggatgtcccccttgccccagctgcgaggccactgtggaggaatccccgcgtccgccggaggcgcgtagggcccgagggaggggaggcgcagccctggccgcgggacccgaggacagtccctcccgggtcccgacctggggatcattttaaccggacctaggaggaggcgggaaagggttgtaacggaaaattctagttgttgatcgcagagaaattaagagactcccctcccccctcccccaccttccacccccaccccacccctccagcttcagcaccacctgtggctaaggcgctcagcacgaactgtcccggggcattttccagtgctggtttgaatccatggctctgatttccgagttttcccttcatctctcgacttctaatgttagggggtcggacatcaggaatcgggttttatcttggcctcagatctggttcttcggagccagcggagcagaggagcatgcgtctggcgcacctagcgcatctttggagggtgtggggcttcccaggtagtggggaaccctgacggttaaaggtggggtgggcccgggcctgggcagtgaggaaaggatccagacctccttgaatgtcttaagtgagcttgcatatcccaaaatcgcaaccacaagccctgacattagtgtctgcccgatttcagttgctgaatttcagtaaaacgaccttaaaatagctaatatttatatagcactcagtgatctaagagctttacatatatcgattctaattcttacagcgacatctatgaggtagatttctaattatcccatattacaaatgtggaaactgaggcacagattacgtgttttcccaaaatttagcccattgttaagtgatgcttctaaaattggaactgagcagattggctccggaatgattgctcttctctaggggtctgggtgtacctttccccacaatgggggattcacatgtcttctttcccccaggacctgagcactggcataaggacttccccattgccaagggagagcgccagtcccctgttgacatcgacactcatacagccaagtatgacccttccctgaagcccctgtctgtttcctatgatcaag

SEQ ID NO: 15236 - DNA, 663 bp, Artificial sequence
  DNA replication origin
tgcagagctgagttcaattcccggatatccttttttaactttctgtctcgttggtgtgtctaatgttgacagtggggtgttaagtttgccattattattattattattatgtgggagtctaagtctcttttgatcacactttaaagaccaaaaggtagaagcgcaaagacgttatctgtccaatattacaaacctagtaagtggtggaatttggccttgaacccagatctgtaactccagagccgaagtgcttcacccacctccctgtggtgcctctacagaaaaagaggtaagcaggcattccgaaagctggtgggccggggggctggccttgtactcagaagccatggaagtcccacgtggggtggctagtggtgtaaggacagaggtctcggatgggcagagggatgtggacaggcgcgagggcgcgcggcagggactcgggggactgggagtggcggctcggggctgcgggaggcgattggtggaaggacagaggtctgggaggggcagagggatgtggacaggcccgaggggccgcggcagggattccgggggaccgggagtggggggttggggttactcttggctttttgccctctcctgccgccggctgctccagtttctttcgctttgcggcgaggtgggcagggtgagctctcg

SEQ ID NO: 15237 - DNA, 683 bp, Artificial sequence
  DNA replication origin
catgtctcctaggtccgcttggtgcagagctgagttcaattcccggatatccttttttaactttctgtctcgttggtgtgtctaatgttgacagtggggtgttaagtttgccattattattattattactatgtgggagtctaagtctcttttgatcacactttaaagaccaaaaggtagaagcgcaaagacgttatctgtccaatattacaaacctagtaagtggtggaatttggccttgaacccagatctgtaactccagagccgaagtgcttcacccacctccctgtggtgcctctacagaaaaagaggtaagcaggcattccgaaagctggtgggccggggggctggccttgtactcagaagccatggaagtcccacgtggggtggctagtggtgtaaagacagaggtctcggatgggcagagggatgtgaacaggcgcgagggcgcgcggcagggactcgggggactgggagtggcggctcggggctgcgggaggcgattggtggaaggacagaggtctgggaggggcagagggatgtggacaggcccgaggggccgcggcagggattccgggggaccgggagtggggggttggggttactcttggctttttgccctctcctgccgccggctgctccagtttctttcgctttgcggcgaggtgggcagggtgagctct

SEQ ID NO: 15238 - DNA, 625 bp, Artificial sequence
  DNA replication origin
agggtgagctctcgggactgatggcggttttggaagaggcctggggctaaggacaggccagggcggcgggagaggcggaccggtggcgtggctggatctgggcgcgctgtcggaccttccacatcaccagctgcaggcaggcgtttgcgtcctcgctggagttgtggccgtcctggctgtcctggatgatctgtgccaggtagtcggccgcgagattcctgagggagcgcttgtaggggaaacccaggtagtgcgggaagagcacggccgtgtccaccacggtgctgtggatgagcttcagggccagcaggtcgctctccaggctgtgcccgatgaggatggtttgggcgctgaaaaagctcagcaggatggcttggacttggggcaacgtgatgctcgtcttggcgacgtcggcctcggtgactccggaaaacctggtgttgtagtccacgatctcgttgtcgggcttgacgaaggtgtcgtacaccactcgcatgtcggcgtccaccacggtgacgcgggtcagctctaggccatgcgtggtgtagcacatctcacagtccaaggcgtagattcctggataagcgtctctggacaactctttcttgaaggtctccacgaagcc

SEQ ID NO: 15239 - DNA, 641 bp, Artificial sequence
  DNA replication origin
ggatgtggacaggcgcgagggcgcgcggcagggactcgggggactgggagtggcggctcggggctgcgggaggcgattggtggaaggacagaggtctgggaggggcagagggatgtggacaggcccgaggggccgcggcagggattccgggggaccgggagtggggggttggggttactcttggctttttgccctctcctgctgccggctgctccagttttttttgctttgcgggggagggtggtgggcagggtgagctctcgggactgatggcggttttggaagaggcctggggctaaggacaggccagggcggcgggagaggcggaccggtggcgtggctggatctgggcgcgctgtcggaccttccacatcaccagctgcaggcaggcgtttgcgtcctcgctggagttgtggccgtcctggctgtcctggatgatctgtgccaggtagtcggccgcgagattcctgagggagcgcttgtaggggaaacccaggtagtgcgggaagagcacggccgtgtccaccacggtgctgtggatgagcttcagggccagcaggtcgctctccaggctgtgcccgatgaggatggtttgggcgctgaaaaagctcagcaggatggcttggacttggggcaacgtg

SEQ ID NO: 15240 - DNA, 628 bp, Artificial sequence
  DNA replication origin
acaggcgcgagggcgcgcggcagggactcgggggactgggagtggcggctcggggctgcgggaggcgattggtggaaggacagaggtctgggaggggcagagggatgtggacaggcccgaggggccgcggcagggattccgggggaccgggagtggggggttggggttactcttggctttttgccctctcctgccgccggctgctccagtttctttcgctttgcggcgaggtgggcagggtgagctctcgggactgatggcggttttggaagaggcctggggctaaggacaggccagggcggcgggagaggcggaccggtggcgtggctggatctgggcgcgctgtcggaccttccacatcaccagctgcaggcaggcgtttgcgtcctcgctggagttgtggccgtcctggctgtcctggatgatctgtgccaggtagtcggccgcgagattcctgagggagcgcttgtaggggaaacccaggtagtgcgggaagagcacggccgtgtccaccacggtgctgtggatgagcttcagggccagcaggtcgctctccaggctgtgcccgatgaggatggtttgggcgctgaaaaagctcagcaggatggcttggacttggggcaacgtg

SEQ ID NO: 15241 - DNA, 708 bp, Artificial sequence
  DNA replication origin
gcttctctcatccttttaatggtgatgttagggtatgcatttttgatctttcctcctttcccttgtgggcatttagtgctataaatttccctctacacactgctttaaatgtgtcccagagattctggtatgttgtgtctttgttctcattgctttcagagaatatctttatttctgccttcatttcgttatgtacccagtactcattcaggaacagcttgtccggtttccatgcagttgtgcggttttgagtgagtttctcaatcctgaggtctagtgtgattgcaatgtggtctgagagaccgtttgtaataatttctgttattttacttttactgaggagtgctttacttccaactatgtggtcaatgtggaaataagtgtgatgtggtgctgagaagaatgtatattctgttgatttggggtggagcgttctgtagatgtctcctaggtccgcttggtgcagagctgagctcaattcccggatatccttttttaactttctgtctcgttggtgtgtctaatgttgacagtggggtgttaagtttgccattattattattattactatgtgggagtctaagtctcttttgatcacactttaaagaccaaaaggtagaagcgcaaagacgttatctgtccaatattacaaacctagtaagtggtggaatttggccttgaacccagatctgtaactccagagccgaa

SEQ ID NO: 15242 - DNA, 668 bp, Artificial sequence
  DNA replication origin
tctcctaggtccgcttggtgcagagctgagctcaattcccggatatccttttttaactttctgtctcgttggtgtgtctaatgttgacagtggggtgttaagtttgccattattattattattactatgtgggagtctaagtctcttttgatcacactttaaagaccaaaaggtagaagcgcaaagacgttatctgtccaatattacaaacctagtaagtggtggaatttggccttgaacccagatctgtaactccagagccgaagtgcttcacccacctccctgtggtgcctctacagaaaaagaggtaagcaggcattccgaaagctggtgggccggggggctggccttgtactcagaagccatggaagtcccacgtggggtggctagtggtgtaaggacagaggtctcggatgggcagagggatgtggacaggcgcgagggcgcgcggcagggactcgggggactgggagtggcggctcggggctgcgggaggcgattggtggaaggacagaggtctgggaggggcagagggatgtggacaggcccgaggggccgcggcagggattccgggggaccgggagtggggggttggggttactcttggctttttgccctctcctgccgccggctgctccagtttctttcgctttgcggcgaggtgggca

SEQ ID NO: 15243 - DNA, 684 bp, Artificial sequence
  DNA replication origin
gatgtctcctaggtccgcttggtgcagagctgagctcaattcccggatatccttttttaactttctgtctcgttggtgtgtctaatgttgacagtggggtgttaagtttgccattattattattattactatgtgggagtctaagtctcttttgatcacactttaaagaccaaaaggtagaagcgcaaagacgttatctgtccaatattacaaacctagtaagtggtggaatttggccttgaacccagatctgtaactccagagccgaagtgcttcacccacctccctgtggtgcctctacagaaaaagaggtaagcaggcattccgaaagctggtgggccggggggctggccttgtactcagaagccatggaagtcccacgtggggtggctagtggtgtaaggacagaggtctcggatgggcagagggatgtggacaggcgcgagggcgcgcggcagggactcgggggactgggagtggcggctcggggctgcgggaggcgattggtggaaggacagaggtctgggaggggcagagggatgtggacaggcccgaggggccgcggcagggattccgggggaccgggagtggggggttggggttactcttggctttttgccctctcctgccgccggctgctccagtttctttcgcttgcggcgaggtgggcagggtgagctctcg

SEQ ID NO: 15244 - DNA, 666 bp, Artificial sequence
  DNA replication origin
gtctcctaggtccgcttggtgcagagctgagctcaattcccggatatccttttttaactttctgtctcgttggtgtgtctaatgttgacagtggggtgttaagtttgccattattattattattattatgtgggagtctaagtctcttttgatcacactttaaagaccaaaaggtagaagcgcaaagacgttatctgtccaatattacaaacctagtaagtggtggaatttggccttgaacccagatctgtaactccagagccgaagtgcttcacccacctccctgtggtgcctctacagaaaaagaggtaagcaggcattccgaaagctggtgggccggggggctggccttgtactcagaagccatggaagtcccacgtggggtggctagtggtgtaaggacagaggtctcggatgggcagagggatgtggacaggcgcgagggcgcgcggcagggactcgggggactgggagtggcggctcggggctgcgggaggcgattggtggaaggacagaggtctgggaggggcagagggatgtggacaggcccgaggggccgcggcagggattccgggggaccgggagtggggggttggggttactcttggctttttgccctctcctgccgccggctgctccagtttctttcgctttgcggcgaggtgg

SEQ ID NO: 15245 - DNA, 1082 bp, Artificial sequence
  DNA replication origin
gtgggatcagtggtgatatcccctttatcattttttattgcatctgcttgattcttcttcctttcattctttaatagtcttgctagtggtctatcaattttgttgatggtttcaaaaaacccgctcctggattcattgattttttgaagggttttttgggtctctatctccttcaattctgctcggatcttagttatttcttgccttctgctagcttttgaatgtgtttgctcttgcttctctcatccttttaatggtgatgttagggtatgcatttttgatctttcctcctttcccttgtgggcatttagtgctataaatttccctctacacactgctttaaatgtgtcccagagattctggtatgttgtgtctttgttctcattgctttcagagaatatctttatttctgccttcatttcgttatgtacccagtactcattcaggaacagcttgtccggtttccatgcagttgtgcggttttgagtgagtttctcaatcctgaggtctagtgtgattgcaatgtggtctgagagaccgtttgtaataatttctgttattttacttttactgaggagtgctttacttccaactatgtggtcaatgtggaaataagtgtgatgtggtgctgagaagaatgtatattctgttgatttggggtggagcgttctgtagatgtctcctaggtccgcttggtgcagagctgagctcaattcccggatatccttttttaactttctgtctcgttggtgtgtctaatgttgacagtggggtgttaagtttgccattattattattattactatgtgggagtctaagtctcttttgatcacactttaaagaccaaaaggtagaagcgcaaagacgttatctgtccaatattacaaacctagtaagtggtggaatttggccttgaacccagatctgtaactccagagccgaagtgcttcacccacctccctgtggtgcctctacagaaaaagaggtaagcaggcattccgaaagctggtgggccggggggctggccttgtactcagaagccatggaagtcccacgtggggtggctagtggtgtaaggacag

SEQ ID NO: 15246 - DNA, 672 bp, Artificial sequence
  DNA replication origin
tgtctcctaggtccgcttggtgcagagctgagctcaattcccggatatccttttttaactttctgtctcgttggtgtgtctaatgttgacagtggggtgttaagtttgccattattattattattactatgtgggagtctaagtctcttttgatcacactttaaagaccaaaaggtagaagcgcaaagacgttatctgtccaatattacaaacctagtaagtggtggaatttggccttgaacccagatctgtaactccagagccgaagtgcttcacccacctccctgtggtgcctctacagaaaaagaggtaagcaggcattccgaaagctggtgggccggggggctggccttgtactcagaagccatggaagtcccacgtggggtggctagtggtgtaaggacagaggtctcggatgggcagagggatgtggacaggcgcgagggcgcgcggcagggactcgggggactgggagtggcggctcggggctgcgggaggcgattggtggaaggacagaggtctgggaggggcagagggatgtggacaggcccgaggggccgcggcagggattccgggggaccgggagtggggggttggggttactcttggctttttgccctctcctgccgccggctgctccagtttctttcgctttgcggcgaggtgggcagg

SEQ ID NO: 15247 - DNA, 1398 bp, Artificial sequence
  DNA replication origin
gggatcaggatgatgctggcctcataaaatgagatagggaggattccctctttttctgttgattggaatagtttccgaaggaatggtaccagctcctccttgtacttctggtagaattcggctgtgaatccgtctggtcctggagttttattgcttgataggctattaattattgcctcaatttcagagcctgttattggtctattcaggcattcaacttcttcctggtttactctggggaggttgcatgtgtccaggaatttattcatttcttctagatttccgagtttgtttgcctagaggtgttgacagtattctctcatggtagtttgtacttctgtgggatcagtggtgatatcccctttatcattttttattgcatctgcttgattcttcttcctttcattctttaatagtcttgctagtggtctatcaattttgttgatggtttcaaaaaacccgctcctggattcattgattttttgaagggttttttgggtctctatctccttcagttctgctcggatcttagttaattcttgccttctgctagcttttgaatgtgtttgctcttgcttctctcatccttttaatggtgatgttagggtatgcatttttgatctttcctgctttcccttgtgggcatttagtgctataaatttccctctacacactgctttaaatgtgtcccagagattctggtatgttgtgtctttgttctcattgctttcagagaatatctttatttctgccttcatttcgttatgtacccagtactcattcaggagcagcttgtccggtttccatgcagttgagcggttttgagtgactttctcaatcctgaggtctagtgtgattgcaatgtggtctgagagaccgtttgtaataatttctgtaattttacttttactgaggagtgctttacttccaactatgtggtcaatgtggaaataagtgtgatgtggtgctgagaagaatgtatattctgttgatttggggtggagcgttctgtagatgtctcctaggtccgcttggtgcagagctgagctcaattcccggatatccttttttaactttctgtctcgttggtgtgtctaatgttgacagtggggtgttaagtttgccattattattattattactatgtgggagtctaagtctcttttgatcacactttaaagaccaaaaggtagaagcgcaaagacgttatctgtccaatattacaaacctagtaagtggtggaatttggccttgaacccagatctgtaactccagagccgaagtgcttcacccacctccctgtggtgcctctacagaaaaagaggtaagcaggcattccgaaagctggtgggccggggggctggccttgtactcagaagccatggaagtcccacgtgg

SEQ ID NO: 15248 - DNA, 685 bp, Artificial sequence
  DNA replication origin
tctcctaggtccgcttggtgcagagctgagctcaattcccggatatccttttttaactttctgtctcgttggtgtgtctaatgttgacagtggggtgttaagtttgccattattattattattactatgtgggagtctaagtctcttttgatcacactttaaagaccaaaaggtagaagcgcaaagacgttatctgtccaatattacaaacctagtaagtggtggaatttggccttgaacccagatctgtaactccagagccgaagtgcttcacccacctccctgtggtgcctctacagaaaaagaggtaagcaggcattccgaaagctggtgggccggggggctggccttgtactcagaagccatggaagtcccacgtggggtggctagtggtgtaaggacagaggtctcggatgggcagagggatgtggacaggcgcgagggcgcgcggcagggactcgggggactgggagtggcggctcggggctgcgggaggcgattggtggaaggacagaggtctgggaggggcagagggatgtggacaggcccgaggggccgcggcagggattccgggggaccgggagtggggggttggggttactcttggctttttgccctctcctgccgccggctgctccagtttctttcgctttgcggcgaggtgggcagggtgagctctcgggac

SEQ ID NO: 15249 - DNA, 1705 bp, Artificial sequence
  DNA replication origin
tttggcatgaaaggctgttgaattttgtcaaaggccttttctgcatctgttgagataatcacgcggtttctgtctttggttccgattatatgctggattatgtttattgatttgcatatgttggaccagccttgcatgtcagggatgaagcccacttgatcataatggataagctctttgatgtgctgctggattcggtttgccagcattttatggaggatttttccatcggtgttcctcagggatatgggccgaaaattctctttgttggttgtgtctctctcagcctttgggatcaggatgatgctggcctcataaaatgagatagggaggattccctctttttctgttgattggaatagtttccgaaggaatggtaccagctcctccttgtacttctggtagaattcggctgtgaatccgtctggtcctggagttttattgcttgataggctattaattattgcctcaatttcagagcctgttattggtctattcaggcattcaacttcttcctggtttactctggggaggttgcatgtgtccaggaatttattcatttcttctagatttccgagtttgtttgcctagaggtgttgacagtattctctcatggtagtttgtacttctgtgggatcagtggtgatatcccctttatcattttttattgcatctgcttgattcttcttcctttcattctttaatagtcttgctagtggtctatcaattttgttgatggtttcaaaaaacccgctcctggattcattgattttttgaagggttttttgggtctctatctccttcagttctgctcggatcttagttaattcttgccttctgctagcttttgaatgtgtttgctcttgcttctctcatccttttaatggtgatgttagggtatgcatttttgatctttcctgctttcccttgtgggcatttagtgctataaatttccctctacacactgctttaaatgtgtcccagagattctggtatgttgtgtctttgttctcattgctttcagagaatatctttatttctgccttcatttcgttatgtacccagtactcattcaggagcagcttgtccggtttccatgcagttgagcggttttgagtgactttctcaatcctgaggtctagtgtgattgcaatgtggtctgagagaccgtttgtaataatttctgtaattttacttttactgaggagtgctttacttccaactatgtggtcaatgtggaaataagtgtgatgtggtgctgagaagaatgtatattctgttgatttggggtggagcgttctgtagatgtctcctaggtccgcttggtgcagagctgagctcaattcccggatatccttttttaactttctgtctcgttggtgtgtctaatgttgacagtggggtgttaagtttgccattattattattattactatgtgggagtctaagtctcttttgatcacactttaaagaccaaaaggtagaagcgcaaagacgttatctgtccaatattacaaacctagtaagtggtggaatttggccttgaacccagatctgtaactccagagccgaagtgcttcacccacctccctgtggtgcctctacagaaaaagaggtaagcaggcattccgaaagctggtgggccggggggctggccttgtactcagaagccatggaagtcccacgtggggtggctagtggtgta

SEQ ID NO: 15250 - DNA, 702 bp, Artificial sequence
  DNA replication origin
gagcgttctgtagatgtctcctaggtccgcttggtgcagagctgagctcaattcccggatatccttttttaactttctgtctcgttggtgtgtctaatgttgacagtggggtgttaagtttgccattattattattattactatgtgggagtctaagtctcttttgatcacactttaaagaccaaaaggtagaagcgcaaagacgttatctgtccaatattacaaacctagtaagtggtggaatttggccttgaacccagatctgtaactccagagccgaagtgcttcacccacctccctgtggtgcctctacagaaaaagaggtaagcaggcattccgaaagctggtgggccggggggctggccttgtactcagaagccatggaagtcccacgtggggtggctagtggtgtaaggacagaggtctcggatgggcagagggatgtggacaggcgcgagggcgcgcggcagggactcgggggactgggagtggcggctcggggctgcgggaggcgattggtggaaggacagaggtctgggaggggcagagggatgtggacaggcccgaggggccgcggcagggattccgggggaccgggagtggggggttggggttactcttggctttttgccctctcctgccgccggctgctccagtttctttcgctttgcggcgaggtgggcagggtgagctctcgggact

SEQ ID NO: 15251 - DNA, 1416 bp, Artificial sequence
  DNA replication origin
tcataaaatgagatagggaggattccctctttttctgttgattggaatagtttccgaaggaatggtaccagctcctccttgtacttctggtagaattcggctgtgaatccgtctggtcctggagttttattgcttgataggctattaattattgcctcaatttcagagcctgttattggtctattcaggcattcaacttcttcctggtttactctggggaggttgcatgtgtccaggaatttattcatttcttctagatttccgagtttgtttgcctagaggtgttgacagtattctctcatggtagtttgtacttctgtgggatcagtggtgatatcccctttatcattttttattgcatctgcttgattcttcttcctttcattctttaatagtcttgctagtggtctatcaattttgttgatggtttcaaaaaacccgctcctggattcattgattttttgaagggttttttgggtctctatctccttcaattctgctcggatcttagttatttcttgccttctgctagcttttgaatgtgtttgctcttgcttctctcatccttttaatggtgatgttagggtatgcatttttgatctttcctcctttcccttgtgggcatttagtgctataaatttccctctacacactgctttaaatgtgtcccagagattctggtatgttgtgtctttgttctcattgctttcagagaatatctttatttctgccttcatttcgttatgtacccagtactcattcaggaacagcttgtccggtttccatgcagttgtgcggttttgagtgagtttctcaatcctgaggtctagtgtgattgcaatgtggtctgagagaccgtttgtaataatttctgttattttacttttactgaggagtgctttacttccaactatgtggtcaatgtggaaataagtgtgatgtggtgctgagaagaatgtatattctgttgatttggggtggagcgttctgtagatgtctcctaggtccgcttggtgcagagctgagctcaattcccggatatccttttttaactttctgtctcgttggtgtgtctaatgttgacagtggggtgttaagtttgccattattattattattactatgtgggagtctaagtctcttttgatcacactttaaagaccaaaaggtagaagcgcaaagacgttatctgtccaatattacaaacctagtaagtggtggaatttggccttgaacccagatctgtaactccagagccgaagtgcttcacccacctccctgtggtgcctctacagaaaaagaggtaagcaggcattccgaaagctggtgggccggggggctggccttgtactcagaagccatggaagtcccacgtggggtggctagtggtgtaaggacagaggtctcggatgggca

SEQ ID NO: 15252 - DNA, 688 bp, Artificial sequence
  DNA replication origin
ctcctaggtccgcttggtgcagagctgagctcaattcccggatatccttttttaactttctgtctcgttggtgtgtctaatgttgacagtggggtgttaagtttgccattattattattattactatgtgggagtctaagtctcttttgatcacactttaaagaccaaaaggtagaagcgcaaagacgttatctgtccaatattacaaacctagtaagtggtggaatttggccttgaacccagatctgtaactccagagccgaagtgcttcacccacctccctgtggtgcctctacagaaaaagaggtaagcaggcattccgaaagctggtgggccggggggctggccttgtactcagaagccatggaagtcccacgtggggtggctagtggtgtaaggacagaggtctcggatgggcagagggatgtggacaggcgcgagggcgcgcggcagggactcgggggactgggagtggcggctcggggctgcgggaggcgattggtggaaggacagaggtctgggaggggcagagggatgtggacaggcccgaggggccgcggcagggattccgggggaccgggagtggggggttggggttactcttggctttttgccctctcctgccgccggctgctccagtttctttcgctttgcggcgaggtgggcagggtgagctctcgggactgat

SEQ ID NO: 15253 - DNA, 821 bp, Artificial sequence
  DNA replication origin
cggcggggaggcgcgcgcttagggcgcggcgccggcgacgcggccacgcggcgcgctcccgaggaagggaggtgtggggtcggctgggggtggcgcgtggacggggtgggggtggggggagggtcgggtgtcggcgagctccgcgtgcgggttccgagtggctgctggcggcctgggctgccggggccgacgcctgggtggctgctgccgccgcgcctgctgcgagatggcgatcttgggcgcggaagggtgagggcgcccgccgcaggaggaggtgccgctgccgtggccgcccggctgccgggagccgacagcttcgcgccgggtaaggacggcgcggcgcggggctgggggtgcgaatgggcagggcgggagggggcacgggccctgagccttggccgcggtgctgggcgcccggcgccgtccgcccccgggctggaccctcctaggacccgtcgggggacggtccgccctaccttggctaccttctccagcccgggagtcgggagttttctggggtggggtcacgggtcttgcccggagttcgccctggcaaaggcctgtgccagtgatcctggagcggagcgaagtgtttccgtgactctgcagccgcagttcttaggcttccttagccttctcttcgccttcctccacctttccctaacacctccctgaaaacacaaatacatggactcattgcccgttccctgactttcaccccaatttcagcgttgcaaaccaaggactccagctttggaacgtctttttctgacatgtttttatcactctccgttcttcaccgactctgcagctccccatcc

SEQ ID NO: 15254 - DNA, 1467 bp, Artificial sequence
  DNA replication origin
ttccccacatttcccccttttctattcgacaaaacccccatcatcatcatggcccgttctcaatgagctgttgggtacacctcccagacggggtggcggccaggcagacgggctcctcacttcccagacggggcggccgggcagaggcgcccccccacccacctcccggatggggcggctgcccggcggaggccgccccccacctccctcccagatggggcggctggcggggtgggggctgccccccacctccttcccagatggggcggctggccgggcgggggctgccccccacctcctggacggggcggctgccgggcggagacgctcctcacttcccggacggggcggctgccaggcggaggggctcctcacttctcagacggggcagcccggcagagacgctcctcacctcccagaaggggtggcggtctggcagagacactcctcagatcccagacggggtcgcagctgggcagaggcactcctcacatcccagacggagcggcggggcagaggcgctccccacatctcagacgatgggcagccgggcagacacgctcctcacttcctagacgggatggcggccaggaagaggcgctcctcacttcccagactgggcggccgggcagaggggctcctcacatcccagacgacgggcggccaggcagagacgctcctcacttcccagacggggtggcggctgggcacaggctgcaatctcggcactttgggaggccaaggcaggcggctgggaggtggaggttgtagcaagccgagatcacgccactgcactccagcctgggcaagattgagcactgagtgagcgagactccgtctgcaatcccggcacttcgggaggcccaggctggcagatcactcgcggtcaggagctggagaccagcccgtccaacacggcgaaaccccgtctccaccaaaaaatacaaaaaccagtcaggcgtggcagcgggcgcctgcaatcccaggcactaggcaggctgaggcaggagaatcaggcagggaggttgcagtgaaccgagatggcggcagcacagtccagcctcggctcagcatcagagggagaccgtggaaagtgggagacgagagggagacgggagagggggagggagagggggagggaggaggagcgggagggagagggagaagaatatgtggtttctgaccactcccccattctaccatagtaggaacccaatagtctaccatatcagaatagattttgcagttattgaggtcatttgttccttttcagatttacaaggctaatttcttcctttgttaaggctccctattgttttctcgtatatttcatggtttttcatctatcttttctgatatatttggggtaatggtgggggagtgatttatttgaataggtatattttctatttttgaagttttttttaatttcttcatccttgatggtatgtgttattacagccataa

SEQ ID NO: 15255 - DNA, 889 bp, Artificial sequence
  DNA replication origin
gccccgtctgggatgtgaggagcgcctctgccgagccgtgacccagtctgggaggtgaggagtgtctctgcccggccgccccatctgagaagtgaggagcccctctgcctggcagccgccccatctgagaagtgaggagcccctccgcccggcagccgccccgtctgggaagtgaggagcgtctccgcccggcagctgccccgtccgggagggaggtggggggcagccccataagcgctaacttaagttagcgcttatgggggcagcccccgcccggccagccgccccatctgggagggaggtggggggcagcccccgcccggccagccgccccgtccgggagggaggtggggggcgcctctgcccagccgccgccccgtccgggaggtggggggggggcgcctctgcccggccgccccttctgggaagtgaggagcccctctgcccggccgccaccccgtctgggaagtgtaccaaacagctcattgagaacgggccatgatgatgatggcggttttgtggaatagaaaagggggaaatgtggggaaaagatagagaaatcagattgttgctgtgtctgtgtagaaagaagtagacataggagactccattttgttctgtactaagaaagactcttctgccttgggatgctgttgatctatgaccttgcccccaaccctgtgctctctgaaacatgtgctgtgtccactcagggttaaatggattaagggcagtgcaagatgtgctttgttaaacagatgcttgaaggcagcatactccttaagagtcatcaccactccctaatctcaagtacccagggacacaaacactgtggaaggccgcagggtcctctgcctaggaaaaccagagacctttgttcacttgttta

SEQ ID NO: 15256 - DNA, 1283 bp, Artificial sequence
  DNA replication origin
atcccaaggcagaagagtctttcttagtacagaacaaaatggagtctcctatgtctacttctttctacacagacacagcaacaatctgatttctctatcttttccccacatttcccccttttctattccacaaaaccgccatcatcatcatggcccgttctcaatgagctgtttggtacacttcccagacggggtggcggccgggcagaggggctcctcacttcccagaaggggcggccgggcagaggcgccccccccccacctcccggacggggcggcggctgggcagaggcgccccccacctccctcccggacggggcggctggccgggcgggggctgccccccacctccctcccagatggggcggctggccgggcgggggctgcccccataagcgctaacttaagttagcgcttatggggctgccccccacctccctcccggacggggcagctgccgggcggagacgctcctcacttcccagacggggcggctgccgggcggaggggctcctcacttctcagatggggcggctgccaggcagaggggctcctcacttctcagatggggcggccgggcagagacactcctcacctcccagactgggtcacggctcggcagaggcgctcctcacatcccagacggggcggcggggcagaggcgctccccacatctcagacgatgggcggccaggcagagacactcctcacttcctggacaggatggcggccgggaagaggcgctcctcacttcccagactgggcagccgggcagaggggctcctcacatcccagacgatgggcggccaggcagagacgctcctcacttcccagacggggtggcggccgggcagaggctgcaatctcggcactttgggaggccaaggcaggcggctgggaggtggaggttgtagctagccgagatcacgccactgcactccagcctgggcaccattgagcactgagtgaacgagactccgtctgcaatcccggcacctcgggaggctgaggctggcagatcactcgccgttaggagctggagaccagcccggccaacacagtgaaaccccgtctccaccaaaaaaatacgaaaaccagtcaggcatggcggcgcacgactgcaatcgcaggcactcggcaggctgaggcgggagaatcaggcagggaggttgcagtgagccgagatggcagcggtacagtccagcttcggcttggcatcagagggagagcgtggaaagagagggagagggagactgtggggagagggagagggagggggaggg

SEQ ID NO: 15257 - DNA, 830 bp, Artificial sequence
  DNA replication origin
cccgtccgggagggaagtgggggggtcagccccccgcccggccagccgccccatccgggaggtgaggggcgcctcagcccggccgcccctactgggaagtgaggagcccctttgcccggccagccgccccatccaggagggaggtgggggggtcagccccccgcccggccagccgccccgtccgggagggaggtggggggggtcagccccccgcccggccagccgccccgtccaggagggaggtgggggggtcagccccccgcccggccagccgccccgtctgggagggaggtgggggggtcagcccccccgcccggccagccgccccgtccgggaggtgaggggcgcctctgcccggccacccctactgggaagtgaggagcccctctgcccggccaccaccccatctggtaggtgtacccaatggctcattgagaacgggccatgatgacaatggcggttttgtggaatggagagggggggaagggtggggaaaagattgagaggtcggatggttgccgtgtctgtgtagagagaagtagacatgggagacttttcattttgttctgtactaagaaaaattcttctgccttgggatcctgttgatctgtgaccttacccccaaccctgtgctctctgaaacatgtgctgtgtccactcagggttaaatggattaagggcggcgcaagatgtgctttgttaaacagatgcttgaaggcagcatgctcgttaagagtcatcaccactccctaatcttaagtacccagggacacaaacactgcggaaggccgcagggtcctctgcctaggaaaaccagagacctttgttca

SEQ ID NO: 15258 - DNA, 1307 bp, Artificial sequence
  DNA replication origin
tacacctaccagatggggtggtggccgggcagaggggctcctcacttcccagtaggggtggccgggcagaggcgcccctcacctcccggacggggcggctggccgggcgggggggctgacccccccacctccctcccagacggggcggctggccgggcggggggctgacccccccacctccctcctggacggggcggctggccgggcggggggctgaccccccccacctccctcccggacggggcggctggccgggcggggggctgacccccccacctccctcctggatggggcggctggccgggcaaaggggctcctcacttcccagtaggggcggccgggctgaggcgcccctcacctcccggatggggcggctggccgggcggggggctgacccccccacttccctcccggacggggtggctggcctggcgggggctgacccccacctccctcccggacggggtggctgccgggcggagacgctcctcacttcccagacggggtggctgccggacggagggtctcctcacttctcagatggggcggctgccgggtggcgggactcctcacttctcagacggggtggttgccaggcatagggtctcctcacttctcagacggggcggccgggcagagacgctcctcacctcccagacagggtcgcggccgggcagaggcactcctcacatcccagatggggcggcggggtagaggcgctccccacatctcagacgatgggtggccgggcagagacgctcctcacttcctagatgggatggcggcggggaagaggcgctcctcacttcctagatgggatggtggctgggcagagacgctcctcactttccagactgagcagccaggcagaggggctcctcacgtcccagacgatgggcggccaggcagagactctcctcacttcccagacggggtggcgcccgggcagaggctgcaatctcagcactttgggaggctaaggcaggcggctgggaggtggttgtagcgagccgagatcacgccactgcactccagcctgggcatcattgagcactgagtgaacgagactccgtctgcaatcccggcacctcgggaggccaaggctggcggatcactcgcggtaaggagctggagaccagcctggccaacacagcgaaaccccgtctccaccaaaaaaatacgaaaaccagtcaggcgtggcggtggcgcctgcaatcgcaggcactcggcaggcactcggcaggagaatcaggcagggaggttgcagtgagccgagatggcagcagtacagtccagcttcggctcgg

SEQ ID NO: 15259 - DNA, 1280 bp, Artificial sequence
  DNA replication origin
tctactaaaaatacaaaaaaatagctgggcgtagttgcacacacttgtaatcccagctactcgggagactgaggctggagaattgcttgaacccagagggcggaggttgcagtgagccgagatcacgccactgtactccagcctgggcaacggagcaagactccatctgaaaaaaaaaaaaaatttagtgagaggcttgaagtagcaccagggatctgaatacttacgagttgggaaaatggcataaagaaagttagaaagggatttttttttaaatacaaaaaaagctcttttaaaaaaatttacatgtacttaagttgtccttcttgttaatagtaaagacatttgttgaaagtctagctccagaagatatgtagtaaaacatatattaaaatgaatggtgctaagtcattgtgaggattaccgtgacaataacaaattttattattgttagagtgtgtccggaattggtgggttcttggtctgacttcaagaatgaagccgcggaccctcgcggtgagtgttacagttctcaaaggcagcgtgtccggagtttgttccttctgatgttcagatgtgtacggagtttcttccttctggtgggtttgtggtctcgctggctcaggagtgaagctgtggaccttcgaggtgagtgttacagctctcaaggcggcacgtctggagttgttcgttcctcccggtgggttcgtggtctcgctggcttcaggagtgaagctgcagaccttcgtggcgagtgttacacctcataaaggcagtgtggacccaaagagtgagcagcaggaagatttattgcgaaagaccactgcttccaccttttggaaggcaaccagcgggttgccactgctgctggggcagcctgcttttattctcttatctggcaccacccacatcctgctgattggtccattttacagagagcccgagtggtctgttttgacagggtgctgattggtgcgtttacaatccctgagctagacacaaaggttcccacctccccactagattagctggatacagagtgtccacacaaaggttctccaagtccccaccagagcagctagatacagagtgtggattggtgcattcacaaaccttgagttagacacagggtgctgattggtgtgtttacaaaccttgagctagatacagagtgccgattggtgtatttacaatcccctaactccaagtccccaccagactcaggagcccagctggcttcacccagtggatcccgcatcagggccgcggcggagctgcct

SEQ ID NO: 15260 - DNA, 965 bp, Artificial sequence
  DNA replication origin
gcagccggtttctttccagcgcccccatccctctcatcggatgttttgttaacacccaggaccatctctcccgggtcccactgtgcgcgtgtgtccaccgttcacttggaaagtgagcgttttcatcccgcttctgtatttgtctagtccgccaccaaaaccctgtgcctactcctcaagcctggaaggcggaatgtagctatggtagaggggattcaggaagacaccaggccacaggctcgggaccccaacaaagttttggacgttcgggatttgctatctcagtcttcccaaacttggtcagccccggccaccgacccgagccacccaggggcgctcagtgaccaggcgctcctctgattcccagcgcccctattcttccagggccgcttcctcaggaatgccgaccgctctccaggaccagggttgggccgctccccaggccccactagggtccgcagcctgagccccacccagctcatggctggagaggggcgcactcgtttttagatgcgaggcggcagggtgggcgggaagaaagaatggagccgcccaagttcctgggtgcctgcctcggggatgcgggatgggagatactgtcgaagagctgtgctcaaaccagggcccttgtcgcgggctggatacctccggtgcgccctaccgtagtggggaatcctttatgagccgtctcctttaagaagcgcgcgtgcgtgtgtgtcgggctgtgtgtatgcgcgcgtgtgtgtgtgtgtgtcgcggtgtgtctctgtgtgtgtgtgtgtgtgtgtgtgtgtgcgcgcgcgcgcgcgcgccaagggccccgagagccaggcagaccccgggaaggaggagttatgtagattacggatgaacattctggaggggagcgaggagaggagggaaggagaagcagaggcgagagagtgaggagcggcggaggcccttcccgcaggagctgggggcgg

SEQ ID NO: 15261 - DNA, 1582 bp, Artificial sequence
  DNA replication origin
ctcggggcccttggcgcgcgcgcgcgcgcgcacacacacacacacacacacacacacagagacacaccgcgacacacacacacacacgcgcgcatacacacagcccgacacacacgcacgcgcgcttcttaaaggagacggctcataaaggattccccactacggtagggcgcaccggaggtatccagcccgcgacaagggccctggtttgagcacagctcttcgacagtatctcccatcccgcatccccgaggcaggcacccaggaacttgggcggctccattctttcttcccgcccaccctgccgcctcgcatctaaaaacgagtgcgcccctctccagccatgagctgggtggggctcaggctgcggaccctagtggggcctggggagcggcccaaccctggtcctggagagcggtcggcattcctgaggaagcggccctggaagaataggggcgctgggaatcagaggagcgcctggtcactgagcgcccctgggtggctcgggtcggtggccggggctgaccaagtttgggaagactgagatagcaaatcccgaacgtccaaaactttgttggggtcccgagcctgtggcctggtgtcttcctgaatcccctctaccatagctacattccgccttccaggcttgaggagtaggcacagggttttggtggcggactagacaaatacagaagcgggatgaaaacgctcactttccaagtgaacggtggacacacgcgcacagtgggacccgggagagatggtcctgggtgttaacaaaacatccgatgagagggatgggggcgctggaaagaaaccggctgcgggagccaggggaagggttggggaaagaaggagaagaagcagcctgaggaaaggcgagtaaagcagctggcaagggcgggaggaagaggctgctcgcagaccgagcgggggagaggctggcgggagctaggagagctgcaggcaagagggggaggcggctggcaagaagcacgggcgaacgcgggcagggaacttcagaggaggctgccagaaaggactggagctgtagcagtgcgaggcagtggacagggggggcagcaaccaccagcccttggcaagtgatggtttggctgaaagaggaagggggaagggagcgaggcaagcatctgtttgggggctaatgccagtaaatgtgcttctccttggcagccagcagaggggaagaggagcccacgggaaagaaaagcaggcgaggttaagaataaagagtgttccaggtatgacagctacctcggtgaggtggaagagagaattgacaaggcaaatttcatgggtgagttggaaaggcaagaagcaggactacaagaggtcctatgtggtaagcagatggaaaattctgagaatggtttgccaaaaattgtattagactgcaataacttttatccaataaaagaaaaaaaggctgaggaatgggactttgcagctgttgctgtaaaaatgtaagaaatgcccacccaacttgacccaagacccaagaagttctcagggagaccttcctgacagtctgccttgtgcccagcatgtgctgcccacaaaa

SEQ ID NO: 15262 - DNA, 1539 bp, Artificial sequence
  DNA replication origin
aattaagtcttgttgtggggtttgagggcaagattctaatttttggagttttatttaatgtcgggagcagattgggtaataaaatgtatattgggaataagacagccttttgaccttttagggtctagggctgtaaagcgtctcagggttgctgccaaacgagccatgaactgggctggatttttatatttgatgaaaaagagcctaaacgctatttgatttggggtaaagaaaaaggagcattaaccttgactatgcctttagctccagccacctttttaagaataaattgctgggcaggtggaggagggctagtcatggaacgaaactgtaagccagaccaggtgtgagaaggggaggtgataaaaggattatagggtggaggagcagaggctgaggaagaattgggacctagctcggcctggcgaggaggggaggggtcagatgggtctgtagaaaaggaagattagaaagactcagcgacacttggggttgggactgaggggacaggtgggagggaaagaaggaagatttgggatgagttgcattgggcacagagactaggaagggaccgatgtgtaaaagaatgcctggacatcaggcacctcagacgatttgcctattttatgacaattattatttagatcttgtaggatggaaaaattgaatgtgccgttttctggctatttggaactactgttgagtttgttttggggtcaggcgcattgcagaagaaaataagatgcttagattttaggtcaggtgagagttgaagaggttttaagttcttaagaacacaggctaagtgagaagaaggaggaacggaaggtggaagcttgcccatagtgaaggaggcaagtccagagaaaagagtagagacacggagaaggggtggggggttcttgccctccagaaaagcagagaaggggttggggcatggaaataagaggtcagggtgcggaaataagggattgggggttcttgtcccctagaaaagcgggacttgctgttaagggtgaaggagaaggggttgaagggtacttgcccctcccccagaaaagcagagaaggggtacagacatggagagaaggggttggggtacttgtccctctgccagaaaagtggggcttgccactaagggtgaaggaccaaggcaggcgtccctgtgtggtctgacagctttgaaacgtgggtgaataatcggagaggtgtccctgaaatgattaaacaccaagggaaggctgccttcccagtccatgaccggcgttggagttttgggtccacggataaaacgtgtctcctttgtctctaccagaaaatgaaaggaattgaaattaagagaagggagagattgaagtgtggtgccaagattgaaaggacaaagaggttgagggatagtgagggaggttggagaagagagtaaaaagaggccgcttaccggatttgaaattggtgagatgtttcttgggctggtcggtctgaggacctgaggttgtaagtggatgtttctcatggagcaaagagcaggaggatggggca

SEQ ID NO: 15263 - DNA, 1022 bp, Artificial sequence
  DNA replication origin
acttcccagatggggtggctggccgggcgaggggctgacccccccacctccctcccggacggggcggctggccgggcggggggctgaccccccacctccctcccggacggggcggctggccgggcagaggggctcctcacttcccagtaggggcagcagggcagaggcacccctcacctcccggacggggcggctggccgggcggggggctgaccccccacctccctccctgacggggcggctggccgggcagaggtgctcctcacttcccagtaggggcggccgggcagaggcgcccctcacctcccggacggggcggctggccgggcggggggctgacccccccacctccctcccggacggggaggctggccgggcggggggctgacccccccacctccctgccggacgaggtggctgccgggcggagacgctcctcacttcccagacggggcggctgctgggcggatgggctcctcacttctcagacggggcagttgccgggcggagggtctcctcacttctcagacggggcggccgggcagagacgctcctcacatcccggacggggcggcagggcagaggtgctccccacatctcagatgatgggcggctgggcagagacgctcctcacttcccagatgggatagcggccgggaagaggcgctcctcacttcctagatgggatggcggccaggcagagacgctcctcacttctcagacggggtggcggccgggcagaggctgcaatctcggcactttgggaggccaaggcaggctgctgggaggtgaaggttgtagcgagccgagatcacgccactgcactccagcctgggcaccattgagcacggagtgaacgagactccgtctgcaatcccggcacctcaggatgccgaggctggcggatcactcgcggttaggacctggagaccagcccagccaacacagcgaaaccccgtctccaccaaaaaaatacgaaaaccagtcaggcgtggcggcgcgcgcctgcaatcgcaggcagt

SEQ ID NO: 15264 - DNA, 875 bp, Artificial sequence
  DNA replication origin
aggtggggggtcagccccccgcccggccagccgccccgtccgggagggaggtgggggggtcagcccctcgcccggccagccaccccatctgggaagtgaggggcgcctctgcccggccgcccctactgcgaagtgaggagttcctctgcccggccagccgccccgtccgggagggaggtgggggggtcagccccccgcccggccagccgccccgtccgggaggtgaggggcgcctctgcccagccgcccctactgggaagtgaggagcccctctgcccggccagccgccccgtccgggagggaggtggggggggtcagccccccgcccggccagctgccccgtccgggaggtgaggggcgcctctgcccggccgcccctactgggaagtgaggagcccctctgcccggccaccaccccatctgggaggcgtacccaacagctcattgagaacaggccatgatgacaatggcggttttgtggaatagaaagggggggaagggtggggaaaaagattgagaaatcggatggttgctgtgtctgtgtagaaagaagtacacgtgggagacttttcattttgttctgtactaagaaaaattcttctgccttgggatcctgttgatctgtgaccttacccccaaccctgtgctatctgaaacatgtgctgtatccactcagggttgaatggattaagggcggtgcaagatgtgctttgttaaacagatgcttgaaggcagcatgctccttaagagtcatcaccactccctaatctcaagtacccagggacacaaacactgcggaaggccgcagggtcctctgcctaggaaaaccagagacctttgttcacttgtttatctgctgaccttccctccactat

SEQ ID NO: 15265 - DNA, 1187 bp, Artificial sequence
  DNA replication origin
gggtaataaaatgtatattgagaataagatggccttttgaccttttagggtctagggctgtaaaacgtctcaggattgctgccgaacgagccatgaactgggctgggtttttatatttgataaaaaagagcctaaacgcttctgatttgggataaagaaaaaggagcattaaccttgactatgcctttggctccagccacctttttaagagtaaattgctgggcaggtgggggagggctagtcacagaaagaaactgtaagccggaccaggtgtgaggaggggaggcgataaaaagattacagggtagaggagcggaggctgaggaagaattgggacctagcttggcctggcgaggaggggaggggtcagatgggtctgtagaaaaggaagattagaaagactcagcaacgcttggggttgggactgaggggacaggcggaggggggaaagaaggaagatttgggacgagttgcactgggcacagagactaggaagggactgatgtgtaaaagaatgcctggacgtcaggcacctcagaccatttgcccattttatgacaaggattatttagatcttgtaggatggaaaaattcaaagtgccattttccggctatttggaactactgtcgagtttgtattggggtcaagcgcattgcagaagaaaataagatgctcagattttaggtcaggtgagagttgaagaggttttaagttcttaagaatataggctaagggagaagaaggaggaatggaaggtggaagcttgcccatagtgaaggaggcaagtccagagaaaagagtagagacacggagaaggggtgggggtttcttgccctccagaaaagcagagaaagggttggggcatggaaataaggaattggggcacagagataagaggttggggtgtggaaataagggattgggggttcttgccccctagaaaagcgggacttgccgctaagggtgaaggagaagcagttgaggggtacttgtccctcccccagaaaagcagagaaggggtagagacaaggagagaagggattggggtacttgcctcttccccagaaaagcgggacttgctgctaagggtgaaggaccaaggcaggcgtccctgcgtggtctgacacctttgaaacgtgggtgaataatcaggcatctctgcaatgattaaacaccaagggaaggc

SEQ ID NO: 15266 - DNA, 1319 bp, Artificial sequence
  DNA replication origin
accggagtgggctccgtgggtgctggggcaggagtttcctcactccccgcctggccgtcgctcctccgctgactccgcgcccttctacgggccgtctcccaccctctgagcggacgcagggagtcgatgccgggcgaaccgggcgccatgaagggcagctgcctaacgggcgccgcggcggaggggctggccggctgagggcccgcgctgggccgaggcatgcggagcccgggcgggatcctgctccaggcgctgccccggctgctgcagcacgccgccctcccgggcctcgccgagctgccggcccgctgggccctgccgcggggtgcgggcggggacggcccggcggaccgccttccccgcgggggcggggcgagcgcggcggcggcagcagcggcggcctcgggcgccctgctcggcgcctatctggagcgccacggtccgcccgaggcttcggagctgccggagccgggcggggccttggcgggcggccccgggagtggcggcggcggcgtggtggtcggcgtggctgaggtgagaaactggcgctgctgctgcctcggcagcacctgttggtgccggagcctcgtgctggtctgcgtgttggccgccctgtgcttcgcttccctggccctggtccgccgctaccttcaccacctcctgctgtgggtggagagccttgactcgctgctgggggtcctgctcttcgtcgtgggcttcatcgtggtctctttcccctgcggctggggctacatcgtgctcaacgtggccgctggctacctgtacggcttcgtgctgggcatgggtctgatgatggtgggcgtcctcatcggcaccttcatcgcccatgtggtctgcaagcggctcctcaccgcctgggtggccgccaggatccagagcagcgagaagctgagcgcggttattcgcgtagtggagggaggaagcggcctgaaagtggtggcgctggccagactgacacccataccttttgggcttcagaatgcagtgttttcggtaagtggggtcccgctggcctatccctctccaagtctgtttttgagcggtcttgtggcggccctaggagggcgctctatcagataaataccagcagagaagtgacattgacggcaggagttacgattactttccatcgcagcctgggaagtctgtcctacacataaaacatacctaacgcggagcctcgaaagagagtttgttagataaaaaactaatgtttcttttagggatgggaatgtaattaaaaatgaaaagccctcttaacaataggcatgcagggacatgaatggaaatgcccatct

SEQ ID NO: 15267 - DNA, 1048 bp, Artificial sequence
  DNA replication origin
tgcccttcatggcgcccggttcgcccggcatcgactccctgcgtccgctcagagggtgggagacggcccgtagaagggcgcggagtcagcggaggagcgacggccaggcggggagtgaggaaactcctgccccagcacccacggagcccactccggtggtgcccgccccttgtcggccagagggggcggggccgcgggcgatggggcggagcgggctgtgttctggtccgctcccgtgacgcgctgcccgccaggctgcgggggtcgcggggcgtccgcgtgggccagcggaggcccacagctgcggagggaaaccactgggaggggagaaggagctctagggagagcgaggctgcaacgaggggagagccgggcgacgggcaggggcccaggcgcgctccccgacttcccacaggcgcgcgcatgcctgcgtgtcagggcgcgcgctccccctctcggaccgaggcgaccccagtccgtgagcggcttggatcctcgcccgttccctcctggtcgtttccgcagtaacctcttatcagagcgggcagctgtgagtggcgctcacatccgccgctgccctgtcgaatgggggaaagagttcttgtgttctgaggagggtttggctatggtccttgaccctattcttgtctcagacttgcctcccaggtatcgaggtctccctgtgggtttcatatggcttggtcctttaggagctggaaaaattaggcataaagtccccccacccccttgacagaacgccccttctgactccagaggtcctttatcgagtgccaggcattggtctaggggcatttgaaaaagattcactgaaggacatttttaagagttcgctttctcagagggcagcttctcaaactcattcgctggtttcttttcctctttccgcctgtttaaggttagtgttccccaggtcctcttgccgtcttccttttcagagtttcctgagccatctcatccaggcccaacagctttgatcctgccgtgccccccataagaagtgacccctaagtgaatgtctctgcccaca

SEQ ID NO: 15268 - DNA, 1078 bp, Artificial sequence
  DNA replication origin
taccgactcaaaatccacggggatttcggggcagcagcgtcgccgcgctcagcccacacgcggaggccgagcgccctgctgcccgtcggggaacggctcctgccgctggtccgctggctgaccgcggtggcggcggcggggggcgaggggcggggggcgaggggcggggggcggggcgggaggcggctccgaggggcacgaggcgggcccagggcgggcgcggggcgtggcctcgggcgctgagcctcgagagcagccgcacccctgccggggtagaaccgttaaaagggtggcgcgcgctttcccgggcgagctgggcgcgtggggttggagcggcgccacccagagccggtcgtctagggtaggaggccgcgagtgaggcgctgacaggctagccctcgacggggcgcgcccgcgtgaacggccttgggggccccagaccgtggccctgcttgtgcgaagactgggaggcgccaggcgggccgcctgctgggggcttggcggcgggttccaggcagcgtctgtgagggaggccgcctctgtgagggaggccgccgtcgtgctgacgactgagtccaccctactcctgtcccccgtcagagctgctggcaggcgctgctttccccttggtgcatttagtgggtgtcgggattcgggttggcagggaggaagatgtttgagacctggtttacctcagaccagggatacagcgtttcacacagactgccatcctgaaaggaacaaaatgaattaaggcaactccatccgaatcatttctttttaatcttcaccttcaatccttttgctaatttttcattatctttgagtgtccccagagggggactgtctgcttgtactgagggacgtggaggtggcagtccctcacgtccccaagcaccaaaaggacagttgaaaatgcactggcaaacactgaacggttttaagtggggcactatcaggatttaccattttggaaggtatgaagtttcacaagcacttccatgtatagtcaagttattggagctgtctccgtttagaaatggcttccagaaacactcctactatccactgagacaac

SEQ ID NO: 15269 - DNA, 902 bp, Artificial sequence
  DNA replication origin
caccagaaaaaccctgcggagaagctatcaggcaggcgggcttgcctgggaaggcacagtcagcatccttcctcagcccaagcgagaggctcacctccacctccaagctagagctcccaggtctttatccttctgggcgtttccttgcaaatctacttccttgcaaagtagagggatctacgctggccttacctctggggctgctttcttgcaagtacggtggggcggtgggagtgacatttccggagtgggatgctgacagcagaggcgagcgttcgtccaccccatcagcagccatgactgcggcagcggcggggcctggggaggccgagccggggttgcggcctcggcggagtggtggctactgctgctgcctctgctgccgctgctgccgctgcagctgctgctgctgccgcctccgggagggcccgggatgtgtcacaaggcaggaagcggggggaggggaggggagggtgcaggaccaggaggcgggggaagggaagcgcgctgggaggcatggctgggggaggggaggggagggagaaagaaagaacccgcagagtgggaggagcagcagtggaggagcgggagcccagccagccagagaaaaggggaacaaattaggaccaactgggaaacgcgaggaaaagaagatgccaagtaactgaaagggggtcgagagtaaatgggatggagggggacaagtcctttgctctaggaaagacggataaaaagcagcctgaaaggggctagcgaagaggaaaggcctgtgacttgattacaagaaaactggagcaaaagcagattatcaagtttatctcccctaaggaggaggagggactgactctttgctgtcaaactttgcagcagttatataaagaaaacatcttcctggggttatc

SEQ ID NO: 15270 - DNA, 1141 bp, Artificial sequence
  DNA replication origin
agcgtgcgccggagccggcctgatgcgggcgctctcggcgcacagcgcgcggcgctcctgctccccggcggacgcccggccgccctgcagataaatgcgtcgccttcctcgagagtgagcgagggcgggcgagggagacgcagacgccgcctgtgacagtggcaattccctgcgccccacatcacatttgtctgccacagcagcaacaacagaaaagcggagggagggagggaggcgggaggaggggagcagagctccgcaagtcttgggctctgcgtggaggttgcgtttggctggcgtccccgaccccgggctttttgcacggcagctctctctgcgcagcgccgggcggccgtagtcgctccgcggcgcgactccgcggtctcgtggcgagcgcgcgtgggcgagtggccgcggacactctggcctcgcgagggaagccgcgccgcgtcctcgccccgtcgccccgcgggccggccgagacgacgggaagttttatttgcagctcggagcctgtggcggatggtgggactctccggccctgtgcagtgtaagtgtccgcggtagggcttggccggcgggcgggcggcggggtcgggcccctgactgttattaattactgttccgatgaccgtcatcttcgtttggattattcgaccgcgaggctccaggctgtacttgtcgctcaattagggtaggactacgcaccagggcaaagaggaacatcgcgggtgactccggtctgcgatgacactgaacttcgcgggtcagccgaggatgcagtttttactattatattccccacagtgtcttttaaaaataatttttcttccctctccatagtcacggtatgcgagcaggaagatgacgagtgggtttctcccccgacaaaacaaccgatcgaggtgcccacagtgcatttggcaggtggccctatgcccgcatcgtgggtttttttcttttcctttcttttttttttttttcttttctttttctgtaaactggaagcaaagacttgttttgatggtggaaaacttagccctaaggagtaaagaggcgggatcttaactttgggacccggctgcaactagggtgggggtttgcttagaggtacccaggcgctctgcgcctgcctgcgaac

SEQ ID NO: 15271 - DNA, 1291 bp, Artificial sequence
  DNA replication origin
ttgggggtaaggtcacagatcaacaggatcccaaggcagaagaatttttcttagtacagagcaaaatgaaaagtctcccatgtctacttctttctacacagacacggcaaccatccgatttctcaatcttttccccacctttcccccctttctattccacaaaactgccactgtcatcatggcccgttctcaatgagccgctgggcacacctcccagacggggtggtggccgggcagaggggctcctcacttcccagcagtggtggccgggcagaggcgcccctcacctcccggacggggcggctggccgggcggggggctgaccccccccccaccgccctcccggacgggggagctggccgggcggggggctgaccccccacctccctcccggacggggcggctggccgggcggggggctgaccccctcacctccctcccggacggggcggctggcctggcgggggctgacccccacctccctcccggacggggtggctgccggacggagacgctcctcacttcccagacggggtggctgccgggcggagacgctcctcacttctcagatggggcggttgccaggcagagggtctcctcacttctcagatggggcggcctggcagagacgctcctcacctcccagacggggtcgcggccgggcagaggcgctcctcacatcccagacggggcggcagggcagaggcgctccccacatctcagacgatgggtggccgggcagagacgctcctcacttcctagatgggatggcggccgggcagagacgctcctcaatttccagactgggcagccaggcagaggggctcctcacatcccagacgatgggcggccaggcagagacgctcctcacttcccagacggggtggcggccgggcagaggctgcaatctcggcactttgggaggccaaggcaggcggctgggaggtagaggttgtagcgagccgagatcatgccactgcactccagcctgggcaccattgagcactgagggaacgagactccatctacaatcccggcacctcgggaggccgaggctggcggatcactcgcgattaggagctggagaccagcctggccaacacagcgaaaccccgtctccaccaaaaaaatacgaaaaccagtcaggcgtggtggcgcacgcctgcaatcgcaggcactcggcaggctgaggcaggagaatcaggcagggagattgcagtgagctgagatggcggcagtacagtccagcttcggctcagcatcagagggagaccgtggaaatagagggaga

SEQ ID NO: 15272 - DNA, 918 bp, Artificial sequence
  DNA replication origin
gcgcctctgccctgccgccccgtctgggatgtgaggagcgcctctgcccggccgcgaccccgtctgggaggtgaggagcgtctctgccaggccgccccatctgagaagtgaggagaccctctgcctggcaaccgccccatctgagaagtgaggagcgtctccgcccggcagccaccccgtctgggaagtgaggagcgtctccgtccggcagccaccccgtccgggagggaggtgggggtcagcccccgccaggccagccgccccgtccgggagggaggtgagggggtcagccccccgcccggccagccgccccgtccgggagggaggtggggggtcagccccccgcccggccagctcccccgtccgggagggcggtggggggggggtcagccccccgcccggccagccgccccgtccgggaggtgaggggcgcctctgcccggccaccactgctgggaagtgaggagcccctctgcccggccaccaccccgtctgggaggtgtgcccagcggctcattgagaacgggccatgatgacagtggcagttttgtggaatagaaaggggggaaaggtggggaaaagattgagaaatcggatggttgccgtgtctgtgtagaaagaagtagacatgggagacttttcattttgctctgtactaagaaaaattcttctgccttgggatcctgttgatctgtgaccttacccccaaccctgtgctctctgaaacatgtgctgtgtccactcagggttaaatggattaagggcggtgcaagatgtgctttgttaaacagatgcttgaaggcagcatgctcgttaagtgtcatcaccactccctaatctcaagtacccagggacacaaacactgcggaaggcctcagggtcctctgcctaggaaaaccagagacctttgttcacttg

SEQ ID NO: 15273 - DNA, 996 bp, Artificial sequence
  DNA replication origin
ctggtagctgggcagaggcacccctcacctcccagacggggcagccaggcagagacgcccctcacctcccagacggggcggccggacagaggcgcccacttcccaggcggggcggctgggcagagacgcccctcacctcccagatggggtggcagccggacagaggcactcctcacttcccagatggggtggcagccaggcagagacgcccctcacctcccagatggggtggcagccgggcagaggcgctcctcacctcccagatggggtgtccgggcagaggcactcctcacttcccagactgggcagccgggcagaggcgctcctcacttcccattcggggcaactgggcagaggcactcctcacttcctcccagatggggcagctgggcagaggcgctcctcacttcccagagggggtggccaggcagaggtgctcctcacttcccattcggggcagccgggcagaggcgctcctcacttcctcccagacggggcggccgggcagaggcgctcctcacatcccagaggatgggcggccaggcagagacgctgctcacttcctagacggggtggcgggcgggcagaggctgtaatcttagcactttgggaggccacagcaggcggctgggaggtggaggttgtagcgagccgagatcacgccactgcactccagcctgggcaacattgagcattgagtgagcgagactccctctgcaatcccagcacctcgggaggccgaggcgggcagatcacccgaggccaggagctggagaccagcccggtcaacatggcgaaacactgtctccatcaaaaatacaaaaaccagtcagaagtggcggcgcgtgcctggaatcccaggcactgggcaggctgaggcaggagaatcgcccactgcagggaggttgcagcgagccaagatcatggcggtacagtccaggctccgcaagagagggagaccttagaaagagggagacgagggagagggagaccgta

SEQ ID NO: 15274 - DNA, 1456 bp, Artificial sequence
  DNA replication origin
cagctggagcgcaggggccggaagacgctagggctgcacggcgcccccgcccccgcccccagccccccgacggcccccagcgccgccacgcccgccccacagcccggacgcccggcgcgcacctggcgctccagggctcgtccagccctccgcacgcccgcggccgccgatccgcgagcacgcccggcgccccctcacaactttggacgggtggaggatcccggacggggcggctcgtggcagggagtagggaatacgaaccgggcacggcaggagaccaaacgattcttcccgacgaggagggggcgacaacgacgccaccgctcggcgctctttccacgcagccccgtgcagctcccggagcgcgagccctcacccccggcctgcccactctgctcccctaccgtgcggggccgccaccctgccccgcccgcacgttcgggccggagtgcttcccgcctgccgattggctgcgcagtgacgagtgggaggggaggcggagagggctgcggccgggggtggggcgggggcggaagaggagcgcgctccccgccagctttgtgacgtcacgggggtcagacaatcccttccattcggcgcgagccgcccattggttccccgggcccgcctcacgtgacccccccccccccgcccccagcgagtggaaggtgtggctgcgcggcgctagggagcggtggtctgtggagctcggcggtgttggctgagcaggctgcggggtcgggagaggggaggcgcctgggccggctccaatgtcttcgcgtgcatggggcccgaggaacgggctgctcccctgtcgtgcaggcttcctagaatctctggcacctctgcggggatgcggtggtgtgggtggccggcccagcggccaagcctcccctgcgcctcgcggttgggtgcgggcttcccagggtaggctgcgggagcggctcccagcctcacgggaacctcaactccctgcggctcaccccagcctgcggtacaaggcgtagcaaagaacctcgagagtagctgttgcttcgttcgtttgatacgttgcagattttaggagcattaacgcccatcatgttttctatcgccccagggagaggaagcaggtgtagacagcagcaagagggagttgtgatgagggaattatctctgtagcgtagatgtgtgctcacgttctctgaggagttttgaaatcagtattgtttccgttgccctgaatggttacaaggagagaacactggacttggagtcagaaaactttcatccaagtcattccctgctctaagtcccatttctgttccatgagattgtttccacctcagatgagattagacttaaggtggcattggtattgtctgtggtaaaacaagatatcttcgagggctcttcagtgacttacatccatacatcccttttatgggatagtggcttctgaaagcttccttggcag

SEQ ID NO: 15275 - DNA, 1045 bp, Artificial sequence
  DNA replication origin
gatcctccacccgtccaaagttgtgagggggcgccgggcgtgctcgcggatcggcggccgcgggcgtgcggagggctggacgagccctggagcgccaggtgcgcgccgggcgtccgggctgtggggcgggcgtggcggcgctgggggccgtcggggggctgggggcgggggcgggggcgccgtgcagccctagcgtcttccggcccctgcgctccagctgtcagcacgaagggcgccgcggggccggcggcagagtgagctccagggaggctgtagggctgcggcactgcctgagggtctccctgacgcaccccgggtcagggctggccccgctggcagcctgacaccggccggcccctgttcgtctggactgaaacgggcacccctggggcggggccgggccgggcagggcggggcgggcagcgggcggggctgcagtccatgggcttcgcgccccggctggatggaggggctggccctcggggcgcacccctgctcgcgcctgggccccgctgccttgggctgtggctttgcctccccggcggggtgggttggtttggttggcttccttgttctctccacccctttatccctcctccatcctcttcccccccacctcccagcccattcaccgggctggagcgagacctcgcccctcctccgctcccgcctccccgccgccgcctcctctaatgagcatctctgccttgctttcaatgggccggtgctgctgtcgctgctgctgcccgcgcgggttgtggatgttgtcggctccgtgttgtgatgacaggagaatgtgtgtgtgtcccgggcccagacgaattggtaggtattcacttaactacctgcgttgggtacccaggaaggatggtgacagatttttgtgtatggatggttttagatgaatcagcgtggtattaagggatgagatagattggaaaaagggacaaacgcgtcttggattgagatagctttgatgtctttgtgagtgcagtttttcaggtagcgacaaaggaaactaatcaaaaaaatactggcgtgtggt

SEQ ID NO: 15276 - DNA, 1461 bp, Artificial sequence
  DNA replication origin
ggagggaaggcggcaggagcgaccgaagtggccttctgcgggcctgcagctttggtctgaagtgccagggacgccctggttgctggccccgggggccttggagcgaagggcgggcggtgggggtttagggttgtgcgtttgtgtgggagggatggttctgggcagtggcccctggggccgccactgcggtcgctttgcgcaggctcctcttggcttttgggtctctccctcactcctgcactgggaatttccttccccagggccagggggtgaaggctctgcgagcgtcctggagagtgtcggtacgccttctttaggggcttttacctcttcactggtcaggtttttcttgtatttccttaaaaccttttaatcgattaccttatggaagattttctaggtaggaacagatgcttctcgacttactacggggttgaaaatatcccaaatggaaaatggatttaaaacacagctaacctactgagtattaaagcttggcctagcctacttttgttatcaaaaaaattattttcagctgtttattttagatttgggggtacatgtgcaggtttgttgcatcggtatattacgtggtgctgaggtttggatacgattgatcctgtcacccaggtagtgagcatgttacccaatagtttttgaacccttgctcctcctttcctctcccttctagttgtctccactgtctattgttgccatctttatgttcatgaatgcccaatgtttagctcccatttataagtgagaacatgcaatatttgattttctgtttctgctttaattcgctttggataatagcctccagctgcacccatgttgctgcaaaggacatgatttcattcctttttatggctgcgctagcctaccttaaacatgctcagaacacttaccttaatctacagttgggcaaaatcatgaacacagacggttgtgtggttacttgtacagtttctactgaatgctcatggctttcttaaaagtcgaagaattctaagtgacaccgtcctaaattaggaaccatctatatagccggagtctcaaaggagcaatttaaggcatgaagtgaaataattactacctaatgtagttggaagtcgacaagcagcaacagcagggagagaccgttgctggttcttggtagagttggtgtacttacattcttgcatcctcgacgtttgatggttgcacatacctctctttaaagcccagacgaacccaaagattctggtcattgtcctgtatgttgaactaccccttctctatctccttcacaggaccttcatcatttctactctccgataatactaattataacagataacattgagtgcttactatgtgtcaagttttgttctaagtgctttacatatttcatttaatcctcccaacagtccggtgtgtaagcatgattatggtaccccctcttaaagatgaggaaactga

SEQ ID NO: 15277 - DNA, 919 bp, Artificial sequence
  DNA replication origin
ccgccccgtctgggaggtgaggggcgcctctgcccggccgcccctactgggaagtgaggagcccctctgcccggccagccgccccgtccgggagggaggtgggggggtcggccccccgcccggccagccgccccgtccaggaggtgaggggcgcctctgcccggccgcccctactgggaagtgaggagcccctctgcccggccagccgccccgtccgggagggaggtgggggggtcagccccccgcccgccagccgcccgtccgggagggaggtggggggggtcagcccccccacccagccagccgccctgtccgggaggtgaggggcgcctctgcccggccgcccctactgggaagtgaggagcccctctgccgggccagccgccccgtccgggagggaggtgggggggggtcggcccccctgcccggccagccgccccgtccgggaggtgaggggcgcctctgcccggccgcccctactgggaagtgaggaacccctctgcccggccaccgccccgtctgggaggtgtgcccaacagctcattgagaacgggccaggatgacaatggcggctttgcggaatagaaaggcgggaaaggtggggaaaagattgagaaatcggatggttgccgtgtctgtgtagaaagaaatagacatgggagacttttcattttgttctgcactaagaaaaattcctctgccttgggatcctgttgatctgtgaccttacccccaaccctgtgctctctgaaacatgtgctgtgtccactcagggttaaatggattaagggcggtgcaagatgtgctttgttaaacagatgcttgaaggcagcatgctcgttaagagtcatcaccaatccctaatctcaagtaatcagggacacaaacactgcggaaggccgcagggtcctctgcctag

SEQ ID NO: 15278 - DNA, 935 bp, Artificial sequence
  DNA replication origin
agcgagacccaccagtctcgctttccagggcaggcggcggccaggagctacagctgtgggctgcactcccggcgtggagtctccttcctgcccgcgcaggccccggcgccccagcgaaacgctccggccgctcccctctcccaacactctggttcccgggccgcctgcggggacgcggttggcggcgacaccggaggggggtgggtcaggaagtgggggcgcggcggccaggagcgggcccccggaggccgaggggttcggcgacgcggagggagggagagtctgggccgcgcgggagccgcagggcgccctagccttcgcagaaacgatggcggaggaagaaggtgattgccgcggggtccagcgcgccaacggctgccagtggtctcgggaaggaggggcgggggcgctggaggtctgggttggagctgctggtggccgcggtcgcggtggcggccgcgcgggcagggcgggaaggagcgcggcgcccaggagaggactgcggagaaattcaggagagcggagcaaatggcccgaagttttgtcggccgaattgggaagcaaaggtggagctgaaagttgggaatccgtagcaagagagaaagctgtgccgggagtggttgggaaagagggagggtcctgatcagattcttggtgaagtgggaggcgcagtttggtttcgaagatcaggtttaggtactcagtgcatatttggaatgcgatttttaaagggctgtggatattgacaaacccagaggcacagggggcgagggaacattcaccacggggataaagaggcagggatttgggataaacgtggcaagattaattgggaatgggcgaacacgcagaaactgaagaaagccaagttcacttaggttcaggggaaaatggtaaagagcagagccatctaattattatagttttgggagatg

SEQ ID NO: 15279 - DNA, 863 bp, Artificial sequence
  DNA replication origin
ggaagctgggcggacagcgccggtggccgggtcccgctccccaggtgcaggcgccgcgctcacccgggcagggcttgcgcagatgtttctccaacagtgactcctccagcagaaactcaaaccagcaggtctgcggcggggtgcagggccggctggaggtggccgcctcccggtccgccgcctccgcgctcatcctgcccccgccgccgctaccaccagggccgcttcccggctccaacctgacacttggatgcgggccggtgcctggggtatgcggaacccggtgggagagaggccaccctccgaacgtcccggaaactcacacaatccaaaatggcggcgcgggccagccggagctgcggtcctggatccgcctccccgcgccaccgccgcgccttcggaccaatcgttgttcgggttggaaggaaaggggcgtgactaaccttcgaaccacgcctcctcccggttgccataggagacggcgccgcatgaagccgggtcgcgggtgggttttccgtgttccctgacagttctccagcgagaaaatgagacaacctcatctagggttgcaacgggcctcaatattttcgtaaaggcgaagcgaagggttctagttgtgacccaagcaaagtttatctcctgtgctttcaatttccccgttcccatttctgagatttcctcgcacctgggtcctctcctcagatgctcccgccgtcctgccgagaacaccagcttcccactcgcttcctggacggatggcagcatacggtgagcagcccttgctgctagctcccgatacttagagcctagttgatcctttcgatatccccgctagaggcgctgttaaccctatacatttacct

SEQ ID NO: 15280 - DNA, 1048 bp, Artificial sequence
  DNA replication origin
agacgactgggggtcatgggttcccgcgttccgtccctgtcaggaaccttggcaggggaccgggaagcggctgggcatggagagccgcccctcattctaggggcttctctatcccaccctcatttggggagctatcccgtgggagagaggatgggaggccgggtcccctccatggggagaaaagttcccagccagcccagtctcccctttctttagctccttttcctgccctcccccacgccctccgcttcccatctggagttggggtcccggcgcccctccgagcggcggtagggcggcagggccgggaaggagggaaaggagactggaggccgtgacaccagtcttggttcctccgccccctgcttccccgccaccgccgctctccaaattggcgcggaaccggcttctccacagcatttcgcctccacaaccccctctccccgctggtccaggagggaggcgggacgtgggggcgctgcccaagccccactcccggtgtacgggggagagggtggaggacccagaaaaacccgtttgaggaagatgtgcctccctgcgcgttcaaggtgtcaggagtgcttggtaaatttttggacactcgcgttccagctgtacattcagttgaggaaatgcaggcttgtatccaaaatgaattaccatgagctagctaacatagcacagaagatggcagggtcacagggcccaggcccccttcggagggactgagctttcacctgcgaatcagcgtcttactggcacttggagaatgtgaatgacaatgtacttgactgcggcttttcctctccccccttcagaggttttatacacctgaaagaagagaatgtcaagacgaaggtaacattatctgtcttagagacatgtttcaaattagttgctgcctttaacttactaattacacttcctttttaaaaattcactacagtagccgtttacaagctaagcagcagccccagcccagccagacggaatccccccaagaagcccagataatccaggccaagaagaggaaaactacccaggtgat

SEQ ID NO: 15281 - DNA, 1147 bp, Artificial sequence
  DNA replication origin
cctcccattggccagctcttcagccaacgctttgctcctccccgaggggcgggccctcgggtccccgcgtcgctcaggaaagacctgggttccctgaggccttggcgggacagctagggcgcgcccctggacggtcacttcccagccaccctatggtcgcccgagtcgtgtccccctgttatgcgcccgggctgagccgcaggctgacacccccgaaatccaggagttgcagtgggaggaagcaaaagcaaactggcgggagatgcgcgagccaggcggcggggagaacagccgcggagaaggagcccctgagagtttccctaccgccgccggccgcgccgtggagcgcggtggacgcgggcagaaggcccggtagagtggaccccacggccgctccgggtggcgggcgcgcactgagagcagggcgcggcgcgcgggcacgcgggcggacgggcgggagaggggagcgcgctgtccggaggtgtcagtctgaggcgcatgcgtgcggggcgggaccggcccggcctatatattgggttggcgccggcgccagctgagccgagcggtagctggtctggcggtgaggagttgctgcgcgtaggggggatgtgggaggaaagaaagcccagttgggccgatcacttaccacaggcgggagcctcagggaggaaaatcgggagggctgagaactagacgactgggggtcatgggttcccgcgttccgtccctgtcaggaaccttggcaggggaccgggaagcggctgggcatggagagccgcccctcattctaggggcttctctatcccaccctcatttggggagctatcccgtgggagagaggatgggaggccgggtcccctccatggggagaaaagttcccagccagcccagtctcccctttctttagctccttttcctgccctcccccacgccctccgcttcccatctggagttggggtcccggcgcccctccgagcggcggtagggcggcagggccgggaaggagggaaaggagactggaggccgtgacaccagtcttggttcctccgccccctgcttccccgccaccgccgctctccaaattggcgcggaaccggcttctccacagcatttcgcctccacaaccccctctccccgctggtccagg

SEQ ID NO: 15282 - DNA, 1602 bp, Artificial sequence
  DNA replication origin
agggcgcgcggccggccccgccgggctcaggagcgggcagcgctgcggccccaaccggcagcgaggcggccctggacggacgcccgcccgcccccccccggcacttacgtgggcccgggccgtgcggggctgcgcggggaagggagcggccgccggctcggcggggaaggacgcgggcggggcgggactgctgaggtagctgcggtggggccgggctgcgctgcacctcgttcaggtacccagacggcaggcgcggggccggctccagccctcgggtcgctgcgcccaggccggccagtccaagtccttttgttgttgtgcagcgctcgcaacagctgatcggccgctccgctcgccgtcgggccccgctgccccgccccgggccgcgccaggccgggccccaccaatcggcggtgcgggggccccggggccgccctgcgagaggttgtcaccaacgcacgtgacctggcgcccggccggcggcgcgctcagctccgaaacaagcccgggcaacaaaaaccgggagctgagcgtgaaggcctgggcgagcggaagggtgggagagaggggctaggccggggagggaagcgctggggccggggccggctttccaggagccggcgggagcggggtgcgtaagaggcgggcgaggaagaaccggcgggcaacgggaagggcagaggtggatctctccctcagcgacccctctcgccgagtgaagggtcgagggtttggggcacaaagggcgcagaacgttttttcctgtgagaggaacattaagactcctgggagggctggggctaacgcctccgagagccccacctggtcagcctagggttagacgtgtagccagggtgctgggagggggccgctgctgggccccagatagaggggtagaggccgctcaatcacggagccaggccccacctgctgtagaaaccgccaccgagagccggccgggcttgctgcacgctctggattccgcctgcctataggcgaggcacaagggactgcgagaccaggcctgaaggcagagaggtcagcaggctcgggggcctctgctccagcggacaacaagcgcaccgggcgggaacggccgcctccccaggcgctgcagcctagctctcatgtgacccacggaacttagcccctctgttctgtttgcatacctgcaaattgtgggcattcacgccgggactgccaactcaccaggttatttatagtgacaagagagtgagacagtgggcttgaaagtgttttccagaccaaggctctgtcccacatataggtggattaactgtctggcaaaggcaggtgagtaacgttgatgcctatcagctctcatgtggatactgtttggactgggatgtagttctttgacctggggtgagctgtatagcaaccctggagggatgcctatcacacattacagtatctgaaagacactcacattctgaccctcacaatgtagtcagtccatttccaacaatgctggttttaaaggatgtaaattgcagtgcagggagttgtcagacaccaaggagtaatgatcaaaatatgatggtcattggaccttatcttgggagaaagagctaaaactgt

SEQ ID NO: 15283 - DNA, 1026 bp, Artificial sequence
  DNA replication origin
ccccaggcgcccggtccgctggccgcagccacgctccgcccagacacctccggcccgggcagccgccgcatgcgcgcgtacagacccagaggcggccggcggcagcacaggccggggatgccaagccgcaacggcccccagacagagccgtgcgcggaggccgccatgacgccggcactgcgtgcccttcgaccccccgccgtcggcgcgcagctacgccccggccacgcccctgcaggttcccctatgctcctttgagtcgcgggaaggcagcctctggacgccgctcaaagaagagccaggtgtcgctgtggtcctctgcatctgggccgccgccgcgactctttggccttcgttccaggaaagacccgcccaagtccgtccgacccctcctgggctcttccccttcccccacgtgcatccacaggcgacctcagagcacctacaagaagtgatgggtgctgctggtgaaggaagtagctgccaaaatcacgccccgccgcccctataccccaaatccaccatgagaacagaacaccttgcactgtttctcaacaggggctgccttggcactttgggcgcaatagcgctgtcccgcacgttgctggaagtttgcaataggtgaatgcccagtcttggtgaccaccaaacgcccacacaccaccaaaggcctctggaaatgtcgccctgtttgggaaccactggccacctaacacctccagcagaaaagcacacacatctctcagagaagccacacagtaggccattatcaaccactacctatagctaacctgcttgctgacttttttctcccagtatcctctgggttccatacgggcagtgccattattttgtttcctgctttaccccaatggctgtcacttgaaaattgtagaagctgaagtgcctcagttcacataaatagtaagtagtcgggtaagatccaaacattcaaaatatctgtgttattccacaatcttatttggacagggaaaggaagtgaagacggccataggccagagcctg

SEQ ID NO: 15284 - DNA, 1114 bp, Artificial sequence
  DNA replication origin
gccggctgcgcggggctgcggacagcacacaccctggaaggccccggcggggaacgggcagagtccgcgccctgcgtccgcgaccaggaggatcggaccttcgccttcgctgtcgccgccgccgccgcccgcggccgtcggggtaggtgaagcccgggtgggtggtccgccggctcctgacgggccgggaggggagacgcgaaactttccgggcgcttcctcccgcggtcccggagccgtcgcagcgccgggaggtgtcgtcgtcgcgggcggtggcggccgacgccatgttggggtctgtgagaaacggggcgctcccggccgctcccctcgcgccggggccggcccgcgggccagttgccgccgccgtcccgccagcccgggagcgagccgcgcccgcccgtaggacgccgccgccgccgcggggggacgggggccgccgggtagggtccggtccacgggtctgcggggcgggggccggcggacgcgggaaggagccccgaggccgggcgagaagttgtggggcctgaggacgggggtcctggacacggccgggggcgtctcagggtcgcgacaaatttctggccgaaaagtttgcagggtctgcgtgtcggggaccttatgacctgaactacatatttgtatgtcacttgggagacgaaaatggccccgcagaacttgctctgatagaagcgatggtttatttatttggagccttttcaagttttatgatcctttgacgaatttatttttctttttaaaaatgtgattgaaggccgagagcgcgctgccggtgttgcttgaatagccttgtgtgctctccgtacattccagcaataacttgagtgtgcggtggaagtgggtatgaaggttacagacacctaagccctcctcggtaattcatagactcacaaaacgcgttgttgataaatgccttctttgtcgtgttgtgtagtacgttgctgaagagactcattaaagaaagatttagacagaaactttgagagtcttaaaggcatgtgttctcttaagaataagaagtgatcttgacagtttgaagtttttttcccctccctttagtttcttaagggtgaatgcctaccgcgttttgagc

SEQ ID NO: 15285 - DNA, 847 bp, Artificial sequence
  DNA replication origin
ggctcgtgcctgtaatcccagctagggtaggccgaggtgggaggatctttgaacccgggagttggaggctgcagtgagctacgatcgtgccactgcactccaacctgggcgacagagcgagactccatctcaaaaaacaaacaaaacaacaaaactgagctaaagacaaataggattgacctggggagtggggtctgaggcaatgggatgaggctgtctaacagggcacctcacagggagatgagaaccgcttggccacacagaggcaaaatgcggccgaggtcagcacagccctctcggggttaagaacggggcgcctgaggggtatcccggtccccgactagaacctcctacgcgctggcagccagaaacaggatgaaggagactggcgcggactgcgggctctgcgggcggggcggggcggggcggggcggggcggggcggggcgggggccagccctctggggcatgccggggggcggagtctgcgctgagtgaagaggtgccagaatccgcgaagagggtcgacgaatgcgctgccgcggagggtagggcgctgagggtctgaaccctgatgcaaggaggggctggaggtcgcgggcacgtttcttttgggttgggcggcggaggggcagctctagggcctggagcagggctttaccagaacagtccacccctcccgcccggttaacctgagcgtctctttcgccttggcttggttccggtcgctactgtgggtgccgccgccgcagcctttgggctgctcgaccataccccgtcttagaaggtcaggtgtgcaaaacttggactcgacttcatccaagagctcgtccaggtcctccgccatc

SEQ ID NO: 15286 - DNA, 814 bp, Artificial sequence
  DNA replication origin
gccagaatccgcgaagagggtcgacgaatgcgctgccgcggagggtagggcgctgagggtctgaaccctgatgcaaggaggggctggaggtcgcgggcacgtttcttttgggttgggcggcggaggggcagctctagggcctggagcagggctttaccagaacagtccacccctcccgcccggttaacctgagcgtctctttcgccttggcttggttccggtcgctactgtgggtgccgccgccgcagcctttgggctgctcgaccataccccgtcttagaaggtcaggtgtgcaaaacttggactcgacttcatccaagagctcgtccaggtcctccgccatcttgaatcgcctggccttttcccctccaatcgccaaggctccggtggtttccaggagtaacgaggggacctggcgggctcctgccccgttaggcgtccccgcgcatgcgcaccgcttcccgtggcaacccggcgcccacgagggctcgcggcagagaacgcggtgggttcgtgaggggcgggcgtatgcagggacagagttcggagctgtctctgcagtgtgtctgtgtgactcgcgatgctttgcgtttcttcctttcagcatgtctggcgtggttcctcccgtctccccctcccgggcccacgttgtaaccacaagcacgcattctcgccccttcattctctcctctcccgtttgggtccctgttgtgtttcagccgtttgtaaattcctgaaatctgtggaaggtttgagcagaacgctctaaaacacaaaaagtaagtgttgacggcaaaaagctgacattcccgta

SEQ ID NO: 15287 - DNA, 1104 bp, Artificial sequence
  DNA replication origin
cgccctcagcgccctgggggccaccagccgggccgctccacgtgcagctcttcccttgcctttcgcccctactgctggacgcgcggaccctggacccgcagggggcgccgccggccggctgggaagtcttcgacgtgtggcagggcctgcgccaccagccctggaagcagctgtgcttggagctgcgggccgcatggggcgagctggacgccggggaggccgaggcgcgcgcgcggggaccccagcaaccgccgcccccggacctgcggagtctgggcttcggccggagggtgcggcctccccaggagcgggccctgctggtggtattcaccagatcccagcgcaagaacctgttcgcagagatgcgcgagcagctgggctcggccgaggctgcgggcccgggcgcgggcgccgaggggtcgtggccgccgccgtcgggcgccccggatgccaggccttggctgccctcgcccggccgccggcggcggcgcacggccttcgccagtcgccatggcaagcggcacggcaagaagtccaggctacgctgcagcaagaagcccctgcacgtgaacttcaaggagctgggctgggacgactggattatcgcgcccctggagtacgaggcctatcactgcgagggtgtatgcgacttcccgctgcgctcgcacctggagcccaccaaccacgccatcatccagacgctgatgaactccatggaccccggctccaccccgcccagctgctgcgtgcccaccaaattgactcccatcagcattctatacatcgacgcgggcaataatgtggtctacaagcagtacgaggacatggtggtggagtcgtgcggctgcaggtagcggtgcctttcccgccgccttggcccggaaccaaggtgggccaaggtccgccttgcaggggaggcctggctgcagagaggcggaggaggaagctggcgctgggggaggctgagggtgagggaacagcctggatgtgagagccggtgggagagaagggagcgcagccttcccagtaacttctacctgccagcccagagggaaatatggattttcacaccttgcctggccaccctggaaaaacaagccaagg

SEQ ID NO: 15288 - DNA, 958 bp, Artificial sequence
  DNA replication origin
cggattctattccagtctctaaacctcccttcctttccccccctttctttctctctcccttctttccttcttcctcttttgcagaaggcagcgtggttgccgcttgttggtggctggtgggggaaacgtggaggacgggaggcagcaggcggatgaacccggctggagaggggtcgggatggggactgatggaatcggtgtctcgggatactgggttcgcagtccaaggcctgagctgctggggcagatctagggcatgagacagccttggaaagccctgggcaaagccggcactagggagtcccacagtctgaggaactagtccgcgagcggcgtcgggcagccccctggtcctggcgccgcgcgggttttccgttggtccctgcgctgggtgggatggtcagccgggctggagccctgcgccctccggcttttttgctccagcgtggtgctcccggctgctccgaggcctcaacacgagtggtttctgcagatgcggcggcagcagttgggcgggccgggacagggacggctaagttcggaggttgtgggtacttaatacacaaaggtacatgggtatgcccatccacctttctcagccaggcgacgttcctctctctacgctattcctgagggctggtgggggtctgggaaatccctggtaccctctgtgggaacgcctgcatgtgtgggtgtctgcggaaacccttgcggccccttcttgccaccggcgttgatctgcagcgtggccagtgccctcaagaaaacctcgcaccacctctggtcccagaaatcagggaaggatccacaggcatcggaaactaagctcctaaaggagagagacaataatgtggaaggagacaggaaaggaagggagaaaaaggaaaggaagagtaaagagaaggaaggaagaaaatgacgggataaaagcgatttaggcagatatccactcctccat

SEQ ID NO: 15289 - DNA, 1123 bp, Artificial sequence
  DNA replication origin
cccgcaccacccggctctcctcccaccctccccacccctcctctgccctccctccccattcctcccctcccggcgaggggcgggagggggcgtggcggggccggggtttgtgtggctgggacccggctcctcgcactccgagtccgcccgaggagccgggccccggccgctgtccagccgctccgtgccccgcgcgtcctgcgccgccgccaccgcctcctggggagacgcagccacttgcccgccatggatactcccagggtcctgctctcggccgtcttcctcatcagttttctgtgggatttgcccggtttccagcaggcttccatctcatcctcctcgtcgtccgccgagctgggttccaccaagggcatgcgaagccgcaaggaaggcaagatgcagcgggcgccgcgcgacagtgacgcgggccgggagggccaggaaccacagccgcggcctcaggacgaaccccgggctcagcagccccgggcgcaggagccgccaggcaggggtccgcgcgtggtgccccacgagtacatgctgtcaatctacaggacttactccatcgctgagaagctgggcatcaatgccagctttttccagtcttccaagtcggctaatacgatcaccagctttgtagacaggggactaggtaagtggcaaagaaaacgctcgactcccctcccgctggagctcggcagccagggagctgttcccgctggaggctacatttgtgaattcccttcctgctctggacacttcctttttacttttcttaaattgtttttctcaagctcgagtaagtttctgaatgtggctgcggattctattccagtctctaaacctcccttcctttccccccctttctttctctctcccttctttccttcttcctcttttgcagaaggcagcgtggttgccgcttgttggtggctggtgggggaaacgtggaggacgggaggcagcaggcggatgaacccggctggagaggggtcgggatggggactgatggaatcggtgtctcgggatactgggttcgcagtccaaggcctgagctgctggggcagatctagggcatgagacagccttggaaagccctgggcaaagccggcactagggagtc

SEQ ID NO: 15290 - DNA, 1182 bp, Artificial sequence
  DNA replication origin
cagggtggagggcatatcccagaccttaaggaagttaaaggatgaggggagcagcgcagcaaaactccctccccctgcaggctgtcatgtgagtggtccctgcaggacagaagaggtgatgaaaaagcaaaaggaagaaggggttagaaagtgagagggaggagattggagagactgggaacacacacagaaagtagcatggcggagaaagaagccacctgagatcaagtgaaaccataaagagaagaaaaaagccagaactgaaatagagaagttgggccaggaatgactgtctatgctgtagtgggaagaatcttgggcttggggtgggagcctgggttctgtcccttgctgcataacctcttggcagagtggccttggaaaagtcacttatttccattgagtcttttttttttccatccgtgaaggtgaaaatagtcaacgccaacctcacaaagctgttggcacgattaaaggagggtactttatggttggtgcctgagcacccaatcagtactgagggaaactcttctgcccatagcagtccagggcagagcactgtggcagacagaagcagcgctacgccgcatcgcctttcagcgtgcaggcccaggaatgagcgaggcagtgggcggggaagacaggcacggggaatctggggacagataaaggaaactcgtgatggggcgaggctgggctgaagagaaacagattggggtagagctgcaaagggaggggtccactggaaggcgaggggggaggccgggaagagagagggtgggaaggcagtgtgagatgggagggcagtgtgagaagaaaagcaggctggggaagagggattggaatgcagaaggaacttggggaaggaggaagtcctgcaggcgggagggaaagaagagagggaaaatggggatgcagtggaggcggggggcaggccgcgagagggagaggatcccgggagcagacgaagaagtggagcagctaaagtctgcgtcagaagaggttggggactgcgagaggagaggctggggcctgcaggggagcgcagcagcttttagcatcgatccaaactctaaagactcgtggcctttgcctgacctcgagggtcgggaatagacgcctgtctttgtggagagcgatacccaaccgagaaaatggggctgttccgagctgggccctgcg

SEQ ID NO: 15291 - DNA, 1069 bp, Artificial sequence
  DNA replication origin
ccctgaggctcagagcaaggttatgcaacttaattaaggacacacagccagttttgaaaccaaaagtgtggctcaaaaactactctactctaagttggccttttaagccataatggtgagagaggtgtgacttccctttctttaaagaggttcattcagaaagtataaatcattctaagtaggaaccacggtgtgtacctccttatgaaccaaggatgaattagttctctaggttaggaatgaggagccacaggcgcagtgccagagttaacatgaggtgtgttcaagatttgggctgggcagctcctatgaaccggtatatattagaatgtgtgtgtatgttttccagggaataagagagttgtgttatgctgtgtgaggtttatgtgtttcatttaacacacagcagttactataccccaggcaccattaaaattgctggacaagatcacatttcagcacgtatgttaggtaatgagtgagcagggtatgcaccgcgtgatgtgtggcgggctggtgtctgtgcagccatgtacacagatgatgggtattgggctgtgctggaaaggaaaggtccgctgtgaggtgtgtgtttagagtggcagtttgtgccgtggtacagatggtagtgtttgaggctgggggaagtgttatgctggatgacttgtgtgcaatgcatacgggaagtgctgcacaggaaagaccgtgtatgcagcacacatgtgcattttttgtgcgttacggatagtgccgaataccggagttccacaggaagggatctaggttgtgtcctgggcctgtgtatggtgcctgcaggcgctgtggattggggtgctttgtatgtgtagcggtgtgtgctgaaagtggtgcatacgacatgattcatgcggtgtgctgggtagggacgaaggctggagcagtgcagaggaggggcccgcgtcgtgatgttgtgtggagcgatgctgagtgcggtgggtgagggggcgatcgtgctaggtgactcgcgtgcgttccccgtgtaaccggaggcgctgtatggagaaggggcactgaggggtaggggagcagg

SEQ ID NO: 15292 - DNA, 1194 bp, Artificial sequence
  DNA replication origin
ccccggagctccagccgcgcggatcgcgcgctcccgccgctctgcccctaaacttctgccgtagctccctttcaagccagcgaatttattccttaaaaccagaaactgaacctcggcacgggaaaggagtccgcggaggagcaaaaccacagcagagcaagaagagcttcagagagcagccttcccggagcaccaactccgtgtcgggagtgcagaaaccaacaagtgagagggcgccgcgttcccggggcgcagctgcgggcggcgggagcaggcgcaggaggaggaagcgagcgcccccgagccccgagcccgagtccccgagcctgagccgcaatcgctgcggtactctgctccggattcgtgtgcgcgggctgcgccgagcgctgggcaggaggcttcgttttgccctggttgcaagcagcggctgggagcagccggtccctggggaatatgcggcgcgcgtggatcctgctcaccttgggcttggtggcctgcgtgtcggcggagtcggtgagtgggccaggcggaggatgcgcgcgccgtttagggtgtttgaagctacgagaggagcccgcagggaataggggagcgccacctggggaacccccagtccccaagtatacaccggagatccgctgggacaaatgcgctcgtccggtcaccctttccccctcttcccttcctcagaaaagcgctgctcgctggcgttaccccgcggtccgcgggaatgggggcaccgagaattgcggtttggtctagccgcagaggcccctgaagtcactcccaacttcttcgccctcggcgggtcttgctgcgtggtctgggaaggacggaggggaaagggtggcaggaggggggagcctgggtcgggcccgcgagggaacggctccactccgcgcgctcctcgagaccagggatgacctggaaacttcggggtcccttcctccgcacaccatcccccccgcgccagctttcctgtttgactgcatgcaagttctggggagatgggggccagatttaagagacccgcgagtgtccagagagaaaagtttgcaaaagttcttttgtttgatgctccctgcggctagggcgaggtaaccgacactacgtggaatcgcagtaggcgatccctcaaggggatactgggggaggcacggaacgcgtccgaaaatgctgggacgccggccactg

SEQ ID NO: 15293 - DNA, 844 bp, Artificial sequence
  DNA replication origin
gccagttcggctgcaaacacacctgatagggcggctctgacggcggcgacggaggcggctcccaggactaagctcgcggcctagccttacggtggcggcggccacacccctgactgggctggggccctccgcgccgccccgtgactgcagccctgcttgccggccaggccgcggggccgagaggcggggcaaagacctgactcgggaagccggggcgggcgccgggttcgggctgggggccacctccggaacgcctggggggttctcactcgccctccaagggcgacctcagggccacagatcggccggaaggcttctcagcttctgggctgtggctcctgttagaaaattgagtgtcgccctgggtcccgagcccctaggcctgactccttcgtgcaggggcgtcgccttcagactgggtggtgcgcaggccagggccgcgtgcttttcagaagcgcagcctcaggcgaggcgggcggcaggggcctgagaaggctcatggcttggcagaagggtcctgtgcttcagtgggtgcccgtgcaggtggagaaggacggggctgcgaagctgaaaggaaaacgtgaaaggtttttgtgtgtctctgagcctgagtaaaggccatgctttctgagctgtcaaacgcctcccaaagggaagagattattaaaccgttttcccaccctgccaggtgtaggattgttaggcggtgatgatggaaggcagagatgacccgaactgagagatcagaaaaagcgttttctctttcgtttgtgcctgaattatatgagggtgcccaagaagaaaggagactcatctgattacccggtgtggcttatctcaacaa

SEQ ID NO: 15294 - DNA, 1215 bp, Artificial sequence
  DNA replication origin
gctggggtttgtctcacagtggaggcaaggaattgcaacttttttctattattgtacaccttaaaggcgaggttaattaaatactgttgtggggtttgagggctggaatttaatttttggagttttatttcggagcagaatgggtaatacaatgtattttgagaataagacggccttttggctttttagggtctagggctgtaaagcgtctcagggttgctgccaaacaaatcatgaactgggctgcatttttatatttgatgaaaaagagcctaaacgctatctgatttgggataaagaaaaaggagcattaaccttgactatgcctttggctccagccacctttttaagagtaaattgctgggcaggtgggggagggctagtcacggaacgaaactgtaagccggaccaggtgtgaggaggggaggtgataaaaagattatagggtggaggagcggaggctgaggaagaattgggacctagctcggcctggcgaggaggggagaggtcagatgggtctgtagaaaaggaagattagaaagactcagcgacgcttggtgttggtactgaggggacaggcaggagggaaagaaggaagatttgggacgggttgcactgggcacagagactaggaagggactgatgtgtaaaggatgcctggacgtcaggcacctcagaccgtttgcctattttacgacaagaattatttagatcttgtaggatggaaaaattcaaagtgccgttttctggctatttggaactactgttgagtttgtattggggtcaagtggcattgcagaagaaaataaggcatttaggttttaggtcaggtgtgagttgaagaggttttaagtttttgagaacacaggccaagggagtagaaagaggaatggagggtggaaagttgcctatagtgaaggaagcaagcctagagaaaagagagagtagagaaacggagggaaggggttcgggggttcttaccttccagaaaagtgggaaaaggggttggggcgcagagataagaggtcagggcatggaaataagggatggggcacagaaataaggggttggggcatggaaataagaggtcggggcacagaaataaggtattggggcacagagatacgaggttggggtgcggaaataagggattgggggttcttgccccctagaaaagcgggacttgccactaagggtgaaagagaagggtttgag

SEQ ID NO: 15295 - DNA, 1699 bp, Artificial sequence
  DNA replication origin
caccgggcgcatcacgtcctctcgcgacggtacagttgtacgttcgtgacgtcggcggttgccgtggagagacccgctcggtcccgaccgagagctggcgtcaggagccgcagggtcacagcgtgtctttgaagctgcctccgccgccaccatgagcggccgaagtcggggtcgaaagtcctcccgcgccaaaaaccggggcaaaggccgcgccaaagcccgagtccgccctgctccggacgacgccccgcgcgacccggacccttcacagtaccagagtctcggggaagacacccaggcggcacaggtgcaggctggcgcggggtggggtggcctggaagccgctgcgtccgcgcagctcctccggctcggggaggaggccgcctgccggctccccctggactgtggcctcgcgctgcgggcccgagctgcgggggaccacgggcaggccgcggccaggcccggcccggggaaggccgcatctctctcggagcgcctggccgcagacactgtcttcgtgggaacagcgggaaccgtgggaaggccgaaaaatgccccccgcgttggaaaccggcgtggccctgccgggaagaaggccccagaaacctgtagcaccgcggggagggggcctcaggtcatagctggtgggaggcagaagaaaggggcggcaggggagaatacctcggtgtcagctggggaggaaaagaaggaagagagggatgcagggtcggggcccccagcgacggaaggcagcatggatacgctggagaacgtgcagctgaagctggagaacatgaacgcccaggcggacagggcctaccttcggctctccaggaagtttgggcagttgcgactgcagcacttggagcgcaggaaccacctcatccaaaatatcccgggcttctgggggcaagcatttcagaaccatccccagctagcatcctttctgaatagccaagagaaagaggtactgagctacttaaacagcttggaagtggaagagctcggccttgccagattgggctacaaaatcaagttctacttcgatcgcaacccgtatttccaaaataaggtgctcatcaaggaatatgggtgtggtccttctggccaggtggtgtctcgttctactccaatccagtggctcccagggcatgatctccagtccctaagccagggaaacccagaaaacaaccgtagtttctttgggtggttttcaaaccacagctccattgagtctgacaagattgtggagataatcaacgaagaattgtggcccaatcccttgcagttctaccttttgagtgaaggggctcgtgtagagaaaggaaaggaaaaagaaggcaggcaaggtccaggaaagcagccaatggagactactcagcctggggtgagccaatccaactgatcctgcacaagtctccctgctacctcctgctgggctgctcctggttgactacatatttggctctctgccttctcttcatgttggcctctgtgtactatagaccctttggactttagttacaagaatatggcatttatgatcatgttcttttgcctcccatagcctcttgcttttctacgttagtgtcacatgttatgtgatcgcacccggactgttcatatgttaagcacacatactttagatgtgtgctccctgttatctacattgcctggaccttgttcttggctctggcct

SEQ ID NO: 15296 - DNA, 1662 bp, Artificial sequence
  DNA replication origin
ttggtccattttacagagagctgattggttcattttacagagatggcccttgggcggttgatgggaccgggcgccgccgagcaggggcggtgtgtgtccgggaggctagggcagcgcaggagccaattgccggggaggaggggtggctcgcgcatgtccggctgcaggtgccgagccctgccctgcggaggcggctgaggcccggcgagaattcaagcgcggcgcgggcgggcgggcagtactgggggacctggcgcaccctctgcagctgctggcccgggtgctaagccccttactgcccgcggccagcagcgctggcgggccgctgtgagtgtggggcctgcggatcccgcgcccacccggaactcgcgctggcccgctagcgccctgcgcagctccggttcccgcccactcctctccctctacaccggcctgcaagcagagggagctggctccggcctcagcctgcccagagaggggctcctacagtgcagcggcgggctgaagggctcctcaagcgcggccagagtggacgccgaggccaaggaggcgcccagagcgagcgagggctgctagcatgttgtcacctctcagtggcatgatctccattcactgcaacctccacctctcgggttcaagcgattctcctgcctcagcctcatgtagctgggattacaggcacgagccaccacacctggctaatttgttttgaatttttagtagagagggggtttcaccatgttggccaggccagtcttcaactcctggactcaagtaatccacctgcctcagccttccaaaatgctgggattacaggcgtgagccatcacgtcctgccctgacctctgctttcagccacaaacttaggtaaaagaaaagtagcttttgctcataaagtgattggagacagcctgttgtccaacagtgtctcccttattggaccatgacttttcccaggcaggggccatgtcttatttgtgtgtatatttccatcacccagcacagcacttggcacgtgatacaggttcagtatatattttcaaacaaataaattgaagtgaagaattgagtcaaggagacaagacctttgaaggccaaaagatcgaagtttgtggtaatgagacatcgagctctggtttgaactaaaatcctttgaagtgaaaaacctcttgagtggttgtgaaacttgaacttaccataaatatctcttcgtattttttgagccgattaatccatggctcccataaaatcttctgcacattaaacaacagggtaagagcaccacgccttcctctgcctccaccgccaacttggcggagactagacccaaggatgcaggagccgttcctctccgtctgagcctgctgggctgaatgggcatgaagaaagttggagaacagaacgtgcaaaccgggtgagttgaagtgggttcctgctcgctggaactggagagaagtgtcatttccagcaggagggctgcttccagtacctggggctacagagagggactgggccacatctctgattaagtttctcttctttcctttctgggagatggatgtaaacagtgactggtttctttggacagaggctacctgtgctattgaagggacaaaatccacatgccctacatgcaaactcacactcccatctttccctatt

SEQ ID NO: 15297 - DNA, 1125 bp, Artificial sequence
  DNA replication origin
atgatctctattgcatactcagagcaaacccgacttgctattgtagtgcaaaagcagccacagacaatacctaaacaaatatgtgtggctatgttccagcaaaaccttatttataagaacatgtggctgggcttggtggctcacgcctgtaatcccagcactttgggagcccgatgtgggcagatcacgaggtcaggagttcgagaccagcctggccaacatagtgaaaccccatgtctgctaaaaatacaaaattagcccggtgtggtggcacgcgcctgtaatcccagctactcaggaggctgaggcgggagaatcacttgaacttgggaggcagaggttgcagtgagccgagaccatatcatgccaccgcactccaacctgggtgacagagtgagactctgtctcaaaaaaaaaaaaaaaaaaaaaaagaacatgcagctggcttgcaggtccatttgctgacctctgcttttttttctctgagacagagttttgctctgttgtccaggctggagtgtggtggtgtgtctggaattggtgggttcttggtctcactgacttcaagaatgaagccgcagaacctcgcagtgagtgttaacagttcttaaaggtggtgtgtccggagtttgttccttctgatggtcggacgtgttcagagtttcttcattctggtgggttcatggtctcgctggcttcaggagtgaagctgcagaccttcgcggtgagtgttgcttctggagttgttcattcctccccgtgggttaggggtctcgctggcctcaggagtgaagctgcagacctttgtggtgttacagctcataaaggcagtgcagacccaaaaactgagcagctgcaagatttattgcaaagagtgaaagaacaaagtctctacagtgtggaaagggacccaagtgggttgccgctactggctaggacagcctgcttttattctcttatctgaccactcacccccgtcccacgcccccccacatcctgctgattggtccattttacagagagccgattggtccattttacagagagctgattggttcattttacagagatggcccttgggcggttgatgggaccgggcgccgccgagcaggggcggtgtgtgtc

SEQ ID NO: 15298 - DNA, 1177 bp, Artificial sequence
  DNA replication origin
cactttggcctgggcgacagagacagaccctgtctcaagaaaaaaaattaaaatcttttttttttttccaaggcagaagagtttttcttagtacagaacaaaatggagtctcccatgtctacttctttctacacagacacagtaacaatctgatctctctttcttttccccacatttccctcttttctattcgacaaaaccgccatcgtcatcatggcccgttctcaatgagctgttgggtacacctcccagacggggtggcggccgggcagagaggctcctcacttcccagatggggcggccgggcagaggcgccccccacctcccagacggggcggctggtggggagggggctgcctcccacctccctcccggacggggcagctggccgggcgggggctgccccctaccttctggaccgggtggctgccgggtggagacgctcctcacttcccagacggggcggctgctgggcagagacgctcctcacctcccagacggggtggcggtcgggcagagacactcctcagttcccagagggggtcgcggccgggcagaggcgcttctcacatctcagacgatgggcggtcgggcagagacgctcctcacttcctagacgggatggcggccgggaagaggcgctcctcacttcccagactgggcggccgggcagaggggctcctcacatcccagacgatgggctgccaggcagagatgctcctcacttcctagacgggatggtggccgggaagaagcgctcctcacttcccagactgggcggccaggcagaggggctcctcacatcccagacgatgggcggccaggcagagatgctcctcacttcccagacggggtggtggccgggcagaggctgcaatttcggcactttgggaagccaaggcaggcggctgggaggtggaggttgtagcgagccgagatcacgccactgcactccagcctgggcaacattgagcactgagtgagcgacactccgtctgcaatcccggcacctcgggaggccgaggcgggcagatcactcgcagtcaggagctggagaccagcccggccaacacggcgaaaccctgtctccaccaaaaaatacaaaaaccagtcaggcatggcggcgcgcgcctgcaatcccaggcactgggcaggctgaggcaggagaatcaggcag

SEQ ID NO: 15299 - DNA, 1032 bp, Artificial sequence
  DNA replication origin
atttcccgcagccgggccgagccctcctcggcctgctgggccagctcgtcctgccagctccgtgcagccatcttccctcccgtcagagggactcgcaggatgacgccggggcgcggagacgcagtggaatagtcgagggaagcgaggaagggccgggccgggtaacctcaggccgagcgcatcgcggccgtccctcgcgccggagccggggatcggccgctgccaccgcggggagggcggaggggtctcccaggttccccgctgtcagcctcactccgccgccgccaggagacccgggaggcgggagggagtgtctccagtggcggccgctaagcggcgtctcggcgccagcgccaggccccgctgtcctccctcggcggaacaatggcggcttgggccgcgatccacgccgcgcgcggggacgaccgtgggtcacgtgggcgccagtgggcggggcgtgggcgtcacgtgggggcgggcggggtcgggtggggcaaaggcgtgtcagggaaggttggcggtggtcggttcgggcctggttaagacgcggcgttggggacccgttactgtagaccagaagctgggaggggttaattggtggacgccttcgcggggtggctggtggcgcagagttaggagacgtggcgcaacgaatgagtacagaggaggggctccgtgcaaggcgggggcgggcggggggcgggtagggctgcagcgctaggaaccgggtcaccgggtctaggtcaaagtcgccctggcaggtatagggctcttcatgcctttttctggagtgttattgaggtggaatcgctttttctccctggtggcgccagttggatccttccagaatgagctcaacggagtctgacgccgaacactgttcttccgggacctaggtttagttcacaaattgggtatttctctccagggtgtttctctccagggcaactaatacactgcgtgcctaccagttgccagcctggcgagggcacgtttgcgtcgtttggctcattcactcttgctctctgttgt

SEQ ID NO: 15300 - DNA, 1419 bp, Artificial sequence
  DNA replication origin
ggcctgaggttacccggcccggcccttcctcgcttccctcgactattccactgcgtctccgcgccccggcgtcatcctgcgagtccctctgacgggagggaagatggctgcacggagctggcaggacgagctggcccagcaggccgaggagggctcggcccggctgcgggaaatgctctcggtcggcctaggctttctgcgcaccgagctgggcctcgacctggggctggagccgaaacggtaccccggctgggtgatcctggtgggcactggcgcgctcgggctgctgctgctgtttctgctgggctacggctgggccgcggcttgcgccggcgcccgcaaaaagcggaggagcccgccccgcaagcgggaggaggcggcggccgtgccggccgcggcccccgacgacctggccttgctgaagaatctccggagcgaggaacagaagaagaagaaccggaagaaactgtccgagaagcccaaagtgagtatgggatgagcggcagtagagaacgggcgaagggcgggcgtggagaccctcgagcttgggggaggccgcgccccagccgggaaggaaaagagtgcttagtcgaaagccgagaggcagcactcccaagtggaggaggaggtgataggtggtcatgttatttggggaatggggggaactcaggaagtataggacgagtggggaagcccagtttcgaggaaggaagttaggaggtctgggggtccgttcagataggcgcccagaggtcaagccatctttgggaaccgtcaccgctagaataagcacagcatccttccttgaggcctgcagagtaggctgcatgtggagcgtaatgggaccttaaggtggtgttaggaagttgtataaagactgcgctcggaagacagatgtctatctcaagtcacattgagacagtaggcagtggaagaagtgcggtgacctagaaattctggggcttacacaggattaaaggtgtccaggtctagacgcgcttccattttagttgggactgttaaagggaaatggttgcccattcttgttctggcaaatgtggccaacagaggccggaacgggagcaaggcaagagggggtcggttacctaatacgctttgaggtgtatggtcctgtgagaaagagctaaggcgagttcaacgaacgagtctgttgcacactctgtggcgtggtagatttgtgaaatagagtaaagggagatgacagggcagaatggtgaaagccgagagaggaattcaggcaccgatttactgggccacgtgtggaagttgcagagggcatcacgtctgtcttaggccttcatgttttacgtttacattctttattgccattcccatggttctcccattatatctttcatagttttatgtatttttaaaaatattttacatttgagcaaa

SEQ ID NO: 15301 - DNA, 1275 bp, Artificial sequence
  DNA replication origin
atgtttaagggtgggtgcggtccccttccccaggtaggtttaggaattcttagtcgccccaggaaatccgctactcttgtctctcactgggattacaggcgtgagccaccgcgcccagccaattttggtattttttgtagagccagggtttcgccatgttgcccaggctgggactgaatctttagagctgcactcatgattaaaaacgctgtgccaggcgttgtggctcacgcctgtaatcccagcactttgggaggctgaggcgggcggatcacgaggtcagaagatcgagaccatcctggctaacacggtgaaaccccgtctctactgaaaatacaacaaattagccaggcgtggtggcgggcgcctgtagtcccagctactagggaggctgaggcaggagaatggcgtgaacccgggaggtggagcttgcagtgagccgagatcgcaccactgcactccagcctgggtgacagagcaagactctgtctcaaaaaaaaaaaaaaaaaaaaaaaaaaaaagctaccggaagcacagcgaggatgtccttgacacacatcctattttctgggaaaagattactaccacagtaattgagctgtgaagcggagacaaattgctctcggtggtggttcaaagtactgcaattgactggaatagcaccgcgcagttttccttcctctcgtgcaagataagagtgataggagctgtatcgattacctgcaagatagaagtagaagcgggccgggtgcggtggctcacgcctgtaatcccagcactttgggaggctgaggcgggtggatcattcgacgtcaggagttccagaccagcctgaccaacatggtgaaaccccgtctctactaaaaatacaacaaattagccgggtgtggtggcaagcgcctgtaatcccagctactcggttggttgggcaggagaatcgcttgaacccgggaggcggaggttgcagtgagccgagatcgcgccattgcactccagcctgggcgacaagagcgagactctgtctcaaaaaaaaaaaaaaaagaagtagaagggaagaaaatcgcaaggaactagactaaaagaatctcgacccttgaatggagttacacgaacggccagatgaaagaaggaaggcccggacctccactcagggccgactaggggactggcggagggtgcacgctgatggatttactcaccgggtgcttggagctccagcagctggctggagcccgcgatgacgtcacggactcgggtcacatggccaagtccgcc

SEQ ID NO: 15302 - DNA, 1768 bp, Artificial sequence
  DNA replication origin
ccgcctgcacttcgaggccgcccggccgcgcagagccgggggaaagcgcgccgcgctcacctgcagccgccggcgcctgggaagcgaggcaggggcgcagccacccgggtcttcctcgtcggcctcttcgcctcgccgagggccgcggctctcctcggggatcgctcgtgggaggcgaggacggagccccagcttctgcctctgcctctgtctccgccgccgccgcttgctccaagtcccatcccagagcgctcccttcgctcgctggctgcctgggaggcgctgggcaagggcgggcggctggggaggcggtgccgcggcgggggtggggagcgggccgggcggaaggaggggtgtcctctttggggatggggaaggcgcggagagggagcggcggcgagggcggccccaccctgtgggcagccccgggagctgggcactctggcggcgcgccctgcctgctgccacctggctccactccgtccgtgcctgagcccaggcgggcatcagactccaggggtccggagccgcaggcacggaacacaggcagctttaggggcctgtcgggttgggagtgcggggaggggtcttctgggggaaaggagacatggcaggaatcttacatctagaacttggggtcatgacctgcgggacgcacccactgacgcggggatggagaaaaaagtggtgagaattgggctaattgatgacaagcgccaagagctgtcttgccagtgcccagagcaccccaccagtgccagttcatattaacagagcgtccactggctggggaccaggccccgggatggggaggaggtaaagatgccaggatggagaggagacaaaattcctaccccgagggagcagggaaagtctagttcagacaagacttttgaaattatgagcagagacatttgcaactttgcagaatggaggaacctcaccttggatgtccccatggagccttggagggatgcagaagacaggattggccagcgacagtcaaagtggccggcacccccctctaccagctccccagttcctggaggctggggtgagtggatgtataacagaccaggacatctcctataaagctccaaaattctgttcccaaaccactagccaacgcacccagttcaggttttgtgtttttgtttgtttgtttgttttttgagacggagtcgcccaggctggagtgcagtggcgcaatcttggcttactgcaagctctgcctcccggattcacgccattctcctgcctcagagtagctgggactacaggctcccgccaccacggccggctaattttttttgtattttcagtagagacggggtttcaccgtgttagccaggatggtgtcgatctcctgacctcgtgatccgcccgcctcggcctcccaaagtgctgggattacaggcgtgagccactgcgcccggccccagttcaggttttaacaagctaccagcagaggcagcagcactaactagtttcaaaacctctggatgtgccacagtctgataatttggtgctttgggcggactttgttttgtaattaaccatcattcctatttgatgatagagttgatttctgaaatatgaataaacgccaaaatcaattcttcagaaaagctccaggaggggtaattaaaattccagccatgaagcaaggggttaacatactcgagccatcaggcaagtcaatgataccttaataccaagaaagaattgtggattcctgttcctttacccagtaccttaggcccactgg

SEQ ID NO: 15303 - DNA, 1870 bp, Artificial sequence
  DNA replication origin
cgagcgaagggagcgctctgggatgggacttggagcaagcggcggcggcggagacagaggcagaggcagaagctggggctccgtcctcgcctcccacgagcgatccccgaggagagccgcggccctcggcgaggcgaagaggccgacgaggaagacccgggtggctgcgcccctgcctcgcttcccaggcgccggcggctgcaggtgagcgcggcgcgctttcccccggctctgcgcggccgggcggcctcgaagtgcaggcggaccgacccaccgacagaataccgagcctgggctgcccgacgcgcaggcgccctccccaggcccgcactgcagcccccagcgccccggggccccggcgccttcgacccctccgaggacagggggagagggagggcggcgctgcccgacccctcggccgggagagctgggcgcgctccctgcgcaggacaagccgcgctgcagccgccccggagtgccccgtgggggcgctgtggcacgcagcggggacgcccagaccccggccaccgcgacccagggaaagggagacctgttgagcgggtatgcagggtgattcctattccacggacagccgatggctcccccttccctcttcggaacctggtattttcatgcccgtgtcatctggattttgttcttgggtctctatggcagctaaacctccagcttccctatattgtggaagagggagagaaaggggaaggcattttgtggtagttgctagaaaccccagaacaatttggagccgtttggggagaggacagagaaatggggactgtccctggtagggtctccaggactgggggcacaggaaagtgctctcctcagggacactcgcgcccaccctgaacaaacccaattgaccaagtttcaatttgtcataaatcaggaagccacaatgcatctgcaccaagcacacttaaaatcggcctttaaggaatggggcagtcaagagacttcagggacccgtggtcgagagcagagactggggtcagcctgcttgggtttcaaccccagctgtgaagtttacagggttgataacttgaaggtacccaagtatgcctcagtttcctcatctgtctaatgaggatggtaatacccacagaactgtgaggattaaatgagatatggcggccgggcacggtggctcagggctgtcatcccagcactttgggaagccggggcgggcggatcacctgaggtcgggagttcgagaccagcctgaccaacatggagaaaccccgtctctactaaaaatacaaaattagccggacttggtggcgcatgcctgtaatcccagctactcgggaggttgaggcaggagaatcggttgaacccaggaggcagagattgcagtgagcggagatggtgccattgcactccagcctgggcaacaagagctaaactccgtctcaaaagaaaaaaaaaaagatatggcaagtaaagtccttagaacatttccaggagcattctaagattaggtgagttccatggcttgtctttgcagaaatagcaaggagctgctatgagcagtgaatgtacctcttccccagttcagaaagagaggctctccatgggtacgtgagggtggcagataagccacgtgtatgcaactggtagttccatgcaggagtccacacgggcgcagttctccctgcttgctcccaaagggccaacctcataaaaccatgtcaaaataccaacatgggtttatgacctggaatgtttcctctcagtccctgaaacttggcacttagaatcctctgtggagaatgagatacttatggctcttcaccttgcattttcctatctgtccacactttttacttttatttctgccaatagaatt

SEQ ID NO: 15304 - DNA, 1321 bp, Artificial sequence
  DNA replication origin
gaaagacacgcgtactcttgaatgtactattttagcccctgcttgctccttgacccagagtttttgtgtagaccatagaatgccctgcccatctgtatttggaggtgctgctgcagccggtcacacctgggttctactgacctccagccctggctgtggtcctgcccagggctcagtgtgtattgaacaagtaagtgaatgagacatgcagaaggctgatttcattcttatttgaatgatttcaatcttgattaaccttcttagcaagaggttattttcttctcctggacctcagttcattcatctctaaaagaaggaagttgaagtcaatgatctctcaggtctcatctcagatgtggtgatgtcaccaattcccctgacatcccttctatgtgggaaccctgatgaaatccgcagctttccctcactgtgtccaggtaggaaagccaaggaggaaccatattctggaagccaaggaaggagaagttttgagacacagggtggtcagtaggatcaggcaggacaacagggatggggcagtgggatcaggtaacacagcagggctgggcagtgggttcaggcagaacagtgggctgggcaggggatcaggcaacacagcaaggttaggcagtgggatcagataatgcagggctaggcaatgggatcaggcaacacaacagggctaggcagtgggatcaggtaacacagcagggctgggcagtgggatcaggcaacataacagggctgggcagagggatcaggtaacacagcaaggctgggcagtgggatcaggcaacacagtagggctgggcagtgggatcaggcaacatagtagggctggacagtgggatcaggcaacacaacagggctgggcagtgggatcaggtaacacagcaaggctgggcagtgggatcaggcaacacagtagggctgggcagtgggatctggcaacacgacagggctgggcagtgggatcaggcaacacagtagggctgggcattgggatatggcaacatgacagggctgggcagtgggatcaggcaacacaacagggctaggcagtgggatcaggcaatatggccgggctgggcagtgggattaggcagtgaagcaggggttgttaaacttcattgtgcatcaaaagctcctggaaggcttgttagaacacagattactgggccctgtgctcaaagtgtctgattcagtaggtctgggttggagcctgataagtggtattcctggaaacctcagtttgagaactattactgtagagaaacctacaaggttgggtgggaatgggcaggaggaaaagatactagaa

SEQ ID NO: 15305 - DNA, 978 bp, Artificial sequence
  DNA replication origin
atcccaaggcagaagaatttttcttagtacagaacaaaatggagtctcttatgtctacttctttctacacagacacagtaacaatctgatctctctttcttttccccacatttccccgttttctattcgacaaaaccgccatcgtcaccatggcccgttctcaatgagctgttgggtacacctcccagacagggtggcggctgggcagaggggctcctcacttccctgacggggcggccgggcagaggcgcccccccacctcccagactgggcggcggctgggcggaggcgccccccacctcccagacggggcggctggccgggcgggggctgccccccacctcccagatggggcagctgccgggcggaggggctcctcacttcccagacggggctgctgccgggcggaggggctcctcacttcccagacggggcggctgccgggcagaggagctcctcacttctcagacggggcggccgggcagagacgctcctcacctcccagacggggtggcggccgggcagagacgctcctcagttcccagatggggtcgcggctgggcagaggcgctcctcacatcccagacggggcggcagggcagaggcgctccccacatcccagacgatgggcggccaggcagagatgctcctcacttcctagacggggtggcggccgggcagaggctacaatctcggcactttgggaggccaaggcaggcggctgggaggtggaggttgtagcgagccgagatcacaccactgcactccagcctgggcaacattgagcactgagtgagcgagactccgtctgcaatcctggcacctcgggaggccgaggcgggcagatcacttgcggtcaggagctggagaccagcccagccaacacggcgaaaccccgtctccaccaacaaatacaaaaaccagtcaggtgtggaggcgcacgcctgcaatcccaggcactccgcagactgaggcagg

SEQ ID NO: 15306 - DNA, 1169 bp, Artificial sequence
  DNA replication origin
ttttttgagacagagtcttgctctgttgccaggctggagtgcagtggcgtgatctcggctcattgcaacctccacctcccaggttcaagcgattcttttgcctcagccttccgagtagctaggattacaggtgcccaccaccatgcccagctaatttttgtatttttagtagaaatcaggtttcaccatgttggccaggatggtcttgatcttttgaccttgtgatctgcctgtctcggcctcccaaagtgctgggattagaggtgtgagtcaccgtgcccggccctggctcttaatcctattttccaaaccactttctttctgtaattcttaagttggctagttctccttcctcagaaaaattaatataaggctgttagcctgccactgacatctgaacatggatttatttagctaggttagattctgcagtggggggattaagtagcacactcctgattgtgactgtcttcatgaaaaaagaggcacagctatcagccagcagtaagaaggggagagaggctgttggagatttgaggagagaggaattgtaagcagtttctgggagagtggaagacggaattgagaggagaaacatgggatctgtaagatgtagagggcacctacttgagatttgtgtttataaaggaagaccgttaagaaccatcatgagttcttcctccgctgtgctctgccactcgggctggcatggggtcattggagagttggctgcgcccaggtcagctttccagtggagggagtgggggtgtttgtaggggagggacggtggtgtgagccatctaggctgatgaagagcgaggcagctgctgcgagccgcagggaggtgctagtgtaaatgggtggttggggcattgttgtgggagggtaagtgggtggaaaacaggaggcatggctctgagagcaggatactgacatcgcagtttgaagctggagcaggtgttggcagtgaccacacctaaggtatgagcagggagtgggtgcttgaggtggggtgaagtaagacatgcgaagtgagggtgggaaggtgactggtgggttattggaaggatgatttaggcagatgctgaagccactgggagtgacaagagtcatagtggtgcaggggaaggcagcatgaccgtcaagatcattaattgcagccttgtttg

SEQ ID NO: 15307 - DNA, 1145 bp, Artificial sequence
  DNA replication origin
gccaggtgcaaggatctgggccactgactaaggtctcttcatcccccttcccagggtgcctctccctgcacacctgtaccccctcaccatcttcccagcaggccagccaggccagcccagaggcaggcctcaacctgcgcctggagcagtggctgtattttaagatcagggctcagacctctaaataaaccataaacaaagccagcttccccggtatggaaggagggagatggctccatttcttttcagcacgatgactgggaaataaacaagtggctctgcctgtcacatacacttaacctctgcaaaggcatctgtcagacccacagagcttctgtctcagcctttccaataaataactgatgtgccccacattgggcttctccctgcaggctccaagttcactctgccattcaaggaaaggtgagcaggggggcttgtccctgaccccaaactcacagaaagagctatcaaagggcaggcttagacacagggccctagtgtagctggaagcatgttggcacagctctctcagctggggaaggggacaagggggagggagagagggaggaaggtaggaggtcgggttgttggcaagagcaggggcagagctgagaggggcaaggagtggcctctgttagagagatgggagggtgagagccccaggggcccaggcagagcctggtctgcaggtggggtggccgtgggtgtggaagaaacaaagaaaaacagaaggcagagggctctctctccatgggtgaaatctcccacgaccacagaggatgaaggagaaagaacaacagacaggaacagaaggaggcgggcagatacatgaagcaggggagggaggaaagccctggaggaatcaaactcaagtatgtgtagaaggaaggaccctccaaatgcagcagaaaaaggtgatttatgcactgagctaaaccagaatagccaggagccaaggccaagggaatgggagcggctgggaatggcgacatgtggcagaagccacagaagggggctgtgagctctggaggggccggaaggcaggcagctcgtagtgaaaggataggggtgagagctagggagagccacagggcccatgaaggctgtcccgtaggtgctgctgctcaggcccctgcagcaga

SEQ ID NO: 15308 - DNA, 1554 bp, Artificial sequence
  DNA replication origin
cccgtctcgggccgggtacgccgccgccgcccgcagctgccgaaggctcacaggtggctgcgtggtcccgccgctcccggagccccctctccggatccgcgcgcccctcacccacccagagaggcaggaacccgcgccgcattcgccccgtgagccggggcgggagcagagcgggtgtgacggggcgcccgccctgcgcggggcgcggcgcggtggtgctgaacggacagctccgcgtgcctcggccgccgcccgggctcggaaggcgcagccgccgccgccgctgcttctctgcgcttccccggcgcgtcaccgcgaccaccttgcgcccccggctcggcgcggggccgacacctctcccttccccccgaccatcccccggtgacagctgttattatcaccacccccagggcgcaggcagggggctgcctacggtgacctttccccgctgggtctggcgggagctgggctgggaaataaagggcggcttgcgcgtgtccggggacagggcgggaccggaggaactccaggtgtccccttttagggacctgaagaaaagtttcccgaagcccgggggtggggttgttggggaacaggagctggaggggaaaagagggggccgggaagtccaaggtggagatcggcttagtacgcggggggcgggagcgcaggccgcacggcgggggcgggagtcgctgagttctggtcgggagctctgtgtgggcacagtttgtgtccaggccggtgtggtgtgctggctgtgcgggactgcagggcgctgtgtgtgtatgtaggctgaggacagcaggacttttcagtgtctgtgtgtaccgcgttcattaaaatgggtcctctgtcggatgggaagatgcgtcggcacaggggggacctgggacgtgtgtcagcgcagtgtgtggcatggggaaccgtgtgctgtgtgtacatgtgctgtgtacagtgtagtactcttgggactgtgacgggctcatgtgtgtggaatatgttgagagcggtgtgcttgccgacagtggggactggggggttcaagctggagtggggactggtagatgtgctcaggatctgtgtccctattcctaagaagactcgtggcccagatctgagctcttggtctgctgggattgtccttaaggccctgcctactgggctgagctgagaaatggacccagtccctggggagccccctccctttggtgtttctctgtggtgtccacttgcaaagactggagcaccgtggttgtgtgagcttagcagggagctagcgtctacatgtctcggtcagaagtcctgggaatgcccttgcagggtggctctggattcatggtgcaaccaccactgccacagtgggaagtacattctttctttacgcaatcctggcaatgccgtcccagctgaaaaggtgctctgtgtagctctggagggcttggggcctccttggaggacctgtagaggaccgttaatctggcttcgaatgggggctcctgcatccaagtctgacccatccctgtgacccactggcttctggacatgtgtgtg

SEQ ID NO: 15309 - DNA, 1261 bp, Artificial sequence
  DNA replication origin
cagcgcatcccccccaccccaccaaagctacgcgccccccgtgtcggcccggccctgcccgtgcgtatctcagctccggtcccgcctgtctgcggcgagcgggcgggggcgtctcccgggcctgcccatggacaaggtcagcatgcagccccctgggcgctcagagccgcggggacgcgaccccgcacgcgcaaagcgcccaccgagacccctggggtggagctgtgctaatagaaacatacccacccccagcctttcctgggaggggatcagacccctcaaactcttgccccagcccagcccttcagcacccaagacccaccaggaggcctgggcccgccagtaatgggtagggagagggggccccgccagggcgcacggcgctctcgccgacgctgttccctccgcttccaggtgtagcgcccccgcgcggcgcgggcggccggcgcctccagcatgaccggccagagcctgtgggacgtgtcggaggctaacgtcgaggacggggagatccgcatcaatgtgggcggcttcaagaggaggctgcgctcgcacacgctgctgcgcttccccgagacgcgcctgggccgcttgctgctctgccactcgcgcgaggccattctggagctctgcgatgactacgacgacgtccagcgggagttctacttcgaccgcaaccctgagctcttcccctacgtgctgcatttctatcacaccggcaagcttcacgtcatggctgagctatgtgtcttctccttcagccaggagatcgagtactggggcatcaacgagttcttcattgactcctgctgcagctacagctaccatggccgcaaagtagagcccgagcaggagaagtgggacgagcagagtgaccaggagagcaccacgtcttccttcgatgagatccttgccttctacaacgacgcctccaagttcgatgggcagcccctcggcaacttccgcaggcagctgtggctggcgctggacaaccccggctactcagtgctgagcagggtcttcagcatcctgtccatcctggtggtgatggggtccatcatcaccatgtgcctcaatagcctgcccgatttccaaatccctgacagccagggcaaccctggcgaggaccctaggttcgaaatcgtggagcactttggcattgcctggttcacatttgagctggtggccaggtttgctgtggcccctgacttcctcaagttcttcaagaatgccctaaaccttattgacctcatgtccatcg

SEQ ID NO: 15310 - DNA, 1468 bp, Artificial sequence
  DNA replication origin
gccgggggcggggcggggcggccgggggcggggcggggcggccgggggcggggcggggcgggaggagccgcgctcctaagcgggagggagatccgccgcggagttacgggaaagttggtccgagttcccagagtttccctctgtggtgccctaggctcggccggccggtgccccggctcctttcctcctttcggccttcgccgtccaccaggtccctctctctgtccccggccgccatggagcagccgccggcgcctaagaggtaacgaatcggggagcgggaagaaggagggaagcggcgccggcggccgcggggcgggggtggctaggccaggccctgctgcgagcctctccccgcccgccgggccccgagccgggcgcgctgaggtcgggaggcgggtccgagtgtcccgccgcgtctgtccacgggcgaggggacctgaggggagcgggagccggagcctcccctgcggccggcaggcctggcgcgtggaaagtcgggtgggcagcgccgggctccctgcggcctgacctcccggggcgggaggaattaaatattaatagctacacagtctgtaaaacattgtggatgtgctgctctgacaggtgttcttcccccttccccctcaagttcaaaagtatttatggatgcaagacagtgggaagtttaaattagaaccccctcccccaatatagttttgcgtgtaaaaatagtgctgctttggtatggtatttactgttattaatagtttatatttaatctttgacacctgtgttggaaatgtatgcatacaagagtgggatgtgtttgagctaatatttgcaatgatcttaggaagccaaatctaggttgtccattgacagaagttcataatatgtattcctctctccccaagaatgaattaacgaattgtttgatgttgctaaaatatttaacctcagtctttcatttttaacttataaaataaggatagtaatctctcagatagtgctgttgtgaagattaaagagttcgtatgctttgacagctagagatctttagatgaaaggtgtgttcaagaacatgggataattgaaaagttaggaactttgggagctattgtgaattgtgtgactagacatgtgagccttgaagcctggaagccatctgttcaggtgaaaaaaagggggggtcgtgaaggagtttccaaaagggacctgctgtcagagcacttgagcaagtcaattgatagattcttttctagcattttgtaagttacctgcattctactcattgggcaccgttttaatacaatataagagaattgggcacttttttcttttctggaagaactggaaggagcacctctgagaaaacacagtagtccagtttgaacaactctgaattgaagtgcagctctctattgattagctgtactgtaagttatcagagtttcattataggtgtaagagaatccttgcccttgtg

SEQ ID NO: 15311 - DNA, 1423 bp, Artificial sequence
  DNA replication origin
gatggcgcgggggccttcccgcgtctgcgggagctgagggtcgttcctcactgcaggaaccccgccacccggaatcgggccgggccagccagccgcaggcacccttccggccaccagcctgcgaggcactgagtcacagggaaggggagctcagtgggaaggccgagcacggggtctcagggcaagttgcgtggccgtggccgtggtggtctagcctggggacagaaacctccttgagcccaggtccagcccgggtttggatttcccagctgaggccctcggctgccgcagcggcggagcccagagccggcgcaaggccacccaggccaccgtcagcccctcgctagtcgcaagatgcctccgcgaccctggagcgtgaggatggtcccgggggaggagcgggcggaagggcgcaccggctcctgcacaagctggatacggctcgggctccgcggtctccaggcccgcgccgcacgccgagggggtaggagcgggctcccggggcggcgcgcgggcacagagcgtgctttcgccttccggtgactccagggaaggggatctcctgcagtttgcctcgtcggagagagccaggctaacgcccatgatcccgcgtccaaggctgcttcgaattcatggtgcttttcgaaccaagcgcttcagtgtccgtgacaaggaagaccaggtttaccgatgacatcgcagtgaaggacaggccccagacacatccggggagaggggggctctccgcaccgggcccctctgggaaggccccaaccgcccagggcgggactggcccggctgtcgtgctcaacgtgggtagacgatggatgacagaaaagaacatcctcggaaaagactagggcacggtctgcaaacctatatttttattaggctttcatattgtgtgtgtttttcaacgcacttgccaacgcttaaactttgggaaaattcaaacggaaatcttgatttccgatgacctccgttcctacgcggcagtgagttggctggagctgagcagcgctaccctcccgtctccagacttgtttttaaaaggccggctgaagattgccttggacgttccatttctcactgcagatttcgtttccctgggacgctgggataggtccgagttaccctctagagcagcggttcttaaagtgtggtccaacagcattcgcatcatctggaacttgttagaaatgcaaactctctggcctcacctactaagtcagaaactgggagtggggcctggcaatctgtgtttgagcaagccctccaggtgattctgatgcatggtaaagtttgagaaccactaacctagatcagattgacattggggtccatcgcgggcgggcgcgatttatctttcccgcgcgtgctctctctcctcctccgtccctacctcttccttcttccttcactc

SEQ ID NO: 15312 - DNA, 1092 bp, Artificial sequence
  DNA replication origin
agatgtcacacgtgtacggcctctcgtccgtgtgggtcctctcatggatgagcaaattgtaggatttggtaaagtgtctgccgcaaaacttgcagataaactcttttttcgttttggagggcaaccttcctcgagagggctttctgtccggagtcaatttactgaggcccgagatggggctacccagtcctgggctcagcttgctcaggtctcccatcttaggcggatcctcttgcgtggcagccaccgccaaattggcaaagtcaaaacggggccggtccttgtgcagggctgggaggacgtgggcaatggccccctgcttggggtggaataggtgggtggtaaaaggcagggccgggaaggggaagcgcgcgtccacgaggccctgcgccgccgccatctccgtgatggtggagcgggtgatctcgtgcacattgggataccccagcgtccagtggttcatgtgcatggtctgtaccgcgctgagaccgtacaggccctgcaggtggtccaccgtggccgggaaggtgttcacggcctgcaggaaggagtaattggtgagctgcagcgacgggtggagcgggatgggcgctggcagagccttgctccccattttccgggatgctgggggtgctgaggggaccaaccctttcttccaggaatcagaggccggagggcgtggggctccgacaaaaacccagtgagacaacagcacgtagagaaagccctaaaaatggcagggaagagagggagagaccgtgactataatccaaggctgctccttctgccctttggcacctgcgcaggttaccacacctaagtctccctccccacccgactccaagaccccccgaaagccgtgaggggactgcgtggcaccttggcacctgctcaagtccgcgtgcagatcagcccggggccagaacaagaagtgctccactggcgagcgcgtgcccaaaggaaagaaagtcggattcagactctaggcagatacggagcggaagactcctcggtcccaggaaaacgaaaggcggacagccgggcagcacccagcccagcccagcccagcccagcccaccctccccaagcctg

SEQ ID NO: 15313 - DNA, 1404 bp, Artificial sequence
  DNA replication origin
accactgctcctctagggcttggagggaaagccaaggccgcgcctgccgtagacagcagatggcctgagcaacctggaggcgcgcccttcagtgccttccgggaactggttaggagtagcctgcggagagccgcgcttgcctcactttccggcgccggctcatggcttaggggccacagatttggggctcgggcggggctctgggcacgtggccggcgggcctgggtgtttgcctgagtcccgcagccgcggcccgggcgggcagccagacaggccgtgcccaatgcttgcgcgccctgctcgcgccggggcattttacgagcctcgaccgctgcccccaggtgctcacaaacccccgtgcagcctgtaagaagcaccgcggcccagtctctgaatctccgggtgaaagaacaggcttgtctgagaaccaatgtagaaatctctcctgtttcaccgacggccaaagagggccttcggcttgaccaacggaggaaaacgtcttcgtgtggagatcgatttcctttcgagagtttattctatacctgtgcagcatcttttgtgtagtagaaactgttttgcactgtgagtaaaaaagacgaagttagccttatgtgggggggcggggcggaggcagcttatttccacataaactaagaaacaattaggttaaaagagtgaggagccgggcgcggtggttcacgcctgtaatcccagcactctgggaggccgaggcgggcggatcacttaagtccggagtttgagactagcctggccaacatggtgaaacgctgtctctactaaaaatacaaaaattagctgggcgtggtggcgcgcgcctgtagtcccagctactcgggaggctgaggtggtaggatcgcctgagcctgggagaagaaggttgcagtgagccgagatcttgccactgcactccagcctgggcgagcaacagaccctgtctcaaaaacaaacaaacaaacaaacaaacaaacaaagtgagcgctcaaacctgagtagggcgcctgggggcaagcaagcgagggggagtgagattaagtggagaaagcgctaaaggggagggttagagacgtgagaggggagcggttaagagagaaggaagcggagggcaaggagacgtggggcggggaagggagggcaagatgggggggctggaaggtggagaactaggccgggtgctgttcggcgggagtaggactaagctgggaagacgcgggtgggggaagggctgaagtcggcggtgatggaagggctgaagtcggcggtgatggagaagggatgagaggcctaggcctagttcgtgtccatgaagcctctccacgtggccgacttcccttagagaagtcccacaagccctcagccctcacagcctcgcccgcgacgccgtgc

SEQ ID NO: 15314 - DNA, 906 bp, Artificial sequence
  DNA replication origin
tgaggagcccctctgcccggccagttgccccgtccaggagggaggtgggggggtcagccccccacccggccagccgccccgtccgggagggaggtgggggggtcagccccccacctggccagccaccccgtccgggagggaggtggggggggtcagccccccgcccggccagctgccccgtccgggaggggggaggggggtcagccccctgcccggccagccgccccgtccgggagggaggtgggggggggggtcagccccccgcccggccagccgccccatccaggaggtgaggggctcctctgcccagccgcccctactgggaagtgaggagcccctctgccccgccagccgccccgtccgggagggaggtggggggggtcagccccccgcccggccagccgccccatccgggagggaggtgggggggtcagccccctgcccggccagccgccccgtccgggaggtgaggggcacctctgcccggctgcccctactgggaagtgaggagcccctctgcccggccacgaccccgtctgggaggtgtgcccagcggctcattggggatgggtcatgatgacaatggcggttttgtggaatagaaaggcgggaagggtggggaaaagattgagaaatcggatggttgccgggtctgtgtggagagaagtagacatgggagacttttcattttgttctgtactaagaaaaattcttctgccttgggatcctgttgatctgtgatcttacccccaaccctgtgctctctgaaacatgtgctgtgtccactcagggttaaatggattaagggcggtgcaagatgtgctttgttaagagtcatcaccactccctaatcttaagtacccagggacacaaacactgcggaaggccgcagggtcctctgcctag

SEQ ID NO: 15315 - DNA, 1336 bp, Artificial sequence
  DNA replication origin
ctggcggggcagaggggctcctcacttcccagtaggggcggctgggcagaggagcccctcacctcctggatggggcggctggccgggcggggggctgacccccccccccacctccctcccggacggggcggctggccgggcagggggctgacccccctcccccctcccggacggggcagctggccgggcggggggctgaccccccccacctccctcccggacggggtggctggccaggtggggggctgacccccccacctccctcccggacggggcggctggccgggtggggggctgacccccccacctccctcctggacggggcaactggccgggcagaggggctcctcacttcccagtaggggcggccgggcagaggagcccctcacctcccagatggggcggctggccgggcggggggctgaccccttaagttagcgcttatgggggctgaccccccccacctccctcccggacggggtggctgccgggcggagacgctcctcacttcccagacggggtggctgccggacggaggggctcctcacttctcagacggggcggctgccgggcggaggggctcctcacttctcagacggggtggttgccaggcagagggtttcctcacttctcagacggggcggccgggcagagacgctcctcacctcccagacagggttgcggccgggcagaggcgctcctcacatcccagacagggcggcggggcagaggtgctccccacatctcagacgatgggcggccgggcagaaacgctcctcacttcctagatgggatggcggcggggaagaggcgctcctcgcttcctagatgggatggcggccgggcagagacgctcctcactttccagactgggcagccaggcagagggctcctcacatcccagacgatgggcggccaggcagagacgctcctcacttcccagacggggtggcggccgggcagaggctgcaatctcggctctttgggaggccaaggcaggcggctgggaggtggttgtagcgagccgagatcacgccactgcactccagcctgggcaccattgagcactgagtgaacgagactccgtctgcaatcccggcaccttgggaggccgaggctggtggatcactcgcggttaggagctggagaccagcccggccaacacagcaaaaccctgtctccaccaaaaaaaaaaacgaaaaccagtcaggtgtggcggcgcgcgcctgcaatcgcaggcactcggcaggctgaggcaggagaatcaggcagggattttgcagtgagccgagatggcagcagtacagtccagctttggctcggcatcagagggaga

SEQ ID NO: 15316 - DNA, 1110 bp, Artificial sequence
  DNA replication origin
acagcacgtgtttcagagagcaccgggttgggggtaaggtcatagatcaacagcatcccaaggcagaagaatctctcttagcacagaacaaaatggagtctcctatgtccacttccctctacacagacacagcaacaatctgatttctctatcttttccccacatctcccccccttttactcgacaaaaccgccatcgtcatcatggcccatcctcaatgagcttttgggtacacctcccagacggggtggcggccgggcagaggggctcctcacttcccagaaggggcggccgggcagaggcgccccccacctcccgggcggggcggctggccgggcgggggctgccccccacctcccggacggggcggctgcccggcggagacgctcctcacttcccagatggggcggctgccgggcggaggggctcctcacttctcagacggggcggctgccgggcagagacgctcctcacctcccagacggggtcacgggccgggcagaggcgctcctcacatcccagacagggtggcggggcagaggcgctccccacatctcagaagatgggtggccgggcagagacgctcctcacttcctagacgggatggtggccgggaagaggcgctcctcacttcccagactgggcggccgggcagaggggctcctcacatcccagacgatgggcggccaggcagagtcgctcctcacttcccagacggggtggcggccgggcagaggctgcaatctcgcactttgggaggccaaggcaggcggctgggaggtggaggttgtagcgagcagagatcacgccactgcactccagcctgggcaacattgagcactgagtgaacaagactccatctgcaatcccggcacctcgggaggctgaggctggcagatcactcgcggttaggagctggagaccagcccggccaacacagcgaaaccccatgtccaccaaaaaaatacgaaaaccagtcaggcgtggcggcgcgcgcctgcaatcacaggcactcagcaggctgaggcaggagaatcaggcagggaggttgcagtgagcagagatggcagcagtacagtccagcttccgctcggcatcagagggagacct

SEQ ID NO: 15317 - DNA, 807 bp, Artificial sequence
  DNA replication origin
ggccgcccatcgtctgggatgtgaggagcccctctgcccggccgcccagtctgggaagtgaggagcgcctcttcccggccaccatcccgtctaggaagtgaggagcgtctctgcccggccacccatcttctgagatgtggggagcgcctctgccccgccaccctgtctgggatgtgaggagcgcctctgcccggcccgtgaccccgtctgggaggtgaggagcgtctctgcccggcagccgccccgtctgagaagtgaggagcccctccgcccggcagccgccccatctgggaagtgaggagcgtctccgccgggcagccgccccgtccgggaggtggggggcagcccccgcccggccagccgccccgcccgggaggtggggggcgcctctgcccggccgccccttctgggaagtgaggagcccctctgcccggccgccaccccgtctgggaggtgtacccaaaagctcattgaggatgggccatgatgacgatggcggttttgtcgagtaaaagggggggagatgtggggaaaagatagagaaatcagattgttgctgtgtctgtgtagagggaagtggacataggagactccattttgttctgtgctaagagagattcttctgccttgggatgctgttgatctatgaccttacccccaacccggtgctctctgaaacacgtgctgtgtccactcagggttaaatggattaagggcggtgcaagatgtgctttgttaaacagatgcttgaaggcagcatgctcgttaagagtcatcaccactccctaatctcaagtacccagggac

SEQ ID NO: 15318 - DNA, 943 bp, Artificial sequence
  DNA replication origin
agatgggtctgtagagaaggaagattagaaagactcagcgacgcttggtgttggtactgaggggacaggcaggagggaaagaaggaagatttgggatgagttgcactgggcacagagactaggaagggactgatgtgtaaaaggatgcctggatgtcaggcacctcagaccgtttgcctattttatgacaagaattacttagatcttgcaggatggaaaaattcaaagtgccattttctggctatttggaactactgtcgagtttgtattggggtcaagcagcattgcagaagaaaataaggcatttaggttttaggtcaggtgtgagttgaagaggttttacgtttttgagaacacaggctaagggagaagaaggaggaatggaggatgcaaggttgcccatagtgaaagaggcaaacccagagaaaagagagcgtagagacatggagggaaggggtttgggggttcttaccctcccgaaaagcaggaaggggggttggggcatggaaataagggattggggcacagagataagaggttggggtgtggaaataagggattggggcacagagataagaggatggggcatggaaataagggattggggcacagagatacgaggttggggcataagggattggggcacagagatgagaggttggggcatggaaataagggattggggcacagagatatgagggggcataagggattggggtgcagagataagaggttggggcatggaaataagggattggggtgcagagatatgaggttggggcgcagaaataagggattgggggttcttgccccctagaaaagcgagacttgctgttaagggtgaaggagaaggggttgaggggtacttgcccctcccccagaaaagcagagaaggggtagagacaaggagagaaggggttggggtacttgccccttccccaga

SEQ ID NO: 15319 - DNA, 1140 bp, Artificial sequence
  DNA replication origin
cctctgccagtgaaggcggggaaggtgaacctgtggccgtcggcagatctgcagatctgccggactgcgggtcggggcgtggcaggggcctagtccccgccccggccgtcagcctgtcgcctctggctcgggccgggcgacgagaccctccctcagcacctgcagtgcagccagagccggtgcggcggccgcgacttccccgacgcggggcgctgagaagcagtgagtgcctgtgtgtacctgccggccgggaatataggacttgtcgcatctcagcccttccctcccggagcgggggcgagaggtcgaggcggggaggcgaaggggcggtgggccgcgagggagaaggagcgatggggtggacgtccttcaaggccggggaacacgcggggctttccaggccgcgggggacggtggcgggtgtcggggcgcggtggcaacgctggagttcccgggtccaccggcgcggtcagccctggtgacccaagccaggggctggggagcaatctgagaccattgcggctgggctgtggggctccccagtcccggcaggtcctggcgccgctgtacatagaaaccgttgccacggcgggaggatgccgtttcttttcggtctccgactgcagggggcggtcggccctgtggatgcaggaaagagggtgcctcggtgggagagacccagcttttcgcgttagtaggcccgagcagtttgaactggaggtattactaagctggctacgaaatatgggaggtggatgtggatcaggatgatggagaaattaaatccagctaggatcgaaggttttcccaattagaaacaaagactgcaaacagaggtggaagagttctaaagtattgtataacttgttttttggaacttgagatggacattcagtagtcttgagaaggtgtatcctacagaaagaaagaaaaaaagagaatccttttttttcaaaaaggattctcagagagacttggtccaaaggtagtgagttctctcacttgattgttcagttatagatccacctcctcgttgtactctttctccccttctcactactgcacttgattagtcaaaaaaaaaaaaaaaagattctcagagaaatgttaaaatgatgttcagaatgaaattcatttgat

SEQ ID NO: 15320 - DNA, 1277 bp, Artificial sequence
  DNA replication origin
tgcaaccaggaatgaatgggagcttgggggctttagtctccaccatcatttcacctggcttagggaggcagtctggggccttgtccagggagaaagagattctctttcagcacaattgatcattggaatgtgctacttcttgactctcctccttacctgtccttatgtgactaaatatactgatttccaaattgattcagtttctttcccagcagggtcatggaaatttttcttcttcgtcgtcttgttgttgttgttgttgttgagacaaggtctcactctgttgtccaggtgggagtgcagtggtgcagtgcgatcaccttgacctcttggactcaagcgatcctcccacctcagcctcctgagtagctgggactacaggtgtgtggcaccatgcctggctaatcttgcttgttaaaatagatttctgagtttcatatcagactaacagactcattttctatggggttggggtgctagaatctagttttccacaagctctccaggtaattcatatcacatgtttgagaaccacagcataagtgtggctggaattggtgggttcttggtctcactgacttcaagaatgaagccgtggacccttgcggtgagtgttacagcttttaaggtggcgcatctggagtttgtcccttctgatggtcagatgtgttcggagtttcttctttctggtgggttcgtggtctcgctggctcaggagtaaagctgcagaccttcgcggtgagtgttacagctcttaagacggcgtgtctggagttgttccttcctcccagtgggcttgtggtctcgctggctcaggagtgaagcagcagaccttcgcggtgagtgttacagctcataaaagcagcgtggacccaaagggtgagcagtagcaagatttactgcaaagagcgaaagaacgaagcttccacagtgtggaaggggaccccagtgggttgccactgctgtcccgggcagcctgcttttagtctcttatctggccccacccacatcctgctgattggtagagccaagtggtctgttttgacagggtgctgattggtgcctttacaatccctgagctagatataaaggttctccatgtccccatcagattagttagatacagagtatcaacacaaaggttctccaaggccccaccagagcagctagatacagagcgtcgattggtgcactcacaaaccctgagctagacacagggtgctgattggtatgtttacaatccctgagctagacataaagactctccacgtccccac

SEQ ID NO: 15321 - DNA, 1119 bp, Artificial sequence
  DNA replication origin
ggtaaggttatagattaacagcatcccaaggcagaagaatttttcttagtacagaacaaaatggagtctcctatatctacttctttctacacagacacagtaacaatctgatctctttcttttccccacatttcccccttttctattcaacaaaaccgccatcgtcatcatggaccgttctcaatgagctgttgggtacacctcccagacagggtggcggccgggcagagggtctcctcacttcccagacagggcggccgggcagaggcgccccccacctcccgaacggggcggctggctgccccccacctccctcccggatggggcggctggcggggcgggggctgccccccacctcctggatggggcggctgccgggcggaaacgctcctcacttcccagaccaggcggctgccgggcggaggggctcctcacttctcagacggggtggcggtcgggcaggcagagacactcctcagatcccagaaggggtcgcggcccggcagaggcgctccccacatctcagacgatgggcggccgggcagagacgctcctcacttcctagacgggatggcggccgggaagaggcgctcctcacttcccagactgggcggccgggcagaggggctcctcacatcccagacgatgggcggccaggcagagatgctcctcacttcccagacggggtggcggcggggcagaggctgcaatctcagcactttgggaggccaaggcaggtggctgcgaggtggaggttgtagcgagccgagatcacgccactgcactccagcctgggcaagattgagacctgggtgagcgacactccgtctgcaatcccggcacctcaggaggcccaggcgggcacatcactcgcggtcaggagctggagaccagccgcgccaacacggcgaaacccagtctccaccaaaaaatacaaaaaccagtcaggcgtggcggtgcgcgcctgcaatcccaggcactcggcaggctgaggcaggagaatcaggcagggaggttgcagtgagccgagatggtggcagtatagtccagcctccgctcggcatcagagggagactgtggaaagtgggagacgaggtggaggtggaggcggaggtggag

SEQ ID NO: 15322 - DNA, 865 bp, Artificial sequence
  DNA replication origin
tctagatagaggaaacatcgtgtgcagaggcccagagatgtgaagccatatgctatgttcaaggatccatgagaagtgtcaggcaccattaaacatgcaaggcagacgatgcatccagaacacggagggccttgaatacagtgctgaaaatgtaggattttaatttgtaaatgaagaggaacatacaaagaggggaaaaaatcagacttgtgtttgagaaaattagcttccatgagagtacagtacccaaaggctggtttgggatgtggttaggatgagtggggtgaggatgacccagggctgtaggagttagtgtcgggaggctgagtagtccaggtgagggaggaggacccgcactgaggcaatgcagtggcatggaggagagggatggcttccgaagctgctcaggaagcagcattgacagaactgcatgcctgacaggatctgagggatgaaggaatcacggaggatgatggaggataactctgacttagaagaagagtaaagaatagaaccatccattgagcttgaggattaagagaaagactagggttgaggaagaggccgataaggtgtggaggcagtgatggcgggaggaagggtggtggtggatgacaaggacgcttcaggacatgttgagtttgaggtgcccgtgaaatatcccaacagagaagtccaagagaaggcagctgaattcttagctctggagagctggtctccagcttataggagggcaatcaggtcacagcaatggataaccacagagggacagagggacagagggcagagtaaggaaggagggagctgagaacagaaccatgggttgcaggtctgcattgtcaaggagagaaaacattacctggaa

SEQ ID NO: 15323 - DNA, 886 bp, Artificial sequence
  DNA replication origin
cctctgcccggccagctgccccatccgggagggaggtgggggggtcagcccccggcccggccagccaccccatccgggagggaggtggggaggtcagcctcccgcccggccagccgccccgtccgggaggtgaggggcgcctctgcctggccgcccctactgggaagtgaggagcccctctgcccggccagccgccccgtccaggagggaggtgggggggtcagccccccacccggccagccgccccatccgggagatgaggggtgcctctgcccggccgcccctactgggaagagaggagcccctctgcccggccagccgccccatccgggagggaggtgggggggtcagccccccgcccggccagccgccccgtcggggaggtgaggggcgcctctgcccggccgcccctactgggaagtgaggagcccctctgcccggccaccaccccgtctgggaggtgtactcaacagctcattgagaacgggccatgatgacaatggcggttttgtggaatagaaaggggggaaagttggggaaaagattgagaaattggatggttgccatgtctgtgtagaaagaggtagacatgggagacttttcattttgttctgtactaagaaaaattcttctgccttaggatcctgttgatctgtgaccttacccccaaccctgtgctctctgaaacatgtgctgtgtccactcagggttgaatggattaagggtggtgcaagatgtgctttgttaaacaaatgcttgaaggcagcatgctcgttaagagtcatcaccactccctaatctcaagtacccagggacacaaacactgcggaaggccgcagggtcctctgcctaggaaaaccagagacctttgttcacttatctgctg

SEQ ID NO: 15324 - DNA, 1089 bp, Artificial sequence
  DNA replication origin
ccgggcagaggggctcctcacttcccagtaggggcggccaggcagaggcgcccctcacctcccggacggggcggctggccgggcgggaggctgacctccccacctccctcccggatggggtggctggccgggccgggggctgacccccccacctccctcccggatggggcagctggccgggcagaggggctcctctcttcccagtaggggcggccgggcagaggcgcccctcacctcccggatggggcggctggccgggcggggagctgacccccccacatccttcccggacagggcggctggccgggcagaggggctcctcacttcccagtaggggcggccgggcagaggcgcccctcacctcccggaccggggcggctggccgggcggggggctgacccccacctccctcccagacggggtggctgccgggtggagacgctcctcacttcccagacggagcggctgccaggcggaggggctcctcacttctcagacggtgcggctgccgggcggaggggctcctcacttctcagacggggcggctgccaggcggaggggctcctcacttctcagacggggcggttgccaggcagagggtctcctcacctctcagacggggcggccaggcagagacactcctcacatcccagacggggcggcagggcagaggcgctccccacatctcagacgatgggcggcctggcagagacgcccctcacttcctagatgggacggcggccgggcagagacgctcctcaccttccagactgggcagccaggcagagaggctcctcacatcccagacgatgggcggccaggcagagacgctcctcacttcccagacggggtggcggccgggcagaggctgcaatctcggcactttggggggccaaggcaggcagctgggaggtggaggttgtagcgagccgagatcatgccactgcactccagcctgggcaccattgagcactgagtgaacgcgactccgtctgccatcccggcacctcgggaggccaaggctggcggatcactcgcggttaggagctggagaccagcccggccaacacagcgaaaaccaatggttgt

SEQ ID NO: 15325 - DNA, 2019 bp, Artificial sequence
  DNA replication origin
tccgcatcgacgccccggcgccgatcggtgctcgctcccccgtcctgcccccgggggtgggtagggcgcccacacgcgagatccctggggatctccctgtcgccggctcccgaaggtggacgaggcatggccggggcgccgccggccgcgatccatccccacccttgtctctgcgggcttccaccccctccctcgccgcccttctcgcttccgcccgagataatgactcggcggcggcggcggcgggcatcgcagtggcgcaggtgaggccgccccctcccctctccctcggccgccccctcctttccctccccctcgcgcagcctccgcgctgggcgctgcggcggcgggacccggccctcccccaccccgggaggcggtggcgcggcggggaggggccgggggcctcggggacccaagcgcgagggaaaggcctggccgagagcgggccggagcccaggcctggcgcggcggcgcccgccaggtagaccggggcgaggctgcgcgccggcgggaggggagtccactgcggggtgaggttttggggtggggctcgcctgggacctagagctgaatttcctgggctccgcggtgggaggaaggacttgaattttcctggtgggggtgggggatgggtctgactttttttgctccttgtgaacgggcgggggaggtgtggacgggggctgcaagtccaggtcggggtagagaacagggtggtgagcccgcagtcggctcccgtgcttgatggactagaactggagggtccctgcgctcggtttggggacgcatatcctgctttgggggcgggtgagcctgagcatagccgctggtggcccgctcggctgggtgtggctctcgtcccctcccccacctgcagctgtcggtcccttagagacgctgtacacggtcaccggcgctgatcggtggcggggaaggcgctgggtgggagagcggggtgtgtccgcggcggggctggtagtggttccgcttctgcgggctgctgtggcgtctctgccccggggtcgggcggcttcgctccccatctctcccccccccccacggcttgggcgggggcgcgggctgctcctccctctggctccggtcggggggaggaattaacactctgcagtaggttgggctccctgacacagatccgccatgacaaaggaggagagtcggggacttgagccgtggctccgacttgggcggagcctggaggggggtggttgcgatacgcggaccggagaatttgcactttaaagtccgggtctgcccgttttcgtttcacagtaaccgacgtctcaagtcaggtaagggttaaatgggtgcggtgagtcctgcccgcagtgtagaggcgaggccttggagcactcgttactgtgtgagaaaccttatccacttcctcttgtaccgaagtgattggggagagaatcctttgtactggcttaaatcattttttgttagaagcagaaataaccagagagcgtttctgagatcctaagggaaaaatcagtaatttagagacctgacgaaaataatgccgtcataaaggttaaatagtttacgtattgagccagtaccttgcatccaaagtggttaattatttgtttaaaatgtggcgacctgttctctcatttggttaaaaaaatattgtgggatttccctgggaaggtaaaagatgattaatattcgggagccagctgccaaggtggactcttctgttcaccttctaacttaaaagtgcacttcattcagggtgtgtattttcctctgaagtcatttattctgtggtgtcactgtgtggattagtatctttgtgctgttcggcaacttgcaaaagggtatctttccagaaaaatgtagctgaggtaaatcgaaaaggtccaggaaactaaaatgcgagggaaagagaattagatgggtagtcatggtaaaggacagcttgagtggtaacatccaattacattatgatggctagaagcaaaatgcagcacttctgcatttcaactggagcga

SEQ ID NO: 15326 - DNA, 1185 bp, Artificial sequence
  DNA replication origin
agcggccgcgcctccttccaggcctcacctcctgccggctccgcccggcccggcccacctcgcccccacctcggcgcccacccattgtcccctcgcgcagtcaccgagcgcagatcccgcgctctcgattggaacgcctccccatcactcagccacactcaggggctggacgcctcactcccgtttccgagccataaaaggtctaggaccgcttcccccgagccagcaggtaaagccgcggcggcgggagggaggccgggaggggccgcgcgccccggtcggcccagccggggaaggggagcggcgggcggggcggggggcagcgcaccacacacaaccctcccttgccgtgcgaccgcgccctgcccccgccccggggcccccgccccgcaagtcctgatcacaatgccggagccgccgagccacccttgtcatcctgcccggggacggccctggggcagttactaccgcgaagcacggagggtggggcgggccgggcctcggggaggggtggggggatgtgaaaggtcccggatgttgctgaacgggagccccttccagagggagtgactggggcaagcgcagacgggctgagcgaaagctaaggtgggggtagggagagaacgccttcccgccggctgagaggaagagtgggccggcagaggctgcaggggagagggagagagagggcgttggggacccaaagggaaggcgaggagtgggggatttgcgttggggaggaaaaggaaaaaagcagcctcctgccctaggtgcactcgggacaagcgtagaggagctggaagccgagcggggtgggaggagtggcggctgcgggcgaggacgcgcgcgcctccgctcgccctccagcgcgggcgggcaggacgagcgccggggagcggcggttacgcggggccccgatcgctgtgggcaccaatcaacggttgccatagcagcgtttgacgtcatcgtgcgtgtggtgcccctgctgccggggctggtgattggaggaaaccccgtgtctgcggagcggctgtagcctgtgagcagcgagatccagggacagagtctcagcctcgccgctgctgccgccgccgccgcccagagactgctgagcccgtccgtccgccgccaccacccactccggacacaggtgaggaacccggccgccgccgcgcctcgcttcct

SEQ ID NO: 15327 - DNA, 1500 bp, Artificial sequence
  DNA replication origin
cccactcctcgccttccctttgggtccccaacgccctctctctccctctcccctgcagcctctgccggcccactcttcctctcagccggcgggaaggcgttctctccctacccccaccttagctttcgctcagcccgtctgcgcttgccccagtcactccctctggaaggggctcccgttcagcaacatccgggacctttcacatccccccacccctccccgaggcccggcccgccccaccctccgtgcttcgcggtagtaactgccccagggccgtccccgggcaggatgacaagggtggctcggcggctccggcattgtgatcaggacttgcggggcgggggccccggggcgggggcagggcgcggtcgcacggcaagggagggttgtgtgtggtgcgctgccccccgccccgcccgccgctccccttccccggctgggccgaccggggcgcgcggcccctcccggcctccctcccgccgccgcggctttacctgctggctcgggggaagcggtcctagaccttttatggctcggaaacgggagtgaggcgtccagcccctgagtgtggctgagtgatggggaggcgttccaatcgagagcgcgggatctgcgctcggtgactgcgcgaggggacaatgggtgggcgccgaggtgggggcgaggtgggccgggccgggcggagccggcaggaggtgaggcctggaaggaggcgcggccgctttagggaagccagagttccgaggggaaaggacagccttctcgggcggagggctggagctggtcctggcagccttgacccggagacaggcagtcaggcgtgaccgcacggacccgtttctcgtaggctaggttttcctacccaaataaagctttcacgtgaagacctcatactgcacatgacgatcattacctttttatctcctagaagcaaggtttgagggacgtcgtagtccccagggttccagctggcggtgggagtgggccacaggccgggtgatgagccgggacgggagcccggaagaaggggaaggagaaaggcggaaattgcaggtgcctgaaccggtagggcctccgcccagttgacttcaggaagttcagagagaaacattcacagtgtgaatgatctctgccccttccctctttaaatgtgttcgggctaagaaaagattagtgcttggatgacctgcaaaaccacttgcaacagccatggagagtgtacggttagcaatgagagagcttggaactcttcattttactcttgtgtaaactccccattgattcttccaacgtatctttattgagctgaccagagcctccgtttagcctcatgttctctacagaatttagtttctcagtagtagacacgaaatgattgagtcctcgctcttccagtacattgtctttcctacataatacagtggaccacaaggctgctctacaaattactttttgcctgacatgacagctggcatttagatagtacagaccagaaagagg

SEQ ID NO: 15328 - DNA, 1821 bp, Artificial sequence
  DNA replication origin
tgtagaatagaagccaccttcccctggcttttgtccctgccaccgcatcggactcgccagcttcaggaaggggcctcatccttccgggcggggccgtatggccgccctcgggctctgcagccgtgactcagctcgggaaggttggcgctcaggcctggagcccggggctgtgcgggcaccaaacaaagcagcgctcgcacgcgccctcccagggccgcgccacacctgcggggccgccttgctcgtttccctccaggagccgcgctggctgttgcggggcaggctgggcccgctgctgctgcagttggctccgcggccgcccctagccgcccccagccgcccccgcccggtgagtcacccgctcccggccgcgccgccgcccggcccgctctcacgcctccgagcctgcgcgcaccgctcgccgagccaggttccctcggcaaggggcgctcgatacgggcggggatccccagaggccgcggccttccttggctgccagacagacagcgttcccaaggaggaaacccctgcccctccgtcccgtcgcgcgcacgggcggaaaggacacccaaactgtcaccgtcctgtcactgtgtctccccgcctccctgatgctggtcacaccctcctgcgctggctctgtctcgggagggggtggcaagtcgctggtggccacctccccccactgccttcaggatttccccttctcgggctgcctaacgcttctcagaggtggctgtccattagaatcattgggagctgtaaaaattcctgatgcccagaccaatgaactcagagccacgggggtggagcccgggcaccacttgcattttgtgaagttccccaggtgactccactgttcagccagagtggcgaactacggacccagacctaggcttcccaaactctgatgggtttgaaatcccctgggatcttgttaaaatgcaggcctccattcagtaggtctagggaggggcctgagagtgcgtatttctaacaagctccccggtgatgctaccgctgctgggctgaaggtgacatttggagccactcaacacccgctggccctttacctctcctcttgtgtggaaatagagagggcgtgggcgctgcagcagatggacaggggtttgaatcccccctctgccactcgctagttaggcggaattgggcacagctctttgtgtataaaatggggtgggggtggggagcaacactcactgcacgtttctagtgaggaggaggcgagatcttgcctggaagattcctggtgccctgagtccttggtgaaggtcagctgtattggatgctttcgctctctagtggccctcttggctgagttggccagggaatgacagaagcagaggaaggaaccttccaggccccctcctttcccctctcataggaaaactaggctgaaaaccatcacactccactgcctccccgggggctggaagggaagggcagtattgctgtgtgtgggagcagagggatgggggaccaagagccctgagcgtccctgaggaggttagtgggattctgggggggcctgaagcctggagaaaacaggtctcctggggcagacgctgagggttacagggggacctggcagatgctaagagccacagaaggccagagagtaggaggccacctggtcaggaccacagtggacacaaggaaaaggggtggaagtaggagaggggactgacagtgtgtgaggagtctcagttcctcctcggaaatgttgtagcagagcattaattgtaccgatttcctggaagccatctgaggctgagtctcacccctcctgctcactagttg

SEQ ID NO: 15329 - DNA, 1464 bp, Artificial sequence
  DNA replication origin
gcggcgtgcgcgggcacgaggcgtagtggtctcccctaaggctgaggcggcggcgggcgcgcggcggcggcgggcgtgcgaggctgttgtgctcccggctctcgtgtttcccctcctgagcgggtggaggaggcccaagcggtgctgggcgcgctcccccttcctttccctccggcgtcctctcccggccctctcgcgctgcactgtctctccgacgcaagactgtcccggcccgggtgagcggcagcgggggcggtgctgacgccgcgggacgcccgggaaacggggcgggggccggccagcggggggcggtggggaccgtgggactcgccgcgggtcgcgaggggtcgcggggggcggcagggcccggcccggggcgggccgcgggaaggggatgagttcgggcgcctgccaggccctgcaggtggccgggtcgcaggccagccgcggaagcggagcggtaaccttacccccggcgacagccgccggtcagctgccagagtgtggcgctcccggtggacgcaggggccgggtttcgggcagtctcggcctccaggaggcgcgtcttggtccagggtccgtgaggactggctagatgggggctgcgtggcctttggtggcagggaggaggagggggtctccgaggcgggagaggcgggtttgggaaggaaggtgcgccaggctgaagctggggtcggagaagtgttgggtggagacctcactgtgggtgcgttcctcctctcctctccccaaaacgatggtgttaaaagctagggtcaggatgtggagcgctgcctgggcctcttcctttccgatggttatggagaatgagcctacttcctggacccaaaatccttttcttctgttactcatttatgttggttttaaaaggagctttggggcagagcttacttgttgcctcctacgagagcgcctcattttagaactcgtttcttccactacttccctctttgcagccccctcggaaaaccacactgagagttgcattaaaaaccagcatgtaggtatttgtaagtgactttttccctccagtttgtcgcatttaatcaaggagcggttgtagctgcctacgattttgtagaaaattgtgttggcttgagagcaagtcctaagttgagctgtccaaaagcaggtggttggttcgtttgaatttctgctttcagaaaggaaatcgatggggcgtgttgtcagaagttaggggcctacctcatgcatttagcttattttattccatttcctttacctggtgttaagttttctgtcttcagaataagaacaagtgactactgtctttattaagtctcttcggtctttttggttgctgtttggtgacaatggaaaatgggttgaatctattgtgtaatgttatattttagggaaagtcctaagtgcaaaagttaaaaataattttgtgtgtctaatgacattgctttgtacgagtca

SEQ ID NO: 15330 - DNA, 1376 bp, Artificial sequence
  DNA replication origin
cccagcgagcccggcggacccagcggctctgaacgcggacgcacagcctttgttctttcacagccgccctttacctcactcccatggaaaccccaggtgttttcccaagctgggggcttttagtgagttcaagattcaagcctaagtcgtattaaaaattgctggctaggccgggcgcggtggctcacgcctgtaatctcagcgctttgggagcccaaggcaggaggatcacttgagcccaggagttccagaccagcctgagtacatagcgagacccacgtctccacaaaaataaaataaaataaaataaatagtggagcatggtggcccgcgcctgtagtcccagctactcgggaggctgaggtgggagaatcgcttgaggccgggaggtgaaggttgcggtaagccgagatcgcgccattgcactccatcctgggcgactgagtgagaccctgcctaaaaaaaaaaaaaaacaaaaaaagaaaaaaaaattgctggccaggcttcccggaggggtttagtttgactgctaacaatatacggtactgagttgctaatccttcggggaatggttaaagttctttgcgcgcgctctctctccatttacaggcagtggcagcaaactttcaatatctgacaagagcaatggcgattataaccatgattaaaattgctgaatatctggaaacagtactttagacatcagctttattgtgcatacttacccccgacccccgccacattcgtttctaattagaactactagtgacaaaggagaaaaaaaaaaagtgtttgcattggctgttctcaccttgcctgtagtgccgtttcccaagtttgcgtggcagtgcccaggaaatgttggctgaatattagtatatcccaaatgacttggactgggctatagataccacagaattgtttaaactagccaggaaggagttagctgcctattgcatttgagtggagaaaaatacgaaatgaaacatggcatgcagtgatccgggtgttcagttctccctcttcatcctcatttcagcttctctcaccttcactttttatgctctgacttccttcttgcagttttaaattactctctagtcctagattgtaagattattttcatcagggaatacgcagtatgttaaacatagtagacgttgaataaatggatattgatcaaatgaaccgagtatgtctgaagaaagcagcttttaaattgacatagcatgaagctctagcttagtcactaatagtcactgtaaccttaatggttgtgttaatctggctgatagagggatgggtacttgttggccctagaaatgggaacttcaaagatctgtgtttatctagccgtgaatgacagtagacagtgg

SEQ ID NO: 15331 - DNA, 1212 bp, Artificial sequence
  DNA replication origin
tgaaactggactttcaagtctgtgcaggtgaaggtgtgtgagagcgcccgagatggcagaacaagagctacaggtaattctgcttttccgtcccccctcaccactctcgctcgctcgcccgctcgcgccctcacctagccggaaaggtgggataagggggggcccctcacatggggcccgagctcggaggcggccgggcggcgcggagtcctcctggatcgtggcaatgggcagacacagagcagaaagtggcggacttgggcggccacaggtaactttctcgcaaggagctgaattctttcactaaagggtacaagcccgagggacgagctgcgcgatgattggctggggagctccctcaggtgagctgccattggcagaggcgcgctcaggtaaggcccttctccgagtgcaggtaactcactccgaagtttacccgagtggagcggcggcatgcttgcagctcggcggcagcctgtgagagctgagggtcagttcttcgagtagatctcaagctgcgttttcctccttctccaaagcagggatgggaaggtggaggctactggttgaagagaagaaaggggttgggggaatgcaacacctgcaaacactagggattgtgggtcgagcggaagagctaatgagagccgagctcaggtatcccaagtcaaccagaatcaaatgcgcagtacgccacaaggcatttaatgcccacagtaacagggctgtttgacagtggcagaagaggacgggactaaagttactttgtgctgagagggggaaagaagcacaaagtttggtctgttgcgtaattgaatttttaacactcttatccacaacaaacactttttcgtgtcctgctgtgtaaaagacatcagatatattacagattttcaaacaggtgagcatccttttacgagctgggcaggtggggagtggcgtggttttgatggagtgaggagatttggttgaatgaacgctaagatggccagacgcacctcttcgatctcaactctgcagcctgggattccagagctgcaaacaaccactgaattcgttctgtaaacctgttgtcatttgacgtttccaggcaggcatcaacatttacattgtaattcaatagacgctactactacaaaggagctttattcttccagcttaatatggttgctgcgggaacactgcaggatgaaactgactttttttgtggta

SEQ ID NO: 15332 - DNA, 1207 bp, Artificial sequence
  DNA replication origin
ttgcaggtgttgcattcccccaacccctttcttctcttcaaccagtagcctccaccttcccatccctgctttggagaaggaggaaaacgcagcttgagatctactcgaagaactgaccctcagctctcacaggctgccgccgagctgcaagcatgccgccgctccactcgggtaaacttcggagtgagttacctgcactcggagaagggccttacctgagcgcgcctctgccaatggcagctcacctgagggagctccccagccaatcatcgcgcagctcgtccctcgggcttgtaccctttagtgaaagaattcagctccttgcgagaaagttacctgtggccgcccaagtccgccactttctgctctgtgtctgcccattgccacgatccaggaggactccgcgccgcccggccgcctccgagctcgggccccatgtgaggggcccccccttatcccacctttccggctaggtgagggcgcgagcgggcgagcgagcgagagtggtgaggggggacggaaaagcagaattacctgtagctcttgttctgccatctcgggcgctctcacacaccttcacctgcacagacttgaaagtccagtttcaccagaggctgaggctccaggaaaagcggagcaagttcattggatcaaacatgtcacaagagtcggacaagtaagtggatcacacgcgccggctgctgctactactaccactttgggctgatggcaactggtttgttatgtttttgtttttaagttgctattgttggtatttttctttcttttttctttttctttttggtggatccagacttttccgcattatgtttctaccctgattaaggggagaaaccctacaacaatgtgaatatttaatatcccctttgggccttgatagtaaaagtgggttttccttttccttcttcccttaggaatggtctcagctcccgctcctggatgaatacttggatattgccagaggttttggtagatgggcgcgggaggcctgctcttccctctctgttttagctgctcccaccgatctggcgtttagggccatttggaagttcagctgagttccttcgatttgtccaaagggcctactggaaaagtggggcttggccgcttttgtgtgaccgcaacaaagagcttttatatgaggcagaaacggccatcttctcgcaccgggcaggagggtgggcgt

SEQ ID NO: 15333 - DNA, 1374 bp, Artificial sequence
  DNA replication origin
tcaggtgcccggggggaaaggacggttcgcgaactgggggaactcatgtgaggcctcgagttagggcctcggcggggcgcgaaggggcgcctgccactgagcgattcacccgcgcccccgacggcgtctgcacgcccctcgagctcgcggccctccacgcagttggccgccacctcggacgcggcaggcgggactgcgtggggcgcgccgagccttctcggggtgctctcgccgtcaaggccgagggctcggggcggcgggaacgctgggctcgcgtccttcccgtcccggacaggcactccagacgcgtcggggagccacagcctgcgcggccggagccgcccgcgggtcactgggcccggtccggccgcgtcctgacggcctcccccctggccggcccccgccctcggaaggctttgtgcgagccgggggaggtggggcctgggcgggcgcgggagggagccggaggtgggtcccgcggcctttctcgggattcggcggggacactcccttccccctcctctcgggcgcgtccgggcctgggaactggctgcgtcctattggaagtgcgcggggccgcccttttgctttccccggtaactttgccgtggcgttgcggccaccccgaggggaccttcctgaaggtgtctcgccggagagggccggtgccccaaggccgcgggccgctgggcctgtcatggagaagtggcggggacccgtcccaagttgagggaccacgagggaggagtgggaaggccctgcggacctgttcaggggtggaggggaaggactagcctcaacataaagccgctggcaggttaggcgaacctaagaaaatgcgctgtcatacttaaaaagcaaaaaactgccagatagttgtaccccgttagccaccgatgaggaattaaccgagtacagcataccggaggggaagaactagcgttaccaacacgggagcgggtcagaggcagggtaggaagaggagagtgtgtggttgtctgagaacacccccagctcctccccatatctctctagtcttcaaggaaacacgactcgagtttgaaattttcagtagccaaatccggaggcgacagcaagtttttggggtttgttttgatctttgcctgcgtcaaagatgattgcaaatctaatttaattaatcgcgcaattaacatttagtttgcttagttttgtgatacaacagaactcgaattctgaatgaaaacgggtcggtctttattttcaccagttatacttagcagcaataagaacaatgtgtttaccatcagaaataagtactgagcgcccgcaatctggtttcaccacacgcatcacctggtttttacaggtgataagtatctgggattacatatg

SEQ ID NO: 15334 - DNA, 960 bp, Artificial sequence
  DNA replication origin
acttgggaagggtgtgctggggagatgtgtttgagtgtttttcagtgcataccgatttatttttagctcccagagaagcaggatgtgcaaagtgggttgtatcagcccgggaggggcaggaggtctccctgtccgcaggaaatacacaagttttttttttttttttctaatgctgcagatgcttgctttaacttttgtgcatggagaaagaatgccatttggctctgcagagctcctgccagggtcagtttcttcctgcgggtctgtcggaggccgcaggcgaggcggctggtgtgctgctgtgcttacacgctagccccgcaagaaggtctatgttctgttccgtagggcagctacggtgaaacacagaagtaggcagccaaggtctcactctctcagaaggaaaccacacaagctcgctcaaagttttcctacttctggctgatttgaaaataacagacctaagccactgtattaccaagagcagagtttgctgtcaggggtttctcagacctaagtggaaatgcttgtgaggtttttcactccaattgggagatccccgtgttttatggccaaaggccttgatgcagactacaaaggagagggggtgtggtgtgatggtgggagtgtgggtacttgcggtagcggggcaaggacagatctggggaggaggctcaagaaactgaaattcacatgtttacctacccaagccagatctctggaaattgtcctggagtctcccctgtctcaaccattcagtgtccagtcctgtagaccctctgtctgtaactgtattaggagagttgccaatatggacattaggagtgtgggctctgcagccagacagccgggtttgagctgtggctcattcgtcaatagctcctggatcttggggtccttacttaacctctactgtgttttctgatgtgaggcatgaggttgataatagataacaaagct

SEQ ID NO: 15335 - DNA, 767 bp, Artificial sequence
  DNA replication origin
cgaggcggtgagtcgcagcgccttccctccgcttctcgggagccagagcggagtcggagttgcagccggggcgggtgtgccgggggcggctgctgggggggacccgtgcgctcggtgcgccgcgggcgcaggggtgggttcgaggagcgcgcggttctgggaacctggttccagcagctccctcctgggtgcagttcaccctgtcaattcctctgtcattcccccagtgcctctgagggaaaacaaaacaaaattacagaccttgagggtgggcggcagaaaaggagagagcaactttgcagagggccgcgcagaggcgcgtggggccggcgggatggggcgcgctgggcagaagggggcgttggtgagcctggcggcccggggacctctggagcatcccgccccgggggccggggccggggccgggggccggggcacccgctggatcccgggcctgcggagtctgcccggaaaggccacaggaggcgagtgcggggcgtgggcgtctggggagggggccaagggagaggccgaaaggcgctggttgaacacggacgaggaagtggtctgcattttggactcaggacctgaaagattcgtgtcccttgcgctcgaggacttgggaagggtgtgctggggagatgtgtttgagtgtttttcagtgcataccgatttatttttagctcccagagaagcaggatgtgcaaagtgggttgtatcagcccgggaggggcaggaggtctccctgtccgcaggaaatacacaag

SEQ ID NO: 15336 - DNA, 2004 bp, Artificial sequence
  DNA replication origin
agccgcccctctcctcccccggccgcccctctcccaacgcccgtctgccgctggccggcggcgcgcccctggtcccggccgcctgcctcgcactccgcgctgtcgccgggggagcgggtggcgtgtggattcgccctcctgcccgcccctccgggccgcggacacacgcccggcagggaggcggcggcggcccctgcgtatttgcttccctccatttggggactgggaggcggcggcggctgtgggttttggggaggggtagagggctggggggcgggcgagagcgggagggggccgccctcgagtggaggacgagaaggaaagcaccatgacgtccatccatttcgtggttcacccgctgccgggcaccgaggaccagctcaatgacaggtaatagggctggcgggtcggcgggcgcggggggaggggcgcccttccctccctcccctcccccacgggccgtgccgggcgggtgcgggtgtttacgcgccggccggccagctggggtggggtgcgggggtccttactgcctcctgctaggctccttccggggcaaacttctcatcccgggggcagggggccgcggggggagcgcggtgtagacgggactcgcggtgtagactggagagcgctctgtaaacccccttccccctcccgcaaggagcggcgttgaactcggcggagatgggggggtggtttctggctcccggggggcaggcggtaattactgcccggccaaggcccgaggaatccatattagtcaaagttgaattgagacagacaatgcggatgggggatggtggaggtaaaaagagagggaagaggagaagcggggccaggggccccggggtgggctgggctgggcttgtcccgggcccccggcagctgtgtccggtggggtggtctggacctggggatcccggggtcgggttggggagagaagccgattcccggcagattgctgggagcgggcggggggtggggggaaggtgatagttgggggagggagtgagggaggaagcgccatgattattgttattattattaaatttgagcccctgcagtgaggtttgcctgccccgggaggggatggattcaagcgggggtggggaagtgcattggattccctttactctcctcctgaaatggtgctggcagctcctgctactagcccctgtggtgcgagcttttttgtttccttttctattctaatgatagtgttttcctgagttgtaatttgacagctgaaaaccgtgcgtagagtgtcaaaggaaaactcttacgtttgcagttcgcaatgctgcttttcttaacacgctgtaaatttctgggttgggtttgctatgggcggaggatgaattatgattttattttatgttttgtcttttataggctgttttggtttggatttctccttttcttccgccaccgttccttgccagtttaggatattgaattgcagtgccgcatgctctcagggaactgagataaggcaggaaaagttccttcactgttggaaaacagactcaggaggttgagggaggcctccattaaagcatgtcttagaatctaagactcagatctaatgatgggctaaatgtttacaggatcacaaagtggagcattttaagtcttcctctctcccagtacttcactgctctctacatttcttttgcgtatagaaggccatctggtcccaagtttagaagttacatagaatttttgctaagtgaccgggtgacttaagttgcatgatgccctgtttgtcatgcgcttcccagagggaggaagaggcctaacttgctgctgagatactggcctcttgtgtcagtgtatctaaccgcctcaagtggagcagacagcttttaaatccagagctggcggtttagtttctgcacttggttcggatttgcctaatctttgctgtagccatattgtatttaacatgtttgggaatcttttgaaatacttactgaaaatactaactactcagagttgtcacat

SEQ ID NO: 15337 - DNA, 1056 bp, Artificial sequence
  DNA replication origin
aaatggagggaagcaaatacgcaggggccgccgccgcctccctgccgggcgtgtgtccgcggcccggaggggcgggcaggagggcgaatccacacgccacccgctcccccggcgacagcgcggagtgcgaggcaggcggccgggaccaggggcgcgccgccggccagcggcagacgggcgttgggagaggggcggccgggggaggagaggggcggctgctggctgcgggctacggggacggtctggtcccggcggcggacggggtccggactaggggaggtgaggaaggaggggaaggagatgagcccgcaccgcgcgtcactagcgagaagctgccgccgccatcttcacttctgccccagtttctccgtctcgcaggctccgctccggagcggcgggggaggggcaaacgggaggaggaggagggaggagaccggcgggcgggggcgcggcggcgagaggcggggctccgggaaacgggcggcaaggccccctcgattgggctgctcaacgttgtcgggccacgacgctgtaaggcgcgtgccgattggtccgttcggctcccgagcccagccccgccgggggtgggatgtctccagagtgagtgttccggagagcacgtgttagggaaggaggaggctgcgggctaacctgccgggagggagggtaagtgtgtgtcccagaggaggcgaggaggaagaggggctcttgtgttctttcgctcggattcccctggggcagccctaattatttggcggatccttaggggtttcttgttgcttctcatccttcatccgcagttgtatttatggtgaagttggtaaaatcagttaaggggcaagacatatacagccttttattggaaaagtaaggaaattatgtaagggcctttccagaaggagatagtaggatcctggagttggctttgcagcaacttctattacctcggtctccccagtttcctcaccaccatcacatgcccaaagacaaaatgtggaaatttccactaatttcctgatataaatgattcgtgattttttattacttttaaatgaa

SEQ ID NO: 15338 - DNA, 994 bp, Artificial sequence
  DNA replication origin
agacagcgccagcccctttagggtggggcagggagtgaacgcgtcgggaggaggcttaggccgggccctccaggagggggcatctgggcacagctaggcagactgggtcaggactaaaagagtttccaagcaaaaggctgcgaaagcagagaagcctgggtgtctgtggcagggacggcagggcggggctgctggggcagtggctgagagacgggaagaggtggcaccagagggggaccttggaggatgggcaggatttgccaggcacatggggggtgagaggagagaacagctgaaaaaacctgagccagaaataagagcaaccgggcatactgggcgatggggagatgttcctgtacccagagtttacaagagtacaggagaaaatgcagggagggtaaactgtacctgcacagcaaggagttcagatcttccaccatagcaaacccagtcaaaggtttttgaacagggagtaatgtgaaccgagttataatttttaaatgtcttttggagagctgtgggtaaggatgtactagaagaagaaagctggctgtagagaccaggacggaggctttcacagcagctcaagtgttgggaagaatgagcgggaggaaatgtgcaggagggcttagatggtcattcattccatgttggagaacagagggcagggagtgggcgctgaagacgcaacatttggggactgcatgacgaggaggttggtggtatccctctaaaggacagggaaggcagagggaagtagggggaagtgtgcatgctgatctgcgagtgaagtccaggacgcagttagactagatacttgggagtcactgtgtgtagggcagagctaaagccacgagataaggcaagatggacaaagaccaccgcatggaggaagaagagaggaaggccgggagaagactgttcgtggcccccaggacccattctcccaccttcatgttagtgataagtctccctagtttgaaataggcacatg

SEQ ID NO: 15339 - DNA, 842 bp, Artificial sequence
  DNA replication origin
ttggggcgggggtctgcatcctgggttctttgaaatcatgcacatgtgctgcctggaagagcttcccaactggaagatctagagaaggatctcagtgggtcagacctttggattatttttaaaccctggatcgggttccagacagcatttaccctgcagtctgaacagctccggaaagcagacgggggtgctggcaggagcgggtgtgggagggcgcggcagctgactccaggtcacgctgacatcggagcgcagccaagagcagggccggggcgaagtgcaaaaccgcagggcagtgaactgcagtctctgccctgcgcgcagagccctccacgctgtcccgtggcccctgcagaagtttcccgctttaataagaaaggcatcctagggttagatttgcggcaacaccgagaggcattgagccccttctaggacggagagacagcgccagcccctttagggtggggcagggagtgaacgcgtcgggaggaggcttaggccgggccctccaggagggggcatctgggcacagctaggcagactgggtcaggactaaaagagtttccaagcaaaaggctgcgaaagcagagaagcctgggtgtctgtggcagggacggcagggcggggctgctggggcagtggctgagagacgggaagaggtggcaccagagggggaccttggaggatgggcaggatttgccaggcacatggggggtgagaggagagaacagctgaaaaaacctgagccagaaataagagcaaccgggcatactgggcgatggggagatgttcctgtacccagagtttacaagagtacaggagaaaatgcagggagggtaaac

SEQ ID NO: 15340 - DNA, 1646 bp, Artificial sequence
  DNA replication origin
gcaatgagccctgatggcaccactgcactctggcctgggtgatagattgagatcctgtctcaaaaaaattaaaaaaaaaaggaaaaggaaggaaggaaggagaaatggagggagggaggaacgaaggaaagaaagggagaaaggaaagagggaagggaggaaggagggaaggagggaggaaggaatgaaggaaggaaggagggagggaccgaatgaagggaggaaggaaggaatgaaggaaggaaggaaggagaaggaagcaaggagggaaagggggagggaaggaaagaagggagggaggaaggaagggagggagggagagaaggaaagaggaaggagagaagggagggagggaggaaagagggaagggaggaagggagggagggaggaaagagggaagggaggaagggaggaagggagggagggaggaaagagggaagggaggaagggaggaagggaaggagggagggaggaaggaaggaaggaaaggaaggaaaaaaatactgctattggtgtattatgatggaataatatagactgacatgttgaccaatgctatgatccttcccaaaattcatatgttaaagtcctaaccccagtacctcagaatgcgactgtatttagaaataggattcaaaagagttaactaagggtaaatgagttcactggaacaggctctaattcaatatgactggtattgttaaaagaagagatcagggcacagacacaggaggaaaatcatgtgaagacacagggagaagatggccacccacaaggcaaggagagaggcctcaggagaaaccaatcctgctgacatcttgatctcggccttctagcctctggaagtgtgaggaaataaatttctgttgtttaacctacccagtcagcggttctttgttatggcagccctagcaaactaatacaaccagtataccagacactcttctattttaaaaaaaggtaatcaaagcttagaagtttcaatactattgtcccaattcgtagaaatctctggaatctatatgttcattgttcctctgtcttgccacttcccaaaatatattgtccaattaaagagctaaagtcagcatggaaactggactaaactgaacattgtctttatttcagggctttggggtcttactgcctactctgtagaaatacttcactgcttttaatatccattgctaagtctgtgttagcaaattatcccaaaatgtagtggcttaagataattatatacatttgttatctatcacagtttctgtaggtcaagaatcggggatggcttagctacattgttctggctcagggttgtcagaggttacagtcaagatatcagctagggttgccgtcatctgaaggcttgattgaggctggaagatctacttccaagtagctctctcacttggttggcatcgtggtgctagctgttggcaaaaggtgtagttctcagcatgtagacctccgcatagacctgcttgtgcatcctcacaacatgacaactggcttccctcagagtgagtgatccaagacggatcatgctggaaacaataatatcttttatgaggagtcttggaaattacacaccatcgtttctacaccatcctactggttatatagatcaactctagtcaaaatgagca

SEQ ID NO: 15341 - DNA, 1115 bp, Artificial sequence
  DNA replication origin
gggctgcacgtctgggaacccgtggagacgcgcggcgggaggggcctggagctgccggaagccacggggagggggcgccgcgtctacagggagagacggggtggtctgaggtcccgtgggccgcgtgggcgggaagtgccgagggctcggccgggttcccgggggctgccggcgggaggagggcggcggccgggtttccgcggggacctggctcctcctcccgcatctgaggcggaggccgggggtgggccgggagcgggtgcgcccggggagcttctcgtccccgagtgacccagccccggcctccgccaggggcgggagcgaggcccggccccgctgtcggttcctaagggaacggcggctcgcggggagctggaaggggcgggcgcctcccggagcctggcgcccgcagccccgcccctccccgcgggcccggcgcgcacggccgggcggttggcggcggcgcccgcggcccctcccccgggtcgggcgcgggcgggggcccgcaagctcaggaagtaggggaaaggtgacggcgcggcaattcccagttcacgtttcctgcgcctcccggagcagccgctgatcacgctttgttcacatgcctcgccccctcctcgcccacgcccccgccccgggccgcacagccaatccgggctcgggccgccgagccggccggccaatggcgggggcaggggcgcggggacgtgcgagcggcgaggaatgttcccagtgactcacccgtgagcctcattgaggttagggcggccccatccgtcggtctccgccagctaggatctcccccgccgtccgcccccgcccctcgtctgcctcccccgcccgcgcctccgcccgcgcttccctttcctgcctcgcgccccactccctttcctcccctccctgtttcccttcctgtccttcccagctcacgctctctttccctgccgcctgcctttcttttttcctttttttgcattggcgtcttggggctgttacacacacgcgcgctgtccattgcagcttacataaaggcgggcgcgattatgcaattatattgttagcgatatttcaagagcaatggctcgttttcttaggatttcaacacgaaggcatca

SEQ ID NO: 15342 - DNA, 1202 bp, Artificial sequence
  DNA replication origin
gccctccgcagtgcctgggcgcgctgcagtcgccgcgcctccccggccgcggcaccgcctctctaggcaggggcgggggacgaggggcaaggagtgggcgaggggtgggcgaggggcggggggcgtcactcaatcaggtggcctctggagttccccggggcagggcagagggaacacgctgccggggattgtgtacacgctccactgacaccagcttcacgctgccgggcagtcgccgatcacgcgtggccccgcgagcccattggccggcgcctcacacacctttgccgttgattggccggcctcaggctccgcccccacccccgcccgcggcgcggggcaggctgagcggctacctgaatggggagggggcagacggcgctgagcgcggcggcggcgggagcggcgtcgagtgtctccgtgcgcccgtctgtggccaagcagccagcagcctagcagccagtcagcttgccgccggcggccaagcagccaaccatgctcaacttcggtgcctctctccagcagactgcggtaagtcatttggggatgcccctgtgcttcctcgcctggtcttgtctggggggccaaagggggcgcgaaccccgagccccggacatcagccatgcctgagaattggggctgcagcggagtcgtggggaaggaaagggcttcctgcctgcagactatgggcattagtgagggcgtgtgtgttcgggagggggtcgaaccagggggctgggatcttcagacagggacaggggtcttgctctagatgtactgaggggaagggacaactccgcatggagacccgagagggctggtgaggaggaggatgacgagcgggggaggagtggggagggggccgttgccctgcagcgaggttggggtacagtgtggaacgagagtcgcgggagggacaagggggctaccctcacctggtaccgaggagagatgcccggtctggctcaggaacgcgagccaggggaggaaggggctgctcgcaagcactcgggaggcggggtgtccacaggagaggcgagtgggctacccatcctgggggtctgaacccacgcttggaagacgggggctgctcagcagatagctcggggctgggggaaggggcgcctgtcgtcggagcggggggatgacacgagggcccgccgacagccctgggggacgagttgctcccccagacgtctgga

SEQ ID NO: 15343 - DNA, 1229 bp, Artificial sequence
  DNA replication origin
tcgcccactccttgcccctcgtcccccgcccctgcctagagaggcggtgccgcggccggggaggcgcggcgactgcagcgcgcccaggcactgcggagggccagccccacgtggggggtggggagggatgcccgctccgccccgtcccctccgcgccgggcctcgtctcagcccgccacggagtgggcgggacgccaggcaggcgggggacgcggcggctgccagccaaggggccggagccaagagatttgcattggaagcgccatcctcttgcgcgtctgatgaggaagcagaacccggtgaccgactgagctgcatttctgaagcatttgctgggttttgcctcactaagcctcggggagcactggggcgcgggatgggggaccctgtcacggagccgacacctgctcgcgcgcctctcccccgctcacgccgtgccgcgggctcgccctccccatctgcagcgcccgcagcgcctgcccgccccgcccatccttcctcctgggcaacccagaggatggcgtgaggactcctggaagcccagaggaccggaccaggggcgtggtggggagccgtagacccgagtttttatccttctctggcgccgacactcggctgcggaatcgagtttgagctcggtgtagctgaagtttaaattgtagctgtttcaaaggtagaccccacctcacccccacccctggaccaagacctctggaagcgtcctgcctggaagccgcttgtggggagggctctcctagggtctccaggctcccgctggagcacgcctggaggtgggtttgccggccgttccctgaaactggcaccactaccgccccacccacccactccagctggtgggaggcaggctgggtttctgaaaggaagccgcccgtgtgctgcgcctgggggctggggctaggccttctgatcaggaaagcccatggccctgctttggcacggatttgcccccgtttggccgtttgtgcgtgatcacagcagctgttgttggagaggaaggcagtgataacggggcttaaagcaaatcggagatcttatccgatttggacaggctgaatttaaggcaaaaatcactgtctctccttcgagcactcacgtctctgtaactgaatgaaaggctggtaatgcaaatagcatttctatcccagtaatcacagaatgaacacaggaagggaattaattcttttagaaactgccaatgctatgcgtat

SEQ ID NO: 15344 - DNA, 1036 bp, Artificial sequence
  DNA replication origin
aactctccacatggctactccatttaatccgtcagctccatgtgataaaggcaagcattatcccatttcactgatgaggaaactgagagaaacagagatctggctgggcacagtggctcgtacctgtaatcccagcactttgggaggccgaggcgggtgggtcacctgagatcaggagttcgagaccagcctggccaacatggtgaaactccgtctctactaaaaatacaaaaatcagctgggcatggtggcaggcacctgtaatcccagctacttgggaggctgaggcagaagaatcgcttgaatccgggaggcggaggttgcagtgagccaagatctcaccattgcactccagcctgggtgacaagggcaaaattctgtctcagaaaaacaaaaacaaaccaaaaaaccagagagatctgcccaagatcacatagccagaaagtgatggaaatgggatttgaaccctggcagcctgactccatcggctggggggatttggcctggattttgacctgcttctaaaattaacaggaaagcagtaggggttgggggagggtcgggggaggagaatcagcagggagcaggaatttgatggagatcatgtgatcccaatggccttgatgtgttttttttttcaagaagtaggagactaggtgccaagcattaggcccaggtaggaagggagtgcggggagagagaggaaggcacagagcagtgagtggcagaggcgatgagaccaagtgtggtacacgcgctggcagccacagtggtgctgagagggaagactggattcacagtggtgctggtcctgtgaggtgcgaggacctctccagtggtgctcaggagccaggagtggggaggagaggcctgctggagcctgcatagctgggaaccagggcagtgggtgatggggagcatcagtgcttctcaacccaagttgcatttgaaaacacaggagggctgaaccccactccacaacagtggaacctgagtctccgggggcctggctctgctctgtgctcacagtccccat

SEQ ID NO: 15345 - DNA, 928 bp, Artificial sequence
  DNA replication origin
tgttttttttttcaagaagtaggagactaggtgccaagcattaggcccaggtaggaagggagtgcggggagagagaggaaggcacagagcagtgagtggcagaggcgatgagaccaagtgtggtacacgcgctggcagccacagtggtgctgagagggaagactggattcacagtggtgctggtcctgtgaggtgcgaggacctctccagtggtgctcaggagccaggagtggggaggagaggcctgctggagcctgcatagctgggaaccagggcagtgggtgatggggagcatcagtgcttctcaacccaagttgcatttgaaaacacaggagggctgaaccccactccacaacagtggaacctgagtctccgggggcctggctctgctctgtgctcacagtccccatgatgatgtgatgaccctgaggtggaggccagggtggaggagctctgaatccaatctagcatggagttcaagtcacgctgggaggtcgggagtaagaggggctgctagatgggttatacaaaatcaaaggaggacagtgaagggatgatagggcagggctccaagaaaggtaaaagtaggggtgagtgctggcagaggtgagggatgctcaggggtctggcgctgtcctgctgggaaggcttggcaggttgggagaaggtgaacaggtacggaggttttcacagcctcttccacacccatattcctgctgccatactgaatggaattgtcttggaaacttccctttgtccttggaatagaaacctctgggagtctgaaataggggtgccctgaggaagtgcttagatggaattttcttcccatgtgaccagcatagaaaagaagactcactccagtggggaggtgacatcagggttgggttatctgcaggatctggggtatcttccaccactaaggaac

SEQ ID NO: 15346 - DNA, 839 bp, Artificial sequence
  DNA replication origin
gccatgtcctcaagaaacctgtccctgacctccctgataaggctgtctcgtgatgggctctcacagcatcttctacctctcattgctttcatagtcacaatttaacatttgtttgggtaatgccatgactaattaaactccccaagccacttggttttcccatttgtattttcagtgtagggtagagtctggcagagtaggggctcaattaacattagctacataaatggacaaacaaatcaatgaacttgcctaaggtcacagcagcaggtagcagaggtaggatttgaacgtgggcagtgagcttgcagagtcctctcctcttagccatacactagactgcctctcacagatctgcagcagctcaggctcgggggggcacatatttaagtctcccctgcaggatcccaccaggtttagggttgcctggccgacctaccctttaatacctccagggcccaacagtctaaaaacctgtgatttaagacacatttcatgaggtgggggtttgggagggaggttctggaaaccctggcaatgtgggactgggatagtgggtgtcagaggctggagaggcagcagtggtggaggtgatatgaggccgccaggaggataagccctccaggggaggtggtgggcacacacacaggaaaagaacgcgaagggcagtgccttgggcacacccacggtgagaagctgggagaaggcgatgccagtgaggaggaaatgagctgtcacaaacctggagatgtgggaaagtgcagtgtcatggaaaccaggggagggagtaggtcggtccatccatccctccatccaggaagaggtggctgggctgtggg

SEQ ID NO: 15347 - DNA, 1015 bp, Artificial sequence
  DNA replication origin
agggcccaacagtctaaaaacctgtgatttaagacacatttcatgaggtgggggtttgggagggaggttctggaaaccctggcaatgtgggactgggatagtgggtgtcagaggctggagaggcagcagtggtggaggtgatatgaggccgccaggaggataagccctccaggggaggtggtgggcacacacacaggaaaagaacgcgaagggcagtgccttgggcacacccacggtgagaagctgggagaaggcgatgccagtgaggaggaaatgagctgtcacaaacctggagatgtgggaaagtgcagtgtcatggaaaccaggggagggagtaggtcggtccatccatccctccatccaggaagaggtggctgggctgtgggagcaccagggctgtgggtcgggagcgggagggggaggtggggggcccagggccacctgtcctgctgggaagatcaaccctgctgaccctcagcagggcggtttcagtaaactgcaatgggaggtggaggacgaaacgaggctgagtgggtgcttcaaggattcaggaggaaacacaacgagaccacacatttccggatttggcagggaaagaagaggatggttgctgggagggggcagccaggacatggggagacgcgcgtgggtttgcaggcgcccgggaagagccggggaggaaacagtggagaagcaagaaggagggcacgtcgtgggcgtgcaccaggctgggcaggagagtccgatgatgagtcagcgctcagcgcttcagtcagtgagagatggggaggcggcaccggcaccgtggctcgggctgggagctaaactttctccctccgtattcacgctggggttggtttggagaagggagaatgaccgtggaggctggaggcggggactcaggctctgaatgcagatccacagcacagctttcgccctgcacccctttcctagaaagccccctttctaggagacctcagagggccccaagccctgggtctggagtccagtgtga

SEQ ID NO: 15348 - DNA, 2088 bp, Artificial sequence
  DNA replication origin
gctgcaggtgacctggtcagtgccgatcgccccgcccccgcccagccgtctccgtggggttttccggctctgcgcgcctcaaacgacctcggctgccgcctgcccggcagctccccgcggtcccccacgttcccccgccccccgggccgcgcggcaggcctttctgatgagtcagcgggagcccgggagcctccaaccgccccgggcatctgctccggtgacgcaccctgagtcacgggcgcccgggccgccgccgaggccgagcgcgcagccgggagcgccgagcgcagcccctacgcctgccgcgggcgcccacccagcccggcccggccccgcacccttcctccctcgctcccagcgccgcccgccctgcactccctggcccagctccaggctgacatcagacgctggccgcccggccaccctctgagtcaacagtttccgaagcagagcccgctgccaggggcggggagagagcgcggcctccgggggaggcgggggcgggcaccggtctggcagccgcgggagggcggaggtgggtggggacgccggagccttttacaagaagtcacgggggatgggggagaagagagggcgaaaaccaccctctgcagagctgccggggcggagaggaaacccgccgccccacacagccacgtgctgaagccctcactgagtgggtggctgggaagggaacccgagggcgggaggagggggaggcacttgctgggaaaggccctgggccaagtttctgagggaggaaaagaaccacctttggacaccctgggtcccaggggcccagcagatatttgtgtctggataacagggccccacccagttccctttgatgggagcagctctggccgagccctactcttggggactggtgctgcctgcttggggtccgacttgaagaactgcactgacctaacctgaccccctcccttgaccacagaccctgtcaccatcgtgggatgatggggttggaaggatgtatgtctgagggtaaaggaattcaagagccccagtccattgagagtcaccttcctcgctgtaacaaggctgggcactatggtctgcccctgagttggtgctgggtaaccactctgagaggctgcatctgtggttctagaatgctcaaagtgagcaagagacccttaaaaaaagcatctacctgcagggggactaagtggcttctagaagcttctttaaccccgcagatttccctgatcacgtcaggcaggaaggaagggtgacgtggagccaggaggacagagtaaggcagtaagcatccacaggtgcttggatttccttccctccaccccatcgcaccccgcccacccatgccatgccccccaggatagcaagacagggctgtcattggtgggcctccggctggaattcacgctcagcttctttccgggatttgaacttgttgttctttccaaagccatggttcaataaatgatgccaacctgggaaggggaggtgtctttctcatcttgcaggcagaagcggcataacagctgggtgaacagaaccggtctggatctgtccagagctatttgtcagcacagctttgcagaaactatgtgagcgtctccttgctccatatgacccccattcaaactcatgctgagaaagagctcccagtccacctctgctggggcagtcttttcccaagtgtgacttttccaagggtgggtggttcatttctgccaatctaacccagctcaaaatagcattgaatcagacttctgggaagccctgtgctccaggcgcctgtagaaaagagttaaaaatgacatctcttgggaaaccagggggtctaattttgctgaggtgggacaagatgcagagccctgtgacatcagagggaagaaatagtggccagggataggtctggaaagtgtgagtggtggaaggtcctgtgctttatgtggttgccctttgggaagtccgtggcctggcccagtggggggcaggtatcctgggagctaaggccaggtgtaggagggggctgtggcttaagccacaaactccacaacctccaacttccacattttccttcaggctgagaacccgaac

SEQ ID NO: 15349 - DNA, 1947 bp, Artificial sequence
  DNA replication origin
ggaggaagggtgcggggccgggccgggctgggtgggcgcccgcggcaggcgtaggggctgcgctcggcgctcccggctgcgcgctcggcctcggcggcggcccgggcgcccgtgactcagggtgcgtcaccggagcagatgcccggggcggttggaggctcccgggctcccgctgactcatcagaaaggcctgccgcgcggcccggggggcgggggaacgtgggggaccgcggggagctgccgggcaggcggcagccgaggtcgtttgaggcgcgcagagccggaaaaccccacggagacggctgggcgggggcggggcgatcggcactgaccaggtcacctgcagcgcgggctgacggcgggcgactgaaggagggagcaagtctcccacccccagcagccggcggccgcttccgaagtctgcccccttccactgcggagcggcgccccgcgggcccccagccagcgcgcccgaggcgcccccgccccgtgtcgctcgcgctgcgttattgggagaaggcggttcctgagcaccagcacgggcctcggtgacaccggaggtcgctggggtcttccccttccccttaagactctgggtctgtctgtgggaagagctttcattccccaccccactctatgccgaccctctccgggggaggctccactggcactgtagacaccacgtgctgggtaaaaaggcctggtcccagcgcttccctgtcactgactgctaaccacaaggcgccgtggcactcaggaaatgcggcaggggggctggagaactatcaggaaggggtgtgggcagagaagaggcttccaccctgtcttggaacacggacacagtccatggcattcaaaagaggtgggaggctcctctgtgcacgtgccttccgcccccgggacaggtggaggaggggatttgactggtcctcaccctctgcatttatagtctgggcacaccttgggcagtgccgcaggagggcgctgtggagtacaggcacatgcagaaggtgtggcgagggcttcctggtggagctggcagtagggcagggaccttgaaaaggaatgatttgaacagatcggaaaagacattccagacagaaacaaatgcctgaaacccaaaccgagaagcaggaaagagcagactgcgttctcggaatggcagggagtccagtttgactggaagacctgaggctcagaggcgcatcacggcccagatgcagaccacagaggcaggcacagtggcccaggaggaccgaggacctggagtcacggggttccgcccgctgcccctggggaaccgagtcatgccagttcccagacagatgaattccttccaagaattccacagtcctgctcaatcctagccgccaagcctcctggccttggatggctgctgtctaatgcagatcctctttcatccagatttcaaatatttttcctattctgtcctttgatcactaacgtttatgtttatctacatcagcatccctcaatcctgacggcactctgaaattatctaggggtgctttaaaaaagaaaaatgttgatgcatggccctcctccaggaaatctgattttattggtctggggtggggcccaggcatcagcagacttttaatgagcagttagagaggagaaccactgatggagatggtcaccagggagtgtccaggtcagaccgccacagaagagtgcagcctcctggccttcagacccaactgggacaaaccctgagaacagccttggcagacctccaggggcagctggactccctgaggctggatgttgcagcctctcccaggcatccactctgcagctgaggccaaagtttccaacgggaagggagggtgaggcttctatttgtttcccaagagccagctgacctttgaagctagtgataaccaccacaaacctcactggtgggagaacgaggcactgcagcca

SEQ ID NO: 15350 - DNA, 1277 bp, Artificial sequence
  DNA replication origin
gccttggggggcggctggggggctccggctgggccccgccgcccttaagacgtccccgcagcgccccgcggccggccgcctcgaacatggcggcggcggctgtctgtgcccccggcggcggcggcggcggcggggctgggcggcgggccgcgcctcaggaccttcgggcggctgctggacgcttggcggagccggagccgcagcagttggggcgagggggcgtgtgccagtgggggagcgcgcgggggtctcgccgccgggggtcgccgtcccctcctggcggcgtgcggcccccacccctctcccgtggtgcattgctgtttccggggagggggcccggccgcagccctgaggggccggggtcccgcagcccctactccgcggtgcgccgccgccacctttgcctcccgaagcccggcgggcgggcggcgctgtgggctgcaacggctggggtcctggttatgaatggagcggggcgggccccgcgccggcctctggtgacagctgcggaggaagtcggattcctggggggcgcggggagcgcggtccccctctggtggaggaaagttgacgccacttggggcctggcggcggggaagccccggtgtcaggtagccagcgagaggcttttggccccttctggaagcctcgaggctgctgctccgcccctgcggcgctcctgattgggtcaagtcgccttcactcaccccagtcacctcctggagcctgaggattagtcaccatggcttcgtttttccgtccgcgccatggttcctaggcagaaagagggagattggtagacgggtggcttatcaactactgtcttgactgccaacagttggtggtggtaacatgttctaacccttacacggtatcctgaatgtgtgtttcgtagacaaagctgctggttcagaaacccgaaacagtcggggacacagtttaccgcctcatgtttcagcacatttaactgaattttgtggtggcatcttggttatattagttctgtgtcccgtcgtgtttctatcgtgaattcccagactgggtgggaatctaaggactcaaaggagggggaattgccttgtgctcagcgaaggttgatgtagaggtgcatcaaagcacaaagtagaagtacatcaaagcacatcaaatacagcaagggttggcagaaacatggctcatgattgtctagaaaggccctcataattcattaatttcttttacatatacgagagcgtgcagatgctgatcatgattagaaataagccccaaggagttta

SEQ ID NO: 15351 - DNA, 1098 bp, Artificial sequence
  DNA replication origin
ggcccgccccgctccattcataaccaggaccccagccgttgcagcccacagcgccgcccgcccgccgggcttcgggaggcaaaggtggcggcggcgcaccgcggagtaggggctgcgggaccccggcccctcagggctgcggccgggccccctccccggaaacagcaatgcaccacgggagaggggtgggggccgcacgccgccaggaggggacggcgacccccggcggcgagacccccgcgcgctcccccactggcacacgccccctcgccccaactgctgcggctccggctccgccaagcgtccagcagccgcccgaaggtcctgaggcgcggcccgccgcccagccccgccgccgccgccgccgccgggggcacagacagccgccgccgccatgttcgaggcggccggccgcggggcgctgcggggacgtcttaagggcggcggggcccagccggagccccccagccgccccccaaggccagccccgcgtcctggcccctcccgcgctcctcggctcggtactcacgtgagataacggcccaaagagtcgggtaaagcgtcttctctttttcggcggaatttttaaagagggatgtggttaccttgagcagaaatacccaaggcggcctgggccataggctgcgggaacgacttgggggtaaaagcgcggcaccgacaccagctgtgtgcagcagtggcggcggcggccgaaggagaaatagaacagcgcaggcaaaagaagaaaggcgcgggctgggtgggaagaggattcggactcgtcacactgcagagcagcagagcgagaaaggatgagaagaggcagagaaggcgacggcagaagaaaaaaggaaaaactgcggccgcgatcagagcctgaaagtgtgagaaggcggcgccagcgacgccagtatttatattagggggcgtggcctggtgacatcacagctggccgggcagccgcgcgagcggggcggaacccggttgcagcccggagaaaagggagggggacggaagaggaaggaggactgagcccgggagagagaggggaggggtcggcgcgcgaccgggtcatgcaggtgcagactggccggtcgc

SEQ ID NO: 15352 - DNA, 800 bp, Artificial sequence
  DNA replication origin
cgtccgggaggtgaggggcacctctgccgggccgcccctactgggaagtgaggagcccctctgcccggccagccgccccgtccgggagggaggtgggggggtcagcccccccgcccggccagccgccccgcccgggagggaggttggggggtcagccccccgcccggccagctgccccgtccgggagggaggttgaggggtcagccccccgcccggccagccgccccgcccgggagggaggttggggggtcagccccccgcccggccagccgccccgtccgggagggaggttggggggtcagccccccgcccggccagccgccccgtccgggagggaggtgggggggtcagcccccccgcccggccagccgccccgcccgggaggtgaggggcgcctctgcccggccgcccctactgggaagtgaggaccccctctgcccggccaccaacccgtctgggaggtgtacccaacagctcattgagaacgggccatgatgacaatggcggttttgtggaatagaaaggggggaaagatggggaaaagattgagaaatcggatggttgccatgtctgtgtagaaagaggtagacatgggagacttttcattttgttctgtactaagaaaaattcttatcctgttgatctgtgaccttacccccaaccctgtgctctctgaaacatgtgctgtgtccactcagggttaaatggattaagggcggtgcaagatgtgctttgttaaacagatgcttgaaggcagcatgctccttaagagtcatcaccactccctaatctcaagtacc

SEQ ID NO: 15353 - DNA, 923 bp, Artificial sequence
  DNA replication origin
gagtcggtgtaggtgagccaggtggattctgtctcccgggtccagctctcgtagtagcggggctcgatggcatccgcccggctcccgccgcagcccatcctcctgcgccgcgggagcgcccagcggctgctcggctgtcggctctggcggcggctcagccccggaggcgcagccccggcccgcaaggaggcggcggcggcgacatcgcgtccccgctcccgcccgcgctgcagccgcgcggagctcctgcggtgcccgccgcccctagtccgggccctctcccagcccgtccctcctctccgcctccaaggccctccctcccctccggtccccaccgcccagtcctccctcccagcgccctggccgccccaaggcccccgctcgcccgccccctccctcagggctccgtgacggcccgggagcaggagcagcggccccgcagccggaggagggctggggctcccgaggcgctcggacccgtctggccggcattaccgttcccagtctctggcccatctatccatccatccatccatccatccatccatccgctcacccgctcattcattcatccatccatccatccttccttccttctttccatccatcctggaaagaactgaaactcttatcacgggaccccaggctttctggccacctgttacaaaagcaatggaactgggagcaaccccgcaaaactggtcagggagtattgccactaagacttaaggaacagtcagagcctatgcctgtcgtatctgatttggggaggcaggagtagggctatgatttttaagagagttaggctaggcagtgtcacttacaccccttccagctgtggtacttcatgatcctctgaactttaaactcgagaaagcaatagatcacctggaaccacgcagcatcctgaaccccctctctgg

SEQ ID NO: 15354 - DNA, 1327 bp, Artificial sequence
  DNA replication origin
ggccagggcgctgggagggaggactgggcggtggggaccggaggggagggagggccttggaggcggagaggagggacgggctgggagagggcccggactaggggcggcgggcaccgcaggagctccgcgcggctgcagcgcgggcgggagcggggacgcgatgtcgccgccgccgcctccttgcgggccggggctgcgcctccggggctgagccgccgccagagccgacagccgagcagccgctgggcgctcccgcggcgcaggaggatgggctgcggcgggagccgggcggatgccatcgagccccgctactacgagagctggacccgggagacagaatccacctggctcacctacaccgactcggacgcgccgcccagcgccgccgccccggacagcggccccgaagcgggcggcctgcactcgggtaagtggccgggcccctgcagaccctcgcccgcccgctaccccgggcgccttggcccgggcactgagagaggagccggttccctgaggaattgatggcgcggcgggggtggctgggaggaagcagaggcaggacctgcccactgatcagtggacagatgcaagcccagggagtggggtcgaccagagccccttaccgaaggctgcgccgatgccccagcttccagcagcccaatgctctttggccttgtccaaagcttgctcgctggtcgggagaccggtgggtgggaggacagcccacctcctccgcacacatatccctcagccacccaccccctgatccgcccagggccgcctccgccccgctttggcccatctgccatcccctggccacctgcgtacccagccgggtgacttctcatccattggccacctggtgcccctctctccctggatttatacacaaggcgcctgcctgggatcgcctgggtggagtctttcttgtcgcttccccttttctccctctaggaaatgagcccactcgcgggcttcaaagaccagaatcccagtttaggtcaaaataaatgcaccccgccccatcgctagttctgcactttaggttacttttggagcagttgttccatagcaaaggacttctctccctaccctatggtgtcccaatgctttgcaggaggcagggcacacatgtggattttgactataaattaaatactcttgcctaggtcattcctcatccagcagaaatctgataaaaggagatgcaaagaattgtctggtcaggtcataagtcaggattttattttattttatttttttattttttagcagaacaagtaattatagcgcagagatgcaaactgttgccacagactgaccttta

SEQ ID NO: 15355 - DNA, 1077 bp, Artificial sequence
  DNA replication origin
tcggcaccccgagcccgttcaccggggccgggtcctggcgggccgcggagtgaggccgggcggcgcagcgcaggcggtgcccgggcgcagggccagtcccgccgccgccgccgccgccgccgccgccgccgccgcgagcccggacctgcccgcccgacctggcggcgcagtctcgcgggatcgctcagctctcgctccccgtgcggctctcgaggcagctccagtcccggacgcaaccccggagccgtctcaggtccctggggggaacggtgggttagacggggacgggaagggacagcggccttcgaccgccccccgaggtgaggcttccacggctgggactgggcaggggccgggcgggtgccgggggaagcggggagggcctcgaggggcgaggggccgcggctgggatgaggcgcgccgggagccgcaggtgctggggaggcaacggcgggacggcccgcacctgagtttcctcggaagcgggaaccggctctgaaaggcgatgccggggccccgcggcgccgcgcaggccaggaacgctgctgtctggctctaggcctggggcaggttcccgggtgtggggcgctggcggaccgggcatcagtgtgtgttggggcgcgggtaattcgtaatccggggcctacagccttcctcccgcaaggggactgccttcgcccttcccccgggacagatttgcgcactttcctttcgacggcagcactacaccctcctagccagtgaaaactgcaatgttgctcctccactggaggaatcctaaaagtctccctctagttggccttacgaaaatcgagaaaactacatacccagaagactgccacaaaaactgactcttcagagtcttttacaagtttaagaactctttgggtcttaaggaatttcccagggccttagttttcttgtacttaataagctttccaacaggggcccttagattgtatgcttatattaatcctttataatttactccgaatcaccagctttccttttttcctccatcttactcttgccattccctctttttaaccctgtcttccatacagcaccaacctccta

SEQ ID NO: 15356 - DNA, 1243 bp, Artificial sequence
  DNA replication origin
cgccattctcctgcctcagcctccagagcagctgggactgcaggcacccgccaccacgcccggctaatttttttttttttttttttttttttttttttgagacggagtctcgctctgtcgcccaggctggagtgcagtggcgcgatctcggctcactgcaagctccgcttcccgggttcacgccattctcctgcctcagcctcccgagtagctgggactacaggcgcccgccatcacgcccggctaattttttgtatttttagtagagacggggtttcaccgtgttagccaggatggtctcgatctcctgacctcgtgatccacccgcctcggcctcccaaagtgctgggattacaggcgtgagccaccgcgcccggccccggctaattttttatatttttagtagagacggggtttcaccgtgttagccaggatagtctagatctcctgaccttgtgatccgcccgcctcggcctcccaaagtgctgggattacaggcgtgagccaccgcgccctgccttatttgttttttggaggtgacatttttggaggctggaaggtgggggtggggcggaggcaggaagaaaccataggtatcatcaggttttccaagagtcccatgacccaaatgatatataaacgctgttttcataagtgctaacacttactaagctctggcacattgcaaaaccttgcacgcgtactctgtcctctcagcaatcctggcgggttgggaggggtagatgcctcctgggctactctcataaacgaatgaggaaactgaggctcagggaagttaatcaatatccagtggaaatggtagaagttcacttttgagtactctttgcctctgatggatattatctttttgtaaccccctctgtcctcctttggcctgtccattgtagaagaaaacattctcagggcccaggctacccaccacgtagggccaggttggagcaggagatcttttatatataactggctggaatcaggcataacagaagtcttgccacacccataacaacacgaggttgtgacggatggtaatactgtgaagtcaaattcagctcagcaggggtctccctatagacccatgcaggttttccggagttggtgagtccagctgatggatgttaaagagagggagcagtctagcagggaagcaggtcgcggcagttctgcaaatgcccagtcctgggctggtaactaactaaaggtaaatttcacttgtttttctaga

SEQ ID NO: 15357 - DNA, 1194 bp, Artificial sequence
  DNA replication origin
cgcgggggtcctgacaggccgagcgactgcagtaggagggggcgggcccggctctcggtccgcccccacgccgggctcggggtgggggctcggggcctattacgggatggaagctccgggtgtcgcgggggcgggaggaattaagggagggagagaggcgcgcgggtgaaaggcgcattgatgcagcctgcggcggcctcggagcgcggcggagccagacgctgaccacgttcctctcctcggtctcctccgcctccagctccgcgctgcccggcagccgggagccatgcgaccccagggccccgccgcctccccgcagcggctccgcggcctcctgctgctcctgctgctgcagctgcccgcgccgtcgagcgcctctgagatccccaaggggaagcaaaaggcgcagctccggcagagggaggtggtggacctggtgagtccgagggagccgagccgggaccgccgcgctggtggaggggacctggccgcgcgccccacgggcagggcgtcagtctggctgttgggggtgtctgtctgtacagctgtgtgtcgtgtgtcttgctgcgccggggtgtcatgctttttatttacaggtgaagaaggacctggttatgcgtgcagtgagtcttggaactcagaggggagaccaaaatgggaggccatcgtggagcggacatgcgatatgggcccggtgggtctccccgaagtacagggagtcccccaataatttctggccccagggggaccccttgggaagggtgggagggatagggcggcagtgagagtaggatgaggagcttgggtacgtccgaagtggacctgggaaaaaccctggcctcgctgatcacatggacctgggcctgggccagggcggtgcaacgtgtcctttgttggggctggtggccacgtctgcctgcgagagagaataacaacccccacaaagcatccgtccaactctttgtaacttgaagactatgagtcacgttgggtcatcttcctagggagtatgggctgcaatttactttgttggacaaccacagctggggctaggaatggttcagaaggtttaaggccggaaagggaaatgaaggggcccggcgctaaccctctaaggacctgttttgcttctgtttaaaccaaatgggcagtctgtcattacacacaccctgggtcttcatatgtggccgccag

SEQ ID NO: 15358 - DNA, 765 bp, Artificial sequence
  DNA replication origin
gggcgtgaggaagttgtgggaaaccgcgctggacgctgagaatgtgcggaaggatcctgaggggaggacgcgagacagcgcgaggagagacgaggagagttagggttggccgggagggtgcgaagatgaagcgaccactggaggctgtgagggtgaaaggagcaagaatcgtctagagacgggctgggccggtgctggggccaaaggcttctgtctgtcaggccctttttggcgctcactctagaaagaagaggcggagacgcgaagagatcgggttagagtcagattttcgaagcacggagatgggttcaatgaaaggacgaggaaagacgagaaaccagcggccggagaacggaggtggccgccgccgtcctttgctctgctcggggctgggcgccgcccggagagccctcccggagggggcggggcggggccgggtgaacagagctgggcgggctcgccagctcttccaggcgccctgggcaagcaatgtgggtgactgagctcgggtgtgtgtgcctgtgtgtgtgtgtgtgtgtgtgtgtgtgtacgtacacaagtgagcgtgtgtgcgcaccccacccagccttccacacgcgcgctgcttagtaccaggccatattgtggtctgatgagtaacgtaagcctttggggtttatatttaccttcttgatgtgtagtaagtgctctccctcctccctctgttccccaggtaccgtctgactagctccccatttaagagagctggggacaggcaaagcagcc

SEQ ID NO: 15359 - DNA, 1381 bp, Artificial sequence
  DNA replication origin
agggagaactcctccaggcacacccgggagcgggccgcggggccggaaacccccgcggagaccccaaccccacccaccccacccccggctagagtggagaagcgaaagcggagaagatatgacgggggctagcggcggagagtcccggggccagggcccttcggctgccaacgcccggatccaggcgagctccgacgtgcagcggggtctggcgccggcccctcctcatcacgcgcccggcccagggtcgctcagccgccgccaccgccgccgccccttgggtcgatggagtcggcgcggaaggcccgcgcgccctgcgccgccgccgctcagtgccgccgccagcacctcctccgcccctccgcctcccgggctcatcccgcgggggcggcgtcacctcctcgctgcccaggcccgggcaccgcgggcgccccgcgggcggcagccgcccctcccgagcgcgatctccaggctgggtccggggccgggcggggagggaggagagactgagcgtgaagggagagggcgcccgagttttcggggacggaagtgtggagaataggagcgtgtgagggggcgcccgaggtgtcgggggcgggggaagagtatgagcaggggtgggggcaggggtgccaggtgtagcaggtagggaggtagaggcggcgagtgggggcgcccgagggaccggggcggggcggggagcgtaagggtggcaaggcgcccgagagtcagggctggagctgaaggtgggtgacagggagggggcgcccaggtgtcaggacctgaggagaaagagtgcgcgtagcgggagggccccgaagtgtcggggcgggatcctggaaggagggagaacgtgaggagggaggaagggtccctggggtgtcagggatgggggccaggaaaggggcagagagctggaggcccacaagtggggatagcgggggagggaggttggagcgagtggggaacgcaggtggtgtcgagggcggggacagggcgaggggagcggggcgtgaggaagttgtgggaaaccgcgctggacgctgagaatgtgcggaaggatcctgaggggaggacgcgagacagcgcgaggagagacgaggagagttagggttggccgggagggtgcgaagatgaagcgaccactggaggctgtgagggtgaaaggagcaagaatcgtctagagacgggctgggccggtgctggggccaaaggcttctgtctgtcaggccctttttggcgctcactctagaaagaagaggcggagacgcgaagagatcgggttagagtcagattttcgaagcacggagatgggttcaatgaaaggacgaggaaagacgagaaaccagcggccggagaacggaggtggccgccgccgtcc

SEQ ID NO: 15360 - DNA, 1110 bp, Artificial sequence
  DNA replication origin
tacatcttcactttggaaggagccatttctctcaaggcagctcaaaacacaggacttagggaggatgtgggctttactttagcccaagtgctgagagtagaatttttactctatgttcctgtaaagctgctctgttagtctcttgatcttgtgttgaggagctttggggaaatgttgcaggggtgtccaatctttggcttctcttgtcttgggccacacatgaaatatactaacactaacgacagccaatgaactaagaaaaaaaatctcataatgttttaagaaagtttatgaatttgtgttgggccgcattcaaagctgtcctgggctgcatgcggcctacaggttggacaagtttggtttaagtttcctttcattgacccaaacttctaggcctttgtatctagagaaacccaagcctaccttcacctggggagtggtgatctgattaccctcctgcaacatcagtaaaactatgggtactccagcagcaagaatgttgtgtccccagcgcaagtgggatggagaaaagagcctgctgcgaggctgcgttggtgtgtgtgagtgttgcgagatcatttctggaatactttctcttctaaaccctggtcggggctatattttttctactgggggtgggagtgggggcagagggtaggggacgggaacgtgaacacggtgggcatctagcctactcagacacattacctgctacactgctcactttgagtcaaggctgtaactaccaggtgaatggatttttcatttggttttggttggggataaaggatgggtcgaaatggttgggagaaatggctggaagtgcctactttaaaaaaagattctaaagaatgtatggaagatttgcgacttccacagaacaccaatcaaaatggggttgcggggagatttggggagtaagcggtatagagaaattagggtaaggggatggccttaaactcgtcaaattaaccactaaaggaggagtcgagggcatctggttgagccaaggctgctcggctgccgccgagaaggggcgcctgaaagggaccccagcgaagagaatctgagtcccctctgacacccgccggggctgcgctccttcccgcc

SEQ ID NO: 15361 - DNA, 1104 bp, Artificial sequence
  DNA replication origin
cgcggagagcgcagggagcagccggtggctcggcggcggcggcggcggcggcggcggcgtcggcgtcgtctacctccagcttctcctccctcctcctccgtctcctcctctctctctccatctgctgtggttatggcctgtcgctggagcacaaaagagtctccgcggtggaggtctgcgttgctcttgcttttcctcgctggggtgtacggtaagtgtccgcgtccccgcgccccgctgaccgaacaaagctgaggcgacccgggccccgaggcctccaggacgggggttcccctggagactcccgcggagaccctggctaccggcgggacaaagaccggtgagggggtggatgtggcggaacgggtgtccccacacggagatgcttttctccactcgtccacctccagaccctcgggtggtggagaggggctggggggcccggccgggagggccccggcggagcgagggggtggcgggcggacttcccgacctgggttcgagggcccccgcggccagttgctccaggacccgtagcctggcacaatccacacacaaagatgcttgactgtgagaaagcagaggagctcgcccccgccgctgccgggacggtccttccccccgccccctcaacccggggttaggaagttctctcaccggcgagattcccaccgcgccagcccttgtcctactcgattccctgaaaaggcttcccgctgacttctccccactccacctcgggggcaagggctctgccgaatccgggcgtgcagggtcctgttggttccccgggagcagcacgcgggagaaggccagaaaatagtttccagccccacctcagtctctcctgttagggtgtacacatctgtcctgactcctagttcaattgtaatttcatccatcctcgtccgccgctgtggtcactgttactttattccagtcgatggatcgggttagagataactcctttcgggttaagagaaggctgaagactgtgcggacagctttatattgcgttggggtctgagcaagagctgaatggaattaattgcaaagaacatctatctcttaagataattaagttacacttctgacttcaccgtt

SEQ ID NO: 15362 - DNA, 1580 bp, Artificial sequence
  DNA replication origin
gccgagccaccggctgctccctgcgctctccgcggctgcgggagggggaagggaggggccgccgccgcccgcgcgcgctccctcctccctcctccctccggctcgcctgctcccaccccgggcggtgcgagagccccacgcggggcggccctcctgggggcaagggcaaggagctcgcgcgccagcgcgagacgagagggtggcggacgccggactccggcctcgcgccgctcgggctagccggcgccgccactcgccagactgagcgcgcgcccatccgtgcgatcggcaatcccctggcccgcctgcctcggttccctccccgcgctccgctggactttccaagtttcgggccgatttccacgcgacgggagcccaaggagcaaggcagcgccaatcgatgacagagcgtgcgaacgccggctgctggatgcccaggggctggagcgcggggtgtgtggaggagcacggtcgctgtccgagggctgggctctggcccagcgggtggggggagggggggtgggataccagctgggaggctgaaggtggttccgtgttgggggaggcgtggatggtctgaagctgacaacttgggagttccttcctctatccggtacccccaagtctccacttgctgtcggcgcggagcttcgagtgggggtgggctcaagttagtgcggccaacctggcagctggtcggtcaaggggcagtgtggactcccacgctcaaggtgcccggaatgagtcgggcaaggcttgtgcagagcccctccagtctggcgtggaagcgccaagaggtcatttgacatctcacgctgggtcgggtgcagctgggccaggatgttcggcagggctggagccgactttcagggtagatatattgaaaggaggattcgcccatcacgctgcagtttccctaaagctcttttctcactcccagcaaatgggagtcctcctttacttagatccccagaacacttttctaagtacgtctgtagtgacgctggcacatcagaccttaccccctgtgtttttaaagcgtttgtctacaacgtcttatttatattagattttatcgttgccctttgcaagcactctccatgctattcattgaagacctacactgcatcatgctgtcctattgacataggttgtcactttttaatcccaaacatccttgtgagataaatattacccatgttttatagaaaagagagaaattaaattactcatggcaagtaagttgtttgaaacagtttttctcattccaaagtaaagattgttgcccctataccacagcaaactctctagcacaatgcttagcgcctagtaatgtgtcggagttggtgcctgccagggggttcgtggtctccctgacttcaagaatgaagctgcagaccttcccggtgactgttaacagctcttaaagatggcacggactcaaagagtgagcggtagcaaggtttattgcgaagagcaaaaggacagcttccacagcatggaagagaaccccaggtgctggctggtggtggccagcttttattcccttgtggtcccctcccatgttccatttctgtcct

SEQ ID NO: 15363 - DNA, 1103 bp, Artificial sequence
  DNA replication origin
ggtcgcggctgccgctccctcggctcccgccgccgccgccgccgccgccgccgctggccaggctcggcccgccgccggccggactccaggtgctccgggcgctgggctcctccgggagccgcggattcacgttcggagatgagcaagcaaatgagagaagagagacgggggcacagagagtgtgacagtgaggaggggagggggagaggagagcgacggggggagaatgggaatgtacaagcgaacggtcagggagagagaaaaggggaaagagaagagaaaaataacacggaaagaaggaagagaaggagggagggacgggagagcgagcagcgaggagagggggagcgcgggggcgcagggcgcgggaggaggagcgcgctcgctcgcccctcgccccggcgtgcgggacggatactccggcgccgccgccgccgctccgggccgcgcagctcctgttctgcggcgggaggcggcgaggcgcgcgagggaggggcgcgccggggctgtggggaggggagactattccatcagccaaaggaggattggctgcatccaaatccagtccggatgcaaactacggccccggccttggtcgggcgaagtgcgggggatccaggcggtggtgggggatgggggcaggggtgggtgggagttggaggggaggcgtggggacggcttggaggagggccaccttctgcagttgtcaccgcgtcaacgctgggcagctgccagggcaccccgccccacctccttccaggcaacttcttccaacggccctctctgagggaccccaactctcctctctcacgcctcgccagtccagcggggcacaaagaaatctcagtctctccctaaactttgtgctttcagttatgccgccccctcccctcacccccaacccccgccctcccagcttcttggcaggaaggttaggccactggcaaagtcctcggcgagagccagatgatcacaaatgccaactgtgtgtcttggggccagttaagtccgctcatctgcccaggctctcagaagaccatttctttgctctcaaggctcccaggagaccgctgcggacacggaccgtcccgctctgggcccac

SEQ ID NO: 15364 - DNA, 1124 bp, Artificial sequence
  DNA replication origin
gccccgctgctgccggcgccgctgagcgcttgcagacatgctcagtttccggacctgcccgcgtggaagctaccaagagccggcagcggcgggggagactgagaggagccgtggggcgccgcgagccggaggctaccacgccgggggcggggggaggcacgcaccgctaaaaatagctcctgcggaagccacgctggcttagcgcgcacccctccccgcgcgcggcccctctggctggggttcgggtttctgctctggctaccgcggtggggaccccagctcgccgagtcctgccaggcgtctgcctgcactaggatccccatcccggtggagacggcgcctccagttcaggcgcccactcgaatagcctggactaagccagagctgccccgatttcggggtcccgcctgtcgggcagctctaatactaggctctccctagagaagcagaggaaagttttgttaaagcgataaaaaagcttctgcaaggaaagctgcaaggaaatttgttcagatttacggaggaaaaaaatgttcttcagatgctttggttgctgggaaaaacaaggaggaaaggaaggcgaagtctgacagcctagaaagggacccaaggcagcttggagcgggctgaagggggttctgcaaagagcttctaaaattcagaattctttgcaaggcgtttgtgactcctcattccgcagtgttttgcataattcgttgacaccccaccctgaccttggagattttcttgttcctgtcacctgaactgtaatttactttctccgcatgctgccttcactccttccccctccaacccggttttaaattgcaaaacgaaaagggcgcaaactctggatgggtagattcccagacctgaactggaacctggctgttctgtaaccctgaggaaaggagctggtcctgttgccgagttcgggatgtatcccagatctcctgtgcatccagcaaacacttcaagcgtaggagcctttcagccacctcacctgcaaattagctatttcccgctattagtgttcactctattctaccttaatttctgatcatttattattattttttaattctgttctttaaagtaagaggtacagatatttcctgggtcaa

SEQ ID NO: 15365 - DNA, 1638 bp, Artificial sequence
  DNA replication origin
caggtccggaaactgagcatgtctgcaagcgctcagcggcgccggcagcagcggggctagagctgggctgcgtcaggctgagcccattcacctcgcggccacaggagctcagcgccggcgccgcgccgcccagccccgccgagaggggcgcactcgccgccgcggggcccgccgccgctcaccgcagccccctcctggcgacccgcaagtaagtttgtgaggctgctgggcgttagggcgagggcttggcgcccgggggagtccaggagggatagcgagaggcgcggctggcgcccgggagagccggctggcctctgccccctgtgcctggcgcctctccgagccacttagccaatttgaaagcgggtggccattgggatgctcgagcggggacgacgggcagagcaggagggcagaactagctccagcgggggcccagagggcggacttgggaagaaggaaagaccgcgcggcgagggaggagaccgggcggcgagggaggagaccgggcggggaggctgggtttggggcgcgggagcccggccagggacagccgcagaaggaaagtgggggtgtcgccgggggatagagtgggagcagcgtgagagcagtgttgggggcgcagagtggagggcaagcgtgtcttgaacagaacggcaggaggatgggtggaaagtggggcgcgtggaaagcggatttggacgagagcaaaggacgccggtggaagggacagtgggctccggaggggcgagtggattcggataatttggggaatcagtaaaaggctagggggcacatcatgatggagtcagcctggaatctgtctcccgctagagtacccgaggccacatgttgggaactggctggggaaaggatggatgtagaaagtggcctggagggccgactggaaaatcgctgagggatttgggtgaagagggggggagctgtgcagtatcgggcggaggaactgggctgctggtagggcctgaaaggttcaggagagggttggaggcttccccgtgccgccccttgaatagtgatttagtactgttatctgaggttcactttcacccctggctcctcctccgtctactacccggcttggacgcacctcggctcgctgtaggcgagctttaggagatttaaatagacattaggcagtggggaaggtagtcgtttacggggggagctgctcgggcttccgttcagtggttcccggcacgctcagggtgcagtgtagggtctgaatgtgtgtattgcgggggtagggggagtggtgtcagttctaggccacaggaattcgtggtctggccccagaggtgcggtgtttttggccgggaagtcaggcagaagtctgcagcgtgcaactcgcagcggggcgtgtgtgtgcgtgtgtgcgcgcgcgtgtgcatgtttccggcccggggtcgcgtgtgtggctgcagcctgtctccgtgacaagaagatccagggatctacgggcggcacggggaagggattaaggggaacatacttccctacgtcttttctgcctccttttcccagggtagcattctttgcttatccaatgatgcctctttctaacctctccctctccacttacatcccaaacctgatgcgggtcttctctgattcggc

SEQ ID NO: 15366 - DNA, 1194 bp, Artificial sequence
  DNA replication origin
ccaacaaccatatgaaaaaatgttcaacatcagtaatgatcagggaaatgcaaataaaaaccacaatgtgatgaaacgcaaataaaaaccacaatgtgatatcaccttactcctgcaagaatggccataattaaagaatcaaaaaaacagtagatgttggcgtggatgcggtgaacagggaacacttctacactgatggtggcaatgtaaactaatacagccacgtagaaaacagtgtggagattccttgaagaactaaaagtggaattaccatttgatccagcaatcccactactgggaatctacacagaggaaaagaagtcaatattcaaaaaagatacttgcacatgcatgtttatagcagcacaattcacaattgcaaaatcctagaaccaatccaaatacccatcaatcaccaagtggataaagagactgtgatatatatatgatggaatactactcagccataaaaaggaatgaattaacagcatttgcaatgacctggatgagactggagactattataagtagctcaggaatggaaaaccaaacttggtatgttgtcactgatgttgggagctaagccatgatgatgcaaatgcataagaatgatacaatggactttggggacttggggggaagagtgggaggggggcgagggataaaagacaacaaatacagtacagcatatactacttgggtgatgggtgcaccaggatctcacaaaacaccactaaagaacttacttatgcaaccagataccacctgtaatccagtaatttaaagaaaaataaaatttaaaaaaaatggggatgggaacttgcatgggggagagcgtgtgggtgtgtgagtgtgtagcagcgggggcgcgcaggggtggggatcacgtgccggggtgggggtgcaggagggatgggagaagtagcaagggggtatacatggggggagggggatagagagcaaaagggaaatagttgggggagggaggatggagagggaggggaaagcagagggggaagggttagagctgggagggagccaggaggggagattggtaggggcatagtgagcagtgagagcaggtgggtggcgagagacaaggagagggagagacagggagagggagaaacagggagagggagagagagagagagagagaaatacagaacaatatattcaataaatatgttttcc

SEQ ID NO: 15367 - DNA, 1076 bp, Artificial sequence
  DNA replication origin
gcagtttaggctttttgaagttttggtgtgctggaaatgtggctggggtttctctcacagtggaggcgagtaattgcaactcttctttattattgtacatcttgaaagcgaggtcatttaagtcctgttgtggggttgagggccagaatctaatttttggaactttttaatgtagggagtgggttgggtaataaaatgcatattgagaataagacagccttctggcccctctgggtctagggcggtaaagcgtctgagggttgttgccaaacgggccatggactgggctgggtttcatatttgatgaaaaagagcctaaatgctaactgatttgggagatgtcttataaagaaagaggagcattaaccttggctatgccttcatctccagccacctctaagaggaaatcgttgggcaggtgggggagggctagtcacagaacgaaactaagccagacctggtgtaaggaggggaggtaataggagggttatagggtgggggagtggaggctgaagaagagttgggacctggcttggcctggcgaggcacagcctggggaggaggggagaggtcagatgggtctgtagaaaaggaggattcccaggactcagagcttggggtggagactgaaggaacagacagcagagaaagaagaaagatttgggatgagtctcattgggagcagagattaggaagggaccgatgtgtaaaagaatgcctggacatcaggcaccacagaccatttgcccattttatgagaagaattatctagatcttgtatgatggaggaatcaaaagtgctgttttctggctatttagaatcattgtttagtttgtattggggccaggcgatgttgcagaagaaaataagatgcttaggtttcaggtcaggtgtgagttgaagagattttaagtttttaagaacacaggctaagggagaaaaaggaggaatggagggtggaaggttgcccatagtgaaggaggcaagcccagagaaaagagagggtagagacagggagaagggaggtagtgagcagccctgggctgcaatgtgggcaagcagccaaagcaggcat

SEQ ID NO: 15368 - DNA, 902 bp, Artificial sequence
  DNA replication origin
aaagagggtggggtcacccctgggctggagatgccgctagccgcagcctgcctacaccgggccgagctccttggagagggagggacaccggctctggctgggggggcgcggagtgccgtggggaaatcgggcgggtggggcgcgcccaggcgcggtcgagttgccccgaaggccgcaggtgagggagggcgtgggaggcgccccaggagctgcctctagcgagtgcggcaccacgtgtccggccggggcggggtcgggcgtgccctcggagcccagagcaatcggcggcagtggcggcggcggcgcgttggagcctcaccaagagccgccgcccgcagcccgcgccggctcagcgcagtctcctcgctccgtgctcgcaggtgcctcctcctggacggcggcagcggcggcgcgaggagccggcgggcagcggcgcgatggggcccctccgcgagagcaaggtaaggagcgcggggcagtgcgggcactggagggcggggaaggcgggcactgcggggcgagaagcggcgggatgagagctggaggggtgacatttagagtctggggaaaggtggaaggaggtggtggtggggtctggagaaggcaggaggcattgcttaggagttgagatccaggagatggggaggtggtactggaggaatagattttggagaatgacatgattggagggttaatcccacctcctgaaactgggactgtggggtgtagctttcagttgatatcctgtgtgtgtgatgtgaatgaaaggaatttgatgcatccgcgactgggaaaagaggactcccgcgtgtcagtgaccctgccttagctcagggtctgcggtgtgcccggcggagtggctggcgcatggtacctgctgggcggcagatgtgcagggcgaa

SEQ ID NO: 15369 - DNA, 951 bp, Artificial sequence
  DNA replication origin
gcccagagtctctgcagcgcgccacccacgctgagagcggcttcttcaagaaacagatcctgcagcataatctgccagggccctggcaacaggaaccggtccttcaggcagcgagcccagggagcagaatcctggcgcccccggcgcgcggccctcagcgtgctcacgccgctgcgccccacccagcggtgcctgccctttggtcccccgcccttctctccattttgtcctcagccccagcagccgcccggctggctgcagaggccgaggggccgagggcaccggagcgcaagggattccgcggcaccacgtgtccaagccgggctaaggcgggcggagcgggccgggcccggctccccgggcctgagcgcaaaccagcagcgacgcggggtcccgtccgcaccggcacccggcccagccggggcccggtctcccgggcgcacgtaggtgcctcctcctggacagcgcgatggggcccttctgggcgagaaagggtaagaccggggcgcctatgcggtctctgctgtcagtgcccgcggacacgggagggcaactgatggtcttcggtacaatgagggcagtgatggggcgctccggaccccaggaccaccctttccaatgcgggaggtatccagggtgctcggcgatgcacagaagaaggtcgtggaaaatggggaatcaagggcactctcagcacatggaggccaagggaaaggccctcctgtttgattggtttgattggttgttgagacggtcgggctggactccttgttgcaacgagcaagattagccaggctaatgtataggccgtcggttttgaatctccctttactggttgttctcaggagtgggtttggaaatggtggcttttgataaggaaggttcattaagaataggtgttctccaggaagcctccattgagctctccaaagagggagacagtcccaagtc

SEQ ID NO: 15370 - DNA, 1315 bp, Artificial sequence
  DNA replication origin
ggattaaactcaatggttggactttgaatagaggtagaaggggaggggtggggagggagggaaggaacatactaagacctcctatgtcacagtttggcaaagagggaagggaagggaaggggagggaaggggaggggaggggagggaaggggaggggaggggagggaaggggaggggagggaaggggaaagaaaggagaaaagaaaaagaaattgttgggatgggttgcattgtgttatgatatgtattttcagtgggggagggatttctagggcttagaaaacactacagagaagaaatcttcacgtctaagccttacagtgagaagtagaagagatgaccagatagcaaaaatgaactggaactaaaaatgaaacgcttaatgcatttaacatgtgccaagttaagtaggaatatgagattgtcgggtttccattgcataaacttgcgctgccaagtttcctcacacatgaatgtaagtaggttggactttaagctaactgtgtgctaaaggctagtgaatacagtaaggaagggaggcagcgaaaggagaaggggtaggatgcagaagcatcccttccttttgtgcagaaacttccttcaggggtgaaaatgaagagtaatctcagagtaagcaaacaacatcaaaagaatctcacctagaagagtctttagccaaactgtggtagtgactctttcacccttagctatgataggacgatgtaactggattcatcatgaagagccttaggaaagctaggcgttctttatggggctacctggctgggactctggcaattctgagggagaaagcccctttgcaacagtctctttagaaacctattttccgagaaaagcaggtagtgggattgattattaagtttgcatttggactaagaaattagaacacattatcctttccagtctggggttcccgtcagccctacctaaagtcaaaacaaattatatctctattgcacttgctattaaagaagtctggagaatttttgttaaacccaattgctgctatctcctgagaactagaaagtgaacagccacatttatccccagatcaaagatcaggaaacttagacagagacacactgttcagatgaggcgcccaaggtcactggtgaagttagaaagagcttgaagctgcaggtaagtcttcgccccctagttttgagccgcgcctccttagctgtccccagacaggcaggctgtggtcgcgagataaattttcccagggagactgtcctaaagggcaccttaggttcacgctgaagtcagtgttcagggctcttcctctccagcg

SEQ ID NO: 15371 - DNA, 869 bp, Artificial sequence
  DNA replication origin
ctgaggaagaattgggacttagcttagcctggtgaagaggggagaggtcagataggtctgtagaaaaggaaggttagaaagactcagggacacttggggttgggactgaggggacaggcgggagggaaagaaggaagatttgggacaagttgcattgggaacagggactagggagggcccaatgtgtaaaagaatgcctggatgtcaggcacctcagactgtttgcctattttatgacaagaattatttagatcttgtaggatggaaaaattgaaagtgccattttctggctatttggaactactgtcgagtttgtattggggtcaagcggcattgcagaagaaaataagacacttagattttaggtcaggtgagagttgaaaaggttttaagttcttaagaacacaggctaagggagaagaaggaggaatggaaggtggaagcttgcccatagtgaaggagcaagcccagagaaaagagagtagagacatggagaaggggtggggggttcttgccctccagaaaagcagagaaggggtcgggggggcagaaataaggggttggggcacagagataagagattgggatgcagagataagaggttggggcacggaaatgagggatcagggtgcagagataagaggtcagggttcctgcccctcccccagaaaagcgggacttgccgctaagggtgaaggagaaggggttgaggggttctcgcccctcccccagaaaagcagagaaggggtagagacacggagagaaggggttgggattcttgcccctcccccagaaaagcaggacttgctgctaagggtgaaggaccaaggcaggcatccttgcgtggtttgacacctctgaaacctggg

SEQ ID NO: 15372 - DNA, 1291 bp, Artificial sequence
  DNA replication origin
gcgaggttaattaaatcctgttgtggggtttgagggccggaatttaatttttggagttttatttaatgtcgggagcagattgggtaataaaatgtattttgagaataagacggccttttgactttttagggtctagggctgtaaagtgtctcagggttgctgccaaacaagtcatgaactgggctggatttttatgttcgatgaaaaagagcctaaacgctatctgatttgggataaaggaaaaggagcattaaccttgactatgcctttagctccagccacctttttaagagtaaattgctgggcaggtgggggagggctagtcacgaaacgaaactgtaagcctgaccaggtgtgaggaggggaggcgataaaaagattatagggtggaggagcagaggctgaggaagaattgggacctagctcagcctggcaaggaggggagaggtcagatgggtctgtagaaaaggaagattagaaagactcatgacgcttggggttgggactgaggggacaggtgggagggaaagaaggaagatttgggatgagttgcactgggcacagagactaggaagggactgatgtgtaaaagaatgcctggacgtcaggcacctcagactgtttgcctattttgtgacaagaattatttagatcttacaggatggaaaaattcaaagtgccattttctggctatttggaactactgccgagattttattggggtcaagcggcattgcagaagaaaataaggcatttaggttttaggtcaggtgtgagttgaagaggttttaagtttttgagaacacaggccaagggagtagaaggaggaatggagagtggaaggttgcctatagtgaaggaagcaagcctagagaaaagagagagtagagaaatggagggaaggggttcgggggttcttaccttccagaaaagtgggaaaaggggttggggtgcagagataagaggtcagggtgtggaaattagggatggggtgcagaaataaggggtcagggcacagaaataaggggtcaggtcatggaaataaggggtcagggcacggaaataagggattggggcacagagatacaaggttggggtgcggaaataagggattgggggacagagataagaggtcagggtgtggaaataagggattggggcacagagataagaggttggggcacggaaataagggattgggggttcttgccctgtagaaaaccgggacttgctgctaagggtgaaggagaaggggttgatgggtacttgcccctgccccaggaaagcagag

SEQ ID NO: 15373 - DNA, 1260 bp, Artificial sequence
  DNA replication origin
ataagacggccttttgaccttttagggtctagggctgtgaagtgtctcggggttgctgccaaacaagtcatgaactgggctggatttttatattcgatgaaaaagagcctaaacgctatctgatttgggataaagaaaaaggagcattaaccttgactatgcctttagctccagccacctttttaagagtaaattgctgggcaggagggagagggccagtcacggaacgaaactgtaagcagcaccaggtgtgaggaggggaggtgataaggaaaaattcaaagtgccattttctggctatttggaactactgtcgagtttgtattggggtcaagcggcattgcagaagaaaataaggcatttaggttttaggtcaggtgtgagttgaagaggttttaagtatttgagaacacaggccaagggagtagaaggaggaatggagggtggaaggttgcccgtaatgaaggaagcaagcctagagaaaagagagagtagagaaacagagggaaggggttcgggggttcttaccttccagaaaaggggttggggcgcagagataagaggtcggggcgtggaaataagggatggggcacagaaataaggggtcggggcacggaaataaggggtcagggcatggaaataaggggtcggggcacggaaataagggattggggcacagagatacgaggttggggtacttgctcctcctctagaaaagcgggacttgctgctaggagtgaaggagaaggggttgaggggtacttgcccctctcccagaaaagcagaggaggggtagagacaaggagagaaggggttggtgtacttgcccctttcccaaaaaagcaggacttgccgctaagggtgaaggaccatggcaggcatccctgcgtggtctgacacatttgaaacgtgggtcaataatcagagaggtggccctgcgatgattaaacaccaagggaaggctgccttcctagtccgtgaccggcgccggagttttgggtccatggataaaacgtgtctcctttgtctctcccagaaaatgaaaggaattgaaattaagagaagggagagattgaagagtggaaaggagaaagtggttgagggacagtgagagaggctggagaagagagtaagaagaggctgcttacctgatttaaaattggtgagatgttctttgggctggtcggtctgtggacctgaggtcgtaggttcatctttctcatggagcaaagaacaggaggacaggggattgatctccca

SEQ ID NO: 15374 - DNA, 1026 bp, Artificial sequence
  DNA replication origin
tcggcctggcgaggagcagcctggggaggaagggagaggtcagatgggtctgtagaaaaggaagattagaaagactcagcgacgcttggggttggtactgaggggacaggtgggagggaaagaagaaagatttgggacgagttgcactgggcacagagactaggaaggaactgatgtgtaaaagaatgcctggatgtcaggcacctcagaccgtttgcctattttacgacaataattatttagatcttgcaggatgggaaaattcaaagtgccattttctggctatttggaactactgtcgagtttgtattggggtcaagcggcattgcagaagaaaataaggcatttaggttttaggtcaagtgtgagttgaagaggttttaaatttttgagaacacaggccaagggagtagaaggaggaatggagggtggaaggtttcctataatgaaggaagcaagcctagagaaaagagagagtagagaaatggagggaaggggttcgggggttcttaccttccagaaaagtgggaaaaggggttcgggctgagagataagaggtcagggtgcagaaataagggattggggaacagagatatgaggttgggacacggaaataagggatttgggcgcagagatacgaggttggggcacagaaataagggattggggcacagagataagaggtcggggtgcagaaataagggattggggcgcagagataagaggttggggcacggaaataagggattggggcacagagataagaggttggggcacggaaataagggattggggcacagagataagaggtgggacatggaaataagggattggggtgcagagataagaggttggggcacggaaataagggattgggggttcttgccccgtagaaaagcaggacttgccactaagggtgaaggagaaggggttgaggggtacttgcccctctcccagaaaagtgggacttgccgctaagggtgaaggcgaaggggttgaggggtacttgcccctctcccagaaagg

SEQ ID NO: 15375 - DNA, 1153 bp, Artificial sequence
  DNA replication origin
gggtttgtctcacagtggaggcaaggaattgcaacttttttctattattgtacaccttgaaggtgaggttaattaaatcctgttgtggggtttgagggccggaatttaatttttggagttttacttaatgttgggagcagattgggtaataaaatgtattttgagaataagacggccttttgactttttagggtctagggctgtaaagtgtctcagggttgctgccaaacaagtcatgaactgggctggatttttatattcgatgaaaaagagcctaaacgctatctgatttgggataaagaaaaaggagcattaatcttgactatgcctttagctccagccacctttttaagagtaaattgccgggcaggtgggggatggctagtcacggaagaaactgtaagccggactaggtgtgaggaggggaggtgataaaaagattatagggtggaggaggggaggctgaggaagaattgggacctagctcggcctggcgaggagcagcctggggaggaagggagaggttaggtgggtctgtagaaaaggaagattagaaagactcagcgacgcttggggttggtactgaggggacaggcgggagggaaagaagaaagatttggagagactaggaagggactgatacgtaaaagaatgcctggacgtcaggcacctcagaccgtttgcctattttacgacaagaattatttagattttgcaggatggaaaaattcaaagtgccattttctggctatgtggaactactgtcaaggttgtattggggtcaagcggcattgcagaagaaaaggcatttaggttttaggtcaggtgtgagttgaagaggttttaagtttttgagaacacaggctaagggagaagaaggaggaatggaaggtggaagcttacccatagtgaaggaggcaagcccagagaaaagagtagagacacggagaaggggtggagggttcttgccctccagaaaagcagagaagggggttggggcacggaaataagtgactggggcacagagataagaggtcagggtgtggaaataagggattggggcacagagataagaggttggggtgcggaaataagcgattgggggtttcttgccccctaggaaagcaggacttgccgctaagggtgaaggaga

SEQ ID NO: 15376 - DNA, 1255 bp, Artificial sequence
  DNA replication origin
atttggaagttcttgtgtgctggagatgtggctggggtttgtctcacagtggaggcaaggaattgcaacttttttctattattgtacaccttgaaggtgaggttaattaaatcctgttgtggggtttgagggccggaatttaatttttggagttttatttaatgttgggagcagattgggtaataaaatgtatattgagaataagacggccttttgaccttttagggtctagggctgtaaagcgtctcagggttgctgccgaatgagccatgaagtgggctggatttttatatttgatgaaaaagagcctaaacgctatctgattcaggataaagaaaaaggagcattaaccctgactaggcctttggctccagccacctttttaagagtaaattgctgggcaggtgggggagggctagtcacagaatgaaactgtaagcaggaccaggtgtgggatgcggggtggagggggtggggggtggcgataaaaagattacagtgtggaggcgctgaggctgaggaagaattgggacctagcttggcctggtgtggaggggagaggtcagatgggtctgtagaaaaagaagattagaaagactcagcactgcttggggttgggactgaggggacaggagggagggaaagaaggaagatttggaacgagttgcactgggcacagagactaggaagggacagatgtgtaaaagaatgcctggacgtcaggcacctcagaccgtttgcccattttacgacaagaattatttagatcttataggatggaaaaattgaaagtgccgttttccagctatttggaactatgtcgagtttgtattggggtcaagcggcattgcagaagaaaataaagcatttaggttttaggtcaggtgtgagttgaagaggttttaagtttttgagaacacaggctaagggagaaggaggaatggaaggtggaagcctacccatagtgaaggaggcaagcccagagaaaagagtagagacacggagaaggggtggggggttcttgccctccagaaaagcagagaaggggttggggcacagaaataagggattggggcacagagataagaggtcagggtgcggaaataagggattggggcacagagataagaggttggggtgtggaaataagcgattggggggttcttgcccctaggaaagcgggacttgccgctaagggtgaaggagaagggattgaggggtacttgcccctgccccaggaaaggcagagaagggg

SEQ ID NO: 15377 - DNA, 1410 bp, Artificial sequence
  DNA replication origin
cttcctcccggatggggcggctggccgggcggggggctgacccccccacctccctcccggacggggcggctggccgggcagaggggctcctcacttcccagtaggggcggccgggcagaggcgcccctcacctcccggacggggcggctggccgggcggggggctgacccccaccacctccctcccggacggggcggctggccgggcagggggctgaccccccctcccccctcccggacggggaggctggccgggcagagggactcctcacttcccagtaggggcggccgggcagaggcgcccctcacctcccggactgggcggctggccgggcggggggctgacccccccacctccctcctggacggggcgactggccgggcagaggggctcctcacttcccagtaggggcggccgggcagaggagcccctcacctcccggacggggcggctggccgggcggggggctgacccccccccacctccctcccggtcggggtggctgccgggcggagacgctcctcacttcccagacggggtggctgccggacggaggggctcctcacttctcagacggggcggttgccaggcagagggtttcctcacttctcagacggggcggccgagcagagacgctcctcacctcccagacagggttgcggcccagcagaggcgctcctcacatcccagacagggcggcggggcagaggtgctccccacatctcagacgatgggcggccgggcagagacgctcctcacttcctagatgggatggcggctgggaagaggcgctcctcgcttcctagatgggatggcggccgggcagagacgctcctcactttccagactgggcagccaggcagagaggctcctcatatcccagacgatggggggccaggcagagacgctcctcacttcccagacggggtggcggctgggcagaggctgcaatctcggcactttggggggccaaggcaggcggctgggaggtggaggttgtagcgagccaagatcacgccactgcactccagcctgggcaccattgagcactgagtgaacgagactccgtctgcaatcccggcacctcgggaggccgaggctggcggatcactcgcagttaggagctggagaccagcccggccaacacagcaaaaccccgtctccaccaaaaaaaaaaaacgaaaaccagtcaggcgtggcggcgcgcgcctgcaatcgcaggcactcggcaggctgaggcaggagaatcaggcagggaggttgcagtgagccgagatggcagcagtaccgtccagctttggctcggcatcagagggagaccgtggaaggagaccgtgggaagggggagagggctgtaaactcttgaaagcatgaatatattacatttaacttaacatttcctgtcatcag

SEQ ID NO: 15378 - DNA, 953 bp, Artificial sequence
  DNA replication origin
ggggtcagccctccgcccggccagccgccccgtccgggagggaggtggggggggtcagccccccgcccggtcagccgccccgtccgggagggaggtggggggatcagccccccccctggccagccgccccgtccgggaggtgaggggcgcctctgcccggccgcccctactgggaagtgaggagcccctctgcccggccagccgccccgtccgggagggaggcggggggggggtcggccagccgccctgtccaggagggaggtggggggatcagccccccgcctggccagccgccccgtctgggaggtgaggggcgcctctgcccggccgcccctactgggaagtgaggacccctctgcctggccagccgccccttccgggagggtgggggggggggtcagccccccgcccggccagccgccccatccgggaggtgaggggcgcttctgcccggccgcccctactgggaagtgaggagcccctctgcccggccacgaccccgtctgggaggtgtgcccagcggctcattggggatgggccatgatgacaatggcggttttgtggaatagaaaggcgggaagagtggggaaaaaattgagaaatcggatggttgccgggtctgtgtggatagaagtagacatgggagacttttcattttgttctgtactaagaaaaattcttctgccttgggatcctgttgatctgtgaccttatccccaaccctgtgctctctgaaacatgtgctgtgtccactcagggttaaatggattaagggcggtgcaagatgtgctttgttaaacagatgcttgaaggcagcatgctcgttaagagtcatcaccactccctaatcttaagtacccagggacacaaacactgcggaaggccgcagggtcctctgcctaggaaaaccagagacctttgttcacttgtttatctactgaccttccctccac

SEQ ID NO: 15379 - DNA, 1687 bp, Artificial sequence
  DNA replication origin
gtcacagttccctacagggcagaaaactatagaaacgggttggggaggagacatcttgggtatgtcactggtagaccaggcacccccgcccccaccccccaccatgggtcctgcagggcccttttccttcccaacgatgctggggaggcgggggcgtcaacgccgtgtccagacctgaggggccccccaaggcgtcgggtgggctacgcggccagcggctctgcagctggaggagaggacccgggagagggagccctgggagccgtccgcctagcccgctctctcaccagctccgcccgcagcctggccagggtggcctcaacgcccgtccagctctgctcctcccgcgccgccgccgccgccgccgcctcctgcacgcgcctcgagatcgcgcgctgcaccgcccactggaaggcgcgcgtcagccgtcgtctgaggtcctccagcagcgggctggcggcgagggcctcctcctggatgtccgtgctcctgccgtccccgaagaagtcgcacgcgggacgaggtgggaaccaaagctccgctctacctgggagtccctggagcccctgggaaattctctctctgcagcggcggaagtccccggggcccatcgcggagacgcctggtcactgctctaccgctgctgctgaaagatgagtttctaagtttgatgtttagggcggggtcagggcgggggcggaggtaattcaaggacccttgccaagtgggatgctgcaactgccccgccattcagagacgctcctttgctcccagtcccatcttagtcctccattagcgacagaggaaggaggcggttcccataactccaggagaagtttaagctgagtcgcttttttctgctgcttgcattgaaaggaagtctttctaaggagaaggcttggtaactgagcagtcagcctatgtaagtggaagttgaggtacaggtggaaggtttatgaccaaaggttagaatatttcaacccaaagccttcctggttgccttgatcgtctaatacgtcattccttaaaaacaattttttttcttcctactctgccaggcactttgccaagtttggggaatgcaaaggcttaattagacccctcacctttccccaggtattgcccgcagtcaagggggagagccttggccctgcttgctagttagaatgtaccttctacaggttcagtaaggcatacctggaagtctgagtctccatgctcctttctattttgactcctgtctgccatgtccacgtttatgaaggggttaaaatgaaaaatcaaaattccccttagcccaaagtgtgtgtgtttaattcccaactaataaggtttggctctgtgtcatcaccaaattccagtggaattgtaatccccagtgttggagatgaagcctggtgggaggtgattggatcatggaggtagagttctcatgaatgggtttagccccattcccgcctggtactttatagtgaatgagttcttaccagatctggttgtttaaagtgtatggcacctcctctctctctctcactcctgctctgccatgtaagacacttgctctcgctttgccttccactatgagtaaaagctccctgaggcctccccagaagcagatgctgccatgctttctgtatagcatacagaaccatgagccaattaaacctcttttctttccaaattaccc

SEQ ID NO: 15380 - DNA, 1550 bp, Artificial sequence
  DNA replication origin
tgcgggagccagctccctctgcttgtggggaggtgtggagggagtggcgcgggcgggaacctgggctgcgcgcggcgctcgcgggccagcgcgagttccgggtgggcgtgggccccgcgggccccgcactcggagccgccggccggcccgggcagtgaggggcttagcacccgggctagcagctgcggagggtgcgccgggttccccagcagtgccggcactgcgctcgaattctcgccaggcctcagctgcctccccgcggcgcagggctggggaactgcagcccgccatgcccgagcctcctcccaacccccgcggtgggctcctgcgacgccagagcctccccgacgagcgccgccccctgctccgcggcgcccggttccgtccaccgcccaagggctgaggattgccggcgcagggcgcgcgagactggcgggcagctccgcctgctgccagtgcaggatccactaggtgaagccagctgggctccttagtctagtggggacttggcgaacctttatgtctagctaagggattgtaaatacaccaatcagcactttgtgtctaactcaaggtttgtaaaacacaccagtcagcactctgtatcttggtaatctggtggggacttggagaacctttatgtctagctaaaggattgtaaacacaccaatcagcaccgtgagtctagatcaaggtttgtaaacgcaccaatcagtgctctgtgtctagctaatctagtagggacttagagaacttttgtgtgtagcccagggattgtaaacgcaccaatcagcaccctgtcaaaacggaccaatcagctctctgcaaaatggaccaatcagcaggatgagggtggggccagataagggaataaaagcaggctgccagagccagcagtggctaccggctctgctctctttcaattgtgtggaagttttgttcttttgtcctttacaataaatcttgctgctgctcactctttgggtttgcattgcctttatgagctgtaacactcactgcaaaggtctgcagcttcactcctgaggccagcaagactacgaacccatcagaaggaagaaactctgaacgtgtccgaacatcagaaggaacaaactctggacgcaccgtcttcaagaaatgtaacactcactgtgagggtccgtggcttcattcttagtcagtgagaccaagaacccaccaaattctggacacactattgcatagaattcatcctcgccaaaggcatatgtgaaacatttaagcaacgtaatgatgtctctgaagtcctgtgccgatagtttccaatgatatgtacagttgccatcagagatgcactatcacaaacctttgtggcaggaggttttgggggattaagttatcagttagggtgctttcaggtgcaagaaactgaataccccaataaaagtgcctcaaacaattggattttattattgttattgtctcacagaacaagactagccataggtaggcagttgcagggtggggtcagaagctcattgatgtcattgaagacactgcttttcatcttt

SEQ ID NO: 15381 - DNA, 706 bp, Artificial sequence
  DNA replication origin
ggggcaaggttatagattaacagcatcccaaggcaaaagaatttttcttagtacagaacaaaatggagtctcctatgtctacttctttccacacagacacagtaacagtccgatctctctttcttttccccacatttcccccctttctattcgacaaaaccaccatcgtcatcatggcccgttctcaatgagctgttgggtacacctcccggacggggcggctgctgggcggagacgctcctcacttcccaggccgggcggctgcggggcagaggggctcctcacttctcagactgggtggctgccgggcggaggggctcctcacttctcagacggggcggctggtcagagacgctcctcacctcccagaccgggtggcggcggggcagagacactcctcagttcccagacagggtcgccgccgggcagaggcactcctcagttcccagacggggtcgcggccgggcagaggcgctcctcacatcccagatggggcagcggggcagaggcgctccccacatcccagacgatgggcagccgggcagagacgctcatcacttcctagacaggatgacggccgggaagaggctgcaatctcggcactttgggaggccaaggcaggcggctgggaggtggaggttgtagcgagccgagatcacgccactgcactccagcctgggcaacattgagcactgagtgagcgaga

SEQ ID NO: 15382 - DNA, 921 bp, Artificial sequence
  DNA replication origin
actcagtgctcaatgttgcccaggctggagtgcagtggcgtgatctcggctcgctacaacctccacctcccagccgcctgccttggcctcccaaagtgccgagattgcagcctcttcccggccgtcatcctgtctaggaagtgatgagcgtctctgcccggctgcccatcgtctgggatgtggggagcgcctctgccccgctgccccatctgggatgtgaggagcgcctctgcccggccgcgaccccgtctgggaactgaggagtgcctctgcccggcggcgaccctgtctgggaactgaggagtgtctctgccccgccgccacccggtctgggaggtgaggagcgtctctgaccagccgccccgtctgagaagtgaggagcccctccgcccggcagccacccagtctgagaagtgaggagcccctctgccccgcagccgcccggcctgggaagtgaggagcgtctccgcccagcagccgccccgtccgggaggtgtacccaacagctcattgagaacgggccatgatgacgatggtggttttgtcgaatagaaaggggggaaatgtggggaaaagaaagagagatcggactgttactgtgtctgtgtggaaagaagtagacataggagactccattttgttctgtactaagaaaaattcttttgccttgggatgctgttaatctataaccttgcccccaaccctgtgctctctgaaacatgtgctgtgtccactaagggttaaatggattaagggcggtgcaagatgtgctttgttaaacagaggcttgaaggcaccatgctcgttaagagtcatcaccactccctaatctcaagtacccagggacacaaacactgcggaaggcggcagggccctctgcctaggaaaaccagagatctttgttcacatgtttatctgctg

SEQ ID NO: 15383 - DNA, 1314 bp, Artificial sequence
  DNA replication origin
cgcgccgaggggccgcggggctcgcaccgggccgtcccgcgctccacctgcccggcagcccgccggcagcttgcaacccgggagccccggctccctgcgccccctacgcccccaacgccgcgccggcgcctcggcccgcggccgggggttatgaatgggcgcagcggaagcaccgccccccccggacgtgacgctcggccaatggcagcgcgggctgcgtggatggatgaggtcagcgctgtcgtgtcgggaatggaatgtgtaagtgtaacattcagaaccgggtaacattcggcgaccgaacgcggcggtcggcagcgttcgcgcgggggcctgcgaagcgctgctcggggccggcactgcccgcggggaggacgcgccgccgccgccacccagcgccgccgccgccgccgcctccagccgggccgccgcgcgtcccgggggccggccccgcgagcgcaggagtaaacaccgccggagtcttggagccgctgcagaagggaataaagagagatgcagggatttgtgaggttacggcgccccagctgcaagatgcactagccggctgaacccgggatcggctgacttgttggaaccggagtgctctgcacggagagtggtggatgagttgaagttgccttcccggggctcattttccacgctgccgagaggaatccgagaggcaaggcaatcacttcgtcttgccattgattgggtatcgggagctttttttttctcccctctctctttcttttcctccgtcttgttgcatgcaagaaaattacagtccgctgctcgcccgccctgggtgcgagatattcagccccgctctctcccgtgcattgtgcaacccaaagatgaaagaccgaaggggagaaagttaaagaaatcgcccacatgcgctggatcagtccacggcttggggaaaggcatccagagaaggtgggagcggagagtttgaagtctttacaggcgggaagatggcggactggagctgaaagtgttgattgggaaacttgggtgattcttgtgtttatttacaatcctcttgacccaggcaggacacatgcaggccaaaaaacgctatttcatcctgctctcagctggctcttgtctcgcccttttgttttatttcggaggcttgcagtttagggcatcgaggagccacagccggagagaagaacacagcggtaggaatggcttgcaccaccccagtccggatcatttctggccccgcttcccggacgctctgcgccccttcgttccttgggatcaattggaaaacgaggattccagcgtgcacatttccccccg

SEQ ID NO: 15384 - DNA, 1055 bp, Artificial sequence
  DNA replication origin
gaagtgtagttccctcccttcgctcggactggggagagcaccccgactcctccgcggagtgccgcctggccccgacacttggagagcaactccagcttcagctggccaggccgagcaatctctcctggggaagttgtgaggggaccagggatgcctggttgtggcggggcggggggggagggggggggggttcccgggaagcggtctggactacatctcccaggaggccgtgcgctgagataggttcgctgctaagagtagggacccgtgattgagcccttccctgtccattacaaggggtttggcacctagcaggtgtggtgaggtgggcaggtgacggtcagctgtgtgatgagctcctgcgagctcgtccgtgggcctctgccgccggtaccgccccgccccctggcctcctgaaccaccatttagtagggagagcaggaccactgtcctcctgtgtggttctccacctgggccagagaacgctgcccagggtgaggttgaaacttgttccttcgcaccctgagatgtatgggttttgtgggggaattccgacggttgatacagttgtcttatcctacagggtggttcaggtggctaaatacttggcatgggggtgtaggggaggaggagtggcttaaaccccaataggcaacgtccccaaggggttgttaggaacaaagtctgggagccaggattgcaccggaggaggtcagatgaaagcctgtctggcttccaggataggaggctttcaatttgcctagacttggagcctgttgacagcctgtgatagggcctaataattaacagtgcctgagaatcaggttccttcaacttctgaacctatgtcctagctgtaggtgctggggatgctataagcagacatgataatgggaatcacgtggatagcaatacaattcgacagctcgtaaaaattaagtttctaaacattttttcctgcgtgtgaaaatacggatacagttgtggctggaaggggtaagggaatagcctcgggaataaatctggctcaagactggattgacttttaaaggcct

SEQ ID NO: 15385 - DNA, 1898 bp, Artificial sequence
  DNA replication origin
atcaggggtatgggggtgcgcatggagacgcccgcggagcgctggcgctggccagcggagcaggaggtgaggtcggcggagctgggaggaccgcgcctggcggctgcaatagccgcacctgtgcacgtgatcgcgagcggctcgggcgccagggcggagcggcgctcacctgggcccacgtgacggggcggggctcgaggagccccacggccacgcctcctcccgcgcggcgcgcccggagcccgcggagctgagcggcggcggcggcggcggcaggagcccgggaggcggaggcgggaggcggcggcggcgcgcggagacgcagcagcggcagcggcagcatgtcggccggcggagcgtcagtcccgccgcccccgaaccccgccgtgtccttcccgccgccccgggtcaccctgcccgccggccccgacatcctgcggacctactcgggcgccttcgtctgcctggagattgtaagtggggccgccggagcgagggtcgcgcggggagcgaggacaggcggcggcatccttgtcccccgggctgtcttcctctgcgtccgcccccggcctccttcccttcgacgtggctttgtcctgcgctccctcccggggtcctctcggtgccccgcgccgccgcccgggccctccctcctagcacctgttacgcgggcacctgctcccccgcgggcgacggaaattgcctggggagggcgagtaggcggcccggcagggccgaacattggggacgtggaggaaagaaaggtgttggggctcagaggcgcctttagaaacccagggcatggccaggggccgcgcttggccggagcgagctcctggctctcggcctcgcctgttgctaacctgccattttgttgggtggtgcaaaggtgtagccgatgactgggtgacctggtggctgccacgctgtggaaagtgggggcgggaggcaacaggaagaggaagagggctgaggacttgaacatgctttttccccactcacccttgccatcattagtggcctttggattggaaagaggagctgggcaggaggcagggcaaggagaaaggtgagttatgtgccatgccctgggcagtttctaatccagtgggtgtgacaatggtgggggaaagatggaaacgtggctctcgagttcttctctgcctgcctttgcaccttctcacttcctggcctccttacgcaactccaaacctttttagcacactttgttgggcccaagtaaaggtggggttacctgcctgtcgtgcagcctttttaggtagcacttgaactttttaaatggaattttatggagttggaaactttcgaagctccttgtggacaagtagataatgtgcaaatataaattgggcaacctgaggttgcatcatgcctgagaatggcaaataaaaagtgaaatgttagcgagttagtgcctttccggcaggctggtattgtttgctcggtttaggattttcatctctcccctcaccctggcctttgagcttgcataacctttatttgggtcgctttggtttcacttttgtgcttgtggagctggatcaccttgtgagcactgttctattatgctcaggtagccacaccaccctaagttaagtttagcccggatttgaatctgaaagaggagacgtgagtgagttgcaggctatgacatcagtaatgggatcctgactgcgaggctggtttgagtttgagcctggttcagaagcatctgagtgcttgggatgaggtgcaggcatccatgtgggaagagcggagagacgatggcattgggctggctgccttgctgtgggagggagacacgtttagaactggaagatctgcaaagaacgatttcttaggttctcggctactttattccatgttctgcaagctcc

SEQ ID NO: 15386 - DNA, 1175 bp, Artificial sequence
  DNA replication origin
caaacgagactttcttcgctgtagattggcactgctcgccttccccctggtccggtgcttgccgatcacgcccagcacaggttttatagcgcgctcctgggacgcgcacaagccggttggctgcagtgcagggaggaggggggagatcggctgggtggggaagtggaacgaaccccggggttgccatggcaattggctgtgggtgctgctctccttagggcgcggcgccggggcctgcgtgtgcctgtgtgtggcgactggcttttcccagagggtggggaggggctgggtggagttccgaggccaggacccagggctcgctcgagcgcgtgggaaggaaacgcccgtttcctcctggaagttgcttcgccttctcccaggacgaagacaccaccactccccaccatcctcctccaccctgaccgttccaaccagggctgcaagcgtggggtccccttacgggatgcctgcagtttggggccatctgcaggggattggcagaaggcccaggggtttagtcatgagggaagcacatgcaagtttgtcaccgtttagggcactcattgaatgtgttgagagggaggggagagaagcaagggaggaaaggagagaaagaggagaaagagaaaagtgtgtgtgtgttggggggaggggagtggcagggggaagggaatctagaaaaaaaatcgatatgtcaggaggtggggaatgctattggccaaatggcaaaattcttttgactctaatccttctagcttcactcagtcttaaaccccaaggtccacaggtttgttagaaataaaagtaaaacacacacacacacacacacacacacacacacacacacacataaagaaaacatcataaaataaaacaaagaaatcttggcagaagaaagccttgaagcacctgctgtagcagaccaaatgtgagacggcacacctgagagtccagaaacctttgacagttttctaagtgggttcagttcaaccaccatcaccaccatcaaaacctccagccagggaagaaatgaggaagaaactggcttaacttggctgacccttcagcaaatcaaatccttctctcaccgggcatccgctttcaagaaatgattgctggggcatgcttgtcatctctcatgggaaaaagggagcagttttactgctccaaaggtg

SEQ ID NO: 15387 - DNA, 1220 bp, Artificial sequence
  DNA replication origin
tctgcatcttaatgatcttcattcctgaccatattctgaattctatttctgtcatttccacctactcagcctggttctggagaggtgttgttgttttggaggaaagaaggcactctggctttttgagttgcagggttggttcttggggttgttctttctcatctttgtgggttggtgctccttcagtctttgaagctgatgacttctggatgggtttttagaaattttattctatttgatgacttaagggtttgaatgtatataaggtggattcagctgactggctttgtttctggaagattttagggaggcaacactcagctctcaactccaggactatgagttctaactctagagaccttgtatcaggccccaactttgctctctgtctccttgaggttaagaatctactgcgctggggtgggggtggtgggggtgcaaggtgcttctggactgctggttactgcactccagtgggtggtgtcagccacagtattttgtagtgtggtggtggtaggatccatccttgtttgcatttgccagcagcagtggcagcagcagtggcagtgcagtggggtgcatgcatgctgaagggagggtgctagtgggtaccagggtgcctgcctctgtgtgggtgttcactactgtggtggaggcaatgtggcttggggggctggaggatggtccttgctggcaactgtgcatggggtcgcgctggtggtggtgttggtacaggggcagggtcctggcaggtgcagttctttgtatgtcctctgtgcaccacaggcaggggtggttgctcagggctggggagggtccactgttttctgtgcctagtttcactcctgcagcagtattggcacaaaggcaggctgctggtgggggtgggactggctggctctgtgcccaccaaggctttgactacagtggtgctcagcggtgggagtgggggagatgggaggggttgggggtggtctacactctcactgtagcagtggcaggacaggatgcacacacacacacgtgctggtggagcaaggaagggaagaatctttccatgcacacatgcaggcaaagcaatgtagggagttgctgtgggcctgggggaagatgtactgtggggagagagtgggtgagctggtgcatgactgtgtgggccaccctgctggagctctctgcaggtaagtcatggcctgccagtgctaaaactatgatgctgg

SEQ ID NO: 15388 - DNA, 1476 bp, Artificial sequence
  DNA replication origin
tccgcaccgctttcaccgacctgcccgagcaggtgcccgagtccatctcgaaccagaagcgtggcgtgaaggtgctgaagcaggagctgggcgggctggggatcagcatcaaggggggcaaggagaacaagatgcccatcctcatcagcaagatcttcaaggggctggcggcggaccagacccaagccctgtacgtgggcgacgccatcctgtccgtgaacggagccgacctgcgggacgccacccacgacgaggcggtgcaggcgttgaagcgcgcgggcaaggaagtgctgctggaaggtaaggggttaacagcgcgcgggccgcgccgggcgcgcacacacctgctcggcttcccacccgcacgctcacactcacactcactcggccacatgcggacacaccccagggggccgggtgtgtgtgtgttgggggggggggaagggtggcgcagggggtggcagcatagagttttgtcaacttttacccaccctgggggcaatttgtctccagcccgcagtctttccaggctttaatccaggaggggtgtatggaaaagcgaggctagcagggtttcccagccggattgcctgcttagtatacgttgtttcatttttatctgcggataatcctggtagagtgtagggactgggatatggaattgagaatgaagggtgaacttagaatattcctacatccaacgttgccaagcagggctactgcgtaattgcaactcatagttttccgctttggcaaaatttcccactccaaagcctgggcagcccagcagaagagggttgactcataaaggggtgagagagaggtggcaatattgtgaatgctaaaactccgactatccttctggacgttccccctgcaaatgggggactagggttatgcctggagagttatgtcaggggccggggaatatgttgcagttttgggaaaaattcgctctccctgccgggcatctggccggtcagtctggattccaggttcctctgggttgagagctggtgaagtgatttttctgtctgcgttttctggagccctttctgagtggtgtggaaacaactttgcatttgtaaacagtttcccctgcgtgcgaagagcctagaaactactctctctcttgagatctgatgtccccagtcccctcattgttgaatgtgaatagaataggaaccaccgttttgcactgttcatggctatgttgagttatgtgggggagaagggcatatggtagtaaactgaattctcctgtctgcctacagctgcatttctcacttgtttctcttctctttagtgctgtgtacatacctctgtcagcactaataacgtgtaattattttatctatttactcagcctagcctagctgtagattgcggtatctggagtcttttatttagtggtgagtctctcttgagcttagttgctccatgacatgcatgctgagtaaatgaataaatgagccc

SEQ ID NO: 15389 - DNA, 1481 bp, Artificial sequence
  DNA replication origin
gtgtgagtcattctaaaagacttagagaactttcaacgatgatacacatcaatgggaatgtgttcaataagatttatttcctctcaacaccttgctgggttgggtttacttcaggaattaacagaactgttgtgggtttgttttgtgttgtgtttggagagagggtagacagcagtgggaaggggacgtaactgagaagcatgaaacaccttgagtggaccatgagacctgcttagagttaggggaaagcttgagaggttcaaggatagaagaactcagggtggttcaggtgtgacatgggttatgtgggcatttctggattgctctgggaaggtaaacaatcattataatattgttaccctggtaaaatgcaacttgaaatccaaataactaacttgcaaagcaacttttgaaatacaacccattccaactgaattcttaaatggggggcttcttatatgggaactcaggaagaaagagagatccccaggcagcatttggtgtggcactgggaaaacaaagataggtcaaaagcttaaagcatagaatgagttagagctggaagaacatttgtccctggggtctgaggcaggcatgacctgttgaaaaccccaggccagcagagacacctgtccagggctcgatagaaaacatttcttgcatttaaggacaggaggtttaagccactcgggctacgttgactcttcattctagaatcttgggacagcgtattcccttttaactcctggggagcccagggccttggtctgagtttagcttcctccagggaacccgggtggaaaggagagacaggtaagaactccgcagaggcagcgaagcctgggtttgaggaagcagagggaggagacctggatcagttacaaatgagttgttaagacccagggacaattctacgggctgggtatgaaagggaagtcggctcaggaggaccgagtgagggcaccgaggcgggacgcacgcacccggcgaaggtgcagtgtgggcgcccacggagtgggggagctgggaagaaagggggctgcggtgggctggagagaagcgggacggggaaggcgctcgggaagctgtccccgcggcgtcgtgcgctctggggacagaggaggggaggtctgggcgggcgggtggcgtgtgaccgccgaggctgcggcggctggaacaggtgagcggccgctgggttgtgggtccccgcccttcaccgccagcgtgcctcctcccacggactctctccagcgctgagctgctccgcggctccccttgctttggggttttgcaactggctgctggcttttttcccctcccctgtctcggtctctccttcttcttttaggttgctccaccccggtcaggatcaggcgagggggaaccagcctgagtgcagctgccaactcccgccgagtgcgtctgcgaactcccggagcggagtcccgcgtgccgccacctccccgcgggacgcactctcc

SEQ ID NO: 15390 - DNA, 1431 bp, Artificial sequence
  DNA replication origin
gtgaaccactgcaccaggcctcattttctattttaattctcatgaccactttatgagagaggtaccaatagtatcccagataattgggaagcatagagagactgagaatacgttcagttgtataaccctgagaaagttgcttaatttttagacctcaaaggaggtacagactcatgcagtgcattagttaatatggtttggctgtgtccccagccaaatctcaccttgaattgtaataatccccacatggcaaggacggggccacatgcagataactgaatcatgggggtggtttctcccatactgttctcctggtagtgagtaagtctcataagatctgaggcttttacaaatgagagctcgctgtacaagctctcttccctgccaccatgtaagacaggactttgctcctcattcaccttttaccatgattgtgaggtctccccagcgatgtggaagtgtgagtcaattaaacctcttccctttataaattacctagtcttagtgtgtctggtgggttcttggtctcactgacttcaagaatgaagccatggaccctcgcagtgagtgttatagttcttaaaggcgacgtttcaggagttcgttccttctgatattcggatgtgtacggagtttcttccttctggtgggttcgtggtcttgctggctcaggagtgaagctgcagaccttctcggtgttacagctcttaaggtggtgcgtctggagttgttcgttcctcccggtgggttcatggtctcgctggtttcaggagtgaagctgcagaccttcacggtgagtgttacagctcataaaagcagtgtggatccaaagactgaacagcagcaagatttactgcagagcgaaagaacaaactttccacagtggaaggggaccagagcagtttgccactgctggcttgcgcagcctgcttttattctcttatctggccctacccacatcctgctgattggtccattttacagagagtggattggtctgttttacagagagctgattggtcccttttgacagggtgctgattcgtgtgtttacaaaacctgagctagacacaagagttctccatgtccccactagattagctagatacagagtgctgattggtgtatttacaaaccctgagctagatagagagtgccaattggtgcattcacaatcccttagctagacataaagattctccaagtccccaccagattaactagatgcagagtgccgattggggcattcacaaaacctgagctagacacagggtgctgattggtgtgtttacaaaccttgagctagatacagagtgctgattggtgtatttacaatcccttagctagacataaagattctccaagtccccaccagactcaagagcccagctggcttcacccagtagatcacacaccggggctgcaggtgga

SEQ ID NO: 15391 - DNA, 1051 bp, Artificial sequence
  DNA replication origin
tttatttatttcgtggccgtctccctcccttcttggccaaactgcggcgctttgtgcaaacggggcaggtcccgcggggactccaccgggacgtggccccgtctccgcgcgttttggcaggcggggggctgcgtgtgtctgctcccctccctccccctctcccctcgctcccctctcccggtgacgattcgccgtaatgtggtggcaggaagcatgacgccgtgggccgaggctgcctctgctctcgtcgctcccggcggctgcaggcagcgggcgcgcagcgcgggcggcagccgagctacctggcgggggcagggccggagcgcggcgctgtcctcacccccgctcaggtgcagggggagtccgcgcggggcggggggccgagggcggccgcgggacccccggccctgctgtccgctgccagctggccggagcctctgccagcccgagcccacgttcgcccccctgaacggcagctggcgcttttcgtctgccccacaagaggttaatctttgttggtgttgcagcttctttgtggcttccccaggacttgtatcctcggctttgcaaacttgcccttttcccagccgctttgcaggaggctgcggagacgaagatgagcggaaagttggaaaccagcaggcatcacaggacggtccctttggcctcgtagctgtgctgagcctgggaggcggaggaggaggtggaggcggcggcggaggagggtttgtcaggctggggagaaaacttgatgaggaagccaaattgtgatttgttcaggtttccacctgattgatagtcttcaaagccagtaggtctctaccttcaactgtttcgcggtggccttttgtttgtctggggcgtggagaaggagagaagtcgatgaataaggactttccctcgacccctccccttttaaagagtggttgctcagcttggccccctgggacactgccttttaggccctggagttcttccccaacctgctctctgatcactttctctctgttaagttaccagatctccaggtctcaggcaggccccgatgagc

SEQ ID NO: 15392 - DNA, 963 bp, Artificial sequence
  DNA replication origin
atgcggtcggttgtgagccctcgggtttgcagggtaagagctaggcctagataggtgaccgaggaggtgcatatttgtgctttcttaggggagacctaatactcccgttctgccaagaagtttaaaagagatagtatgggcgttgcagtccctttgagaggggctacacaggagcagatcattaacacattgaaggagagtggacggttttagggataaggtaaaaaggtcgcaagcaagggcctgtacgaagaggtgggggctgtctctgaaaccttgaggtagtacacaccaggtgagccgacgtgaaatgtgggtgtcaggattttcccacataaaggcaaagaggttttgggaattcgagtgtaaaggaattgtgaaaaaggcattgtttaaggtttagaacagaaaaatgagtggtattggagggaatcgtgaaaagtaaagtatatgggttaggaactgctggacataccgggagtacagcttggttaatgagcctggggtcctggactaagcattaagttccatgtggctttttaacaggtagaattggtgtgttaaaaggggagtttgttgggcggagtaggcgactggtgaggaggtgagaaatgataggctttaggcctatgagagctgctgaggaatgggatactgcttctgtgataggaactgggtgggctctttaacagtaatgcggacgggggtgtggtgttctgtgactgaaggtgtggaagtatcctaaactgcggagttaactacgggcggcggataaggagaagttgcatgttttaaggtgggaggttggaggagtagaagaaagttagatggcccagaggagtctgggttgatgcgttgggtactatggggaatgtggatgtggagagtagtgtggcgttttgaaaggatgtctctgcctaggagcggagttgggcatgagggcaggactaagaaagagtgagc

SEQ ID NO: 15393 - DNA, 1009 bp, Artificial sequence
  DNA replication origin
caccctttttgagtcctgcaaggagacacacaattatgtggtttcaacggtggcatccagaggccctgtcttgataatcccagtgggggtcctggttggggactgcctccgcaccagtaggctgggcaggagcttggtgatgaatggtatcagcatgtgcctgagctacagtccagatacggtcttggtcttctggggtgagggtggaagagaggataacctagaggtcatgccgggtcagttcataagactgggtgaggtactgaaattttctaatataagaggtagcatcttctggaaatgaaccgaatcttttgttaatttgagagagatcagtgaggcagaaggaaacatgaactctaacaataccttcattttctactactttctgaagggggtattctagcaccggcgctgaagtaagggcggggcatgggccaaagatggcgcccgagcgagtaagggcaggagagaaggaagaagctggaagtggtttctgctgagggtttgaagggggaagggtggttgagttgataagcagtggaggataggggcgtaaggtggtgggatgggtttacaagcctcaggagagggcggtgggggaggagaatgggtacaggcaatactagaattgtcctgagtaggggacggtgtaggaaaagaagtggatactgcttactgagaagatggcgactgggaagatggcagctgagaagacaacgaggaggcttgcaggggttaaagaagatggttgagaggaagaggtaagggctgggaggggtggacagcagtctgctggatttaatgaggaaaaagaggtagggtcgggaagagaaaggcgatcagggtggcaagaatggagaaggatttgaacaggtaagaaagaattgcagaggttgggttgtgatttgagaataaaaaggcctggacataaggaacttctcatttcttcagttgtcagcaataattgcttaagtcagttaaaattgtaaagttgaatgtttcattt

SEQ ID NO: 15394 - DNA, 994 bp, Artificial sequence
  DNA replication origin
ggggtgaggactcagggttccacatcacagtgcagaccttttccccactcctcaagaggtatgtggccctgcattggaagtccaggagacaccaggcatgctgtgagaggaggggagaccaagggccacctagcacgcctcagctggtccagtagccactcccagtcctcaggggcccgggaggctcggcctgaccatgtagatcactgactatgtagagaggtataccattcactgaggcgctctcaggagcctcaggctggtggcccgtggttcaaatccatgccacaaagacgttttgttgtgctggagtgatgtgttaaaaaaagagtcatcagatgcccttaggtggggcagacgttccctgttcctcactgttcaacattccaaggagtatgggctgtgttaggtgtctgtaactttgttggagagtggtgcaggtgccctgggaggggtgacagtggggtggggaaaagggcatggggagatagtgggtgggaggaggttgcatggagaaggcggtgtttgtcctcgtccatgaagaatgggtggaaattgccagccagagaagggtgggagagtatgaattccaaggaggggagcggaggggtgaggtccagagcaagggcacggctgaaaggagcagcctggctgagcgtggctgagacgagggaaggtggagccaactcgaggggcagggcagtggctgcaggggtgcatgcacaccacactgaggaatttggacattgtcttacatgaccgggagttccagaaggttttatccagggaggggaccctctgtgctaacacattcagatgctggattcgcatttcctagctatgtgatgtctgcatgtgttggctggggctgtgtggcctaaagcacctcacctcatctgtacaatgggcatcataacactgtgtatctcaaaggagagttgtggggatcagaaggaaatacgatgtgaaaagcccccagaaaaattcctggcac

SEQ ID NO: 15395 - DNA, 1186 bp, Artificial sequence
  DNA replication origin
ttactaggagaacctatgctgtgattgactggtgatgtctgctgtgggtgaggaatgcacagtggtggtgtgtgtgcctctgtagcctatattctgtttgttttaggatccagacatgtcacggcacatttggaattttggcaacacaggcttgatagtgattttttaaattccaaggcccaaggggttttgggggaagtaactcatccttaggaaggcacataccctgacttaagaagaccatgttagtcatcagacagaaatgcagttctgactgcggccttatgcctgatcttcatcaggtcatcctttggcctaggtttcaaagatctatgtctgatttcaagaggatgggacaagtataattggacagggttgtctcaataaaaatcactgtgtgaggcagcactgctagggctccatggtagaaagtaacatggggtggggagagatgagggtttggggagagggattctcatggttgcagaatccactgtgggcttgggtgtggtggggatggaggacattgtggtgggtcaggggttctggcagatcataatgtagatgctgtgtggtctcatggggacagggccaggactcccaactctggcaggggcaggaaatggtttctcggtgcctttttagagtgaagaacacctgcaatgctccctgaggactcccagaaatagttagggggctgactgtgatccgcttggaggccacgccacagtaggtggagacaaaacctcctgcacagtgacccaacttggagcccaaggctgggagccctgagaaacgcaggtcataattataacactgcgtgggatgaatgcgctggatgacagggaggacgtcactggctgcctggtgggggggactggggacagaggtgctggagggtttcacagagataagagttgagccaggcacagttgtgaatgtgggtcttgaaaatcaggagaaatgcatgagcaaaagaacagaggcatgaaaaggaaggctgggtcagggaagggtgtggatttggggtggatggaggtcaggagacagtggcaggagacgaagccagaaggggtggggagtgtggagacagatctggaagggatgtggatgttaggagcagacacaaagtcctggctctggaagaaaaggttaaacgataggatggatggaaggaaggaattag

SEQ ID NO: 15396 - DNA, 823 bp, Artificial sequence
  DNA replication origin
gccgcggggctacagggccctgaagacgcggacacacttcgggtaccggggtggctgcctgccgagcggccgctgaaggggttggaggacgtgcggtcactggcggagccactgctgctgctaaggcggccattggccggggctgctccgggcgggacgggggcgaccagccgcggggacttcaggcccatcacaggcttggaggaggcgtagaggtggcggaactcctcgtcaaacagctccaccgcctggcctgtgaacttggagaggatgttccggtgcacgtgtccgcagagccaggtgaagctggaggggaagaggagagagagtgatggaggagaagggggaaggatggggaggggaagtggaggaggagggggaggggaggaagagggagggaggaggtggaggaaggagaaggagggagaggggaagtgggagggggaagaggaagaggaggaggggagggggaagggaagtgggaaggggaggaggaggaaaaggaggggagggggaggaggaagaagaggaggaagaggaggaggaggaggacagataggaggcttcgccggcccaggccccaagatcctcctgggggaccagtctgggagttgtgggtcccctcggggcagggacggaaggggaccaacccatgcccactgcccctcctcttgggctcatttcatcctggcagaaaccctgagagagagacattgcgacacctctcttacagacgacaaaactgaggctcaggggccagaatgtgtttgcgggtgaataattaagatgccagagcgaatccctggtctcaaggctccctcct

SEQ ID NO: 15397 - DNA, 1286 bp, Artificial sequence
  DNA replication origin
cacagagaagtcaaaacctccgtcctggggttcggtcagttagtgggtcagataatcatctcagctcaaccactactcccaaccagcagcggccacgtccccgcgtcgccctcaaagactacaagtcccagcgtgccgcgctctgggccgtggaagccccgccttttccggcgggccccgcttcctcgttgcccccgccgcgggcgcgagatggattccgggtgctggttgttcggcggcgagttcgaggactcggtgttcgaggagaggccggagcggcggtcaggaccgcccgcgtcctactgcgccaagctctgcgagccgcaggtgagaagctggggcctcttcgccttatcccgggccccaggcctcgccctccgcggggccccggccccggcctcggcccctccgtccgcgcgaacgcaaaccctggcaggctccagcgcccgccgcgtcccccgccgtccctcctcctccacggggaagcggctttcccaggccccattccgggtccatgggcgagaatccccgcgttgtaagcggcttgactcccacttggcatttggccggcctggctgctgccggctggtctcaacgcccctgccctgcaatctccggtacctcccgtttgtcttcactgctcttacagctgggcagtcaggcctcccaaaacggtgacctccggcaaacccactctcccctccctcttcggcgagctccccctgcccgtaccaaccccgcgctgatggttaaagtccttcagttatatccgtttttcaaggcacatcttaaatgtcatctcctctaggaagtcttttctgatttcgtcttccagccaaatatttttgtctttggcccccttccctctatttagcttctacttaaagcacttgtcagtattcccacaaagtcctgagacccggagtgctaaatgatcgcaccagcatgggttcttgatgcccttggcagtgcctaacagtttttattaataatagtgactccgcgaatatttttgaattagtagagtattacttcctattctttcatgagtgtaaatagttcatcagtcaaaactaatatttatggaaaatacggaagtgttccgggcactgtggtgggttccttcgcatatactgtctcattcgttcctcacaattgtactgacaagatgccaggcactcgataattactgaattgtgtttttggttatttcagttgcattttctccttatcacatacgatctttcaaagttaccttcagccctggatcatgtagactcaaaaca

SEQ ID NO: 15398 - DNA, 2014 bp, Artificial sequence
  DNA replication origin
cgggagggccccgccttggccggctctctcccttccccctccgcccccggacggccgctggggcgcgcgcctctcctcgcacccccaccctgagtccccacactccgcggggccaccgagctgctgaggcccctttgcgggcccgccgagcggttccgggtttagggttcacaggtcagagttgactccctgaaaagtgcagccggtttgaaatgcaagatggcggcggcgtggcgctgagaggcgcggcggcccctgcaggtagtggcgcgagccggctccgcgaccagcgggcccggagactctgggctgcgggtgggaactggagcgcagagtccgcggccggcacgggaaaggcgagtagcgcggggcctggcgggaggagggcagcctcacagcagagacccctggggctgagcccgctcgcggcggcgggtggcggggtggacccggcgtggggcgtccgagggggagggacggggcctgcctcgcggctgggtagtcgccgcagagggacagacagacccacagcctccctcgctctttttgggtgtctccgccaccgaaagagcttgggggcggggggctctctggagggaacatctcagccccctgccttggtgaggacccagcaacttaggattgttgagaggagtgaagactgcgtattcccagcggagggcgccgccggagggagcaccccagtaatgttgggagtcctagaggaggtcaggagcgctgtcctccgggggcgtgtggctgcctcgtgggggacccagtctccctgagagtaaggagagattctcttgctggagctgagcgcactgactgaggttggagccccagcaaacccttcaggagaagtctttacctccagttcaaggaaggctatgcgcacccgtttcggggccaggccatgtcccaactttgggaaagactgggagttgagtccttaagaaccatattacgattgtgacgaagccctgggatttagggagaagttaattaaagaggatggtaggggcgtgggggtgtgggggctgacccatgggaatcctccaagccttagggcccacagtgaacaatctactaatacctcaaggggtataaaaggctgggaaggagaggtgtgagaggaacaaggtctaagggcaggaaagaagagccctggcagatcccctttccttatatatttacaccaaagttggaggtaaagggacttggcaattctttgttttagtacctttcctgtcctctctcctccgtgggtaactgtaaggaaagagcatagcccctgagaaggaaaagattccatttgatatccttagcttaggttagtgaaggatccagcagctgggaaggcgtcaatgagagacagcaggcgggggaattagaacagagactagggatgagaaaagaggaatacagggaagatatcggacagagcaggaattccacagcccttttctgtcaactcagcccagctattagaaaaaaaaaaaaatgcgaagagctaatatttgagagaaaaatgtaaaggctgagagagaagtcgtgatgtgattaggttgggattccatgtaacttaagcagttctcttggaggttaatgtgatagcagaaaaaggaaaatcacaaaattggaaaatatacagcggttcacggttagggaggaagaagcagtctccccccaggaacagtgaatatttggtttggggtgtgtgtgtgtgttgtgtgtatacatatataagagcactttagatttgctggtgttggtcattgtttctcagtctttgtctgaaagctttaatttgtgttatatggtgctacattaattatcttcgtttctgaaaaattattctgaaaaagtcatttgtttttatgtcgggagcgaaggtgagcaggagttggttttaacagggaaattggccctagtatacccatcgattattttaatttctaaagtagcaattctgactcctgattttaagcaaaagaaatgtgagtgctgccaa

SEQ ID NO: 15399 - DNA, 1376 bp, Artificial sequence
  DNA replication origin
gtaggggcggccgggcagaggcgcccctcacctcctggacggggcagctggccgggcggggggctgacccccccacctccctcctggacggggcggctggccgggcggggggctgatgcccccacctccctcccggacggggcggctggcctggcggggggctgacccccctacctccctcccggatggggcggctggccgggcagggggctgacccccccacctccctcccggacggggtggctggtggggcggggggctgacccataagcgctaacttaagttagcgcttatgggggctgacccccccacctccctcccagatggggcggctggcctggcagggggctgaccccccccacctccctcccggacggggtggctgctgggcggagacgctcctcacttcccagacggggcggctgccgggcagagatgctcctcacctcccagacggggttgcggccgggcagaggtgctcctcacatcccagacggggcggcggggcagaggcgctccccacatctcagatgatgggcggccgggcagagacgctcctcacttcctagatgtgatggcggccgggcagaggtgctcctcacttcctaggtgggatggcggccgggcggagacgctcctcactttccagactgggcagccaggcagaggggctcctcacatcccagatgatgggcggccaggcagagatgctcctcacttcccagacggggtggcggccgggcagaggctgcaatctcggcactttgggaggccaaggcaggcggctgggaggtggaggttgtagcgagcccatgtatcagtaatttgttatgttgtattgtgggatagtatttcattgtacggatatgccccttttgcctattcatccacagttgatggacatttggattgcttcacattttggctaatatgaatagtactgctgtgaacatttacatgcaagtcattgtgtgacttatgttttcatttctcttggatagatacctgggattagaattgcagaattatatggtaaatttatgattatcttaaactgctctccaaagaggctgctacatttccactggcactgtgagggttccaccttgtccacattcttaccacccttgttatcatctgtcctgttttttgttgtttgcctttttgtgtgtgtgtgtgtgagacagagtcttgctctaacacccaggctggagtgcagtggtgcaatctcagctcactgcaacctccgcctcccgggttcaaacgtttctcctgcctcagcctcctgagtagctggaaccacaggcactcaccaccatgcccagctaacttttgtatttttactagagatagggtttcgccatgttggtcaggct

SEQ ID NO: 15400 - DNA, 920 bp, Artificial sequence
  DNA replication origin
tcagccccccgcccggccagccgccccgtctgggaggtgaggggcgcctctgcccggccgcccctactgggaagtgaggagcccctctgcccggccagccgccccgtccgggatggagttgggggggtcagccccccgcccggccagccgccccgtctgggaggtgaggggcgcctctgcccggccgcccctactgggaagcgaggagcccctctgcccggccagccgccccgtccgggaggtgaggggcgcctctgcccggccgcccctactgggaagtgaggagcccctctgcccggccagccgccccgtccgggagggaggtgggggggtcagccccccgcccggccagccgccccgtccgggagggaggtggggggtcagccccccgcccggccagcccccccatccgggaggtgaggggcgcctctgcccggccgcccctactgggaagtgaggagcccctctgcccggccaccaccccgtctgggaggtgtacccaacagctcattgagaacgggccaggatgacaatggcggctttgtggaatagaaaggcaggaaaggtggggaaaagattgagaaatcggatggttgccgtgtctgtgtaggaagaagtagacatgggagacttttcattttgttctgtactaagaaaaattcttctgccttgggatcctgttgatctgtgaccttacctccaaccctgtgctctctgaaacatgtgctgtgtccactcagggttgaatggattaagggcggtgcaagatgtgctttgttaaacagatgcttgaaggcagcgtgctcgttaagagtcatcaccactccctaatctcaagtacccagggacacaaacactgcggaaggccgcagggtcctctgcctaggaaaaccagagacctttgttcacttgtttatctg

SEQ ID NO: 15401 - DNA, 1284 bp, Artificial sequence
  DNA replication origin
cactccgcggcctcggccacgggctccttggacctgtccagtgacttcctcagtctggagcacatcggccggaggcggctccgctcggccggcgcggcgcagaagaaacccgcggcgaccacagccaaagcgggcgtgagtacgggcctgaggcgggctcccagggcggttcccggggggactgccggcagcccggcgctcggaggggcctgggggtgggcggcgccggtcagggtgacagttgtcgggggagaagtgtggtcgaggacgagtaaaatggaagctctcgggatcggaggtgcgggtcggatcgctgagctgaggctggccgggagaggactaagcatttggtcaccacctacttttacgcaagaggaaatcgaagcccgccacagcggagtgcggtctggggccaagccgcggctgttcggccgcccgcacgaccccccactccctggccgatcgatcgcccaggctcctgccctaggttcgcatcaacctggaggcaacacgcatcccctgactgctttctgtctgcgccataaacgttgggggggagggggcacagggacagacaggttgtaattcaggttctctgacctccattaacgatccagaggagttccgtaataacagcgcagtgaataataccaggttgcataatgtggagggatgaagaccaacatttcatgtacgccccccgcttccaagcctcgtcataaccctttgagaatgcgtagttgtgctatctctttgacagatgaagaaacggattcaaaaaggtaaacagtaaggggtagatctaaaattggaactcagattgcctgcctcctaaatcgttccctttctatgccgtcatgctgcagttacaagcagtgtctataggggaagtttggaaggaaggagggtcctcttgaaagaagtgctgcttctaggtctgaagtgcagtgacggtttttgcagggcagagttaaagctgagcagttactcccctcccatccacctccccaccccagctgctgaaagaggcctaggtggaggggtttcagcattcacagaaggttgaagaagtcggggaagctcgctagtaaatttagttaaggcagcaagtaatatatagctggactgaaggtgttggagtgagtgagggtaggcatggagtaggaaaaataggacctgagagaaggttgggaacttgggaatgagaatgagaggctcaggggaaatgtgtggtggaagtgacaatgtaatcctcttcagttcagcagacgatttcagggtctt

SEQ ID NO: 15402 - DNA, 941 bp, Artificial sequence
  DNA replication origin
gttgcgactcgccgcccgggagcctgggagacccagaggctgcgcccgcgccccctcaccagtagcagctgctgtagacgcaggcgtcccgcggggggctggccggctggtagtggacagcagcggggccattaccttccatggccggctagctgggccagggcccgggccggaggaagaccgactggaccagacgtaggaaagggcgggcttgtagtggcccgcgtgggttcccggcgtggggtgggcggagcccggggggagagggccggggcagtttccgggtggtggggccagtagcgcggtgggcggggccagggcgggactagcagcacgagttcccggcgcgggaagcccgggacgaagtaggcggagctcggggcaagcggcgccagttcctgggagggtggagcccaagcgaagtgggcgggtccggggtggggtgagtggcgcgaactcccggtgggcggagcccgggacgaggaggacagcgcgcttccgggtaggcggagcccggctggtgggtggggcccgggatggggcgggactggaggaccgggctctggtgggcggagtcaggggcggggccccggtgagctttgggagaagaggggtctctggcggcggcttggggaggagctaggtttgggcttggagttgggccctgaatggcgctttgctgtgaatctccgcggggaggctcttccaaccaggggctgagcttctgcgctgtggagaagccaggtgagacactgaaataacagaggtttgggtgtgaaaatccacgcttctgcactcagcctggagtctgcgggagcccagagaagaggggagtggaggttaattccaatatgaccgcatcgaggacgctttccgaaagggatagcaccccaaatctcactctattgtaacttaatcttttaaattggaaggcctgtagc

SEQ ID NO: 15403 - DNA, 1549 bp, Artificial sequence
  DNA replication origin
cttccagcccccgcgaaactgacccgggctggtctggggggcgcagggacggcgaatgaggggcaggcagggctggagcgggctgaggagggagaccctgacccggagggtgggactacggggcccgatttctgcagaggtcttcggaccaccggagacagggaattcggtttctcttattgttcaaggtcagtgtctccaagtggacacgactccttacagaacacctggtccctctgagagtctgatgacattcgcggatcgtgtccccaaacgttcgctcaaacttaatcacacagctttagtggtccctgctttaaggacaccggagtcgcgcactttgcccatgtgggggcgcgggcgggtgggctgagccccttcaccgcggggtggcccggctcccagcgcccaagcgctgtggacgcgacaggtgacgggatccgacgaaggtcccgcctggagcgcttccaggccctgcccaggcacgggcaaccacgaagtggccgggaggatgagtaaccaggaagggacggccagatggtccctggggcagccgcttactgggcggacttgcgagcggtggaggcttggggctgcagaggtgcaaaggagggaagggggcaggggatgaatcccacaagagctctgcttctgggaggacagggctcttgcacctgtttcctcggtggccctctcggtcggtctgctttgtatagagtgcactccgtttccaggggtgcctgtcagctgcgaaaagcctgcctggccccggtgagcctctggattcgaggcctcacctgagctctgtggtctggcgggaaacctgaggtccgctgcgctccctgctcagcttggctaacgatgccagcgccggctagtacgcaaggtagcctggaatttctcagcccctgacctcgacagttgactttcagagactctcagcatttagcccggtgagcgggggcgatgaaagtgattccagaatggactggtgcagccagagtcacccttgggagccttttcctgccacctttggttaaaaccatgggcccctgcacccttaaattgacttcaatggagaattctgtttctgggccaggttcccgcttactgagatttaccagtcgttgcttggatgaagcattggcaataaattttgagaaaactatcaagaaaatgtggttattttggcaacttgaactcccgtgcctcccatttgtttgtgatttgtaatgcatcaaattcccattgtctcacaatgtaaagaaagacattatttaattctgggggtctgtccggagagacttgagcgtattaaccaccagcatataaccatttacgttggagttacttggaggctgtcccaggggagtttagggaccaccataaggaaatcttatttacgtaaaatcaagtaatttatttacgggaaagtaagaccaactgctattgacagactatgtcttttatcgactggagttaccaattatgcctaaattattctccctcaacaaaatgggaaccttccttccttcctccttgttcctaa

SEQ ID NO: 15404 - DNA, 981 bp, Artificial sequence
  DNA replication origin
atctttccaagcgccgggcctcgctctgggacaacggtgtcctgggggcggggagggcgcgcggaggtgccaggggcggcggggtacccggcccggcagcaccgcttcaagtttccaccggcgcggttgtgcaaccgggaggggagcgtgagccgcaggcgcctcggaaaacaagccgagcccataaacaaagccacgtggcctccgggccggggggccgggctaagagcgggcggctcttccggcaacaaagagctgcggccggctgcggggataaatactgcggcagctactgccgcgcagcactcccggagcctgcaacgcttgagatcctctccgcgcccgccaccccgcagggtgccccgcgccgttcccgccgccccgccgcccccgtcgcgggcccctgcaccccgagcatccgccccgggtggcacgtccccgagcccaccaggccggccccgtctccccatccgtctagtccgctcgcggtgccatgccattcctcgggcaggactggcggtcccccgggcagaactgggtgaagacggccgacggctggaagcgcttcctggatgagaagagcggcagtttcgtgagcgacctcagcaggtgaggggacccgctaccaacttccagcccccgcgaaactgacccgggctggtctggggggcgcagggacggcgaatgaggggcaggcagggctggagcgggctgaggagggagaccctgacccggagggtgggactacggggcccgatttctgcagaggtcttcggaccaccggagacagggaattcggtttctcttattgttcaaggtcagtgtctccaagtggacacgactccttacagaacacctggtccctctgagagtctgatgacattcgcggatcgtgtccccaaacgttcgctcaaacttaatcacacagctttagtggtccctgctttaaggacaccggagtcgcgcactttgcccatgtgg

SEQ ID NO: 15405 - DNA, 1194 bp, Artificial sequence
  DNA replication origin
gccccccggcccggaggccacgtggctttgtttatgggctcggcttgttttccgaggcgcctgcggctcacgctcccctcccggttgcacaaccgcgccggtggaaacttgaagcggtgctgccgggccgggtaccccgccgcccctggcacctccgcgcgccctccccgcccccaggacaccgttgtcccagagcgaggcccggcgcttggaaagatgcgccccggtctcctgcagctcccgggctgacggggtgcagggagggggccggaggggcgtctgggtccctgcggggtgggcgtgaggagcagggccagcccccctcctgcccccgagctatcaggatcgacctccgcagccagatcagcctcccgggccgtccgcagagctggggccggcaccgcgcccgccgggcggggagtagggggcgcagcctcctgacctcgctcactgccccaaccccgccctagcgcgcgggggttggagcggggaggagggacagcctcccagccctccgggccccttagctgtcactaaccagtcctccttcagacctgcccctggggcagcaaaggaggggaaggagaggaagccctgggaggtatctggctcccgcaggttgggagtggagaaaaagaacagcgcccctatcctacccgaaccctctaagagacgggttaaatgatgtacccagggccaatgctacagtacaatctgaaactaccctgtttgcttttactttttgctgttgttacaacaatctacccctgtctgcagtgggaactccatgagagctggtctgtcttgttccggaggcatttcagcccctgcaccctgccaggcccagtgcaggccttcaacaactatttgtgtgaataagtgaatggatacgggaggctgctggcatgagggtggcttcttgcccttcatcacctctagttatgatgctttacagcctggtctatttggcaattagtttgcacaggacagcagcagcagagtaaaaatcccatactcaagcattagcttcaaacttcattcttccattcttctttctctgcagccatcaatatcatctagtccactgactcggtgtaatctttaaggctcaggcaaagaaattgtgtgtgccctatgaggctacatgttggactgggaagacgtttttaataaagtttgttttcaagaagccag

SEQ ID NO: 15406 - DNA, 883 bp, Artificial sequence
  DNA replication origin
cctctgctaatgtcttgaaactgtgtatattttgaagagatggtgcatgtcttagattttttcccctcctctatcagctaagcaataggaatgcctatctttagttctgttttagagcatttttggggtggtaaaatatattacaaattattactcattcattgtctcaacagggatgcatcatgccattgctatgatcctggtgctcttctaaagcagctttgagaacacaaagatgaacacttacccttagcgagtgtacaggctgtaaggagagagagagacattaatatgtatacctaaagccgagcctatgtgcagtgaagggggtggagaaaagagggaggtagggaggtggggggaggggggggagagagagagagagagaaagagatacagggcaccattagagcacttaggaggataaagcacctaatcagcctggaatagtcagaggaagcttcgtggagttggtctcaaaccaggtcttaaaggacgggtaggaattaatcaagcaaatggaggtaaggatgggagtgggtgggcattccggggagaggagacagtaggaacaatggcggagaggagaggagcagcatatgacatggtgaagaataggatgtggagcagggcatgaggatagctggtgatggggaaataggccagggtgagattgcagagggctccatgtgccttactggaaagcctgggctttgtctgaaatgatgggagccatggaagagctgtaagcaggagaccaccaatgggcagatagtgctgtagggagattctcttgccgagtagagagatggatagaagaaatacgtgacagggggcaagagaccagttaggaggatgtggctgtttccaggcaacagttgat

SEQ ID NO: 15407 - DNA, 1079 bp, Artificial sequence
  DNA replication origin
cagctcgccatgtcccggctgctgccgctgctgaggagccggaccgcgcgcagcctgaggccgggcccggccgccgccgccgcgccccgcccgccgtcctggtgctgctgcgggcgggggctgctggcgctcgcgccccccggcggcttgccgggcggccccaggcggctgggcacgcaccccaagaaggagcccatggaggcgctgaacacggcgcagggcgcgcgcgacttcatctacagcctgcactccacggagaggagctgcctgctcaaagagctgcaccgcttcgagtctattgccattgcccaaggtaaggggggcaggtggggggcgagcccgggggccccgacgccctcctcttctcgccagcccaccgggagcccgctgcggccctggatcttggacccccgccgccgccccccttccgcccccctcgcctgtctggccccacgcctgggacggctgggggcggggagactttccgccgcccgagtttcccccaggcaggtaggacgggcgcgggtcgtgccaggcagccgaggccagcgctagctacttcctccccagcctccgaatccggagcttcggcctaaaatgccagttaacgctgttgggattgagttttgatttgccccgtgcctcccctccccagccctcctgtcccttagcccttgctgctttcttgcgagcgtgcacccgtgcaggtggcatgctgtgcctgctccgagaaagtgctgcaaacccgcctggcaggaagaaactttttgaacggttatcaaatgaagacgtatgggtgggtagccaaaagaaggggtgtagcttcgaaagtcagggatgctcatagctgcttgtttccacacatgtctgattgcgttaatttcagcagccaaaggaaacattttctccagaaatggaaagacagattcaagttaaactccagttttggtttttcccagaggttgaaagaatgaaataaataaggaggtatattttttggaaatctgtggctctgtagtaaaagtcagactgatgctcaaaagtaattgggaatgatgaaagcaaaacgatttttaaac

SEQ ID NO: 15408 - DNA, 871 bp, Artificial sequence
  DNA replication origin
ggagctgggctcagctcgaccccgccccgaggtcctcctgccaggcagccgaggcgccgggcaccatgcactccgcgggcccgcgcggctctcgcctcctgttccgtccccacttcctttccaaaaggcccgcggcggctcccgcccctccgatgggaaaaactttctctgagacggccgggcccggacagcgcccggagagggcgggcggtcggtgcgggcgggcgcctcccggctgaggaggagcggcgcgggcgggcggggcgggctagtgtgtgtctctgtcagtctgatcttccagaggatgagtcagccacgcaccgccctcctccagcgccgccctactctcccgccagctttctcaccctctagcctccccacgtccccactctgtaaggttcccgagccctcaaagcagccgcgctcccgagccgcagccgccgccgccgccgctacccctagcggcagcagaagtgggaacggggcggggcgaaaggggaaggaggtgcgggggggcggggaggtgtgtgagcgaggctgcgcaggcgcagtctgcaggctctcgggccgccctccctcctaggggaggagcgtgcacacgcgtcccctcccgcgctggtgcgtgaaggtggaaggaggtagggtgcgccaccctgtgctggcgttaaacctacagatcggaatagggaaaacgagctctggacccctcgcccgccagggtagtacagctgccacccggcccccaacctggggccacatctggagcttgttctgaaaggtgccccggcgtgcggccccgctctggacaggcggagagctgcgctgccaccccagccccgacgggatcacggcgctctgctccggaacgaag

SEQ ID NO: 15409 - DNA, 1073 bp, Artificial sequence
  DNA replication origin
cgccgccgccgctacccctagcggcagcagaagtgggaacggggcggggcgaaaggggaaggaggtgcgggggggcggggaggtgtgtgagcgaggctgcgcaggcgcagtctgcaggctctcgggccgccctccctcctaggggaggagcgtgcacacgcgtcccctcccgcgctggtgcgtgaaggtggaaggaggtagggtgcgccaccctgtgctggcgttaaacctacagatcggaatagggaaaacgagctctggacccctcgcccgccagggtagtacagctgccacccggcccccaacctggggccacatctggagcttgttctgaaaggtgccccggcgtgcggccccgctctggacaggcggagagctgcgctgccaccccagccccgacgggatcacggcgctctgctccggaacgaagcgccccagctgcgcccttcgccaagtcagcgcccaccgccgcttcggccgagcaggccggctctaatgcagtcgctctgggcgccccaaagagaaagcgaagccagttccacccctgcccaaggagggtctgagactgagcccttgacacgagaacagtcctccccgttcagattccagcagctggcatgcaaattgttaatgctagaggcagaggcaagaatgtcatagacctttcctagtggttgcttgtgatttttttgtctctgtgctaaagcgggaagaataatttgattgtccacgatttcccctgatccaggtcctaggcatctttcaaggcccaggtgaaaggtctcctacttcattaagctgtccctaatctcttctaagggaggagatctctgctttatctgaacctgtctaatgacgcttaggcacccttagagaataaatccacttaataaatctgctggagcgtaatcaagatctaaatcccatccttatcataaacagtgctgcactcagcccggaaacttgtaggtagtaaatgtgctacatgtaagtagaatattaaactgaataatggaggattgttaccactaaagcctcctacttctctaactctggttctcaaagtgtgtccc

SEQ ID NO: 15410 - DNA, 1068 bp, Artificial sequence
  DNA replication origin
tgctttgaattcttgttgcggaatctctggctttttggcccctggacaaaagacttctgctggggcgaggatgcaggtccagagggactctggctgccgcctgaccaggggccaggaggagcagacagcaggcgggccagcccttgggacacccctgccccccgagcaggacactgtctacctacactctccccggaaggatcctgaggcttggctgagtgtttgccacactggcctgagcggcagaacgttttgtttttactcagaacccctctgtatgtgacggggtgaatgaaggacctgcagtggcctcgagggggcgccatttggctaaactacccagctcttgttttgccaggggagagacatgtacaagctgcaggcagagctgaatcgctcagagcgggaggagggatttttattttgagagatgttggaagtgaaggagcagaggcccgcagcagcgggaaggcacctgggggagaagtcgcaagctgcattttgatgaagctgtgctgtgtggtggttgaagtgcccccaaccccagctccccaggaagcgttcagtcacttgtatgtcacaccacacagttttggagtcagatttggtattggagatgcaggaccgtgccatggctcaaaaggatggggcaagggcagctccccaggggcaggttgcatccaggtacatggcaaacagatgccgtcattctggagcaaggggacccctcattttcattttgcactggaccccacgaattatgtagctggtcctcactagaataattacagaatcaccagtgctgtagagcagatagagaggagaacctataatctgagggcatgttttactaaggcagtgaggtaggataaatgaaaggaaacgtttgctcacagacaaggttcatttgccagatggtcatttaggcagcgggaacaatgtgtccataagcatggtgggtgggggagtgggggcgcgagagaatatgggtgattggacatcaacaggactttgacagtgctagtgcctaaagtaccactagggggtgctcagggagaattgatgata

SEQ ID NO: 15411 - DNA, 932 bp, Artificial sequence
  DNA replication origin
atctaggaagtgaggagcgcctcttcccggccgccatcccatctaggaagtgaggagcgtctctgcccggccgcccatcgtctgagatgtggggagcgcctctgccctgccgccccgtctgggatgtgaggagcgcctctgcccggccgtggccccgtctgggaggtgaggagcgtctctgcccagccgccccatctgagaagtgaggagaccctccgcctggcaaccgccccgtctgagaagtgaggagcccctctgcccagcagccgccccgtctgagaagtgaggagcccctccgcccggcagccaccccgtctgggaagtgaggagcatctccgcccagcaggcaccccgtccgggagggaggtgggggtcagcccccgccaggccagccgccccgtccgggagggaggtgggggggtcagccccccgcccggccagtcgcctcgtctgggaggtgaggggcgcctctgcccggccgcccctactgggaagtgaggagcccgtctgggaggtgtacccaacagctcattgagaacgggccatgatgacaatggcggttttgtggaatagaaagaggggaaaggtggggaaaagattgagaaatcggatggttgctgtgtctgtgtagaaagaagtagacatgggagacttttcattttgttctgtactaagaaaaattcttctgccttgggatcctgttgatctgtgaccttacccccaaccctgtgctctctgaaacatgtgctgtgtccattcagggttaaatggattaagggcggtgcaagatgtgctttgttaaacagatgcttgaaggcagcatggtcgttaagagtcatcaccactccctaatctcaagtacccagggccacaaacactgcggaaggccgcagggtcctctgcctaggaaaaccagagacctttgttcactt

SEQ ID NO: 15412 - DNA, 1046 bp, Artificial sequence
  DNA replication origin
ctttcccctctttctattccacaaaaccgccattgtcatcatggcccgttctcaatgagctgttgggtacacctcccagacgggctcctcacttcccagtaggggcggccgggcagaggcgcccctcacctcccagacgaggcgactggccgggcggggggctgacccccccacctccctcccggacggggcggctggcctggcgggggctgacccccacctccctcccggacggggtgcctgctgggcggagatgctcctcacttcccagacggggtggctgccgggcggaggggctcctcacttctcagacggggcggctgctgggcagaggggctcctcacttctcagacggggcggttgccaggcggagggtctcctcacttctcagatggggcggctgggcagagacgctcctcacctcccagacggggccacggccgggcagaggcgctcctcacatcccagacggggcggcagggcagaggcgctccccacatctcagacgatgggcggccgggcagagacgctcctcacttcctagatgggatggcggccgggaagaggcgctcctcacttcctagatgggatggcggccgggcagagacgctcctcactttccagactgggcagccaggcagaggggctcctcacgtcccagatggggtggcggccgggcagaggctgcactctcggcactttgggaggccaaggcaggcggctgggaggtggaggttgtagcgagccgagatcacgccactgcactccagcctgggcaccattgagcactgagtgaaccagactccgtctgcaatcccggcacctccggaggccgaggctggcggatcactcgcggttaggagctggagaccagcccggccaacacagcgaaaccccgtctccaccaaaaaaatacgcaaaccagtcaggcgtggcggcgcgcgcctgcaatcgcaggcactcggcaggctgaggcaggagaatcaggcagggaggttgcagtgagccgagatggcagcagtaccgtccagcttcggctcggcatc

SEQ ID NO: 15413 - DNA, 1292 bp, Artificial sequence
  DNA replication origin
gattatgacgctggattatgacgcaggcagtgggcgcggactctgcggttcgcttgactgacggcgcagcctccgggcctagccacagcagcaacggcagaggccagcgggcgaggtcaagatggtggctccgcgggcgggggaggcagtggagggaggaggagtcagaccttagccagccggaaacaccgaaacccagagacctcctggggagccgccgccgccgccctctcggccatcgctgcctccgccgcctgctccacctcgagggacgcgagcgggcggcggggctggccgtgagagagacaggagaggaaggagggcaggggcggagttgcccgccttagcccccgcccccggccgcggccccgggccctgccccgcgcggccctgcccggcccaccgagccctggtgtggcagcggctcatggcggccgtggggcccccgcagcagcaggtgcggatggcccatcagcaggtctgggcggcgctcgaagtggcgctccgggtgccctgcctttacatcatcgacgccatcttcaactcctacccggattccagccaaagccggttctgcatcgtgctccagatcttcctccggctctttggtaagggaacagggtaccgtacgtcccgggacggctatgcgggccgagacgttccccggggagcgggcaggcgcgcagaggccatgggtcgagtatgtgtctttgggaactacagtttcatccctcaaagggtcgtctttacgggttgggagggggaaggagatgatacttgtctgagttgacagcggagcagtccccctagcgaggattcagtgttgtacctgagtgaggtggggagaaagtaaggatgtgtgagcatgcagctctttgcccgtttgccttgggaaatgagtactggcttaccgcgtcctatgcgacagccttcgaaaaacaactctgctatcccagtctcgtcgtgtgtgaccttggacttctgccaaggcgtgggcctcagtttccctttattaccaaatgccgagtacttgtatgttgtcacttctgctgcacccgagggtccacaggatcgtgaagtgtctgcagtaaatgacatccaagcgaaggagacagggttttgaatgtcagaccttgaaaccattaccaaaaattctcatgaaagcggcgatgcttaaatcgagtcctaaaattttccatgaataaacgagaaggtattgaaagtgactgtaaaaagtgatgagacatttgccaaagagacttctgaaaatcattgtctttgtttcgtatgga

SEQ ID NO: 15414 - DNA, 1733 bp, Artificial sequence
  DNA replication origin
cgaataccctacagagcggtttggctttttaaattactgttattattttgggcagagaacagtcggtctggtgcaccccgtcctcgctgcagaagaggctgcgagtccgaggtgggtctctcggaaggtgaaattccttctggggtgagcgagccccggccccgcgcgcagtccagcggccccgcgtgtgtgccctcgccctgccggagccgggaaaatggaggctgtgattgagaaggaatgcagcgcgctcggaggcctcttccagaccatcatcagcgacatgaaggtaggacgccgggggtgcggctgcggcgccggccgccgcgctctgacctcgccgccgcgcttcgcctccaccccgggccgggcacccggcccttccctgcagtgtggccaccggccacctgcgggagctcccggccggagtgtcacctgctcacccggggcgctgctccgggctctgcggggtcactgggcgggtggcttctctggggggtgtctgctgtcccacgccatctcccccgctcattgtcccagggggcggcaccatttctttccctcgggggctcaaggcactggctgcaagttttcccattgtctgtccctgaagtaagtgtctgggacccgcgggggctggatgcccgggaggacacctgattcctccgggcacggggtgggggcgcctggcgcggtggtggggaggaagtgggggctctgcccgctcgcaggaaggagtcccctagcctaggagactgagagggaaagccagtccctccttggctgtcaggtctacttggagtggggtatctgagcaaattagttattaattgggccgttccgaagctggtaaaggtgtgcgtgccctctcttagccctcccgcggggcgcggggccgaagttcccgggcagccttgcaggggccccgccttctcccagctgagcctaaaggcaagattggggcccccgaaataactgtatcctgccctcccagacccaaacggacacacactctaggttttctcttggaagggttgtgaagatggtgtgtgtgtgcgcgcgtgcatgtgtgtgtgcgcgcgcgcgcgtgggggcggggaacaacaccctggttttttcctgcaaagggtgggactggggataacctgatcctcggatgtggattttctggtgcctagagatagaccagggccccgtgttattcatccagaggaaataaaaccagccgcgcgagctggctggaggtgggaattgggagcggtgggggaaattatttttttaatgtgtatttagggagcttctctttggctctggcccagccccagtttgcctcaacagatccagatccggggaggtggtgtttaattaaaagctcgcttccaaaacgagtgggcaggtttggaaagctgtgcaccgagtgggtgtggacagcccctcttcagccgctgcctgggcgcctggaggagcttttgtctgatgaagtgtaaggtttagagaggcttcgtgcctcggagatggtctttgggaaggaatgctcagctgtcatggcctgcttccacctttcagaaccaactgccacctcacccagggtgaactttatcaagctgcctctgtcctggttttgtccattttgaaatctttctacagctctcgtgccttttgtcacaaattgtccttagcatagcataatctgcagccagactctgcttgcccaggaatgcttatagtccagg

SEQ ID NO: 15415 - DNA, 1383 bp, Artificial sequence
  DNA replication origin
aaatcgcccaacagcagagcgggtcagctcgcggcgtccggatctgttgctcgcagctgcggccgccgcctccttttcactcctgcgcgcccggccccggcgctcgctctggctgggctcccggggacgttcggaggggcgcacgcgcgctcgcggccgtgcccgccaagcggaggcgcgctctcgcggccgtgcggccgccgcacgcgggcggggctgggagcgcgcgcccgagaggcgcgtggggcacccgccgcaaagaggagcctgctggtctgctggcgggcaggcggcgctgggccggagcctctccctccggtgcgcacagcgcaccctctcctcccccggccgcccgtcgcagcgcggagagggcgtgtcggcaccctgcctggcgagcgcccacccctacaatggctgcgagcgcgcgggacggagggtgcaccgccgctccccggggacttgcacgggtggcgcgcctagcccagagcccgcttgtagtgagcgctcagtagggcgggaaagctgctgccgctactgcggccttctgagaagacgcccattctctgatgtcaggactgcatcgccgagtcctgattgcaaatagcgaaatatataattaaggagagttcgggggcgtatcctgcaatgggatgccgagttcgataaagttgcaggatgctgggaaagtggattgatttgctgttgctaaatgaatggaaacagcgttagagcttctgtccacgatccatcagtctatcgagattgctgattgcctatgacttggacggttgatggttttcaggcccactgagagcagccagcgttggtataaccgcagggagccctcctgggaggttgaacctgcagagcgcaaatgtgcccaggttgatttggggcctagtggtccattttcacagctccactgcctatctgcataaccaggagccctcattcagatgaacgccaaatgggccagagggaggagaatcaaatgagcaacttttaaaagatattaagacataggcacctaactccggacagttcctttaacccttgagctaaccatttgaagcacaaaacataacaaaagaaaagactggggggagtggggccaaaagaaaccaagtgcaaaattctgtacacttgtgtcagattcactccgtaatgggaaaaggtctggctttgaaaactttatggatcaaagggatgcatggagttacacagcacagctgcagaagataatgttcccctggatcactctgcccaactcttaactgcaacccaccttccccatccgtctccccgaaatcacccggaagggtgttaccttcaggaagtaactgatctcttgatcacccctgctggatcctgtccccaagggcg

SEQ ID NO: 15416 - DNA, 1299 bp, Artificial sequence
  DNA replication origin
gactgcacttccccaccgataaaaggtggtttccagggtacctccctcagatggcggcggcggctcccgacggcttcctcaccagcatccctcgcgggcggcggctctcgccagcgcggcgcggccccagtaaccagagtaaccgtcgcacgcccccactcgccgccaggctccacgcgtctcagccagctgggcgggctcggcccagacgagggaccgggggcggggctcaggcgcgagtccgcccataccgcgcgccccgcgtgctgccccgccccctacccctgctcctgccgccgccggccaatgagggcgcgcaccgcgcggtaggccgagatggcgctatgccgcgtttggccaatcggaggcggcgcaacctgcgcggcgacgccccgaaaggcgctagggcgatgttgcgtggtgcgggttggggcgtggggatgggcgcgggccggctccggcgtgggtggggccaggggtcgcctaggaggcgctctggggccgggatcggcgtcggggtcggggttggggttggttcaccgcagcagccccagctcctgcgccctccctggactgaggtgtgctcgctttgaggagaagcctggagtgatccgctgcctcgggtcggaacgtttccattcattccgctagcatttattgagcgcttatgatatgtcagtccccggagtccgaaagaggaatcagacacagcttccctgccctgtgtatgtggagagggcggaagggagggccatgagtgcgtggagagcctgacattccagctgaagctggaagaatgagtaggcttttgccttaagaagaaaaggagaggacgctccaggtgctcaggctagagatacacggatgcgcccagcccgttctctcaagaccagaaacgttgggggtgggggctcggaggcaaagaagtcaaatagtcgtgtcataggtgtcctgagaagggggtggttagagagggagccatggaaacccaagaggtggtccttcccttggcctggagaagtctggtgaggcgcccagggggaggttacacggtgtccaggacaagcagtccgagggagcaaaagtgtgcaaaagtctcggagtgagacagcccttattctactacgatgaaacttacctaaaatttattgaggcttaagacctcagtgtctttgctcatcctgtttcttaactctggacttccttctttaacccctatgataataggtgcaaatcccttctgccttttggagcgtggctgcattgtcacctcttccaccaaatcgccattgaccttca

SEQ ID NO: 15417 - DNA, 1344 bp, Artificial sequence
  DNA replication origin
gctgagacatgagaatcgcttgaacctgggagtcggaggttgcaatgagccaagagcatgccattgcactccagcctgggtgacagagcgagactctgcctcaaaaaaaaaaaaaaaaaaaaaaaaaaaaagagagagagagagaaagaattccttggctgattcattgaccagataactgattagcgcccccagaaaaaaagccccctcccaccctcactcctccagggaggaagattgtgcttcttccttcacttatattatcaggaagcttctggaaagaagaggaaatgctgcccagagtgcacaaccctgaagggataagcttctcctgggttccgggggagtggggtcggtgggggtgggggagtaagcttgcgatggggagtggttgggaggaggagacatatccccacttttacttgttcctttagcaaatattcgtggcacgcttcccatagggcggcacagtgccagtccccgcccttcagtaacatggggtctagtggaaccctgtgttaaatgctatgatggggggggtagaggctgcagtggataaagcgtccagggcagacagcagggtgggcactggggagtcagcaaagacctgggggaggagagggtgactaagctgagacctggcagagaaggaggaattgagggggaaagggacggagttgagaaagccaggaagagtccgggctaggagaatggcacctgccaaggccacaggcaggtgagagcctcagagcttcaaggaaggcacaacattcttcgtggctcaagggcagagggatgaggaagccaaggggcagatgggggcagagctggcagggtgggcagggtctgagacgggaataaacagctggtgcctgaccaagaccaccacgaccaccaagaccaccaaggcgaggggcatcctcaggaagaattggaggtcttgggagtgagtaaattatcagccgagcagcccctttgggaattgcccagagcggcacccctgtctccctcagccctagtgggaggggaggtccggtggcagcggcagcagcagcgtgggggctctctttctggaacatgctttcccagtatggcatggctaggttgctcacctcttgcaggtctttgcctcaatatcacttttctcacgtgggttctcctaattaccctattgcaacttctcccactctttccccctgcctggctcgtttctctccatggcccttatcacccttctccccccagcattttacttgcctgcctcacattgtctagctcctctcacttcttgtgtgtgtgtgtgtcttttttttaccaccatatcctgggatcctaaatgctgga

SEQ ID NO: 15418 - DNA, 784 bp, Artificial sequence
  DNA replication origin
aaggatgaagttaggccaagcgtggtggctcacgcctgtaatcccagcactttgggaggctgaggtgggcagatcacctgaggtcaggagttcaagaccaatctggccaacatggtgaaaccccgtctctactacaagtacaaaaattagctgggtgtggtggcgcgcgcctgtaatcccagctgctggggaggctgaggtgggagaatcacttgaacctgggagacagaggttgcagtgagccgagatcgtgccactgcactccagccttggggagaaagcaagacttagtctcaaaaaataaaaaataataataataataatttaaaaaaagaacgaaagatgaagttacttgctgcggttaagtagctcataaggggtggtgcggtcaagctcctaagcatttatggcgactggaaggagagattacaatttgtaggggaaaacaggagttagggaggactctagaaggcatttgacctgggagatgtgcagggactgtgagggagttgctcaagggagagtatgaatggtgggaggccgggccagacaaggggtgtgcggaagggcagggctagcaggccagagaaactacaagggtggtgggagctgagcctgcagaggtctcctgagacagtgttgggaagggcttgaaagccatgttgcacttggtcctgtgcccagaggagagcccaccgaagagttagttagttagtttgtttgtttgtttgtttgtttgtttgttttgagacagagtctccctccatcgcctaagctagagtgc

SEQ ID NO: 15419 - DNA, 850 bp, Artificial sequence
  DNA replication origin
gccacagccgccgcgtcgtcggcgtccagcaggcgtttggccgggacgcctcgggtggctgggaagagcagggccgggccgcggggctgcgaggcgccgctcatggcagagcgcaccggaccgacccgcatcccgtcctgggccggggtggccccggctttttaagtcccgggatccgcgcgggaagacgctgcgggtttggtgccggctccgcgacttcttccagccggcgggatggagtttgcagactggtcttggctcggcccccacgaggggcaaagcaggagccactccccggcgctcgcgttgcacgcggggaccacgctggctgtgcgtccgggaggcggaggccggctcgagtccccggacccccgcaggcaagggctcccggagcctcgctgggggcggccgccactattgttgccgaggctgccgatagtccgggaggcagaggcggcggcggcagcggtcagcgatcccggggtcccgagccgcgaggacaggattcagcaggctcggcggagccacgaagcaaatgcacttcccaaagcgatgagtctccagcaaaagccgggggaactttttcgcggcgctcgggatcctgagcgctcctgggctccgggcgtgtatgagagcgagcgagacgcgctcagagagagtgactgtgagtgagtgtgagcgctgcaccgatcccggccagtgcactcctccttctccttttcctccacctcctccgcctcctggtgactcacgctgtatacacacacactcacaggccgggctgtgtaaacagttgggaagccgggttgtgcaatgaggtggctgcgacgactccggccccgccgcccag

SEQ ID NO: 15420 - DNA, 1442 bp, Artificial sequence
  DNA replication origin
gccggctggaagaagtcgcggagccggcaccaaacccgcagcgtcttcccgcgcggatcccgggacttaaaaagccggggccaccccggcccaggacgggatgcgggtcggtccggtgcgctctgccatgagcggcgcctcgcagccccgcggcccggccctgctcttcccagccacccgaggcgtcccggccaaacgcctgctggacgccgacgacgcggcggctgtggcggccaagtgcccgcgcctctccgagtgctccagccccccggactacctcagcccccccggctcgccctgcagcccgcagcccccgcctgccgctccgggggccggcggaggctccgggagcgcgccggggcccagccgcatcgccgactacctgctgctgcccctagccgagcgcgagcatgtgtcccgggcgctgtgcatccacactggacgcgagctgcgctgcaaggtaggcgctcccgggccaggacccggctggggtcgggggcgcgggacggggtggtaggcaaaggtgcttggggtccggccaacgcttgggctgggcacagggcggatcagtagattgggtcagataagacgccatttgaccaggttcacgtttttgtggatcgaggggtttcccatggagtgatataatgggggcgcctagaggaagtgcagtgttcagtggctttctctatctgttcctttcctcagcgcccagtgtagcgcgtggcgttccatataagttgtggaattgaaatggattccagggccatgccattccccttctctcattctcctcgctctccaccccccctcccccgccaatgtcctggaaggacgccctttagtgggtgcctcctaggagcttggagcagctggcagctctcttgccgggcttgcacggcacccgggctcagttgtaggtggtaagggggctggaagactgtgtccggctcctgccttggggattccgaattgaatccgcgctgagactagaacacgccctcccaagggagcagtcccagagtcatccacccgaggcggaggaatctgctcggagtagaaatgttgaaaagcccacaccggccaggaaccctcgcttcgattcactttattttccagccagcgattttcctttgaacatagggatcccatccaggaggaggagacacagctcctagaaacaggatccgccgggtcctcctcctgcgcgggtagacgcagaacgttcccacagtctactttatgcgagcgtggcacccctgcttgaggcaccccagagcaccctcgggccgctccttttcacccgaaagataggatcaccccccagttaagtcgcttctgggttttccgcaactcacctgacactcccaacaccccgaccccgtcccggggctcgctgctgccacctactgcccaacccgaatgaaatttcagacgcatga

SEQ ID NO: 15421 - DNA, 1182 bp, Artificial sequence
  DNA replication origin
tgatgatgaatctgcagggaacgaggagggagggaagggcttccccagtcgtgccagaggcagagtgacccaggacataataagtcatgcattgcattcctctgccaccatgcagacttgtggtggccattccaaaccactggagagaaattccattttattcttagtgatttttgcatgggagacagctgacgttcaggtccgggctcataatcttccactttcgtcgatcctgcaggaagagcgggctttggccaatggccattaacctcccgctgcctggcagaccttttgtaaggctcagggatgaacgacaggatggctgagggaatggcctttgagttagacctcccccgacaccccggggagcccaggctctcccctcaccagttgtgtcactttgggaaagctattcaccttcctcagcttcggtttccatatctgaaaaagagtacccatgctcatctcatagggagtaagtgataccatgatagtacagtgcttgaggcatgctcagtgcacagtaagagctccagaggaggctccgtgcatgctgtgttcatgacgacactacatatgcccagattgtgttcacacaggcgcatgccaagaatccatcagcgttctcagtctgggggggaggtagacatggggtgttttgggaaaacaaggaagagattcctaactcactttcagatgtgtgtgtgtgtgtgtttgtgaggatgtgtatgtgttgactggtgtgagcataagtgcatgagtggatgtgtgtgtctgagcataggtgtgtaaatatgtgtgtgacagagttgagtgtacgtggtgtgtgtgaatgtgagtacaggtatctgtgtgagggtgtgcatgtgttgggtgtgtgtatgtgtgtgtaaatgtaggtgtctacatgttgggttgagcctaagtgtgaataatatgtgcgtgtgagagagttgagtgtatgtggtgtatgtgcgagtgtgtatgtaagcgtgagttaagcctgtgtggtctgtatgtgtgagggagagtcgtgtgtgtgtatgagagttgtgtgcgggtggcataggtgtctgtgtgtgtgtgcaagtgtgtgtgaaagttaggtgtgaggggctgcgtgtgtgtgtgacaggtgtgagagggggctgcatgtaagtgtgagagttaggtgtagagggg

SEQ ID NO: 15422 - DNA, 1494 bp, Artificial sequence
  DNA replication origin
gggccgtatatgtgggtaacttccaggtggtgcacctgcaccggctggaggtgattaacagcttcctgactgacgccagccagggccgtcgcggccgcgtggtcaacgatctgtaccgctacaagccgctaagctccagcgccgtggtgcgcaacgcgctggcgcacgtgggtgccaaggagcgcgagctgagctggcgcaactcggagagtttcgccgcctggtgccgctacggcaagcgcgagttcaagatcggcggcgagctgcgcatcggcaagcagccctaccggctgcagattcagctgtcggcgcagcgcagccacacgctcgagttccagagtctagaggacctgatcatggagaagcgacgcaacgaccagatcgggcgcgcggccgtgctgcaggagctcgccacgcacctgcacccggcggagccggaggagggcgacagcaacgtggcgcggactacgccgcctcccgggcgcccccctgcgcccagctccgaggaggaggacggagaggcagtggcacactgatgggcgagctgagcgcagagctgcgaaggggaactgtttgcagtagcagccgctgctccctttctccctctcttcctccctcttttgccactgtctgggccccatctgggattcctgggccctttggaaaagagttggtgaaatgcgcagccggctgtggacgggggaggaggaaggggacagagggagcaggtaggaaacactttagttgggggtggggggcgtctccctctggccccctgtctgtcttcctctccgcggtggagcaaactgtggacttgcctggcacttaaaccttggtagatctgggtttataatcggccattcttaagcacgtggggttgggggaaagttcggagtacccattcctgccgttgcttcctatcctgggcttggaagaatcctggtagaaaggccagagtgggtttgtggagtcgccactgcgggaccagcacgaaagctgcttgtctgctttggcggagctgagctgtgtatgggatccaggaggctggggtgatttattttatgggattcctggagcgcagggctggtgaatccatgacaaggtccgggagcagcagaccaaaaccacagcagcctcctattaagtgtaacaaatagttaagcaaactcgggctacaaacaaagactttgctacctccctcctccacaacccccaagtaattagccttctggagctggctcttagctgaggctcctgctacctcctgctccacccgccccttcctaggttacaagtaaatcattgtcaagggccagccaggggaaggtttcaattaaggttctgttctgctgcctttgtttctcccctgctgttgtaggcacttacagctgcgttgttatgaaaggagggaatagccctttgtgtctttgatctaattaaacctgcttggctgtgtttatccgcagggcaggtcacagatagggttggctgtgc

SEQ ID NO: 15423 - DNA, 1163 bp, Artificial sequence
  DNA replication origin
gagctcggggagtgagcgcctgtctctttaaatgccacgggctgcgctcccgcccgggagcccggagccggatctacaatcccgtccctccagctccggtgcttgttgctcgcccggcccaagcgggagctgttgccgccaggctgcgaggctgccgtcctctcctcctcgcgccccacctcccccgagagctggctgaggaggggcagcagccccagctggcgggaggaagcgcggtgtgaacagggattgccccccgccttcaagtatcggggcgctacgcagccgcgggggaaagacatgcccctagtctgcccgctgcgctgccctctgcccagcctcgctgccgcccgcgccgggagaggagggactgccgagcctacaccttcaaactcgccctagaagtctcggggcgcggcagggagcccttccccaggccccacggccttcacctctccgcgggtgagtttgtgcaggtaacccgagcctgagggcgggcgcgggggaagggcgggcgagccgggaggaggtagcgctgcaggtgagccaggtagggtgactcacctgtccaggtcgcgctctgagatcctcgcttgttcctctggggatggatgcgttggtggggaggaggcgtccccggggctagttagggcccgagggtgggaggggaagttagcagaggaggggggggattggcgtaaagtttctctttccttccctcttcctgcccaagcttggcaggtagggcgcaggcggaagcagtagaagctgctgatgcaatgggcttttgccagggccaggcgaagggctggggacagggagaacaggagttgcccagtctcctgtgaccgtgaccttacaggtggagaaacgagggaaagctcgctacacccgagacttccccctaaaatggctccaggtgctgagcccccaccgattctttttcggaacaaaacgcccttttcacggaggggctcctgcatggctttcttgccttcctctcccaacaggtagcctcagcccctgtccggggacctgtgcaaatgaccctggagttggtttcgctttctccccttgcggcggtgtgaacgtgtgtccgcagcgtgatgggcaaccaggtggagaaattgacccacctaagttacaaggaagttcccacggcc

SEQ ID NO: 15424 - DNA, 1655 bp, Artificial sequence
  DNA replication origin
atctctccacgatgttattataaaatatttgttcaattatcaaaatcctttggagaatttagggaaattgaaggaatggggcttctcgtggcatgtgaagtggttatgtggagagagaacaaggatttagtgtggaatgagatgtatatagggagggagcattggaatcactgtgtgaagtggttgtaggagatattactagggattacgaaggagtaagaagtggctgttggtcggaggattggagtttatcacggtgtgtgaaggatgtgtcgtatttgaggatcggtgttactctggcatgtgattgggctgtgggcacgagaggattaggatttgctgtggagtgtagtcatttagggagcatggataggggtttattgtggagtggctttagggatggaagaactgcaaataactaaggggttaaaagtggatgttagcttacagaatgagaatttaccctggggtttacctgggaatgtgaactgtttgtagagaggaaggtttggggattcacatgaactgcagaagggctgggagaggggagagcgttcactgtggagtcaagcattttggggaggaaggattgaaaatgactggggagtgtgaagtgggcttgaggatgggggtcctgtggagtgagaagcgggtgtgaggatagggggactgcagtttattgtggggcatgaagccgtgtgggagaggaggtttgaggattcctgtggcgtctgcagcatgtgtagagtagaaagattggtgattaacgcgaaggtaaaagagctgcagctgtcctgtggagtgtaaggcatctgaggcttggtgaattggggtgtattgtggcgtgtgaagtggttgatgagagggatgagtagtacttgatttcaaatataacctggttttgtggagagacgactgaagctttccatgggcgtgaagcaggtggttgtgggggaagaactgataccttccatggagtgtgaagtgcagtggaggtgggaggcctttcctgtggagcttgacatggttattgggtgggggattggagattgctgtagagcagtaaggggctttgtggtgggagggtagggtttactttagaaggtcagggtttctggtgagggaggattcaggtttagtgtgatgtgtgaagcagttgttggagggaggaccgggttcttcttggaacatgaggtggtgtgggcagggatcatggaggattgctagcaagtgtgaagtggctgtaggcgtgagaattttactatggggtgtgaagcgttgggcctcctgtggaaaggtgaattactgtgggggaggaggttagggcttcccacgggaggtgaggaggtctgagaagggtaagattgtagtttgctgtggactgtaaaatgcctgttgggtcagacgattggatttactgcagaatatgtagtgattgtaaggagggacaatttttgcttgatgtggaatgtgaattggttgtatggaggaggatttgtgtttatgatgaagtgtgaaatggtggggagagggtctgaggctgactgtggagtgttaagtagatatggcagtgggaggcttatggctgattttggagtgagacatggtatcctgagttatattttgctccctatctttccataaactatctccta

SEQ ID NO: 15425 - DNA, 920 bp, Artificial sequence
  DNA replication origin
agggaggtggggggttcggccccccgcccggccagccgccccgtccgggagggaggtgtgggggagtcagtcccccgcccggccagccaccccgtccgggaggtgaggggcgcctctacccggccgcccctactgggaagtgaggagcccctctgcccggccagctgccccgtccaggagggaggtgggggggggtcagcccccctgcctggccagctgccccgtccgggagggaggtgggggggggtcagcccccccgcccggccagccgccccgtccgggaggtgaggggcgcctctgcccggccgctcctactgggaagtgaggagcccctctgcccgccagccgccccgtccgggagggaggttggggggtcagtcccccgcccgccagccgcccgtccgggaggtgaggggcgcctctgcccagccgcccctactgggaagtgaggagcccctctgcccggccaccaccccgtctgggaggtgtgcccaacagctcattgagaacgggccaggatgacaatggcggctttgtggaatagaaaggcgggaaaggtggggaaaagattgagaaatcggatggttgccgtgtctgtgtagaaagaagtagacatgggagacttttcattttgttctgcactaagaaaaattcctctgccttgggatcctgttgatctgtgaccttacccccaacccggtgctctctgaaacatgtgctgtgtccactcagggttaaatggattaagggcggtgcaagatgtgctttgttaaacagatgcttgaaggcagcatgctcgttaagagtcatcaccaatccctaatctcaagtaatcagggacacaaacactgcggaaggccgcagggtcctctgcctaggaaaaccagagacctttgttcacttgtttatctgctgacctt

SEQ ID NO: 15426 - DNA, 779 bp, Artificial sequence
  DNA replication origin
aaggggtggggtgcagagataagaggttggggtgtggaaataagggattggggcacagagatataagaggttggggcacggaaataagggattggggtgcagagatacgaggttggggcatggaaataagggattgggacacagagataagaggtcggggtgcggaaataagcaactggggggttcttgccccccaggaaagcaggacttgccgctaagggtgaaggagaaggggttgaggggtacttgcccctgccccagaaaagcagagaaggggttggggtacttgccccttccccagaaaagcgggacttgccgctaagggtgaaggaccaaggcaggcgtccctgcgtgtggtctgacacccttgaaacgtgagtgtataatcagagaggcgtccctgcaaggattaaacaccaagggaaggctgccttcccagtccgtgaccggagccggagttttgggtccacggataaaacgtgtctcctttgtcgctaccagaaaatgaaaggaattgaaattaagggagacattgaagtgtggcaccaagattgaaaggagaaagaggttgagggatagtgagggaggttggagaagagagtaaaaagaggctgcttaccggatttgaaattggtgagatgtttcttgggctggttggtctgaggacctgaggtcgtaggtggatgtttctcatggagcaaagaacaggaggacaggggattgatctcccaaaggaggtcccccgagccgagccacagcaccaaatttcatgcgcgtcc

SEQ ID NO: 15427 - DNA, 925 bp, Artificial sequence
  DNA replication origin
gacaaaccgcatccttgtcctgtgagtataaatcatcgcaggcggaacagctgccctccacaccgagaacgcactgcgcgcccaccgccacgccacgcgcgtaccaggctgcagggcgcctcgctaaggctggggaaagggccgcgctttgatcaagagtcccagggagagtggaggaaagaagggtattaatgggcgcgcgttcagagcgtgggatgttagtgtagatagggaggaatgatagaggcataaggaggaaaacgatgcctagaatgattaaaataacccagcaacgcattgccacgtatacttggagagcgcgttatgaataaactcccattgcatttgttggggggagtcatgtattatgcattatgtatgcacagctatctggattggataccttccacccagactgagtcccccaatttgctgccaaagcagcagataccgcccctcctgccccgcctgctcaggcttccgtggggccccgtgcgggaggcgtctgtttagccctgagatgtgtctgcctgttccagagctgggctagggcgagagggaggttgcctgctctctgccagtctgtaccccaccgtcccacccccacgcctcccacacggagttcccaatttctcagccaggtttcagaagagacaaatcccctttgcgccctgtggcgccggtttgcaacagtctcgggctgccgggtttgggagaaatcaaaggtgctagacgggagaatatgggaggggcagggggtacccgaaccgcgggaccggacttcctaaaaggggcaagtggagagcttgtggaccgagccgggggagtcagcagagacccttgtgaaaaaaaccgttaactctttcctccccggacaaaccggacgtttaattcctttccaggtcctctttccccttttattatt

SEQ ID NO: 15428 - DNA, 1219 bp, Artificial sequence
  DNA replication origin
atcaccgagagaagttaggaatcgaccttccttgaggtgggttctgcagataaagatgcttttgaagttcagttggtgggagataggatctttgtggccttctggatggatgcaccacgatagggaaatcagcaagctgaagatagggaaagtgaacacttatcactgaaggcctctgcagggtttgctttgaggtacttccttcctgtcaaccctgttctggagtctgtctccatttttcagacacaaaaactgaggcatagataactgttttctgttttttgtggggagagagtattattgtttcaatttcctggacacttcaaaacatagggtatttctcattatgcaatagtttaattgagcacatactgcaggccaggcatggtgctgcatgcattctggaagtacaggaatgagttggaagtgctctttttccttagagattttttgttctcttgtgtgtgtgtttgggggtggggggggcgggcgggcacgaataggggaggaatttagatgagaaatcagataatcacagccaaggtgcctgcctggggacacagggtgccataggcacacagaagggcccagggtgtggacttagggtggtcaggggaaggaaggagtttgcccagagaagaggcaggagggagacaggaaaggtaagcagaggccagatcctagaaagaccattttgactttgtgctgagggcgatggtctcatgatgcagattttaagcagaggtgagagagggagagattagcatttcagaaagcatggcctctgccataggaagacaagatcagagggaggtccaagctggtggccagtggtgacggggcctgagctggaggagacagggatgcactggagacccaagagagaagtccctgaacgcggtgcacgaagagcctctggggttacaggaaggaaggggtaaaatgttcttttctgtgtccagcttaggccactgaatagattcggtgctgtgtgttgtactaggaaatgcggaggtgatggggattgtttgggctggagtctggaggggctgtgccccaccccaagctgggtgagcatctaaggtaagtgagggctgtgcccaagactgcatgagcaaatccaggttctcctaccagcaagctgccttgaagactctgaggctggaaatgtataaccttgtccgtaccactgagcacctgttacccatacacattactg

SEQ ID NO: 15429 - DNA, 956 bp, Artificial sequence
  DNA replication origin
aagagaggagaggagaagagaggaaggaaggagggaaagaaggaaggaaggaaagaaggaaggaaggaagaaagggagggagggagggaggcaggattgtctaacacagtgaaatcctgtctctactaaaaaaaaaaaaggtgtggtggtaggtgcctgtagtcccagctactcgggaggcttaggcaggagaattacttgaacctgcctgggagatggaggttgcagcaagccgagattgcaccactgcactccagcctgggcaaagagcaggactccgtcaaaaaaagaaagaaaaaagaagggaggaaggaaggaaggaaggaaggaagagggagggagggagggaggcagagagggagggagacagggagggaggaaggaaaaagaaagaagagaaaaaaagaaaagaaaaggaaaaaaaagaagagaaaggaagttgtaacattttctccttatactctgttgtgggtttaactgtgtccccagaagtgttatgttgaagtcctaactcccagaacctgtgaatgtgccttatttggaaattgggtctttgcagatgtaatcaagttatgatgaggtcatgctggtttagagaagatgcaattctaagaaaagggaaatttggacacaaacacacaggagaggacacaggaggatggaggcagagacttggatgatgcaatgacaagccaaagagcgccaaggatggccagcctccagcagaggccgggagagagaaagggaggatttttctgggcatctgcagggagaacacagccctcacaactctttgatttcagacttctggcttccacaactatgagagaatacatttctgttgttttgggcaacctagtttgtggtactttgttatagcagctctaggaaactaatacacaccctgaccaatctgcacatcctactgaataagaaagagtaacatgtaaagcaat

SEQ ID NO: 15430 - DNA, 1084 bp, Artificial sequence
  DNA replication origin
ggccagccgccccgtccgggagggaggtgggggggtcagccccccgcccggccagccgccccgtccgggaggtgaggggcgcctctgcccggccgcccctactgggaagtgaggagcccctctgcctggccagctgccctgtccgggagggaggtgggggggtcagccccccccgcccggccagccgccccatccgggaagtgaggggcgcctctgcccggccgcccctactgggaagtgaggagcccctctgcccggccagccgccccgtccgggagggaggtgggggggtcagccccctgcccggccagccgccccgtccgggtgggaggtggggggtcagccccctgcccggccagccgccccctccgggaggtgaggggtgcctctgcccggccgcccctactgggaagtgaggagcccctctgcccggccaccaccccgtctgggaggtgtacccaacagctcattgagaacgggccatgatgacaatggcggttttgtggaatagaaaggggggaaaggtgggggaaagattgagaaatcggatggttgccgtgtctgtgtagaaagaggtagacatgggagacttttcattttgttctgtactaagaaaaattcttctgccttgggatcctgttgatctgtgaccttacccccaaccctgtgctctctgaaacatgtgctgtatccactcagggttgaatggattaagggcggtgcaagatgtgctttgttaaacagatgcttgaaggcagcatgctcgttaagagtcatcaccaatccctgatctcaagtaatcagggacacaaacactgcggaaggccacagggtcctctgcctaggaaaaccagagacctttgttcacttgtttatctgctgaccttccctccactattgtcctgtgaccctgccaaatccccctctgcgagaaacacccaagaatgatcaataaaaaaaaaaaaggagtaaagctgctgtagtgtaatactgccaaattactttccaaagtcaatatagtctttaatagaacaaatagaatgtgagagctgaacaaagctggaaaaccaggttccccttacat

SEQ ID NO: 15431 - DNA, 1222 bp, Artificial sequence
  DNA replication origin
cccggacggggcggctggccgggcagggggctgacccccccacctccctcccggacggggcggctggccgggcagaggggctcctcacttcccagtaggggcggccgggcagaggcgcccctcacttcccggatggggcggctggccgggcggggggggctgacccccccacctccctcccggacagggcagctggccaggcagaggggctcctcacttcccagtaggggcggccgggcagaggcgcccctcacctcccggacggggcggctggccgggcggggggctgacccccccacctccctcccggacggggcggctggccgggcagaggggctcctcacttcccagtaggggcggccgggcagaggcgcccctcacctcctggacggggcggctggccaggcggggggctgacccccccacctccctcccggacgaggtggctgccgggcggagacactcctcacctcccagacggggtggctgctgggtggaggggctcctcacttctcagacggggcggctgccgggcggaggggctcctcacttctcagacggggcggttgccaggcagagggtctcctcacttctcagacggggcgaccaggcagagacgctcctcacatcccggacggggcggcagggcagaggtgctccccacatctcagacgatgggcggccgggcagagacgctcctcacttcccagatgtgatggtggccgggaagaggcgctcctcacttcctagatgggatggcggccaggcagagacgctcctcactttccagactgggcagccaggcagaggggctcctcacatcccagatgatgggcggccaggcggagatgctcctcacttcccagacggggtggcggccaggcagaggctgcaatctcagcactttgggaggccaaggcaggctgattctggtacaagctccttttctcatcgcagacctgcagtttgagtagcgttgcttaagttacactgtataaacatttatctcctcttgagaggtgaagctggctaggcttcagggtcaggtggggacttggagaacttttctgaatcagctttactcctaattatactccctagagaatgctcatgtgcaaagcagaaatgtagtatttgcaacaccaaaaaaaaaaagttaaattaaatgtccatccaacagagaatggacaaataaactcatacaaagagtatcacagagaag

SEQ ID NO: 15432 - DNA, 1161 bp, Artificial sequence
  DNA replication origin
atttcgtctgtaacttattcatatacctcattcagtaaatgtttcttcctttcctccctccgttgcttcttcagtcttcacattaaaagcctgccatgtccacccagtgtgcttggcatgcagagacaaaatatactattcctacacttagtgagatgacaatctgttgggaaggaagtacttgggatttgcactctatgatgataggtgcaatgataagagtgagcctggatactggatgaacacaaaagcaaaatctctaatcctgcctaggcttgctgaagtgtccaaaaaacactttctggaagaggtagtatccaagtacattttaaagaatgggtagaatttagcaagtgaagaacatggaaagagcatgcgcaaatacaaggaactttgagagattatagtccactaaagcaactactgctactccagtgtgcagggagcacaggaaaagccctgagggatatgctgagaaccaggaatgcaggggggtgcagctgttggtgccagtgttgctggtgttggtgctgctggtgcaggtgctggtgctgtttgtgctcgtgctgctggagatgcaggtgctggtggcgctgatgctgctggtgctgttggtactggtgctggcactgcctgtggttcttgttttgctagtgctggtgctgttgccactggtgctggtgctcctactgctgctcgtgctattagtgttggtgctggtgctgctggtacagattatggtgctggtgctgctggtggtactggtgctggtgtttgcactggtgctgcttgtggtactgatgctggtgctggtgctgctgctgctggtgtaggttctgctgctggtgctgccagtactgttgctgctggtggtgctggtgccagtggtgctggtgctggtgcaggtgctgctggtcctgtttgtggtactggtcctggtgttgctggtgcaggtgctgctgctgctgctgctgctattagtgctgctagtgatgcaggtgctggtggtgctgatgctgctggtagtgcaggtaccggtgctaatgctcctggtgcagttgctggtgctgctggtgctggtgttgcttgtgctactggtgctggtgaatgtgctagtgctggtgcaggcgctggtgctgctagtgcagttgctggtgctgg

SEQ ID NO: 15433 - DNA, 970 bp, Artificial sequence
  DNA replication origin
ccctactgggaagtgaggagcccctctgcccggccagccgccccgtccgggagggaggtggggggggtcggcccccccgcccggccagccgccccgtccaggagggaggtgggggggtcagccccccgcccggccagccgccccgtccgggagggaggtgggggggtcggcccccctgcccggccagccgccccgtccgggaggtgaggggcgcctctgcccggccgcccctactgggaagtgaggagcccctctgcccggccagccgccccgtccgggagggaggtgggggggtcagccccccgcccggccagccgccccgtccgggagggaggttggggggtcagccccccgcccggccagccgccccgtccgggagggaggtggggggggtcagcccccctgcccggccagccgccccgtccgggaggtgaggggcgcctctgcccggctgcccctactgggaagtgaggagcccctctgcccggccaccaccccgtctgggaggtgtgcccaacagctcattgagaacgggccaggatgacaatggcggctttgtggaatagaaaggcgggaaaggtggggaaaagattgagaaatcggatggttgccgtgtctgtgtagaaagaagtagacatgggagacttttcattttgttctgcactaagaaaaattcctctgccttgggatcctgttgatctgtgaccttacccccaaccctgtgctctctgaaacatgtgctgtgtccactcagggttaaatggattaagggcggtgcaagatgtgctttggtaaacagatgcttgaaggcagcatgctcgttaagagtcatcaccaatccctaatctcaagtaatcagggacacaaacactgcggaaggccgcagggtcctctgcctaggaaaaccagagacctttgttcacttgtttatctgctgaccttccctccactattgtcccatgaccctgcc

SEQ ID NO: 15434 - DNA, 1232 bp, Artificial sequence
  DNA replication origin
ggaggtaaggaattgcaattcagaaatatgttgctacttggcagcctctactctattattgtaaaccttgaagatgaggttaattaagtcctgttgtggggtttgagggctggaatttaatttttggagttttatttaatgtcgggagcagattgggtaataaaatgtatattgagaataagacagccttttgacattttagggtctagggctgtaaagcatctcatggttgctgccaaatgagccatgaactgggctgggtttttatatttgatgaaaaagagcctaaatgtgctctgatttggtataaagaaaaaggaacattaaccttgactatgcctttagctccagccacctttttaagaggaaattgctgggcaggtgggggagggctagtcatggaaggaaactgtaagccagactgggtgtgaggaggggaggtgataaaaggattatagggtggaggagcagaggctgaggaagaattgggacctagcttggcctggcgaggagggaagaggtcagatgtgtctgtacaaaggaagattagaaagactcagcgacgcttgggattgggactgaggggacaggtgggagggaaaaatggaagatttgggatgagttgcattgggaacagagactagagagggaccgatgtgtgaaagaatacctggacgtcaggcacctcagaccattcgcccattttacggcaagaattatttagatcttgtaggatggaaacattgaaagtgcaattttatggccatttagagccattgtcaagtttgtattggggccaagcggtgttgcagaagaagataaggcatttaggttttaggtcagatgtgagttgaagagattttaagtttttgagaacacaggctaagggagaagaaggaggaatggagggtggaatgttgcccatagtgaaggacgcaagcccagaaaaaagagagagtagagacacagagggaaggggttcgggggttcttaccctccagaaaagtgggaaaggggtcggggcatggaaataagggattggggagcagagataggaggtcggggagtggaaataagggatggggcacagagataagaggtgggggtgtggaaataagggatcgaggcacagagataagaggtcggggcacagaaataaggtatcaggggtttcttgcctcccagaaaagcagagaaggggtagagacatggagagaaggggttggagttct

SEQ ID NO: 15435 - DNA, 1087 bp, Artificial sequence
  DNA replication origin
gcattccctcctccccctccccgtcgttaccctgtacatccgggtcacttgccctccccgctcggagctgccgcctggcttgtcgcggctctgccacaggggcaggtgttgaggggctcccggtccggctgccgccgctcccccgctccggacccggggctccccctagcgccgctgaggagccgcctctgcggctccaggagggcgcaggagcgggactgagagcgcctggaggctcgagcggagggtgagtgattggtttttgccattttcccctcttccttcacactcctagctttcctgctctgcgaccccattttggcgaagaggcgggtgcggcggggcccgcgctggcgcggggcttcctcctttccaggcgcgctgggcccgcccccggccccgcgacgccccgggcccgcttcctctgtggccccgcggccccggcctgcccccggcgctcattcattcgggtcttcctttcttccgcccccttccttccattggcacctccacgcgcgctctcgccgccccctcccaccccagatcctgcgcccgccagtgactcctggctcgttggctcgtcccttcccgtgtcggcgttgtcccccctccccaatcctggctcccaccactccttcctcttcgcggccgctttttctcctcatcccctgttcccgtccccagctccacacccccttatcccccgggcttcgcctcgcctcgcctcgacacccagccctcctggtccctggttttgaagttggtgtctttatcgctccccatcacttcgccttccacctgcgcggccagatcttccaacttagatactgcgttgtccttttaattaatgatcagcgtttaaagtccagattctcagtcttagggtgtggtcttagtgtgtttccaaacgcgcaatttctactataattacccaaatctataactgtcaaactctagtggaagtggcaattgctgtgtgtgtgtgtgtatgtgttttaacctcatggctattctgggtcatactgagtaccttttttatttttttcatggaagacttctatgatggattaatttcctctgagtgtaa

SEQ ID NO: 15436 - DNA, 904 bp, Artificial sequence
  DNA replication origin
atgagcgccgggggcaggccggggccgcggggccacagaggaagcgggcccggggcgtcgcggggccgggggcgggcccagcgcgcctggaaaggaggaagccccgcgccagcgcgggccccgccgcacccgcctcttcgccaaaatggggtcgcagagcaggaaagctaggagtgtgaaggaagaggggaaaatggcaaaaaccaatcactcaccctccgctcgagcctccaggcgctctcagtcccgctcctgcgccctcctggagccgcagaggcggctcctcagcggcgctagggggagccccgggtccggagcgggggagcggcggcagccggaccgggagcccctcaacacctgcccctgtggcagagccgcgacaagccaggcggcagctccgagcggggagggcaagtgacccggatgtacagggtaacgacggggagggggaggagggaatgccaggaagtgagggcgccgcggacctgtccggccgtgcgcatgcgccgcacgcccgccccgcaaggtaaatccttagcctatcttctccgcccctcatccccgcccctcccgaaggggcggggcgaagccagagacaggtggtcggcgggcgcggcgtgcagaggaaggaggcgtggccacccccttgcaccccggcctccttaaaggggcagcaccttcgcaaatatcgcgccgagatagcttctgagtgggttggggtcttccagccttccagatgtacagatgggaaacggaggttcagaggtggcggtgacctgcctcttgtcagcgggcttggaaatggcaggaactggacctcgggactcgatgctgagccctgcgaagttgccatattccccccacgcctggaaccgctaggctgcgggcgcgcctctcccctttg

SEQ ID NO: 15437 - DNA, 1388 bp, Artificial sequence
  DNA replication origin
gcgggggcagctcgcaaacctgtggcggtgacgtgagccccgccaacccggaaacggcggcggcggcggcaccggaggctccgaggctcctgcgctcccgcgccgcgctcccctcgcccgcccgggccgccaggtacgtgccggggctctgaaggcgccgccgcccggccggcccgcgcgcgcgcccctggatccgatttgcccccggagagggcgcggggtgcggggcgcgcgcgtgatgggtgcggggagaggcggaggtaccatccgggccgccgggccgggcgctgcggcgggtggacagggggcgccgccgtggtgggggcgtccgggccggcgggcgcgggggtcccgggggaggcgcctcgagtgcgcggggggcggcgggcggacgcgaggggagcgcgcagcggggccgccgcccgggtccacccagctgcggagccggcgccttgtgcgcctcgaggcagggggcgctcgggtcggggtggctggtccctggcagacccttcctgcgagccgggtgtcggtgcggggactgaccccgggagcagcgctggcccccggccacctcccatcaggggcttggaagaccagtcgcattggatttgaggaactagagggggtgaacaaaatctccactggcctcaagacttcctcctggggtagccacccgcctgtgtttaaagagcacttcctcttcgccttttatcttttcattatctttctttttaaatggaagttcagtgttagcgggtgggtgcccttgcagcctgcagggctttcctggggctgtgtacacacacactggggttgggaaaaacctgtgtgtcctttgaaacgtgtgtcctgtgtcaggagtggaacgaaggaggaatcgaggtcttaccatgctggagctacttggagtgtgcctttgctacccaccctgctgcaagaggtggaggggtgcggagggatagagctggggctgcgggggagtgtcacatgcactttgcagctatgtttaattcctggccctgccgcttactagctgtgtgaccttgggcaagtcgcttaccctctctgagtcttagggtcccgtctgtgaaatgggctgctgcgagtggggccttgagaaaacgagcgtagatttcctggcctgcagggggcgcagtgatagaaagtgtcattgccagtcaccttgaatttctgcatccccagcacctagaaagggtgcgttgaagcacgtgggaagcaccccatagataattgtgagatgaacgagtgggtggtgaattttgagaggtgagtcggtgtgcttccacattttggcttccttgccctgtaacatccatccaggatctccagggagcaattttgctatctgggttggatggactcctccc

SEQ ID NO: 15438 - DNA, 1370 bp, Artificial sequence
  DNA replication origin
cgtacctggcggcccgggcgggcgaggggagcgcggcgcgggagcgcaggagcctcggagcctccggtgccgccgccgccgccgtttccgggttggcggggctcacgtcaccgccacaggtttgcgagctgcccccgccgcggcggcagcagcagcagcagcagcagcccgggcgagtgccaggcgagaaataactataaaaggaagaggcgcggcgaggaggaagaggaagcgctgtttaccttcgagaagccgagccgccggcgctcgcacaaaaggaggacgctcgcctcgcgacgcgcctccccccgcgcccagtccccgccgcatcgcggggccccggcgtcagcgcgcgccgcgccccgggaccgccccgcgccggcccccaccccagaaccccgcgcccgcctggcccgtgtcctcccgagccggggcgccacgggcccgggacggtggtgaccttgggcaagtcaccgcggggcgcgctgcgattgggggtcatcgccctcattgtgcgaggaggaaacccggctccgagaggcgcaagagtgacccccaaggtcactgcctgtcaggcagggcttgggctcgaaccccggtctccagaccttcaggccggccaggttcccatccctgggtcgcttccccctcacctggacttcaggaatggtgacagcccctgcctggctcacctcgcagcggggtcagtgagaggaatgctgtccacgcacccattcagccctcccgcagatacttactgggcctactaagtgcccgggctgttctaggccctggagctgcagctgcgaaccaaaacaaaatccctgcccgggaggggcagcggggacaggccgtaaatatctgatgggtcctatggtgctaagtgctgtgccagaggaaaaataaagcggggtgaggggacggtgcgggctgtcggtgctaccctaagcggttctccaaggactttaaatttagtacagaaattcccacataaaaagctcctcgccataattccagtttcaggtattatgggagacctcatctttcccctgatctagaatggaaaatactgtgtttttctccctgtaacaggacatgcctaggaaactgatactctccttccctctgccttgctcccctggcccagaagcccatcctatcattatcttgacattcaaccagaaatttctcgggaagatagacaacattctctcaagtatctttctgctgtcctctagcagggtatcaaaagggttacatcaaaggcttccattgtctttccacctccacctccagctataggggggttggagtgtgctcacatcatactcagtgctgagttacctgattaggagccagttgttccattt

SEQ ID NO: 15439 - DNA, 1504 bp, Artificial sequence
  DNA replication origin
acatgggggcagaggggaacacatggagggcagaggggaacacatggggggcagaggagaacacatgggggcagaggggaacacatggggggcagaggggaacacatggggggcagaggagaacacatgggggcagaggggaatacatggggggcagaggagaacacatgggggcagagggggaacacatgggggcagaggggaacacatggagggcagaggggaacacatggggggcagaggagaacacatgggggcagaggggaatacatggggggcagaggagaacacatggggggcagaggggaacacatggggggcagaggggaacacatgggggcagaggggaatacatggggggcagaggagaacacatggagggcagaggagaacacatggggggcagaggagaacacatggggggcagaggggaacacatgggggcagaggggaatacatggggggcagaggagaacacatgggggcagaggggaatacatggggggcagaggagaacacatggggggcagaggagaacacatggggggcagaggggaacacggggggaagaggggaacacatggggggcagaggagaataggttgaatgatctcagtaatgatcatccccaccaccactgcacccctgccacacacacacacacattcaagcctgaaacagtatccaatggggggctaggctgggcatggtggctcattcctgtaatcccagcactttgggaggctcaggtgggaagatgatgtgagcccaggagttcgaggccagactgggcaacaaagtaagaccctgtctacaaaaaagaaaaaaacaaaaaaagaaaaaaacacatacgaaaagtgggcacaaggttaggggaggggagaagaacaagggtgtggagagtagggggctgtggctggggccacaaggacctgggtccacacggctgcccatcactcaactgtggtaatgtgcctaacggtgtcacgcgccctgccaaagactaaacgcaggtaaaggaaacatgggcccaagcacagtaagccctcaaaggacctgaggtggagagacaggggtaagcctccagctcctggcctcaccttggaggctgggctgtcgggggctggtggataaagggaggggctgctttcaacggagtcagggggtggtgaagggggacgtcagttccaaacagatactgttccaggcttaaaaccacatacaaccgatgtgaaagaacattttgtcatcagataaaaagctggcttcgcctccccctggattatccaggtcactatgttagcttttcccagaaatatcccgatagaaagccgctggcttccatgcccaagcccattttccccggtagcacggtgtttaaagggtttgtcttggactatgaacaggcacattatgtctaccaacttttttttttttgacagagtcttgctctgtcatccagaatggagtgcagtggcgtgatcttcgctcactgcaacctctg

SEQ ID NO: 15440 - DNA, 1149 bp, Artificial sequence
  DNA replication origin
tccccatctcctcgccctttctgggtcttgcgggttgaaaggcctggggactggaggtgggagaggactgagcgagctgtggacactccagggaggacagaagatggaagtcctgtccctggcatgcactgttcggcgcttccacatcttcgtgaccctcctgtaaccctcgaggtaggtggcgtcaggccaccgagggcccagaggcgaagtagtgcagccaaggtcaccagcaagggactaggagatgggcagtgaacgcacccctcagcggcccgactggaccaggcaggcgtagctgcggagacgagggccgttggaaaaatcccagaggacccagagagaactcaggctgggactgtatccactccaggagtcctccctgttagtctctggtgcctgaagcccagatggaaagagatctgtgcacataggtttccacccggcttccctaacccggagggtttggtagggcttagggctgctgcgccagcaggacctgcccgcagggcactccgaggctggacaaggagatcggaggccggtgcagcctgcttgagctgaccagacacggagaagggaggcccgaggcgacagtcagacagctcctcttacctggacccttcaggaaagcgttgctggtggggggtggggggcagggccaaggccaaatcgattttctttaggattttcagtgagttaatgagagagtggtatgggcaaagaggaacctgaaagccaaggagcagcagaagcctctggggccacgataaaaataggatatttgcccaggaactcagcatcatcaataagtgccataaagcatccctccccttcaaacaaggcaaacgtatttcaactgaaaatggcaccattgggtggaaagtaggaagggagatggttttccctgggtgggttatgctgtggctggtttaggtgaggtttggggagctctttctgatgtaagccccccaccccaaggacggacctctgtaatatggggaagcttgggcttctgtgggccgactcatcttgaaatgagctttgatactcatgtttccacacacgtagaactgggattcagaagtagagggatcccaaattttaggaggagagagacttctgttagtgctgggtcccatctggcct

SEQ ID NO: 15441 - DNA, 976 bp, Artificial sequence
  DNA replication origin
gagccccctgcctcgcgcgcggcttggagtttgaagggccccgcgccgagccccgccagcgccgccgccgcctgccttcgcccgcctccttccctccctctcgccgctgccggggacgggagccgcgcgccaggccgggcggcgggtggcgggctgcgcgccggggttcatgagcctccgggcggcccgcggccccgggagcctgcgccgtgactcaccccccgcccccgcttgtgtctcgtccctcccggcaggatgccggaccagatctctgtctcggagttcatcgccgagaccaccgaggactacaactcgcccaccacgtccagcttcaccacgcggctgcacaactgcaggaacaccgtcacgctgctggaggaggtaggtcgggccgggacccccgccgtccacgctcgccgctgccgccgcgcagctggaggatctcctctccgagctgggaggaaggggacgcgggggccgggggcgccacaccccctcagggagccgccgggtgaataagggacttcggacgggcggcgccttccccatctcctcgccctttctgggtcttgcgggttgaaaggcctggggactggaggtgggagaggactgagcgagctgtggacactccagggaggacagaagatggaagtcctgtccctggcatgcactgttcggcgcttccacatcttcgtgaccctcctgtaaccctcgaggtaggtggcgtcaggccaccgagggcccagaggcgaagtagtgcagccaaggtcaccagcaagggactaggagatgggcagtgaacgcacccctcagcggcccgactggaccaggcaggcgtagctgcggagacgagggccgttggaaaaatcccagaggacccagagagaactcaggctgggactgtatccactccaggagtcctccctgttagtctctggtgcctgaagcccagatggaaagagatctgtgcacatag

SEQ ID NO: 15442 - DNA, 1277 bp, Artificial sequence
  DNA replication origin
tcttctctgaccctccctgcaaggtggagtcaggcacctcttcctaagtgcccattacatgttatgttcctgcaggaccacactaaacatgctggctcataattatctggacatgtctggcccccattcatatgagaggttccaggatagcagagtatgcagcacaacagctggcaaatggtaggcacttaatacagaaagacagagacagaaggggaagagtagggagaggtgaaggaggaagaagacgaggaaaggaggaaagggaggagtaggagggggaaagggggaagataaggagggggaaatggcgaggaggaagagaggaagggagaggaggaggaggaaaggaggaaggaggaggagggggaagaaggggaaggggaggaaagaaggagagggaggagaaaggggaaaatggggaggagaaggagggggaaaatgaggtgggggaagagagaggaggaaaggaggagggggagggggaagggggaggaaagggaagagggggagagggaagaggaggaaaggaggaagatgggggaacagaggcaggaggaggggaggaggggaaagggggagaagggagagagggaggaagggaggttgagaagaggacgacaaatgttacgggtactcaaagaagaaaataatcacaatagtaaagactgggaaaggcttttcagagatggtgcacctgagccatgctttaaataataagttgggtttttggcagatggggaaggtagggaaagggcattttggatgatgggaacagcaagactgtgaaagtataaaggttcttcattttggaagagaattcaaacagggtggttggctaaagcctagggtgaatgaggaaagtgtagtgaacccagaatcttctagatgccatgtgagttgttcatcccactgtgcattcattaaggtgttttttagttacaaataacagaaaactcccatcagaatagtctaaaggtaggtgcttggtgtctcattccttccatttttctgctctgacaccctcaacacatcctccctaagctaggctccctcatggtcccaagatggctgccacggttccaggtatcacatgctaaccccagtacgtcccacaaaagaagaggggctttttcttcctacatgtctctttttaagatgcagaaaaatctttcttcacccccactgccaggcaatttcccttcatatttcactggccagagctctgtcagttgcccacacctaacccaatcactgccaaggggaataggacccag

SEQ ID NO: 15443 - DNA, 1114 bp, Artificial sequence
  DNA replication origin
gtgagttgcggggcgctcgggcgcgctcggcggggccgggcggagtcgcccacagtcgcgggcgccccctgcccagtctctcgcgcgaagaagggcgccgggacggggcgcggggcgggctcccggctcctctcgcagcggggtgtccttctccgcggggagggcgccggccctgggctggggcgtgtgcgggacgcgcggccaggctctgcggggccgggcgaggccgcccggtgggggggggaggtctcctcgcctccagctcgggagagggggcccctgcagtggggccggggacggggcccgccctggggggtttcgcgtccccctccgggggagggcccgggacgacgtgcttggcggcccggaccccgccgatggggcgccctcccggcattgtctctggtgcagccgaggaaagttccccgcggcccccggcccctacccggacccggcgctgcttggcaggccccaggccacttgcctaaagcaaaagaagagaaacgaaagggaagggggtggggggagtcctacttggagcttggggttggctcctgggcggaccgtgaagtggcttgtgttttctgcttgtaccattttgggacctgctgcgttttctgagagcgacatgaagtttcaaagaaaaaagaaacttgccggtgtccggttttctgcggtttgatacatcccaagaggttcatcttgggcacttctaaagcagtttcctttaataatgtggttttccagtagctcagggagaaggatggtcaactgcagaccatcatcgttaacttgacctcaactttacctgtactcgtcaggaaagcaaaagaactttctctcgcattttcccctgtctactctgttaggttatcttggcgtgattgattctgggatgacatcaggacctggattgctgagtaatgttttgggattgtaaaagcttatcagtttttaggccagggttatctgtattgcaaccttcatcccaaagcctttctgttttgcaattgtagcgcggccagatagctttaagaaaatgcgggtcttctggaaacacccagtgaacagtttggaaagaaaaagatctttgagaacaactgattcaccccct

SEQ ID NO: 15444 - DNA, 1124 bp, Artificial sequence
  DNA replication origin
catcgcgggttcggccgggcgctcgcggctctcgggtgggaaagcgaactgcgaccgggaagcgccggctgggcgggaggcgcgggcccggggctgcccagcgcacagtgctcgcccgcggcagcggccaggccaggcgaggcgcgggagccgagcgcggcgcaggaaggggcgggcgaccatgtgccgagggggaggaggccgcggcgacgcgagcggctcgcacgatcccgctcggcggcggagggcgcgggtttcaggaaatccaaacacttcgacaggaaatcggaatcctgactaagcattcccggccccgagccgctccgcgccgggggctcccgcctcgcttaacccttggcccgccggcagccacgaggggggcgtgggaggggccccagacctcggccggggtcgggcgtccttcgccttccgccccatgccccggccggccggcctcctccccgcctgaggtggaaggggtgggatttatccacagaaaaccctggacgcggaaggtgcctttctaaggccgggacagcggcaaaggacgtgcctgtcttccatctgcagaggatggacctgcactgtcctggccgttacccctattttcagtaaaggaatgatttcaccaggctgccccctttcaccacttcctctctgctcttataattttatttttgcccagtgccaagggaacaggaccttcccagtcaggatagtataggaacagtatggagagtaattgtgtgggctgcaggctctgtgtccggttggaatatggccttttttctactcatgttaccttgagtaactcgctcaactttcctgagcctcagtttccatttatgaaatggatgttaattccaccctcataggtttgatctggaagctgaatgtttagacagggactggcacattggaaacgcccaaataaatgatagccatgcttgtccttattattaccattaaaagacatcagagaaaggaggattttaatttgtgggatgtatattgtgcatatctatgtctactttcaaagtcagagacagtagtctttctttagaacttaatttccctcctaatcattgggtgattgtttttctttgcagcatttcagaaacggc

SEQ ID NO: 15445 - DNA, 1734 bp, Artificial sequence
  DNA replication origin
aattaaatccagcaattaagctctaattgcgcaattacttcaccgtgtggctcagtgccagggttgggagacttgagcccacaaatggtgtttttgtgcaaactaggggagggggaggtgaaggagacagggctaaggaggtgatatccggggaccaggaaacaaaagcatttaaaaattagacatcttgccaatgccttggtgccagtcttctgactggcagggccatggggtgggctggggtactcgggggctttttcaggagtaaaatccataaatatactgagtttgtggctttctttcagcaattccctctggtctgtcttctagtgaggtcatctctctgtatgcctgggctgggtacccctctgtttagggtttggagtgaggaagtcctctctgtacgcctggggtgggttcccctctttttaaggtttggggttggggagtcctctctgtatgcctgtggggggtgcccccctgtttagggtttggggtggggtgggggagtcctctctgtatgcctgtggtggctgcccctctgtttagacttggggtgggggagtcctctctgtatgcctgtggtggctgcccctctgtttaggcttggggtgggggagtcctctctgtatgcctgtggtggctgcccctctgtttagacttggggtgggggagtcctctctgtatgcctgagatggctgcccctctgtttagacttggggtgggggagtcctctctgtatgcctgtggtgggtgcccctctgtttagacttggggtggggaggtcttgtctgcatgcctgaggtgggtgcacctctgtttagggtttggggtgggggagtcctctgtatgcctggggtgggtgcccccctgtttaggatttggggtgggggagtcctctctgcatgcctggggtgggtgcccctctgtttagacttggggtgggggagtcctgtctgcatgcctgcggtgtttagggtttggggtggggagtcctctgcatgcctggggtgggtgcccccctgtttagggcttggggtgggggagtcctctgcatgcctggggtgggtgcccccgtgtttagggcttggggtgggaagtcctctctgcagcctggggtgggtgttagtttcctcatctgcaaaatggatataatagtaatatgtacctcagcccctctgttttggcttggggtgggattgtcccctctctgcatgcctggggtgggtgcccctctgtttaggcttggggaggggagtccttttctgtagacctagagtcttggagctttatggttggtggtgggtccgggagctgtgtccagacttccagagcatgtagaagaagagagtgcccagagagcatctagagagctgggaggggcttgcatcggttgttctgcttggtggatccatatttgtgttctgagaagatttgggagatgagaagctgctgttccaccatttcagtcggtggattccatggggagtgttgagaacagcttctctgcctgtcattcattcactcaacttgtacatttctctcacttgctaattcttcaactagtatttatggagcatctaatttgtacaaggtactctgcttggctttatgggagaaaacaaagattgaacatggctcttgctttcaaggagtatggagagaagacatgtgtaggatgatctggaagttactgagcacctactacgtgccaaatgctactgtggcacttta

SEQ ID NO: 15446 - DNA, 1010 bp, Artificial sequence
  DNA replication origin
acaccctgctgcgactctcctgaggagagatgttaaggaatgggtcaccttctaaatctggatgcttctcctccccttctgtctcctgctccggagactgcagaccctgagggaggggaatgaggagcagaaagcagactttcttagctgatgtcagagtagaattactcatagaatcagagtagaagggtagagttggtagaaacttttagaggtcatttagttccactttaagaagagattgcattccgctaacactcaagacctcctaggtacaaggcactgtgccagactgaaggcggagacttaaagagagtgaggcaaccctggctctctggaagctatatgatcaataacccggggaagttagaggggaaacaaatgcaaggcaggcaggagttacctggttgatggaaatgaccgccagccggggtatgaccacttggaggatgacctgcagcagcgaggtgcccaggccggccaggatggcccaggtgagcggcagcggcagcatactgtaggtggcgaagagcgtgaagagcacgtagcctatgccgtcgcccaggagcccgtagccgaggcctgctgccaggatctgggtggtcatggccacccaggtgaccacgccgctgtactgcaggtacgtgtgggaggtggtgtccttcctgaccaccaccagggcgcagatcactacctcaatgccggtgaagaagcccagcaggatgcccttgagcgggtccatgggggccgaggccaggctcaagtgtaggaccaagagagtgagtttggtcagcacgtccagcacgttcatcaccacttccgatttgcgcctttggcccaagaaatagcgctggtagaggcgttccaaatcccgagatttgaaggagttgcgcagggtggggaaaatgacccctcggtagctatagcccccattaagaaagaaatccgagttgctaggggcacagtcaaggtgcaggaagcccaggtcgcccccgcctccgctgccgctg

SEQ ID NO: 15447 - DNA, 1078 bp, Artificial sequence
  DNA replication origin
agccctgcgctagggctccctgtaggtcgggtcatactgtgcccaggggcaaagggcacctggaagatcgcggcggacctcggcgtccttgcgtgctgctctcccgccagccggcgcagcttgggtacgcagcggcagtggctatttgtcctcaggagccgcagcgctgtgagccacgcagccccttcctgggctcaggctccttggttgattctaggctcagcgttttggcgcagcctttgctctccaagagacgcctaagcgcctgggcgccgtgcttctgctgcgcgtcgggcgggtcctggctgctgcactgggctttggacgcccactgctccgcggctgcagggggcctggccggcggtgaccggcggcagcgatgggtgcgaagttagcagatgtggctggaatcatcgcccttcggagaactccattgcgccgggatggggagcaggggcggagctgggggcgggggcaaagaaggaggaggagggggtcacggtgaggtggcggggcgccccgcgacagggttggagaggtggtagcctcggcgctaacaattcaccaaatagttaatttggaggaaggggtatgctgaggctccctcctaggctctttcctagttcgggagcaaggactgacagcgcagcgctggctctggccagaagcatccctcccggagggggtgtggggactctcgctccagggtcccagcctgagctataagacgaggtcaacgctttcagctgtgctttcgaagggtcgcagcacacagttctcatcccctttatttcgttctttggagtccatttggctcggagctaggaggatcaggagaggcgggggaaggaaaaagtggtgagggctccaaagccaagagctccgagaacgaagagaagccgccggtgcggatatctgaggctgagaaccgaagcttggcggatgaggcgaaggtttggaggagaagggaggcccgaggccgcgtggaagtcgacagagacgcctctggatctagggaagcgccgccgcgtgccaccctggagctctgaaacgcaccgcgggcgccaggcgactggga

SEQ ID NO: 15448 - DNA, 877 bp, Artificial sequence
  DNA replication origin
tgaatcttgatgacttttgttcctatccatattctgaattctattactgtcatttcaaccatttcagcctggttaagaaccgttcattactggggaactggtatgatcatttggaggtaagaagacactggctttttgagtcaccagagttcttgcactggttctttctcttttgtgtgggctgatgttccttcaatctttgaagctgctgccctttggatttattttttcttttatcttctttgatgctgttggggatttgattgtggtataaggtgggcttagtcaactggtcatttctgaaagaatttcgggggctagggctcaactcaacactccagggctgtgtgctctaactctggggggctggtttcagacccctggctttgttctctggcccctccaggttagaacctgctgcactagagtggacaaggtgttcccagagagatgactacatcaatctgctgggtggtgctggacaaagcagttagttggggtggtggcagtgggattgaggcttgtttgtgtatgccaacaggagaggcagcaggcagggtacatgtgcattggctgaggtggggtcctggtgggagcaaggctgctatgttcctgtgcatgctcatgttggtggtgatgatggcagtggcagaatgctggatggatcagggcttctagtctctgtgtgtgagtttgcagccatgatggtggctgcatgggaggaggttgccagcagatgtggtgggggacagggtgtgctcaccctggcagcagtgttgtggtggaagggatggtgttgcagtgagctcacatggtctggcagggaagaggaggtaatgaggtccacgcatcacaaactggcaaggtgatgagggga

SEQ ID NO: 15449 - DNA, 1051 bp, Artificial sequence
  DNA replication origin
gtaatcccagctactcgggaggctgaggcagaagaattgcttgaacctgggaggcggaggttgtggtgagccgagatcatgccattgcactccagcctgggcaacaacagcaaaactccgtcttaataaaaaaaaaaaaaaaaagtgatgtaacattccactgtatatcctttctttggctccttgaagttaggaacctgctgcactggagagtctgaggtgcttgtggattgctggtcacaatgctacaatgggtggtgccaactgaagtatttcatagggtgatgaaggcagtgggatctgtccttgttcccatgtgtcagcagcagcacatgggttcatgctcctcagctcgagtggagtgttagcaggtactagcctccatctgggcgtttgcatcagtggtggtcgcagcatggcatggggaagactgggggcatgcattcatcctggtggtggtgttaggctaggtgttaggcagttgtgggcacaggactgtgtgtgtcccctgtgcatgttcatgggggcagtggtggctcctcaaggcagggatgggtcctctgttctccatgcttagttccacggtggcagcagtgatagcacagaggcaagatgctgatgggggtggggtcagtgggctctatgtcagccattgctccaacggtaatggctgtgtcgtggtgtggtggtgtggtggtgtgggggtggggagcagggtgtattcataccagcagcagtggcatgacagggtgcacacacagatacgtgctagatgggaaggagaggcaaggtctgcccatgcacgcacattcctgcagaacaatgtcgggggtagtcatgggtaagggcatgcaggcaaagtggcatggggagtctgcattgggggggagggtgtgagtgggctgctgtgtgtccatgaagattgctttgctggaactctctgcagtcaggtgtgttccaccagtgcaggacctatgatgttggtccctaggaggtgccactcatgggcacccaaggctgcaccagaagcatgtgtgtggctgggctgggg

SEQ ID NO: 15450 - DNA, 1112 bp, Artificial sequence
  DNA replication origin
gaaaacgaatgccacgcaggtcaccaggcttggaaaatagaaggcacccgaagttgttctacgtggctgtccccagccacccattccacccgctcgacaagggatcctgggccgagcccggccatccgcgggggcggggccgggacggcggcggcgcgctgacgtaacgggcgtgggtcgtccgtcgcgccgcccggcgaggagtgggctggcggcggtagctgtcgcccgcttggttgcgtgaccgcggggtccgcgtccgctccctccacccttcgcccttcgcccttcgcctcgttccggcctccgcggcccagcaacggccgtcatggtgccgtcggcgctccctgcgcggccccgctgagcctcggtgcggcggcgagcgcggtcgagatcgccatgcctacccgtgagtggccggccgagggccgggggcgttgggaggcgactgcctgcgcgacgcgcttgggccgggtactcctcccgggcggctggggaggctgggccgcgctgagcagagccaggaagtgtctgcgagcggcggagttagtttcgtttcggcttagccttccggagatggcgtgagcccgttgcacggatcgggaaactgaggcccgaacgttaagggaactgcggggacgcgctgttaggaggcggcagagctggtggtaacctgacccgtgggatttcaaagttaaagcccttttcccacggccacacggcttcgtgggactttatggaaatattgaaaataactgcggtaccattgtcagtcccttctcacctcgggccggacgtcgctagtggacgcgccggccccgagtcccttcccgcggccgccagacagacccccgacagcctaactcggcgtccgtatcgccgtcggggcggctgaagtcggagctttctgtggagcttgttaggcagaggcacctcgactgtggcttttggaccacacttcggattcacccgggcagatgattaaaaatgccggtttcgggacccgccctattcccatggaattagtctggagcttgggccccggagtctgcatgtctaataagcgtccctggggttaccaaggcaccccaaagtttaaaagtcactcggtg

SEQ ID NO: 15451 - DNA, 926 bp, Artificial sequence
  DNA replication origin
agacataatccatgggcctcctagcctttgaggtgaggtggggtagaacagggaacccattgttctctaattagagcctgaggtctcctctgaggctcaagatggggcttcttaatatggagccttcacctgttccaagctatagtattatgatgcctcctcccttcagaggcagcccacctgccaacattcatgaaaggcttccttcttgatgtgaggagtggggagaggcatcacatggctaagggtctttccttggggtataaaggactcagtctgcacctgttcaaaccctagcatcattcatccagctgcactccagtggagccttcacggtaggcatctgttattcctgatggttggggagacagagagcaggggagggagggagggaggaagacagcaagtaaaggagggaaatgaatgggagaagagaagaagggagggagaaagagaaggagggggagagggagggatggaggaaaagagtgagggagggagggaaatggttgggagatggaaagaggcagaaagggtaggaggaaggaggggagggaagaaaagtaggagaaattgatgaaggaagaaaaggagggagaaagagagggtagaagggagggagggagagagggaaagagggaggaagggagagaagaatggaggggaaatgaggagataaatgaatggaggataaggtggtaggggatgctctcagggctgtctgagacctggatgttgctccaggatatagctgaaaacccaaattgctctgagtcgatctgtgaaaagatgcaatgccagacagagagcacctggcaaatttacccgggggaaaaatccaccacttcacattagtgaggatcctacatagccctgggcaatgaccccgcccacggcacctggtgtggaaacacaatcagcattaa

SEQ ID NO: 15452 - DNA, 1330 bp, Artificial sequence
  DNA replication origin
caccccgagcgccccttcttcccagagcagcagcggagaaggcgaagcggccggcgggggcgaggcagatggggctcaaggcgcgcagggcggcgggggcggctggcggcggcggcgacgggggcggcggaggcggcggggcggctaacccagccggaggggacgcggcggcggccggcgacgaggagcggaaagtggggctggcgcccggcgacgtggagcaagtcaccttggcgctcggggccggagccgacaaagacgggaccctgctgctggagggcggcggccgcgacgaggggcagcggaggaccccgcagggcatcgggctcctggccaagaccccgctgagccgcccagtcaagagaaacaacgccaagtaccggcgcatccaaactttgatctacgacgccctggagagaccgcggggctgggcgctgctttaccacgcgttggtgtgagtacccggccgctcggggcgccctcggcggcggcgcgcttggggacttggggtcggggctggagctgagaagtctctggggctttaagacccatggatgctttcccgctgaaggggagaccagcccgtcctcagcacgcgtttccctgggtgtgtgtgtgtgtgtgtgtgtgtgtgtgtgtgtgtgtgtgtgttgccgctctccgggtgttccacactaggggcttaaaaaacgaagcgtggttcccctgctgatttgggcggatgtgtgcgcgcgcgggtgcacatttatgacatcttctaggggtgttggtttggaagcttaaaataattatgtgggtttttccaattaatgtgagggttgaagaggataaagcgggtcctcccgtgagctctgtgtttctgtttcgggtggatcccttctgttgggatcgccactgagtttagttggggatgggaggggtgcgcaccacccatagtggggagcgtgtgtgtgtgtgtgtgtgtgtgtgtgtcgcttgcttgtgccacccttctgatcgctgggtactggtacagagaagaacctggtgctgctctgactgggagctgggactggccaaaatgcatgttctaggattccttttagggaagtgaatgggaacgtgtgtgtctaagcctagactgaggggctggggcttcacagagccaggaggtgagggggccggggactcttttggctgaaacatctccttgatttgggatccgatattccctcagcctcagtcgctgctgcttctcctgctttggctggcctagggcaccgggaatgtgaggggcttggcctggaggtttgcacccaggcactgttctcctagaaagaatctccttgct

SEQ ID NO: 15453 - DNA, 1426 bp, Artificial sequence
  DNA replication origin
gctgcggagaagctgggagggcgcgcgaggctggcgcggaggcgctagggcgcgcggcggcgggagcctggaaccggcgctccggggcggcggcggcggcggcggcacccaggccggcgagcccaagacagcatcgcagtttatttacaagcccggtgccagccgccctcccgcccgccagccacacgcgccgccgccgccgcctcctccctcctccgcgctcccacccgcgcccctccccgcccgttccagcctcagcctgtcagcagcagcagcagcgagcgcgccgcgggccgagagcacgccgcgtccctccctccctccttccccggggtggggccccattgtcccgccccgtcgcggcgggaggcccgggcggcggcgccccgcctcttcccgccgacccccaccgctgattgtctggggacccaggatcgcctgggctaccgccgcccccgttgcaaccaggcagtgcgccaggcggctgcagagcccggctcctggagctcccgtgggcgttggggcttcccctggatggggcgtgacggcgggcagttgggggaagaagaggaagggaggagggactggggggttgtcgcccaccaaacattggctctgtggttgcagctttgtgaatttccctcaccccctacccctgctcctcggcttcagaggtaaaagccaagttgtcgggttggtcaaggccgggcgcaccgcgaacgcacctgctctgtggtagcgaagctcgtgactccctcttccctcttccctcttccctcttccctctagttcgtggttcatggtggatgccgcggccctctcctcccccaatctttgaatagcaccttcacctgtctgggtgggcaaaggactgaagaaatgcagtcagaatctttgattcctgctttgctcccgacttgcacccaagccagtcattccctctctggtccaaatttcaattcaatcaaccaatctgtaacccctcgtgagcttccctggcaaagggtagtgatctctgtcctgaagatatgaggtctctgcactcctaagacctccgtcctagccggtggaagacaatgaaaagacaaattttaacagtagaatttccgatattggtaaatagtatgtggtaacaaattagagtgctgcgctatagtgactgggggagtcactctaaaccggctggtcgtggaaggccttattgtggaggtgatgcttcgaggtgagaccctaatgacaagctgggagcaactatgtaaatgtccagagagccctccaaacagcagaacagcgggtgcggaggggaagggtggcttgagcttaatgagagtaggccacaggcaaaggctagatcttgtaagacactgacaaaggacaggagcatcctgcacttcttccatgcccaccgccatcggggaagcctcca

SEQ ID NO: 15454 - DNA, 938 bp, Artificial sequence
  DNA replication origin
agacaccagaatgggggcgtcccgggcggcccggcgggggccaggcggcctgccggctcagccgccgccgcctcttaccgactcggcctcctctctgcacagcagccgggccgtccggggccgagctggggcacgagcagggcggccagcccgggcctctgcctctgcctccgcccaggcagcggccggggagggagcaggagcggagcgagctggggccgcagcgccggatccgcccaaggtttcgcgggagggagctgggtccgagccctcaagctcgctcagggtccgctgccatcgccgccgccgccgccgcctccgccgccggccagccctgacgcgacgccgggccccggcgacgtcagccgcccgcgacgtgccggaagcgggcctggccttgtcacgtgactcacgagggttgggcccgggccgcgcagccgattggcgggccgccgtaggaggcggggctttgcggtcgttgacggaccgctagcgggcggggctctggttactggaggaaagaacgcgagctcttggtgcctattggtagttgtgaagtatttgacctttgagatttgaggacgaagggcattgtttattattcttgattcgttgggaaccacgtcaccaaaacccctttacccaggacccttggcaaactttttcaaatgcattacatgctttcttagatatccatcccactccacatcaagaatagagcatggttactactacaaaatcaataaacctcccttgaatggatgctttgtgatagacactaggctgtaaatatgtcacatgacaatcacaactgtacaactgtattacaattgtattgctttccagtcttggagatctttacaatacaaagacgaatattactaagatgtgtgtacgcgcgtgctcaggcacagctgaataaccttaacctatggcta

SEQ ID NO: 15455 - DNA, 1139 bp, Artificial sequence
  DNA replication origin
gtggtggtctatgtataggtctacaggtaaaacccacatcctccctcctgtatcagtgcatgtgggatgtgcatagctgcactgtgtgtgtgtggggtggggtgtgtttgtgagagggtgtgtgggggtatgcgtatggtgtgtatgtggggtgtgtctggtgtgtgtgtgtggtgtgtgtgtgtatgtgtgtgcctgtgtggtgtgtgtgggggggtggtggtgtgtgggggtgtgtgtgtggggtgtgtgtgtggtgtgtgggggtgtgtgtggatttgtgtggtgtgtgtgtggtatgtgtgtgtggtgtgtgtgtggtatgtgtgtggggtgtgtgtgtgtgtggtggggggtgtggtgtgtgtggaacatgagtgtggtgtgtgtgggggtgtgtgtggtgtgtatgtggtgtgtgtgggggggtggtggtatggaggggtgtgtggggtgtgtggggtgtgtgtgtgtgggtttgtgtagtgtgtgtggggtgtgtggggtgtgtgcgtgtgtgcgtgtgtggtgggggatgtggtgtgtgtgtggtgtgtgtgtggagggtgtgtgtggtgtgtgtggggatgtgtgtagtgtgtgtgtggtgtgtttgtggggtatgtgcctggggtgtgtgggggggatgtgtggtgtgtgtgtgtggtgtttattgtgtgtggtgtgtgtggtacgtgtgtgtgtggtgtgtggtgtgtgtgttgagtgtgtttgtggtgtgtttttgtgtgtgtatgtgtgtggtgtgtgtactgagtgtgtatatggtgtgtttgtgtgtgtggtgtgtgtgtggtgtctgtgtatgtgtgtggtgtgtgtgttgagtgtgtatgtggtttgtgtgtgtgttgtgtgtgtggtgtgtggtatgcgtgtgtatgcatggtgtgtatgtgtgtggtgtgtattatgtatgtagtgtgcttgtgtgtgtgtggtgtgcgtggtgcttgtgcatggtgtgtgtatggtgtgagcatgtttgtggtgtgtgtgtgttgagtgtgtatgtggtgtgtttgtgtatgtggtgtgtgtgtggtgtgtgtatggtgtgtgtatgtgtgtggtgtgtgtctgttgagtgtatatgtggtgtgtttttgtagtgtgtg

SEQ ID NO: 15456 - DNA, 1678 bp, Artificial sequence
  DNA replication origin
caacaggcggcggctccagtgggcgcccgccgcgcgctgccggagcccagcccagcccggcgcgcccgggaggagggagcagggagcggggaaggggtgtgtcccggctgcgtgctgggactgcgagggtctgggaggggcgaggcgcgggggcggggccgcggcgcctataaagtcgccctccgcccggacgtaaacaaacctcgcctggctcccagctggtgctgaagctcgtcagttcaccatccgccctcggcttccgcggggcgctgggccgccagcctcggcaccgtcctttcctttctccctcgcgttaggtaagcccgcgccctcttctcccaggcgcgacgcggagcagaaaggggccgcccgtgcggtgccgctggagcgccaggaccgccctttgtagccccgcgtactccaggagtaagcgccccggagctgcaagtgcgcggtcaccccggggcgcgggcgcgagggggctttgggtgcagacaccgctgaagtggggggttcaattacggaaagggaggaaaaaaagacagggtcccattcatctcccccctagctggggattggggttctggaggtcgggaagggggcgatgagacggtccgaaaaaataccaggatagcgtttcctggcgtcgtctccgaatcccagctggcgccgctggcaggggtgcgcgctggacgtgggtgcagaagggactaggtgagtgtgtgtgtgtgtgtgtgtgtgtgtgtgtgtgtgtgtctgtgtctgggaacggagagattgcgcgcgagtgtgtagatgaggggttggtagaggtgagtggcgctggcaaggaggctggagaggggggcgtgggtgtgtctggcttgcagactgggtcgggaacgggtgtggatccgagaggctggtggcgcttcagtcccgtagcacacacagggcggtgtgcatgtgtgagtgtaagcgtgtgtgtggggggagggtccagggtgtgtcacagtgcaacacgcgagccggagcaagtgtctgcgagcgccactgggcagggtgcgcccccggaggaacccgggattggcgcatcggcggcgtgggagaagtgacctgggcgagaggggtctcgcggacatttggcggccccttgagctggctggagctaggagtggcgtcattttcgcctccgcccaccctcccccgctttcctcccctcccctgcctctggtgctggccgctcctgccctccacgggggaaaacagctggaattacttcgacgttcctgggggatccgccgcggtctctgattcagcctcgggaggagatttcgggctgggcttggggaatgcggctggttctgggggaaacacgctgtcacgcctctgtcaaattagtagctggagctgggatttagtgggtcggttccttacccacccctcccccatatcccccgcctgttgtccctgctgtccctgggggtcctgaacagcacgcctctgtggcttggaagtgggagatgcctggcagtgggtgggggaggcagggcccttggttatcttatgcccatccaagaacaccccttcctcacggacgctgggggcacttcagtttgtttggtttctttaagctactgggaaatatctaatattcagaagtcagccagtggccaggcaggagggcggtagacatcct

SEQ ID NO: 15457 - DNA, 1094 bp, Artificial sequence
  DNA replication origin
cccctctccatatttcttttgttccagaaaacccttctccaaaactggccctaataatcagaggggaaagccatggcccctgccttggggacagcatgggttggcacagaaaagaggtttacaattcagcaggaagtgttgtgcgtgcgcgcgtgtgtgtctgtggaggcgcagggagggtcacctgagcttgccctgggtctggtcctgggctcagtggcaaattcaacgctgggcaggtggcctgaggacaatgacggtgccagctgtgagtcagacttcctttattcataaaatcatgttcctccatgcagtgcttctcaacctggctgcacgtcaggagccacctgggtagctttgtaaaaaccccaatgcccagttggtttgcaccccctgagattctgattaaactgttctggagtccatctctctctttttattatctatctatttatttattttttaatttggcggctcctctgggacttctcatatgcagtaggggttgagaattgctggtttctttggccagatgggaacatgcaggccaatagttacgcacaaacagagcagcagagcaggacggtgctaaggttggaaagggtgagtcatgaaagttcaggaaatcagaataggaaggggtgagaatcctctcatctgggcttgtggggcaggagagaagagcccagtgggcaaggtccagtgagtgtgcttagaactgggaagatgaggggaagggtaagcgctgggcggcggtgggcaagatggacgagattaaacgggagcgaggatttcagcgagagctttggcgacacggaaggctgagaatcggagggagcctgtcgggcgaaagcgaaggcggctgctgggcaggcagccgaatccggctggagagccgagctggtgagacctacaggaagtgaagggagtcgctcagggcgtggcgcaacgagactcttagaagaaactctgaggcagagatggggggcctccgcccatacggagacacaaggaagtccacatgcacacgcacgagcgcgcacatgaacacgcacaagcacacaaacgcctcctccgggcagggcacacgcgcc

SEQ ID NO: 15458 - DNA, 1046 bp, Artificial sequence
  DNA replication origin
gtgacagtggagctgggactgaagaccccgggattctagtggaagacattcgaagggagaccccttccttggcagcggcgaccacccagggctttgggagaggaagaaggtcggggtggaggttcgggcttaggggtcttcggccgacactggaggagctgcctggagctctgtggggaacctacgccaagtcccgggcagcggttcccgaaagcagccccagtgacattgcacccggcgccgggctgggatctcctccgctggggccgcccgtgggaggagacctcgctgggtggccgggctcaggcgctctcgagcggatttggggtcacaggctgggacaccgcggaggccgccagtgttctggacgagcggccgtgggacagtatccggatcgagtcccccaatccgctgcaagcaggcgcagatccgggaggtggctatcggccccggggacgccgtcagagcgcgctgctccggatctgggggtgaagttgacacccgggacaagagagctgaacgcggcgtggcggacagtgggggacgcgggtgggccaaggagagcacggccggagtcgtgttagtggcaactcgaaactctgaatccgccccaaccccgtgaggcgtcgcagctcccaagaaataatctgacaaaagttagcaacttgcctgtgtctctcgtgtgtgtgacctgcgtgggggcagggccaccccttctgggagcgcacggggacggacagcggtgaccctggggcgaggcgctctggtgagggtacagttagtttggaatcgggacggtggcgcaactttccgctcctcctttctctgcgcgagtgtttaagcgtgaccttgcgggaggaagcgcggctgaacttgagatgggggttgagcttgcgccccggcttggcacagagacgtcggagcgcgcattagcctggccttgcagccgggtctcccaggaagcgtgtggggatcgtctggctctgctcgtcagctggagccctgactcgctcctccctcctacgctagggtcctcggcggccgta

SEQ ID NO: 15459 - DNA, 1051 bp, Artificial sequence
  DNA replication origin
ctcttccttagccccgccagcttgagggccgcgtccagagagcggggagctcctctcggggcgccgatcaggtccccgcgccgcagccgccgcctccggcgtctcccaggctcggcctctgccgagcccgctgcggtccacgtggcttggcagagctaaattcggcttgcaggaagcccggagccaagggaaagccgagccaagttggggtgggcggggccgaacggaggcgcagagtcgggaggggcgggcactgggcggaggaaggggagggccgcgcgcaggggaggcggtggctgggctctggcgcgccctggcacccggccccggccggccagggaaggcggcccctcctcggtcgccccgcctttcactcccgttacacccgggggaaggtgttcccgagccctctcccaccctcatcccgcctcctcgcttcctcggctccagcctccgccggcggagcccactatgccagacagtttcgacactttgcaaagacaaagagccctagaccggagggaggaggaggaggaagaagagcggagagagaaggaagaggcgatgtgagctgggaagggggcaagtgtccgggacacccacacccctgtattctcctccgaaccccttcatgcccaaatcccggaaactccagcgtgtctccagccgtggtgagtgcgcgcgcggaggcgaaccctgctcggggtgcgcgggggctgcgtccgcctgagttggggctcgggcagtttcctgtggattctcggagtggaaggttgattgtctggacccgggaactgaaggggtggggaggggactaggagggtgtgacagtggagctgggactgaagaccccgggattctagtggaagacattcgaagggagaccccttccttggcagcggcgaccacccagggctttgggagaggaagaaggtcggggtggaggttcgggcttaggggtcttcggccgacactggaggagctgcctggagctctgtggggaacctacgccaagtcccgggcagcggttcccgaaagcagccccagtgac

SEQ ID NO: 15460 - DNA, 1551 bp, Artificial sequence
  DNA replication origin
tctgccaagccacgtggaccgcagcgggctcggcagaggccgagcctgggagacgccggaggcggcggctgcggcgcggggacctgatcggcgccccgagaggagctccccgctctctggacgcggccctcaagctggcggggctaaggaagagcgcccgggaggcccgggagccactggggtccgtttcagcaggaagacgggcacgcaccgagaggatggcagtgcccagaagaactcgagtcgggggcacggtggggagaaggggccgatcccctgctggcgaccgggcagagccacccacttcctctaagggcgcgggactcgaggtgggatttagggagggggaagggaggagcgtgggctggacgactcttgcggccagaaccgcgttcagagccacagagccgggcactgcggccggccctggtcccggccccggccctggcccagcccttgccctggctcgcctgccgccgctttttccttccagatgcggaggctgcggctggagcttggggtttgcggattaggcttgcagttattcagccctccctcttttacagggaagcgggggcggtggagacttcttttgctgaaaggcagagtgcagcgctttgatgctaaatgcagtacacaagtcatgtaaatctggttttacggttcttaaccccttactgagactacctctttcgcaacttttcggaggaatgttagaggaaagaggcacagtttgcctttggggtcattgcatccttccagcgccccttgctccagctggagagagatcaaccttttgcagtggaaggggagagtcccccagcctttgtttcatcagacggctgctgtagtacagggattcaggccagggcccgcatggccggacttcttggttcaaatcctgcactgccactcaacggatgtgtgagcttgggctagtgactgaacctcccagcctaggtgactctgtgcctcggtgtcctcatctgtgagaaccgacctaagaagtgtctgtctgataaagctgttgtgatgagttagtgaattcgtacacatagaacctttagaactgtctttgacatgtagtaagtcagctgtgtagatggtgggtttctccagtgtcaggtccctgcccacagcaggaagatgacctgtgctagaagatgggggctagggtgttggggaagacttcagggacttgggagagaaaaggagaaatattcagagatgagaaaagtagaagaaaaaccagcttttaaaagggggaggagagagaatgagaaaaataactactagaaagggaaggaaaagatgaatagccttttaggtacttcgggacctgctctgagacctcttgcctgacgcccttggtttttgatagaattctagagaaggggtgagcccttttgtctgcctggacacatcctgtgggctttcctctttctgaaactcaggtcaaggtgttcactgcatctccagattgcttgtgtgcatgggaggaggggggcagagagttctgcttacatcggctactgtcccctccaccagcag

SEQ ID NO: 15461 - DNA, 1269 bp, Artificial sequence
  DNA replication origin
cactccagcctgggcaccattgagcactgagttaacgagactccgtctgcaatcccggcacctcgggaggccgaggctggcggatcacttgcggtcaggagctggagaccagcccggccaacacagcgaaaccccatctccaccaaaaaaatacgaaaacccgtcaggcgtggcggcgcgtgcctgcaatcgcaggcactcggcaggctgaggcaggagaatcaggcagggaggttgcagtgagccgagatggcagcagcacagtccagcttcggctcggcatgagagggagaccgtggaaagagaggcagagggagagggagaccgtggaaagagagggagagggaggggagggagagggagagggagagggagagggagagggagaggggctcctatcatctcttaaaggtctcacctttctcgttttttttgtttttttttttttttttgagatggagtttggctcttgtcacccaggctggagtgctatagcatggtctaaatgcgtgttgttttaagccacacagcatctggtaatttgttccagttgccgcaggaaactaacacagccaaaaaggaacccagatggttccttttttccaggataatactttacgatgtgggagattacccgaagcctggtaggattaggatatagacttcagggtgaccaaagaatcagaataaatgttggtacaagatggggtcacccctgccagcagggtcaaaaaaagtagcgttgacgttacagtcgctaatagtatagtaatgccggcggctaggactgggagggaaaggagtagaaggactgctgtaatgaggactggtcagacgaaaagcggtgtttgataccgggatataactgggggttttatgataacagttgtggtaataaagttaagggcccctaaaatggaagagaaacctgccaagtggagcaagaagatgctcagatccacagaggctcctgcaggtgctaggtttcctgctaaagggggataaactgtccagccggttccagcgccagcttctactattgaagatgcaagtagaagtagaaaagatggggggagaagtcagaagctcatataatttatccgggggaatgccatatcgggtgcaccaattattagagggactagctagttgccgaaacccccaattatgattggtattaccataaagaagattatgacatatgcgtgggtggtaacaaaaatattgtagatctgatcatcttctagcagagttcctgattggcctaat

SEQ ID NO: 15462 - DNA, 1287 bp, Artificial sequence
  DNA replication origin
cccggatggggcggctggccgggcagaggggctcctcacttcccagtaggggcggccgggcagaggcgcccctcacctcccagacagggcggctggctgggcggggggctgacccccccacctccctcccagacggggcggctggccaggcagggggctgacccccccacctccctcccggacagggcggctggccgggcggggggctgacccccccacctccctcccggacggggcggctggccgggcagaggggctcctcacttccagtaggggtggccgggcagaggcgcccctcacctcccggacggggtggctggccgggcggggggctgacccccccacctccctcccggacggggcggctggccgggtggggggctgaccccccacctccctcccggacggggcggctggcctggcgggggttgacccccacctcccttccggacggggtggctgccgggcggagacgctcctcacttcccagacggggtggcagccgggcggaggggctcctcacttctcagatggggcagttgccaggtggagggtctcctcacttctcagacggggcggccgggcagagacgctcctcacctcccagacggggtcgcggccgggccgaggcgctcctcacatcccagacggggcggcggggcagaggcgctccccacatctcagacgatgggcggccgggcagagacgctccccacttcctagatgggatggtggccgggaagaggcgctcctcacctcctaggtgggatggcggtggggcagagacgctcctcactctccagactgggcagccaggcagaggggctcctcacatcccagacgatgcgcggccaggcagagacgcacctcacttcacagatggggtagcggccgggcagaggctgcaatctcggcactctgggggggccaaggcaggcggctgggaggtggaggttgtagccgagatcacgccactgcactccagcctgggcaccattgagcactgagttaacgagactccgtctgcaatcccggcacctcgggaggccgaggctggcggatcacttgcggtcaggagctggagaccagcccggccaacacagcgaaaccccatctccaccaaaaaaatacgaaaacccgtcaggcgtggcggcgcgtgcctgcaatcgcaggcactcggcaggctgaggcaggagaatcaggcagggaggttgcagtgagccgagatggcagcagcacagtccagcttcggctcggcatgagagggagaccgtggaaagagaggca

SEQ ID NO: 15463 - DNA, 1661 bp, Artificial sequence
  DNA replication origin
ccgccccgtctgggagggaggtgggggggtcagccccccgcccagccagccgccctgtctgggaggtgaggggcgcctctgcccggccgcccctactgggaagtgaggagcccctctgcccggccagccgccccatccgggagggaggtgagggggtcagccccccgcccagccagccgccctgtctgggaggtgaggggcgcctctgcccggccgcccctactgggaagtgaggagcccctctgcccggccagccgccccgtccaggagggaggtgggggggtcagccccccgcccggccagccgccccgtccaggagggaggtgggggggtcagccccccgccaggcgagacgcctcgtccgggagggaggtggggggtcagccccctgcccggccagccgccccgtccgggaggtgaggggcgcctctgcccagctgcccctactgggaagtgaggagccactctgcccggccaccaccccgtctgggaggtgtacccaacagctcattgagaacgggccatgatgacaatggcggttttgtggaatagaaaagggggaaaggtggggaaaagattgagaaatcggatggttgctgtgtctgtgtagaaagaagtagacatgggagacttttcatttcgttctgtactaagaaaaattcttctgccttgggatcctgttgatctatgaccttacccccaaccctgtgctctctgaaacatgtgctgtgtccactcagggttaaatggattaagggcagtgcaagatgtgctttgttaaacagatgcttgaaggcagcatgctcgttaagagtcatcaccactccctaatctcaagtacccagggacacacacactctgcctaggaaaaccagagacctttgttcacttgtttatctgctgaccttccctccactattgtcctatgaccctgccaaatccccctctgcgagaaacacccaagaatgatcaataaaaataaataaataaaaacaaaaacaaacaaacaaaaaaacaacacgcatttattctctcactgttccgggggccagaatctggaattagggtgttggctcagccatccacctctgaagactctgcaggagaatgcttccttgtcttttcttagcttctggtgttgctggtaatgcttggtcttccttggcttgtagatgcaccacacctctcttctgcctctgtcttcacatggcttttatataaagacatcagtcattggatatagggactgccctaagccagtatggcctcattctgaggctccagctggacatgactttttggggatcactattcaatccagtagagggtgtaacccccctgcagctcacgtttctcatatgttggatgcagagactagtgtctgtcttacaaggttagtgcaaatgattacatgaggataaagatgtgtatctatggctgagaaccgtgactagtgcattgcaacttccagggcagggtttgctgtgaccatgaggcagttttacaatcatctccatcggtccactgaggaagttgtgtctcagttaaaagttgctcagagccctcgccccaggatggcagagcgggcacacattggagctactggagaaatttcttggaggtgttccctttttaggagatagtatcagtaagcgatcaag

SEQ ID NO: 15464 - DNA, 1785 bp, Artificial sequence
  DNA replication origin
gatctgtggccactccttggcctctctgggcctctctctcctgttctatgaagtagggattctatgaatataaagtcaagcctccctcctagggctgcaaccaggacacaaggaggaagcccaggtgagcatgtatcacactccggcacatagcagagccgaatgaatgacagttctcacagtgagccagtgttgctcttaaaaatcacggggtacggagcatttttagaggaataatttaaaaataattcaaaagccagggttgagaggaggagaattaaactttgttctaaccttcaaagcatgtgatttggaggcttctgcatttggaacatttcaaagcttcctggaatctatcttcatttggtacccaagcactggggaaagatgataaacagccctgcaggaagagaggcaattagtaagccatggctgggggctgcccgggaggctgcggtgctcttgctcccgtgtgtgcgtgcggttgtgtctgtgggagtgtgcgggccatgtgtgtgctgtgtgacacgtgtttgagcgtttatttgtatgtgtgatatactgtgtagtatatatgtgaggtgtattactgtagtatgtgtgtatgtatggaatgtgttttgtgtgtggtgtttgtggggactgcaatgttttgtggtatgtgtgtaatatgcgggggcttttgtatgtgtggtattttgtgtgctatgtgtgccgtttctggtacaggtctatgtgtagagtgtgttttctatgtggcgtttgtagtgtgtgtgatattcaagaaggtgagggtgttttacggtgggtctgtgtgtggtgtttctggtgtgtttgtgtgtgcggtgtgggagggtggggtgtatatgaatggcgtgtgtggtgtgtaatgtggtgaatgtgggagttgtatgtgtgacgtattgtatgtggtgtgtatgtggtgtctggtttgtatggaatgtgtttcatgtgtggtatatagtgtttctaacatgtggtatgtgtagtgtgtgcagtgtggtgtgcgtgtggagttgtatatgtattgtgtgtggtgttcatgtgttgtatatgtaatgtattgtgtgtggtgtgcgtgtgttgtatgtgtgatgtgtgtggtgtgtatgtggtgtctgtggtttgtatgtacagaatgtgtttcatgtgtggtgtatggtgtttctgacatatggtatgtgtagtgtgtgcggtgtggtgtgcatgtggagttgtatatgtaatgtattgtgtgtggtgtgtgtgtggagttgcatatgtattgtgtgtagtgtgcgtgtggtgtctgtggtatatgtgaatgtgtagaatgtgtttcatgtgtggtgtgtggtatttcacgatgtgtggtatttgtggtatgtgtggtgtggtgtgtgtgtggagttgcatgtgtgatgtgtgtggtgttcgtagtatgtatgtatggaatgtgttttgtgtgtgtggtgtatggtgtttctgacgtgtggtatgtgtggtgtgtggaatgtgttttgtgtatgtggaatatggtgtgtgatgtttatgatgtgtggtatgtgtggtgtgtgcagtatagtatgtgtagggagttacatgtgtgacatattgtgtgtggtgtttatagtatatgtatagtatgggatgtgttttgtgtgtgtggtatatggtgtttctgacatgtatgtgtggcgtgtgtggtgtggtgtgtgtgtggagttgtatgtgtgatacattgtgtgtggtgttcatagtacctgtgtatgtatggaatgtgtt

SEQ ID NO: 15465 - DNA, 1853 bp, Artificial sequence
  DNA replication origin
tggttacacacagagcctgatttcgtagggttggggtggagccgtgatgcccctgctgctggttacacacagagcctgatttggtagggttggggtggagccaggatgcccccgctgctggttacacacacagcctgatttggtagggttggggtggagccgtgatgcccctgctgctggttacacacagagcctgatttggtagggttggggtggagccgggatgccccagcagctggttacacacagagcctgatttggtagggttggggtggagccgggatgccccagctgctggttacacacagagcctgatttggtagggttggggtggagccgtgatgcccctgctgctggttacacacagagcctgatttggtagggttggggtggagccaggatgcccccgctgctggttacacacagggcctgatttggtagggttggggtggagccgtgatgcccctgctgctggttacacacagagcctgatttgggagggttgtggtggagctgggatgcccccgttgctggttacacacagagcctgatttggtagggctggggtggagctgggatgcccccgttgctggttacacacagagcctgatttggtagggttggggtggagctgggatgcccccgttgctggttacacacagagcctgatttggtagggttggggtggagccgtgatgcccctgctgctggttacacacagagcctgattttgtagggttggggtggagctgggatgcccccgttgctggttacacacacagcctgatttggtagggttggggtggaactgggatgcccccgttgctggttacacacagagcctgatttggtagggtcggggtggagctgggatgcccccgttgctggttacacacagagcctgatttggtagggttggggtggaactgggatgcccccgttgctggttacacacagagcctgatttggtagggtcggggtggagctgggatgcccccgttgctggttacacacagagcctgatttggtagggtcggggtggagctgggatgcccccgttgctggttacacacagagcctgatttggtagggttggggtggagctgggatgcccccgttgctggttacacacacagcctgatttggtagggttggggtggagctgggatgcccccgttgctggttacacacagagcctgatttggtagggtcggggtggagctgggatgccccccgttgctggttacacacagagcctgatttggtagggtcggggtggagctgggatgcccccgttgctggttacacacacagcctgatttggtagggttggggtggaactgggatgcccccgttgctggttacacacagagcctgatttggtagggtcggggtggagctgggatgcccccgttgctggttacacacagagcctgatttggtagggtcggggtggagctgggatgcccccgttgctggttacacacagagcctgatttggtagggtcggggtggagctgggatgcccccgttgctggttacacacagagcctgatttggtagggttggcgtggagctgggatgcccctgctgctggttacacacagagcctgatttgggagggttggggtggagctgggatgcccccgttgctggttacacacagagcctgatttggtagggtcggggtggagctgggatgcccccgttgctggttacacacagagcctgatttggtagggtcggggtggagctgggatgccccagctgctggttacacacagagcctgatttgggagggttgtggtggagctgggatgcccccgttgctggttacacacagagcgtgattt

SEQ ID NO: 15466 - DNA, 931 bp, Artificial sequence
  DNA replication origin
tgggctttgtttttcttagtaaggtgtgggaagctcatcagagttaagggtgtgtgtgtgtgtgtgtgtgtgtgtgtgtgtgtgtgtgcatgtgcacatgtgcctgcacgttaggggctgagaagaatgggaactttttgagccctcctgtgggtcattcatgagtgcatcagaggcaccgagcgcctactctttgtgtaccaggcatggagtggttgctgactacaggatgtcgcatgaatggaggtctgtatagtagtttcttagagtgtagtgggctgggcagaaatgactctgacactctgagataagtgtggggaacagctggtgggtgctccacaaggtattgggagagcttgtggaaggggcttctctagcagcctggagagcaggtgaggtgggtgctctctggtggctcgctggggcagagagttgaaggctacagagacgtcgagcactgaagagtggggctgggggtagaggagggcagggagaagaggggaggagaggaggggagtactacccttgcaagaggaaatagcatttgctcagacacagaggaggctgatgcagtgatcctgggaagtgttctgtggcatctgaatccagcagtgggagttgaaataaggggacatattgtggagatgtcaaggaagtgcagttcacaggacctggcagagttcgcagaggggagctgccttggttttggctggggaccagggtgaatggtggcatccctgccaaccttgagagcccagaggagatgcagatttggaggaaaaagggtgagttagttgtggccacacattgatctggggactgcaggatatccaagagggcatgccgccccacgtggagtctagcatgaggtcctcagtggaggaggggcatgagtagagactgggtggaagcagaaggataaaccaccaag

SEQ ID NO: 15467 - DNA, 1408 bp, Artificial sequence
  DNA replication origin
ggaatccgtgaagtgggataaaaagcacggcctccgactgcgagcatgcgcgttagctcggccctgccgggccgcgctcggcgccgggggagggtcacccgaagcggacgtccgctacgcaggcgtctgcgccccgtggggaggagggcgaagactccatccgccatgttggatgccgcagattcgccataacctcgccggctcttttcttaaaaaaataaaaataaaaagcgaagcgtcagcagggcgccccgccccctcggtcggcacgggagggggcccggaagagcccgaggcttttttttcctccgcggtggggcgttgccatggagacgcgggcggcaggtgagccgggctgggggttggggtgagacggggtgggggtggggcgcggcgcggcgcgcggaaagccgtttcgagcgtcgagtcgggaagcagtgcgccggccgccggccgccggccgccggccgcggagggatccgggtctggggaggagagcgaacgtagttgcgttctgcggctcacgttcagtcgctggggtatcccgccgcaaaaaaaaaaaaaaagcaaggcgggagcgagtgggagagcatgcgcccggccgtttccacggcaatgggtggcgttggggcgcgggccagcgacggaacgcagtgggcgcgaggttcgaatcccggcgatgccagctctttgactggaccttggcggggcttccttcttgcctggcctcggattcctccttggcgaaatgagtacctcctgcaggcttcccggccgccggctggacctaatagagtgacagatcttccacttgacacccggtgcaagtcatttaaccttgagcttggggtccttcacctgtaattaccacaagcttccacatttgggcactgacttaacacgttttgctgctcagctctcttgagaactctaatttgtaggtcatttattatgaggaacagaagttcagagaggtcaactttacacagtttaaaaacgacagagctggggctttaaaaattaacttcctccaacttgggctaaaatccaaactcctgcgtgctcgcctgacttgtacctccatcttcttagaatagggcttggctcatgtaagtgttcactatatacttagtgaatgaaagaacgaacgcgctaactgatcacgcctgcccatcagtctggctttttttgctggagtccaagtgaccttttggagatgccccgcacagctgcctctcaccagctttatcttccgagcctaccagttcatctactgaaacatctgtagtgtgtgtccccatgctgaaggaagtagcgtgtcctacctctaacccccagggacacctttcctgactttagttcaaataacagctttgcaaggatcccctctgcacgccaggcaggggta

SEQ ID NO: 15468 - DNA, 1711 bp, Artificial sequence
  DNA replication origin
ctcagtgcggacgccgccgatccccagctctcgccgcgccccctgccccccgcccctcgcgcgcccctcaccctggcgctggcgcgtccccgcgccctctcccccggccgctccaggcgcgcctcgggctcggggcgcggggcgctgggagcgggagggtgggggccgcggcgggccggcggcctcctcgcccgacccccgaccccgggccaggtgagtgccttggggcgggagagggcgtccggagcggagaggacaccgggcgctcagccccccgcctgacccccttccggggcgctgacaggctctcgggacacggcctctggggggcgtcgtggggtcacttgtgtcggggggtgcttttttggcgcccccgtccctcagggtcgggcgtccgagtcgtggggggctcggggccgggaagtgggcgctgcggtgcggccctggagtgcagccgcggcgacagggtatggggcgggcggcgggaggcaggtgggcccctccccggggctcgtgaagtggggggaccgggcgtgggggccgcgggaagctttcgggaaatgtttatccggcagttgcaagaaactctgccctcgggacgaggcgccttgctttttgccggggccagcgaaagtggcggatttcacagcaaaactcgggtgaagccaggctggaccggccgggagtgagagaggccgggagcacccgtctggatggggaccagagatgaacgaatccgcctgtgtgtagcaccagggcatgatgtgtgcacgttgctatgccagtgtttaatgtttgttgcttatggttattttaggactaaatgataaaaaagttacttgggagagagggaactgcttgatttgacatgagttcttcacttgtgcatgcaggaaatacattaatcctgtacacacacaactgaatttatgtccagtggactttacaaataatatacacaaaattctaaagccccgaagcaaggtgatgtgtgtctgaagagtttcaggtgtcaggctccgtgttccgtgggaacaaaataggaggacaccgaagtacttgatatgcccaagcagtcatctttttgtaataagctttggataccatcaaagtggagtttagttgtaactgccagggttaagtaatcgcattgacccggtgccacccaccagtttggagcttctctgaaagtaatttacgagacagtcctgtgctgattgtgaataaccagtgcttttgctgatttttttcctgtttaattttacactgtcatcatgtatgtgtatgctacctgtttaccaaacgttagaatgaattatccatagttaaactctccactaaatcactaaatcaggtactagctgtggcatgtctttaaaaatatatatatttgaatgttacctggaaattaccgatataatggtttcaagctgatagggattttttgaacttaagtctagcataaacattatcccaagtggatgtgttttaaaatttaaatctcatctaagaaaacttcctggtttgtgaaaggtgcaggattgtgatgatagctgaggaaatgccagagagaatttttggtagagaataagagaacaacctgtgaatttggtgttaaccagcagtctcggcatatactcacttgctccttacctaagcatttctgatatgtgggtgctttttctgttgattatgtatctttggttatttg

SEQ ID NO: 15469 - DNA, 1105 bp, Artificial sequence
  DNA replication origin
gcgcggcgagagctggggatcggcggcgtccgcactgagaaagcagcctccgccgcgtccgtcatggcgcgcggcggcggcagcggctccctccggtctctctgctccctcgcctttagtttgacctttccctccagtgtgtctgagggagagcggctgtgcgcgcgcgtgtacatgtctctgtgtgtgtgtgcgcgcgcgcgtggggaaggggccgggttcgctccccgacgcctgacgtcactgccatggcaacggcaacccccgcccctcgcttcccatttcctgtccccgcccactgtgcacgttctggggccctcacgtgctcactcacacgcacgcacgcaggcacgcactctcggggcgcgcgcgcccagagcgctggggtttgggaggtaatttggacctccgcctgcctcccttccctcgctgcctcccggaatttgaccaatcccgtgaggaggagccgtgggcggggcgggctcggctcccggagtggcgtgaaaaatttcccgaggcagagcgaaaagtcttcatgcgttactgagcatgtccggtgcccgaaggggcgctttggacgccagtgaagcgaggagaggcggagaaggaaccgagcgggcagttgagggaaatctcggaggaggttacctgcgatcaaactggggctgcgtagtgttagggtcaggcagctttgaagtggaatccggatccgccactctcgctgcgtgatattgggcatgccatcaaagcgctctcaaccgaacgtctcgggtaaaatgggattagtgaagtctaccaaggtagttgtgaggatcaaaagagataacgcggaaaacgcctcacctggcacgttatagatcctaaatgcctagctattattatggagcccacaacctccatattttacaactgggaacacgggactcaaagagattaaaaaactaaatgactcactcaaggtcaggtagtggtggagacccaggcttcaagttcaatactctttgtcctacaaagccttcccttaagcaggggtaataaaacatttcagaaaaaccaccttaaagagcatcgcttgtgatctgtggatcacttggtagtccccacc

SEQ ID NO: 15470 - DNA, 1553 bp, Artificial sequence
  DNA replication origin
ttgagaagagcagccacaagcagcctacaagcctgacgctgggcccaggtcagaaacagaggtgcgacagtcacaggtccttcactcagttggccaggccggggcgaagcaccacgaccagcagtgaggagtccacagatgggtgtctgcccagcatccctggagttacagctgaagggaaggcgagggaggctcagaaggcccagaggacagccttgcagccggaaaaaacccaaagcaaagatcagctcagcatttccgataggcagagtgctgttttgggtatttcattatgagttaacatatttattctcatgaacttcttatgaaataagtttggttgtcatctccacttgacggatgaggaccctgaggtgaagaaacttgcccaaggtcacagctagtgagcagcagatccatgattccaaatccaggctgtttaaccccagaggctttgcttttaactgtgccatttttctgcttcttgcaagttgagactgaagagagccatgaagaagactcttactggggactctgaaatgacaccttagccgggggaggagtggagccttgagagtgagggcagttgagtactcgggtctgggacttagagcttccaagatttctaccacctcccactcccctcgggtttgtaaagctgcctccatttgcattgggagtgcgggggggctgcctgggggactgtggcgattgtcctcaggctattggctgagagtggtatgccactgacttattcctccaagagacatttccagtaccctccatccctgccccctgtactacacactggtgaccttccccctcaaaaacaaaactcaaactctgtccctgatgctcatggtctactgaaaacagaattacagctgtctgtgaatgacctctgaccaagctggggggacacagagaagggacttgtgacttgctttgccagggaggtcctgagaggctgtccagggaaggtgacattgaggccgggacttgagctggctgtttgaaggcaggaaaaatggcagggcaaggactggagtccttcgccttcctgggggacgtttattccacatgcctcgggaaatctgaaatggccttggagagcatttgctgggggttgggggtgggcggaaggggacagagagcattgccaccgacaggcggggcgtcccagggcctctccccaggagcggatgagctcagacgcggctcactcagctgtgtccaggcacagccggtttatgacctaagagaatgacaacccaggagcaagtcgggatgacaaagacgcccagaagggcacgcgcttttatgtaaccgacctctgagctggcggatctcaggaggttggcgctctgagctcaggcgcggagaaaggacggcgcccctgccttactctcttataagtacgaggggacagcaacgcgacataacttagagaagtccaggaagctttagagagcagggcggtcccgctgctattcctcagagcgcgactggggcgaactggggcgcccttcccagctccagctcggcccttgtcc

SEQ ID NO: 15471 - DNA, 1606 bp, Artificial sequence
  DNA replication origin
ccgagggcccgcctaaccgcgccgcccgcgcccgctcctcctcggcccgcgcccggagcgcgggggccgccggcgctgggtactcggcggccaccggggatcggggctgagcggtcggttcccgcccccgtgccgccgccgccgccttccggccgaccgcccggcttggccgctgctgccgcgtctggcccccgggtccccgccgctgggggcgcgggcggggtcgggggttgccgggcgccgccccccgtgcgcctggagtccacatcccgggcccggcggccggcgagcatggaggagaagtacctgcccgagctgatggcggagaaggactccctggacccctccttcacgcacgccctgcgcctggtgaaccaaggtgaggcgccggccgttaactgccggccggcggcggttgggggccgggtggaaacgcgggggcccagggggcccctccgtgccctctgctgtcagcggacgcggcggagacggaggcccgggtggcccccggggtcgtttgcacggggacctgggaggctgtgggacacctaggggaagaccctgatgtgaattttggggacttggaaggagaaggctggggcgcatgggtgagacttgaaggaaatctttggggactcgggcacacccaggggaaacttctgggtgggggacagcgaccatctgggggcttcgttgggaacgaggttgaattatgtcatggaaggggagcgtgttggactcggggaagtagggcgtttggtttgtctaaggtactggagaaaaagctggaggaaaatggaaggacttgagggactcaaatgcagaagaggtgaagggaacaggtgcttgcattgttagcgaagtttggggaccttggaagagggttggggtcagaccccagcacctgagaggagaggagctccgtggtcccaggggaggagcccagttccccctcccagccctttgtctctcctgtgtccaggctccaacagccctggcggggcagtcagccctcccaggggatgggcagcccatgccaagccttgcaggctggcccttggagaagtcagtaggggagaagaggccggcaaaagagcaccgttccggagggcgttgggttgggtgaccctcattggtggctggcttgaggttcggaatagtggtgaagggagtccttgccattttcacacgactccagccagctcagggtgtgaaagatcctaggaagtactgcgggtcagggatacagagatttctggaggcacgcctacccgggacagtgttcccctggctttttcctcctgtggcttcctgaatcatctgctggcatgcacggtaaattaagccttccttcctgggagcagtctcctacttttcctggaatatgtgtttcagatgaagatgggtgtgggtgccactggtctgtcttttctctgggaaatggcagcaacatgatctggtcagatctgttaccttttgcaggaattactgtgcactgacagtctgtggttccctagatgaatcggatctgctgctcttagtgctcgccctggcttttttattgttggaagtgaaagatgaggcagacatattctatttgtatata

SEQ ID NO: 15472 - DNA, 1052 bp, Artificial sequence
  DNA replication origin
ggggggcagagagacctggttcagcagggtgtcgggggagaagacagacctgcagcaggggccactggagacagctgaaggaggagtgggctgtgggcagggaggaaagggaagaagagtcacagggggcaaggatggctgctgagggcatctgagatgggctgggcagggtgtgcacagttgttgtggggactactgtccacatcctgccacgtgtctgcgcgagaatctctcaaacacctgcctggtgtctgagtcctccccattttcagcccacatctcccaaatcagaaaccaggaactccttcccatcctgggagggtggcctcactcgtgggagcagccatgccccatgatgggggcattgtacctggtggtgaaggtcccatgcctgattctcttgctttcttggagatactgaaagccacgtgctctccttcgatagatttctttctatgcagagggtgctctgtggtttgcaactgagaaccttgactgacagttcaggatttcatagatggggcaagaagtcgggttctgctctaagagcaggagggagcccttgggggggctatgcaggggagtgatgggagcaggtgggtgtcagttggaaggtctgctcagtggatgtgcaggcggagatggggtccgctaggtggatgtgcaggcagagatggcgtctgctcagtggatgtgcaggtggagatgggctgtgggggctttagtgggagctttgccttggtggcagttatggtggagacaggaaagtggacagaaaggcatgaaaataacaagatctgttgatggattgaaaatgggagtaagcaagtgaggggtcaaaaatgacactttggagtcggacatgccctgcctatggtgggtggcgggggagagggtgcctggagagaggcatcagggaatgtaagttacaggggatgccagtgactatcatctggaagagagagggaggaaaatacaagtttgcatacctgcatagaagagttaaatgaggctggatgtggtggctcattcctgtaatcccagcacttggg

SEQ ID NO: 15473 - DNA, 848 bp, Artificial sequence
  DNA replication origin
ttagcaatcatatcataatgtaaattccattatcatatgatttaaatgaggaaggaaggaaagaaggaaggaaaagaggaaggaaggaaggaagaagagaggggagggagggaggaaggaaggaagaagggagggagggagggaggaaggaaggaaggaagaagggagggagggagggaagaaagggagggaggaaggaaggaagaaggaagggagggaaggaagaaagggagggaggaagtgagggaggaaggaaggaagggagggaggaaggaaggaaggaagaaggcagggagggaggaaggaagaacggagggaggcatgaagaatggagggaggaaggaagaagggagggagggaggaaggaagggagggaggaagggaggaagaagggagggtgggagggagggaggaaggaagggaggaaggaagggagggagggagggagaaagggagggagggagttggttaagctctaatctggttctaatgaactttatttcagcgggaagcctggagttaagaagtgcagagcaatcaacctggagcattttaagtcttgagttgatctgttaatgcagttctgaagaggggttgaccaaaggcaacaggacacagggattcagcttccagaagtaagtataggatcaagaggagcttaactggccctaactaggcctgaactcagagaagataagaaacatcccctggtttagttggcccccaaacacaatggtccaggaaatgctaccatctcacaagactgtgttctttaacacagaacctctttaaggcagaggttatttgtatacatgatgagaacacacaagactacattttatgggaac

SEQ ID NO: 15474 - DNA, 1315 bp, Artificial sequence
  DNA replication origin
gacagcttttttgagtcctgcaaggagacacacaatcctgtggtctggacggtggcgtctagaggccccgtcttgataatcctagtgggggtcctggttggggactgcctctgtgccagtaggctgggcaggagcttggtgatgaattgtatcagcatgctcctgaactggggtccagatacggttttggtcttctgaggtgagggtggaagagaggataatgtagaggtcatgccaggttagttcataagactgggtaaggtactgaaactcctcaatataagaggtagagttttctggaaatgaactgcgactgttgttaatttgagagagatcagtgagggagaagggaacatgaactctatcaataccttcagtttctgctacttcctgaagggagcactctagcaccagcactgaagtaagagtcaacgatggtgcctgagcgagtataggcggtagtgaaagaagaagctggaaatggttccttctgagggtttgaagggggaaggggggttgagttgataggtaatggaggatagataggggtgtaaggtggcatgatgggtttacaggcttcaggagagggtggtgggggaggagaatgggtacaggcaatactagaattgtcttgaggaggggacggtgtaggaaaaggagtgggtacttttggaagtgatgccggctgggaagatggtggggaagatggcggggaagatggcagctgagaagataacaaggaagattggggagttaaagaagacagttgagagggagaggtaggggctgggagtggtggacagcagtcagctgaattgaatgaggaaaaagagttagggtcggaaggagaaaggcaatcagggcggtgagaatggaggagaaggatttgaacaggtaagccagaattgcagaggtcgggttgtgatctgagtgcaaaacggcctggacataaggaatttctgcccatttttccagtagtcggcaataattgcttaagtcagttaaaactgtaaagtcgaatgttctatttgcaggccatttggacctgttatctaattcagactgcagtcaggctgtattgcaaaaaagataaggcgcttagggtggatatcttgcctgaggcctaaggtttacaggcttttttatggggcagcctagagggctgttttttggaatggaggactgggagtttccgataaccgagggtcagcttgggagaacagggaaaaaggagaccgtcctggacggctggagggagacgataaaaggagcaatcgtcaccgctgcttttctcgttccctgaatgggatcaaat

SEQ ID NO: 15475 - DNA, 1056 bp, Artificial sequence
  DNA replication origin
ggcctagataggtgactgagggggtgcatatttgtgctttcttaggggagactcagtacctctgttctgccaggaagtttaaaagagagagatagcatggacattgcactctccttgagaggggctacataggagcagaacattaacacattgaaggagaatggacagttttagagataaggtacagaggtcgtgagcaagggcctgtctaaaaggtgggggctgtttctgaaactttgaggtagtacacaccaggtgagctggcgtgaaaggtgggtgtcaggatcttcctacgtaaaggcaaataagttttgagaatcagggtgtaaaggaattgtgaaaaaagcatcctttagatttagaacagaaaaatgggtggtactggagggaattgcagaaagtcaagtgtatgggtgaggaactgctggacatactgggagtacagcttggttaatgagcctgaggtcctggactaagcattaagttccatctggctttttaacgggtagaattggtgtgttaaaagtggagtctgttgggcggagtaggtgactggcgaggaggccagaaatgataggctttaggcctgtgagagctgcttgggggatgggatactgcttctgtgataggaactgggtggggcttttaagggtaatgcgaatgagggtgtggtgttttgcgactgagagtgtggaagtatcttaaacagtggggttaactatggatgggggataaggaaaagttgcatgttttagggtgggaggtcgaaggagtagaagaaagttagaagccttggagggatctgggttgatgcgttgggtactatggggaacatggaagtggagagtagtatggagttttgaaaggatggctctgcctaggagcggagctgggcatgagggcaggactaagaaagagtgagtgaaggaaaaggtgtgcagggagcagaagagtggagggggactcggggtttggagatttgtccatcaattcctacaacagagacatgagaggactgggtgggtcctgaaaaattaggtaaagcagagtaggtgg

SEQ ID NO: 15476 - DNA, 1091 bp, Artificial sequence
  DNA replication origin
ggccggagcccgctccctcagcttgcagggaggtgtggatggagaggcgcgagcgggaaccggggctgcgcgcggcgcttacgagccagctggagttccgggtgggcgtgggcttggcgggccccgcacttggagcagccggccggccctgccggccccgggcaatgaggggcttagcacccgggccagcggctaccgagggtgtactgggtcccccagcagtgccagcccaccggcgctgcgctcgatttctcgtagggccttagctgccttcccgcggggcagggctcgggacctgcagcccgccatgcctgagcctcccacccgctccgtgggctcctgtgccgccggagcctgcctgacgagcgccgccccctgctccatggcgccaagtcccatcaaccacccaagggctgaggagtgcaggcgcacggcgcgggactggcaggcagctccatctgcagccccggtgggtgcgggatccactgggtgaagccagctgggctcctgagcctggtggggaggtggagaacctttatgtctagctcagggattgtaaatacaccaatcggcactctgtatctagctcaaggtttgtaaacacaccaatcagcaccctgtgtctagctcagggtttgtgaatgcaccaatcaacactgtatctagctactctggtggggccttggagaacctttgtgtggacactctgtatctagctaatctggtggggaagtggaaaacctttgtgtctagctcagggattgtaaatgcaccaatcagcaccctgtgtctagctcagggtttgtgaatgcaccaatcaacactctgtatctagctactctggtggggtcttggagaacctttgtgtggacactctgtatctagctaatctggtggggaaatggagaacctttgtgtctagctcagggattgtaaacgcaccaatcagcaccctgtcaaaacaggccactcgcctctaccaatcagcaggatgtgggtggggccagataagagaataaaaacaggttgcctgagccagcagtggcaacccggtggggtccccttccacagtgtggttgctttgttctttc

SEQ ID NO: 15477 - DNA, 1323 bp, Artificial sequence
  DNA replication origin
atagaagatgatcaatattttctccctgatttccatgagggacacagtaatacaacaaatttatagaaggagaggaacacaaaactgagtttatttcgcatgtggacagagccatatagatgtgtctgtgatcactcaacactcgcttgtaggatcctttgatgctggagccatgcataggtggagaggatgctggagttgtgggtaggtggaggggatgctggagttgtgggtagggggaggggatgctgaagttgtgtgtaggtggaggggatgatagagctgtgggtaggtggaggggatgatagagctgtgtgtaggtggagaggatgctggagttgtgtgtaggtggaggggatgatagagttgtgtgtaggtggaggggatgctggaattgtgtgtaggtggaggggatgatacagttgtgtgtaggtagaggggatgatagagctgtgcgtagatggaggggatgatagagttatgggtaggtggaggggatgctggagttctgtgtaggtggaggggatgatagagttgtgtgtaggtggaggggatgctggagttgtgtgtaggtagaggggatgatagagttgtgtgtaggtggaggggatgctggagttgtgtgtagatggaggggatgatagagctgtgggtaggtcgaggggatgatagagctgtgtgtaggtggaggggatgctggagttgtgtgtagatggaggggatgatagagctgtgtgtaggtggaggggacgatagagctgtgtgtaggtggaggggatgatagagttgtgggtaggtggaggggatgctggagttgtgggtaggtggaggggatgatagagctgtgggtaggtggaggggatgatagagctgtgcgtaggtggaggggatgatagagctgtgtgtaggtggaggggatgagagagctgtgtgtaggtggaggggatgagagagctgtgggtagtgaaggggatgctggagccttgcagaggtggaggtgatactgaactgtgcgtgggtggaggtgctgctggcctgtgtgtaggtggaggtgatgctggagccctgggtatgtggagaggatgctgaactatgcatagatggcggggatgctggagctgtgtgtatgtgaaggggatgctggagtcttgcataggtcgaggtgatgctgagctgtgtgtaggtggaggtgctgctggagctgtgtgaacggggagggcagcaagtacatacatgcataatggaacagatacctgggtcagaacatgaccttgaccaggtttctcaattgccttcccactcctaggcccacccctcagttcc

SEQ ID NO: 15478 - DNA, 687 bp, Artificial sequence
  DNA replication origin
tgaaactccatctctactaaaaaatacaaaaattagcctggtgtggtgatgggagcctgtaatcccagctagttgggaggctgggacacttgaacccaggaggcagaggttgcagtgggctgaaattataccactgagctccagcctgggcaacaaagcgagacaagtctcaaaaaaaaaaaaaaaaaaaagtattgtttcagtcaactgcacagagttattgccgtctatgtaaaagtagctgagaatagaagatgatcaatattttctccctgatttccatgagggacacagtaatacaacaaatttatagaaggagaggaacacaaaactgagtttatttcgcatgtggacagagccatatagatgtgtctgtgatcactcaacactcgcttgtaggatcctttgatgctggagccatgcataggtggagaggatgctggagttgtgggtaggtggaggggatgctggagttgtgggtagggggaggggatgctgaagttgtgtgtaggtggaggggatgatagagctgtgggtaggtggaggggatgatagagctgtgtgtaggtggagaggatgctggagttgtgtgtaggtggaggggatgatagagttgtgtgtaggtggaggggatgctggaattgtgtgtaggtggaggggatgatacagttgtgtgtaggtagaggg

SEQ ID NO: 15479 - DNA, 2368 bp, Artificial sequence
  DNA replication origin
cgcagcggctgcggagcggagccagcgggagcagcagggcgggctctcccggccgcgagggcgcgcggcgcggcgcggagggtctggccgcgtcccggcggaggaaggagaggagtgagggcgccagaggtgagcgcagcccgggaggcgccagcccagcggcgcgggcgcagccggtcggtccttgctttcttgcggcgctggcggctgcgttcccccgaccgcgctgacagcctcgcgtcctggcgcctgctcgctggggctgcccggaggccgcggccgggcagctgttgcacggagaggggggcagttgcggggttccataaccatagcaaccgcatcagcaccggcggcggcgggcgagggcagcatccgctcgctcctcctccaggcagcctcgccgcggggacccaacaccagctcgcaggtgctgcggactccccagtccgcccgccgccgccgccgccgcaactgttggcggccagagacggcgaaagaggagagagagggacccaggagcgcggcccccgggggagagagaggggagccctgcagtggagacaggtaggtgagagcgcttcggggtcggcagctgcaaaactctctcgtcggtggtagtgacgcttctgcaagcgtggttgccagttggatggctttctgtcacggaacagcgattccgccgcaaaatgtggtttatctccctcgattttccccagtctctctgccctccaggtttgctgcacatctggacaggtcttgaggggataagaagggccagggctgtgaaaggagcggagaggctgggttaatgaggggttccccccaggagtcccagatggaggctgagggggcgcatgcagaccttggccattggggtccttggagccagggaacccgggggccaggctcaggagaagaccgcactggggtggaggggacagtggcagcgattccctgtgatccaggcgaatgcacagacccgttcttcctgtggcttggctggggacaggggtgtgcggggacactgcagctcagctgtgacatggaaagggaccagctcttgatctgtagagccagcttcaagcccagtcactggaggggatgtttagacgaggcaagtagtaactgttattattttgggacacaggagtatcatgttattgccgttgactattagggataggatgggaatagaaataaaattttgagctagcagtcaagactatgccctccccttctccccacctcatttctagctccccaccccactttgccagcaaaacaagaatcacatcgctcatagtgacaatccttgctccttggccactggcaaactatctcgctttcagacagctggagacaccgcttcagttgtccatttgaaccagggggcattgttttccatcaggttatgatgctcttgatgttaagtgatgtgtcaaagccgagaggcacctgggctgtccatacagtgtgatggactgttaactacatctgcaggctggagagagggccagagcttggggagtgattacaaactcagatcagctgggaccagggccccggaagaaggaagatagcatgtgaataattagggtctgaaagttcgtgcatgtaggtaagtaggcctctgaataatatccaggataggcagccattgactttgaaagggctcttcctttatatcgtggcctcgggggacagtctaagtcccagttaaaaggctatgttctttaattgggcttttaatttatggtgtggttatgttacccaaggggatgtgatttggccaacctctcatctggagatttatgtcataatatggatgatgttatcagagcttagacagatggttaggtgtagaggaaagtggaccagattggagggtcagaaaacatggatttgaactctgatttcctcatgcacctgctgtgtgaccttgagttgttccacctcactgaggcttctttctctcatctggagaatggggatactaactaacaagtcttgcagtttaccaggctcaatcacaatccaatgggatgtggagaggatgtttgggaagggctttttaaaacctgatgtcttgtgcaagtaaaagggattattgttttctaaagaatctctcttcctcagattggcaaatcattaaacatccatcaactacgaaaagagagtggaaatattagtcagtgactcacagtggaaacactgtagtctggtccaagattcactcagggcaacataaagagggcttctcaggggaaaatgctgcatgccatccaccttgcctacaagtgctgaaggtcaagtgctttgccatcaaatgcagcactcgtctagtttgaaacagtgaggcctgctcaca

SEQ ID NO: 15480 - DNA, 1642 bp, Artificial sequence
  DNA replication origin
gggggaacgcagccgccagcgccgcaagaaagcaaggaccgaccggctgcgcccgcgccgctgggctggcgcctcccgggctgcgctcacctctggcgccctcactcctctccttcctccgccgggacgcggccagaccctccgcgccgcgccgcgcgccctcgcggccgggagagcccgccctgctgctcccgctggctccgctccgcagccgctgcgcaccgcgtgggtagacgctgcgcgactggctggcggcgcggctcacgcgctcccacctcggtccctctccgccgcgaggccctgatgggagcccggggcgggccgcccggcggccaaaccccgcccgctcggccgcccgggtgcccagggcgcaggctgcggccccgcgtgcggccctcccagactgaccggcgcgagcatgctcagtccccgcggcggggctcccctctcgagccaagaccccaggcctcgggcaggaaaagggtccctgcagatatccgggggcggggcgcggcggagaactggctgggaggggactgttgaacttggaagagaagcccaggcaacaagtagatgcctgagaaagggtaaaagcgctgagcaacccatacctccaatgcgaagtcagcagtggccttcaaccagccagccggcccgtcatccgatgggctcctcacttcatgctgaacgtgggggttcacagacgtgtgagattctgtccacggaggagggagaggaagattggggagggttaagccagctcccgtctactgagcattcttaaggggcattgggaactctaattatcaccaccactgtgctggcaagttctcgtggcatgcctgtgacagatgacaaaacagccttagagaaggagccaagactgggactcggaagcccagtgacccgtccactagactcggctgcactaactccacccaggaggaggcagggaatggaaccaggcattagaggatgactatgtcccccattagactgggctgcactaactcacaccccaggaggaagcagggaatggaaccaggcaattgcagttggcaggaggagtctctaaccctgtcaggctgggggcaggggcaagtaattggggaaagatacctgaaaaaaaggtataagaacaaatgagtggggcggtgaagggtagagaagactgctctttccaggacaagaggagcagggtacagaggcctggaggcaggacagaacagcaggaacctagcagcagcaggcaaggagaggtgaggcaggcgagtggtgaggtttacagggcaggcactgcacaccaaaggccttgcgatccaagtgaaggggttggaatttgacaatgtgacccttaggatgggaagggaatggggaaggtggtggggaggagggcagtgaagcagtttaagcaggagaaaggctgggtgggaatgaagggaagatcaccttagttgaagtgtgtgtggtgctggctagggtggggattaaggctgcagaaagaggtgtcctaaggaggctgttgacatagtgggcctgggcagatggaggctctgagctatctaccctgcttgtcctccccacagcacccagcaagcccagggcaatgcataccctcagtaaatgtttggtgaatggcaaa

SEQ ID NO: 15481 - DNA, 1332 bp, Artificial sequence
  DNA replication origin
catcattttcagtaattttcacataaaatttcacagcacataatcataattaagtaattcaattacgatttctatttggtgacctcagtcctaataagcctcccaagaggaactcctggtgacctgcagctggagggcagggcctgggctgacttggtcccaagtgccaggccacagacctctacgtggcggctccaaacccacaacccacactgctgcccatccctcccagccttcgggtccacccagagggaacagctgggtgggtcactttgtggtcacatacatgttcccagatgtgtgtgtagtgtgtgtagtatatgtgctgcatgtgtgtatgagtagtgtatatatgtgtgtggggtgttatgtgcctggtgtgtatgtggagggtggcacgtgaggccatatgtggagtattatgtgggcacatggatataatatgcatgtgtgtgtgatgtgtgtgcatgtggtgtgtgtggagcatgtgtctgtgtttgtgtggagggtcttatgtgcatggtgtgcctgtgtgtgggtgtggagggttgcgtacatggccaatggtgtgtggagctgtgtacattgtatgtatgtaggtgggtgggtgtgtctatggtgtctgtgtgggtgctgtttgtatatgtggtgtgtgtgaactgtgcatttgtatgtggtgtatggtgtgtgtatatagaatgtgtgttatatatgtgtggtgtgtagtgtgtatgtggtgtgtatagcctatgtgcagtgtgtggggtatgcatggtttctgtttctgtggggtgtgtgtgctatatgtagtgtgcagtgtgtgtggtgtgtacaggtgaatgggtgtgtatgtggagtgtgtgcacgtggggagtgtgctgtgtgtggtgtttgtgcacatgtgcctagatatagactgtgtgtatgtggtgcgtgtggtgtgcagactgtaaatggtgtttgtgcatgtgttcatgtatgtgtgtgatatgtctatggagtgtctgtggtatacagtgtgttcatgtggcgtgtgcaaaacgtgtatttgcatgtggtgtgtggtgcatatctatgtggcatgtgtgtagtatgtgtggtgtgcatagtgtttgtgtatgtgtgtatgcatatagtatacatggtgtgtgtggtatgtgtagtgtggagagtgtgtgtggtgtgtgcatatgcggatgtgtgtgtgagtgggtgtgtatgtgagggtgtggtttgtgaggggtgtctgtgtgcatgtgcttctatctagggtgtgtgatgtgcctggtacgcacggtgtttgtgtgtgtgggtgtgtgtaggtggggtgtg

SEQ ID NO: 15482 - DNA, 2342 bp, Artificial sequence
  DNA replication origin
gggggtcgtgcgctacagcgaccggcccaccacggccttcgagttgggactctttggctcgcaggaggaggtcaaggcggctgcccggcgtctcgcctaccacgggggcaacaccaacacgggagacgcgctccgctacatcacggcccgcagcttctccccacacgccggcggccgccccagggaccgcgcctacaagcaggtggccatcctgctcaccgacggccgcagccaggacctggtgctggacgccgcggcggcagcccaccgcgctggcatccgcatctttgccgtgggcgtgggcgaggcactcaaggaggagctggaggagatcgcctcagagcccaagtccgcccacgtcttccacgtgtccgacttcaatgccatcgacaagatccggggcaagctgcggcgccgtctttgtgaaagtgagtgcgcccgggccccatgcggcccctcccaagagtgacgccccctgctgagcccacgggaggggtcctcgggcagatagggatcctacggccggctccaggaaggcgggggaagtagcaggtgcagaggctgaggggacccacattcttgggtttggccacacagggaacctagtagcatgggcaccccctggacattcctgttgtcagaaggatatcttctcccatccagaggcagaggtcgcgggcagaggcaagaaggggtttgggatgaaagagggatgggttctaaccaccctgccacctgggagatacttggtgtctcatctttacctctgatgtgggaacatcctctacttactgcccagagctgtgaaagctagaaactgtgcatgcaaagtctggcctgaagcattgggtatagcagggtctccgaaggggcagtgatgagggatcacgcaagaagcattcaggctccctcggctcttcccagcagcccagagtcagtcatttagacacagtcaggaggtgcttatcccagaggccaagtgctgttgacctggtgccctctgagataacccaaggcctctagcttatttgtctggaatctgttgattgtggctgggggtgggggaggggaggcagagggctgatggcccccagggctctgacctggaagcctgacctccaggatttagtgggggtcattctgaggacagcgccctccccaggacaggaaggatgaagtgggtttctcatgttccagactgtctccagcttctgcctctgcctattgcattggggtgacatttgtccttctccagtcacagtgggtgctgagtaatcttctcctccaggcccgggaggggttgggctttgaagccggtcaggctgagtgtggagcctcagcctctgtcttgctgattactgcagggggctgaacaacccctggctgggaagccataggttacaccttggccaggggcagggaaagctttgggggctggggcagcatggaaggtgctcgtgatgagagcagctgggtgtgagtcagaaggggaggcaggggcctgatcctggggatgtgcctggcttgcagcccagtgagaaaacagctaaaccatttctgaaactggggtggctctaggctgctttaccacagtatgacccttttctctgtgttggctcttttaatctccacttatttattcaacagatacttatcagggctctacttttttgtatggccttgtgctgatttctggggctacagaaaaagacaagacacagcaaccattctcagggtgctcatagtctagaaggcaggaaagccacataaaagggaatgtgataccgggcaggtaaactttagcagcgtctcatgtgccaggtccatgtgtggtcgtggtatgtgtggggatactgagaatgatggagggctccctggaggaggtggtgcttaggttgtttagaggatgggcatgaactgcatgggattgagaaggatgcgatggagtgggattaaaggatgccatgacatggtcaatgaaccatgatgggcccgtgcagctggggaaagggaggaggttagggctgctgggcattgccagattgtcagggtccccataaaggggggccttgtgtgctaaggtgaggacatgctggagggtttatgcgggggtatgacatggtcagatctctgtggggaatggaatgccgctgaacagcaggacaaagggaggtccttcacaagactgctggagaaattcagataattgtgagagatccagcaccgatgacttggcctgtgttacagaggtggaaatcgatgcccagaaggctaagtgaaggtaatctaccctagagcatgcaaggcattggctgtggacttcccatacgtgacttcactga

SEQ ID NO: 15483 - DNA, 849 bp, Artificial sequence
  DNA replication origin
gccccggatcttgtcgatggcattgaagtcggacacgtggaagacgtgggcggacttgggctctgaggcgatctcctccagctcctccttgagtgcctcgcccacgcccacggcaaagatgcggatgccagcgcggtgggctgccgccgcggcgtccagcaccaggtcctggctgcggccgtcggtgagcaggatggccacctgcttgtaggcgcggtccctggggcggccgccggcgtgtggggagaagctgcgggccgtgatgtagcggagcgcgtctcccgtgttggtgttgcccccgtggtaggcgagacgccgggcagccgccttgacctcctcctgcgagccaaagagtcccaactcgaaggccgtggtgggccggtcgctgtagcgcacgacccccacacgggtgcggtcggggcccacctcgaaggtgtccaccaggttggccacccactgccggaccttctcaaagtcctccttgcccacgctggaggaggtgtccaggaggaagaccagatcgtagtggacacttttgcaacctgcaggggtgagagaaggggtggcgtagggcaaatgggcatggaaaggacactgtcctggggtatacaggtcactggggtcacacacacctgctcaaatacctacctgccctgtctctcatgacccaagggccctgggctgcctgaaaggcctgagcctcagtttccacaccttcacatggcaataatgatgagttttccccaagactactgtgaggctcaactgacagtaggtagcatcacattaaaatgactaacacccaccgcacagcactatgcctcaatctcttcacttttattttgttta

SEQ ID NO: 15484 - DNA, 1351 bp, Artificial sequence
  DNA replication origin
ggagtcctcaggcacaaggccctctcctactcccttctgcaagcccatctgctaattggatggctggggggatccaggcgtaaatccatgaaggggaggtcacacttggctctgctctggaaggtcacacattcgctgcctggagttgaatccgggagggaagatgggttggaaggctgggtgtagggaatccccctgggcagggcccagagtttgcctctcacagactttcagcttgagagccttctctaagggtgtctttctccacacaggccatgctgctgtagaccctaacagcgtctcttcctggccaagagaagcctgtccccaagaacaggagagccatggccggcctccgagggaacgctgtggctggcctcctctggatgctgctgctgtggagtgggggcggcggctgccaggctcagcgggcaggtggggccaccgtgggctgtgccatgctgtgctggggacagagcagacagcatgtgtccgtgagcatgggctgtggtgtgtgcatgcaagtgagttcacaactgactgtgtgagagagagggagagtccggaatccaagtgtgagtcagctgccttctaacctagggacaaaaaatcaccagctcctcagcaagggcctgtatatgtctgacagtatgtgtatgagtgtgtgaggaagtgtgaaagtgtgagggagagtgtgtgagggagtgtgaaggaatgtgggggactgtgtgtgggagtttgaagtgtgcgagggagtgagagggaatgtgtgtgagtttgaggaagagtgggggagtgtgagggagtgtgtgtttgacaaagtgtgtgggagtgtatgggagtgtgagtttgagggagtgtgtgagggagtgtgagagtgtgtgagtttgaggaagagtgtgtgggagtgtgagggagtgtgtgagtttgacagtgtgtgggagtgtgtgggagtgtgagtttgagggagcatgtgggggagtgtgaggaagtgtaggagtgtgtgtttgacgaagtgtgtgaggagttcgagggagtgtgtatgagtgtgaggtgtaggggagtgtgagggagtttgaggaagtgtgtgagggagtgtgagagaatatgtgtgagtttgaggtaatgtgtgagggagtgtgagagtgtgtgagtttaagggagtgtgtggggaagtgtgtgtgagtttgagggagtgtgaatatgtgtggcaatgtcagtatgcatgtgagtgttaatgtgaggggatgagtgtgtgttcctgcgagaggaggagagagcgtgacagagagagggaatgagttgctttaacacgtcttggtcagtcacatcctgggttgtgagcctgtct

SEQ ID NO: 15485 - DNA, 907 bp, Artificial sequence
  DNA replication origin
gcctggcccctggagctcacccttcctggtgagagaggggcctgcccctgcccagcatttacctttgggcttggcctgaagcagctgttccaccctgccatgtcttcctctggattcctcactccagggttctctttgcttcctgggagaatatgtccccctacccccttctgagggccacttggcccagcaaagggccttgcctcaggtcagcttagctcagctggggcccaaacctcttagacttgcatatagtgtagcaccgtgcaagtgaagatgtttcttcccgctggcacactcactcttcacgctaggtaggtggggggggggtgggggggcagagcacccccatttggcatatggggtaacagggctcagaaaagcggcagagctggaactccaagtcaggtgtcctgactgcatatttccaggtacctatcctgaagctcccggagcggggcggggtggggtgggatgggtccctcagattgccatgaggaagggacatagataggggcatgcctcaggaggaagagggagggggtgtcatctccaggtcaatcaaatacatacgcgggggtgggggcagtgggcatttcacatcagcaggcattagagaggaataagtgccaggtcagccagaaaaagatgtgccgagtctgccagttccttcacccagttcaaaagcccagctctgggctcagcaccacagacaaaaccataagccaagagccacgttcagatgaagcctttgattgttactaatcacacagagctttgtccatcttttctctacaacagtggcccccagaaggcagatctgagaccagcagtaatggggtctctggcctgaagggtgggctggtggacctgagctgggtacggcgtgcagtacgttgtgtagtag

SEQ ID NO: 15486 - DNA, 1129 bp, Artificial sequence
  DNA replication origin
gtaggatagccgcaagccctcgcagcgttctccagagcattcagggacttggcacagagtgtcaggccccgatgtgttatttcgcaatttcttctcgtttccttgactgacttcacgcttcctgtataagagcttgttccacttatccgtggctacataacaaacatctccatctcagtggtgcaaagcgacagcaatcgtttgctaatgttgtctctctcatttctggggactggctgggctcaggcaggcagtgcttcctcgaggtctctcaggcggttgcagcgacactgagttaaggctggaattggcacaaaagcaccttctctctctctatctctctctctaacacacacacacacacacacacacacacacacacgtgcgcacgcgcgtctgttcctggggggaaaacgtgaatgcctgggtttccctctgtctctgtggtctctctgcagagtggcttcagagtagctggactcctgcacaggtgtgtcctcagggtgaacgagcaggtgggaagcaatgctgtcatcaccaagtgtcactctcgcctcactgtctttcgcgccagggattgaggctaaggtggtggtgtgtgagggtctagatggggcccagaggaggtgctctgtgttgatgggggcgccgagagcatgtgaccacctgtagtcccccaagagcggatgggaggaacacgtttgctgtgttggcctcgcgctgacctgtcttccttttgtcttcagacctggatgctcccaggctttgatgctgggtggcctgggaggattcactgggaccctgtgtgtgtgcacgtgtgtgtgcatgtgtatgtggggcgtgtgcacatgtgtgcatgaggaagcttcagcccatttcagcagaggctctgggtgggtctcttcctcttcagacctgcacagtccctcctttcctcccagggagtgtgttgtgtctgggagatgccatggactctgaggggcttagaacagcactggggcactttgtggggctggaggggtgctgccctggtgtgaagagctgggggtgaaggcaggggtgctcccttttactaagcccctgcacactaaggcgcatctaccctctgcagcgtcaggaagctcctagc

SEQ ID NO: 15487 - DNA, 1284 bp, Artificial sequence
  DNA replication origin
aggccattgaggcattaacactgaggctctaatgagggtactgtgcctgctcaccaccgtgtgcctcccaccagcacagggctcccacccagcacatggaaaggcagaggcagaaatccgtccaataagcaagtgagttgaggacccactgagtacacagaggagggagggaaggagggagggaagaagggagggagtacacagaaggatggatgggtggataaatggatggatggatggatggatgagtgggtgggtgaatagatgagtgggtggatggatggatggatggatggatggatggatggatgagtgggtaaatggatataaatgggtaagtgggttggtgggtggatgggtggatggatagatggatgagtgggtgggtgggtaggtagatgggtaggtggatggatgggtggatgaatagatggatgggtgagtgggtggatggatagatggatgaaggagtgggtgggtggatgaatagatggatggatgggtgggtgggtaggtggatgaatgggtggatgggtggacggatggatggtggatgggtagatgggtgaagggatgcatggtgaatgaatggattgatggacgggtggacgggtgggtgaacagatggatggtggatggttgggtaggtggatggataaatagtggatgaatggtgaatgaatgtatgggtagatgggtgggtggacagatggatggtggatgggtggatgagtgggtagatgggtgtatggatgggtgagtgggtaggtgggtagatgggtgaatggtggatggatggataggtagatgagtggtggatgggtgggtggatggatagatggtgggtggatgaatggtgaatgggtgagtggatggttggatggatggatggatggatggatggatggatggatggataagtgggtggatgggaggatggatggggatagacagatggatggatgtgtagatgggtggattgatgggtggcagatgcacggtggatagctgggtgggtgggtggatggatgtgtgaataagcaggtgcatggaggactaagtgagtacattgtgaatggagagatggaggtgtgaataaccgctgcatggaggaagaggtgtatactggggcctgtttcacctactgctctgacctcattagactccactgatgaaagtgacccaggaaagagtaggtgagggcaatgggtatctccaactcctgggtctcacctgattcccacccctcctcagagcaccatgctgggtgtctccgcattccga

SEQ ID NO: 15488 - DNA, 1046 bp, Artificial sequence
  DNA replication origin
cggcgcctccgagcctcacccttcggggaccccacccggtgctctccaccgcgctggtgtctgggccgggcgtgcgagccccgagcgagtgtgcctgagccgggagggcggaggcgccacttttgcgaagagagtggagcgctaagaataatcccatagcagacacccacccacccaccgccccggcgcgggctgggctgcgcggggctctgagccttacacttactacctctctgggagttggagagggctggcctggcacccatggctcctagagggactcaggtggcaggggagtgcgcctggggcgtgagaggcactgaccctccgtagcccctgggccccgctccaggcttctctgagctcagatttcatctctcttccccccgcccggctccttttttcccctgagttccagttctggagcttggacttcccaggcccctgggaggagagagtttgctctctggtgcttgcgttgggggtggcagcccctcaattgctctcagtagaggtggagagtgggggcagggcagaacctgcccactccctaggctgtgacactgggaaaggccagtctagacattgcccagaaaccagggaacttgagccccagtcacgagagggggtccagctggtaaactgcagggatgcccgccagccccactgccaagggcgctattcacagagcagggtctctggtcggtcccgagggcagtgtcccctctaaggctgggggctgggaggactcccggacgttatacttggagacctgtgggagctggggcaggtaccttcattcgggtggacgtggtggataccctgcatggcaggaggcagggtggtgtctctgtggttcacttgccccagtgaggcaggctgcctctctagggccatctccttggacttgccaaggccagtgtgttagtgggggtggtctgtttcctgcacccctcagggcttcacacccctgtgccctgggcagggacctcctccttcccccctcccttcttcccagctcctcctgtctcgcttctctggacctc

SEQ ID NO: 15489 - DNA, 701 bp, Artificial sequence
  DNA replication origin
cgcggtacccagcggggccgccctgcatggccctgcgcagtggggcgggctgcttcggccgggtctggcgcagggtgtcggggttcccggacgcctggccccggcgctcgagcagcctcctgtgcctgtccgccttctcggctgagcccgggcccgcgccgcccctgccccgccagccgcctcgcggtggcggtggctgtggcggccccagcggagggggccccccccagcctccccgccccccgcctccccgctgctgctgctgctgctgccgccgccgcttacaacttggaggcggcggcggcggcggcggaggaggaggcggcggcggccgccgggcgctgcagtgggacgcgcgcggctgtgagcctgcgggacatgccccccgcgccggctccttgctggcggccatgaagaggcagaacgtgcggactctgtccctcatcgtctgcaccttcacctacctgctggtgggcgccgccgtgttcgacgccctcgagtcggaccacgagatgcgcgaggaggagaaactcaaagccgaggagatccggatcaaggggaagtacaacatcagcagcgaggactaccggcagctggagctggtgatcctgcagtcggaaccgcaccgcgccggcgtccagtggaaattcgccggctccttctactttgcgatcacggtcatcaccaccataggtaagggc

SEQ ID NO: 15490 - DNA, 903 bp, Artificial sequence
  DNA replication origin
ggtggcggtcggccagcccgctcctccgggggcggcgggcgcggcggcggcggcgggaggggtcccgcgggcctcgcggagcagcggggcggacgcgggcgcatgagccgcgcgggggtcggggccctccggcgtccgggcgtcccgggaggcggccgccgcgctggtctgccccgggcgctacgtgcgtgcgcgccgttgggagcccgaatgtgtgtgtgcgcgtgtgtatgtgcgtgtgtgtgtgtgtgtgtgtgtgcgcttggcagccccgctccggcgggagggcctcggggagcgggggccgggctacgccgaggccgggcctccctccctccctccctcccgcagcctccagggcgcgccacctcccgcctggtccccagccagctggcgaggctgctgtggcagctcccgctgcagacccagcgcggcgcagggcgcacgcggagggagcccgggaggggcggcctgagccgccagggagggggcgggggcggagccgccggcgggttttggcgggggatgggaggataaacgcggcttcttgggtccttctagccccgctccccaagagcgcaagcagccctggcgggtggagagtttgagggactcggggttggaggaggaaaacgggattcagccagagatggcaggctgacagcttcaggcagattgggcagagagtggggagcagaaggggagggggccatgggcacacaggagagcggcagcagcggttcacgaagtcttccccaccccccaccccccacctagccacccggcgcgggagcgtgtcattggccagggacatggcctcgtggagtggtggggtcccgagggctgcctcggccccctcgcctcccagcggcacagcccgcttgggccagcacctgcagaccc

SEQ ID NO: 15491 - DNA, 1872 bp, Artificial sequence
  DNA replication origin
cagattcctgtctcagcgtttgcttatgtgagatctctaactcagaacccgtcccttcctgggtccggcttctgctgggaagccagccacctgaggtgggggctgacgggctgggtgggggccccggactgcactgggctagcagatgcagggaggcagggagggggaggcaggccatttattgaagaactgcttgcagacatggacacacacagccatggtaaccagacgccaccctggggccagggagcacccagaaacagccctgggctgccagcccaggcctggacatttgcccaccacgggtggagggcctctcttggcatcaaccatccacgacctcctacggcaccatctctcctgccaagttgcccatgggggtctccaggaagaaaaccagccttgggggattccaaggcccagggagggtgggaagctgcccacgccctcaggctgtgcccagtctcatgctcaccatttctttctatggccaaagggaagtcgctggacgagggaggtccctctgctgggatgagcagcacagcacggctggggccccaggtcacagaaatgggtgcagggatcctgggacctgggctggatgggcacccgctttgggatttcctctgcttcagcctgtgtatggtccagggaacagtgtaggaaggggcgtggcatggggtggggctgccatgtccggggcttctgcgtagcccagcaaagatgctacaggaggaacaggaggagagggctgggaggggtctgggggaggaggaggagatggggctgcagtgaaggccttgctcattgcagggggtgtgggaggccaggcagggtcacctctggccctgcagaaagagggacggaagtaggcgggctcaggcctgcgcctccagggcacacacgtgcacactgggcaggcagaaccaagagggtggcagctccttgctggtgctgtcctcgtggaaccggatgtggaggaagaagtctcccgtgtagaggaagaggagggccccgaggcaggccgactggccggacggctgcacctgagcagggaggagaaagacacatcagtctggtcagcagcaggggccacccaaagccaccaggaatcctgggaatctgcctggacataggtgttatgggggaagcgagggccgcccaggcctggctccagtgccccctccagcaggtcactgcgcctctccgagccagttttcatcttggaaaggagctgccaatattcccattcctgaattgtttgggggctcagggggtcaggagtgtgggagggtcaggagtgtgggagggagtgagggagaggttggggcagaggggaatggaatgttagcctgtgctggggcctgacagtgaggtgctgagaggcagcttgagaggtaggaggtgggaggtgggggctgagggcgtagggctggagcctttccgtggaaggagcggcaggcacgggatgggtgacagtgacatcacagtgatgccacagcagggtccaatcatggagcagccccctgtcctgggcacagctcccattccctgcacattttcctgcttcaccaaccctgagggcctcactgtccaggactgagagacaggtgagcttgtctaagttcctgcagtgaatggggcagactcagactcagtgtgcacacgtgaccacagaacccctgctgctatcgtctgctggacatatgctgaccccaaagcccaccacccagggaaggggggatgatgaccacatggccagaggctcccagaccgccttgcacaccaccacgcaccgcgtcgaggtagaaggtgctggagcccacgaaggagacggtgtcgtgcaggtcgtagttgtgcacgccgttctgg

SEQ ID NO: 15492 - DNA, 1973 bp, Artificial sequence
  DNA replication origin
ctgtgcccacggccacattgggcatccatggcagacaggcactgggcctctagtcccttctctctcaacacaggcaagctgtgttttgcaccaggaacgccttggctcatggagacaatgactatattaagtgcttccccttcaaccttctctttttggacaagcactttagacaactgaagataaaccagaagaaaaagaaacggggaaaaaaatggaaaatatgcctgctggctggaagcattatgcaaagacagctttctgagaagagcagagaatttaaaatgactcctctgtccccaagcaatgtctctaccttttcaatctctcatttttcatcttctctcaagcctgtctaaataaagcaaagactctcgccacccaggcaggccccccgcccccaccgctctgtgtggctctgtgttgagtccttgtcctcatcacacaatgccaacccagtctcagactttctcatctgccaatcagatcatacacgtgggcacggtcagcacccagggggtttggaggaatcatgagaccctttcctagaggaggaagctgaggcctggaagggaaggagtacaggagggtcagagcagatgtgagggttgtgcaggtgtcagagtgggtgtggaggtgtccaggggtcagagcaggtgtgggggctgtgcaggggtcagagcaggtgggaggtgtgcaggatcagagaagatgcagggggtacacacagcaggagtcagagcaggtagggggggcgtacaggggtcagagtgggtgtgggggtgtcccggggtcagagcaggtggggaggtgtgcagggatcagagaagatgcagggggtatacacagcaggtgtcacagcaggttgggggggcatacaggggtcagagtgggtgtggggggtgtcccggggtcagagcaggtgggaggtgtgcagggatcagagaagatgcagggggtatacacagcaggtgtcagagcaggtaggggggcgtacaggggtcagagtgggtgtgggggtgtcccggggtcagagcaggtggggaggtgtgcagggatcagagaagatgcaggggttacacacagcaggtgtcagagcaggtagggggggcatacaggggtcagagtgggtgtgagggtgtcccggggtcagagcaggtgggaggtgtgcagggatcagagaagatgcagggggtatacacagcaagtgtcacagcaggttgggggggcgtacaggggtcagagtgggtgtgggggtgtcccggggtcagagcaggtggggaggtgtgcagggatcagagaagatgcagggggtatacacagcaggtgtcacagcaggttgggggggcgtacaggggtcagagtgggtgtgggggtgtcccggggtcagagcaggtgggaggtgtacagggatcagagaagatgcagggggtatacacagcaggtgtcagagcaggtagggggggcatacaggggtcagagtgggtgtgagggtgtcctggggtcagagcaggtgggaggtgtgcagggatcagagaagatgcagggggtacacacagcaggagtcagagcaggtaggggggcgtacaggggtcagagcaggtgtgggggctgtgcaggggtcagagcaggtggggaggtgtgcagggatcagagaagatgcagggggtacacacagcaggtgtcagagcaggtagggggggcatacaggggtcagagtgggtgtgagggtgtgcaggggtcagagcgggtgtgtggagatttgcaggtgtcagagctggcatggggggcatgcaggagtactgaggggctgcagctggttttctgtgccgggccttgcataggctgcttgttggctctgcctgggcatctgccattggcgtgtctagcgcagcctctcctccctggaagccttccctcccagggacctctgttgctgccctcggcattctgcaccttgtgcccatgtgtgc

SEQ ID NO: 15493 - DNA, 709 bp, Artificial sequence
  DNA replication origin
aagctttggctgtcaccacatcaagagtctgtttaacctcgtaagcactgacccagcaccaggcaggggtcagccctgggctgtgtgaggacagtctgggggtacagggtgagaggggttcccggcatgcttcatgacaagcatggcaccttttcatggtaggaagaagttctggacatggcgcccagagatgagaacatgaaatagtgagcctgtttgaaaccattcagcccattgctctcatgtgacaatggggacgctgaggctcagatcggttaaatgatttacctgaggtcacactgtaagccattgaagggccaaggccatcttatcgtctgtccattcatatggcagaggtcccccaggagctcaggagagacagtccctcagcagcagattcccgtgtgggccatgcaggccatggcgggttgctgggggctggatgtgcttcaggaagtcttcctggagcaggtgctgcaggagcccagctttggaaaggccacagggagtcagcaggagggagggacagatggagcaggggaagtcgcagggcactggggtgagagaccacaggggacgtgatcagacagccttgaacttggccttgaatactttggaggagcaattgaagtcgtcatttctacatccacaatcactttatgtcttctctctggaaaatgtcttcctcctgctgtctccctgctgcaca

SEQ ID NO: 15494 - DNA, 3110 bp, Artificial sequence
  DNA replication origin
gcccctcacctcacccaaactcggggtaacaacaagaagccatcccaactcccatgggtcggctgaaatcctcactgggcctgcccagcttctttctctgtccatctgcttcctcctctccttcccaccgtgctgacctgaaggtgctgcgtgccagcctctgttttccagagacgcccccaccccgtgtcacaagctgaacagcacatcttcctcccctggctgaaaacaggtctcctgctggtgcaaaaccacattcaactcatcagagacttagccttggccccaccacttactgagtgactttctgagcttccacttcctcatctgtcaaacgggcaaaacgtactaggaacacagggtgtggctaccagggaaaccccaggagctgtgcggcacacggagctgtcactgccaggggccctgggaaggacgggccaaagccatcggtcttggctgcctggggccaacaggacaggggtgatgagatggccctcggccagccttgaggtcacctgagaggtcgttgtaattgggggagccatgagctccgagcctcgtctgccccagctcccactgctggctcagtgctggtgtggcacctggcaccctccaggtcctcggataacttgtgctgagtgaatcagtgaacctaggagcatgcaggacagacctgtggagaagccagccagggtttggggatgaggacagcgtgtcgcaggaggagccagggattggggatgaggacagcaggtcgcaggaagagccaggatttggggtataaggacagcaggtcgcaggaggagccagggttggggatgaggacagcaggtcgcaggaagagccagggtttggggatgagaacagcatgtcgcaggaggagccagggtttcgggatgaggacagcaggtcccaggaggagccagggttggggtataaggacagcaggtcgcaggaggagccagggtttggggatgaggacagcaggtcgcaggaggagccagggatggggtataaggacagcaggtcgcaggaggagccagggttggggtataaggacagcaggtcgcaggaggagccagggttggggtataaggacagcaggtcgcaggaggagctagggtttggggatgatgacagcatgtcgcaggaggagccagggtttggggatgaggacagcaggtcgcagggggagccagggtttggggatgaggacagcaggtcgcaggaggagccagggttggggtataaggacagcaggtcgcaggaggagccagggtttggggatgaggacagcaggtcgcaggaagagccagggtttggggatgaggacagtgtgtcgcaggaggagccagggtttggggatgaggaccgcaggtcgcaggaggagccagggtttggggatgaggaccgcaggtcgcaggaggagccagggtttggggatgaggacagcaggtcacaggaggagccagggattagggatgaggacagcaggtcgcaggaggagccagggtttggggatgaggacagcaggtcacaggaggagccagggattagggatgaggacagcaggtcacaggaggagccagggtttggggatgaggacagcaggtcgcaggaggagccagggattagggatgaggacagcaggtcacaggaggagccagggtttggggatgaggacagcaggtcgcagtaggagccagggtttggggatgaggacagcaggtggcaggaggagccagggattggggatgaggacagcatgtcgcaggaggagccagggtgggggtagagggacagcaggtcgcaggaggagccagggttggggtataaggacagcagatcacaggaggagccagggtttggggatgaggacagcaggtcgcagaaggagccagggtttggggatgaggacagcaggtcacaggaggagccagggtttggggatgaggacagcaggtcgcaggaggagccagggtttggggatgaggacagcaggtcgcaggaggagcccgggatggggtataaggacagcgtgtcgcaggagaagccagggtttggggatgaggacagcaggtcgcaggaggagccagggattggggatgaggacagtgtgtcgcaggaggagccaggctttggggatgaggacagcaggtcgcaggaggagccagggttggggtataaggacagcaggtcgcaggaggagccagggtttggggatgaggacagcatgtcgcaggaggagccagggattggggatgaggacagcatgtcgcaggaggagccagggattggggatgaggacagcaggtcgcaggaggagccagggtttggggatgaggacagcaggtcgcaggaggagccagggttggggtataaggacagcaggtcgcaggagaagccagggtttggggatgaggacagcatgtcgcaggaggagccagggtttggggatgaggacagcaggtcgcaggaggagccagggtttggggatgaggacagcaggtcacaggaggagccagggtttggggatgaggacagcatgtcgcaggaggagccagggtttgaggatgaggacagcaggtcgcaggaggagccagggtttagggatgaggacagcagggtgcaggaggagccagggttggggatgaggacagcatgtcgcaggaggagccagggatggggtataaggacagcaggttgcaggaggagccagggtttggggatgaggacagcaggtcgcaggaggagccagggattggggatgaggacagcaggtcgcaggaggagccagcgttgggggatgaggacagcaggtcgcaggaggagccagggtttggggatgaggacagcaggtcgcaggaggagccagggtttggggatgaggacagcaggtcgcaggaggagccagggtttggggatgaggacagcagatcacaggaggagccagggtttgggtatggggacagcgtgtcgccggaggagccagggggcgtgggtattaggatggcatgtcgcaggggccctggaagtgggctgtgcagtgggcccagtggctgctctggcagtgcctgtcagtgccatctagagggagtccccccagccca

SEQ ID NO: 15495 - DNA, 2444 bp, Artificial sequence
  DNA replication origin
gctttctggtactttaaagtgtatcatgagccctccttcttcgttctgtgtattttcgtctatacttaatagctgttctctgaggccgcattctctgggtctgtggttgatctttttaatacatgtcaggaattaccagccctcccactcatgctacgggctccttttataactcctcttgtggactctgcattttgaaaggttttatatgtcaaaatatatactactcagaaatcattaattcactgctcctggacagtaggggagcctggccagccccgactcccagaggaacgcaccaagcacagtgccaagcccacactggatactcaataaacattttcttggcaaatgagagaacaaagaacctggggccccaggatgttcaatgtcttagcctgagtgcacagctgacaaatggcagggctgccaggtctgcaggtccccacctgccgagtgtggggtcttcccacttccgaccctggtgagggccctgcaccgggaggaggttggattgggtggactctggatgcctgtgcatggcctggagttttcagacttccaggcaggaggcagcccaggcacacctcacgccacgctagattccacaaagccactgaaactaccaaaaggacacactggggtacgcctactccacatccagggggtctccgcagggtttggtgtggatccaacagtggaaggaggccaggagagagctatagtctgaccttcacctgcaaccccaatgggatgcatgatgaagagacacctccctcggattctatcatgcccctggaccccagcatgaggacccctctccaggggagggggcttagtgagttcatgcatgaaacatgctgtgagtgttgccacttgaggacctggccctgagctccagcttgctgctcccaaccatggtggctggtggggagctttccttggttgaattttatactcctcccatacaggggtcctcatgggattcagtaatgtgtctgaagcactgcatggaagaggctgtggggagagagctgccttggtggtgggtggtggctgcggcggtggtgcttggtggtggtggtgggtagtggtggcggtgcttggtggtggtggtggtggtgcttggtgccggtggtgggtggtggtggtgggtggtggtggttgtgtgtggtggtggtgcttggtggcggtggtgggtggtggcggtggtgcttggtggcggtggtgggtggtggtggttgtgtgtggtggtggtgcttggtggcggtggtgggtggtggcggtggtgcttggtggcggtggtgggtggtggtggttgtgtgtggtggcggtggtgggtggtagtggttgtgtgtgtggtggtggtgtttggtggtggtggtgagtggtggtggtggtgagtggtggtgatggtgcttggtggcggtggtgggtggtggtggttgtgtgtgtggtggtggtgtttggtggtggtggtgagtggtggtggtggtgcttggtggcggtggtggtggtgcttggtggcggtggtgggtggtggtggttgtgtgtggtggcggtggtgggtggtggtggttgtgtgtgtggtggtggtgtttggtggtggtggtgggtggtggtgatggtgcttggtggtgggtggtggcggtggtgcttggtggcggtggtgggtggtggtggtggtgcttggtggtggtggtgggtggtggtgggtgtgtgtgtggtggtggtgtttggtggtggtggtgagtggtggtggtggtgcgtcgtggtggtggcggcggtgcttgatggaggtggcgtgtggtggcggcgatggatagtggtggtggtgctgtgagagcagtggttgttgtgttgtttgcagacttgagggattcactggagaaaggtgattggggaccatctttcttcatctgtggtaaactccgttgaaagttcaaatgacacatttagacgtcatttatttcagactactgccaaagtgactgaaataaaaatcccagccacagcccggtcctcttggggaagtggtaaagtggagcagcagattctgagaaaagaaactagacagcgtgatgcatctatctcaagaaatagccctgccttccagtgactccggggaacagccacatatcgcctttgagaaaaatgggtttgaagttctctggaaaaccttctgccagtaaactgggaaggaagtgaacatttgttgatgggctgatatgtgcaagtgataggcagaacatgagacatgaggtgttggtatccagctgtgtttggggtctgtgtgtgcacaccctccaactgtgggcttatggtctgactgcctgcacagagagcggtgctgggcctgaggcttccctgcagttgcactgtctggagggtgggctcccgcatgaggtggctgtgtcccctggcactgtgtgtggttcatcaga

SEQ ID NO: 15496 - DNA, 906 bp, Artificial sequence
  DNA replication origin
gggtgacagagcgagcgagactctgtctcaaaaaaaaaaattgtgtgtgtgtgtgtatatatatatatgtatatatatatgtgtatatatgtgtgtgtatatatatatgtgtgtgtgtgtgtgtatatatatatgtgtgtgtgtgtgtgtatatatatatatgaactttagcattcattcttgccattgattcctcatgttaagtgcatgtcatcttgccaggcacgcctggtgctggtgaaacagctgagaacaaggcatggttctttgtgcagagagcactgggctcgaggggatagagcacccacctctgcaaggtatgaaggcaggggcaggcccagagactgctgaggaggggctcatcctccagccagcctgggtgcaggtgttggggacagctttctggtggaagaggccttcaggggagattcaccggccaggaggagctgggcaggcagagggcagctgggtggggattgctcaccagtgaggactgcctgtgccaggccaggaggttgggggcgggggagcacactgggttcccgaggctgaagctgttcagggtgggagtgagggcagagacgatagtccagggtgaggctggaggggcagcagggcccatgagccaaggtcgaagtcaggtctcttgtgagggaagggacggtcatgagaaggcaggagagtgtgccatcagattggccttttgggaagtgcctggaaggggtgagtgacgactggcgggagcctgggtgctgatctcggggtgggttgcagtggctgggcctgggggtgccattggtgcagagaaaagaggtggattccgggatgtgtgggtaggaggagaatttggcagggtttaggggtgtggggtatggagaaggaggggaagggtttgggccacagggc

SEQ ID NO: 15497 - DNA, 1480 bp, Artificial sequence
  DNA replication origin
gctacagggggttcagggggagctgctgcagggggtgcagggggagctgctgcagggggagcatggggggagctgctgtagggggaggtaccacgggggatgcagggggtgcagcagggagctgctgcaggagggagctgctgcaggagggagctgctgcaggagggagctgctgtagggggagcatgtggggagctgctgtagggggaggtaccacgggggatgcagggggtgcagcagggagctgctgcaggagggagctgctgcaggagggagctgctgcaggagggagctgctgtagggggagcatggggggagctgctgtagggggaggtaccacgggggatgcagggggtgcagcagggagctgctgcaggagggagctgctgcaggagggagctgctgcaggagggagctgctgtagggggagctgctgcagggggagcatgtggggagctgctgcagggggtgcaggggggagctgctacagggggagctgctgtagggggagctaccacagggggtgcatgggggagctgctgccagagggcagctgggctctttgggaagagcagagcagagcagagcagagcctggcagtctagggtcaggggagcaaccactgcggccctactctccactgtctcatctggggcctcccgtgggctgagcctggccagaagctcaggggcatgcggagcctgttgatgctgtcacctgagtctgtctcttggaacacagcagagggtataagcaaatcaggaggagcatacagagcatgttcagcatgaaggatttaagtgtaattaatttttacaaggcttcaaagcccagtctccccagcctctgttgaccttcctcagtgttcatcagaccaggaaacaggcaggctggcctgcgtggcccagggtaaaacactgggctgtgtctgccttctgttttgatgctttcaggtgggagaggttattggttggcaaatgaggaaaggaattttttgagaggttcaataacttgccccatattccccagtttttgacagggtggaatgggaaggcaccattgacccttagctgcttctcactatacccacaacccctgaatacagtaaggtgcagtagattacactcatatatatttttttcttatttaatccttaaccctgaggggtaaattgtatagtatttttttcaaggtcatgcagctagtaaatggcaggcctggaatttagacccagatatgttagtttcactgtaccacatggtctgttttctcttcgtatttttgagtggcaatcatattttgctaggacttgaccctcctagatgataatcatccattttgaccagtggtgaccttgcatttaatgacctcctgctggttattaccagagtgccctatgccccagtttgtctgagacaggccctgttcatactgccctggagtaattattattagtgccccctccccatctcagaatgtc

SEQ ID NO: 15498 - DNA, 1632 bp, Artificial sequence
  DNA replication origin
cactttctacctcacccaaattggtcccaaaaggagggtgggtaggaaagcatgaaattaaggtagtatcattaaatttctcaaagactatacaaagtttttaaaataagacacaaataaacaacatttttaaaagaaaaaatgattaaatgaaccacattaaagttaagaacttctgttcatccaaagccaccactaagaggtaaaggcaaacaaatcatagtatgggagaggatggtcacgccacgcgtccaacaaagagctcacaccaagggtatacataaagaagtcctccaagtcaggagagatggggaaggggagggagaaacagagatagagacagagagagagaagacaaccaatgggggaaaaaagggcaaagtcctcatacaaaagaggatatacgagtggccagaacattggaaaagtgctcaacttcaccaatcatcggggaaaagcaaattgaaacccgaatgctacaccattatatacctcactctcaccactctcatctcaagaatgaataacatgagtgcaaacaccaagtaaaggcaggtgaaatgaatctatgccattagaagtcaaacagtggtagccttaggcagagaagtggctagacatctgatgcacaaaacttcaatcctcatgacaactctacaaagtggtggtgtctgtggcaatagcaatagtggcagtggtggtggtggtagtgatggtggtagtggtagcagcagtgatggtgatggtgcttgtgaggatggcagtaatggtggtggtggtggtggtagtgatggtggtgacgggtgatggtggcagtggtaatggtggtggttgtggtggttatggtagtgatggtgatgatggtggtggttgtgttgatgatgaggtgattgtggtggtggcaatggtgatggtggcgatggtgatggtgatggtggtagcagtgatggcagtggttatagtggtggtggttatggtggtgatggtggcagtggtgagggtggtggttgtgttgatagtggtagtggtgggggtgggggttggggtggtgtttgtggtggtgacgatggtggtggcagttgtgacagtggtggttgtggtggttatagtggtgatggtggttttggtggtcacagtggagagagtggtggtagtgagggtggtggtgatgatggtgatggtggcgatggtgataatggtgatggtgatggtggtgatggtagtgatggtggtgctggtgatggcagtggtagtgatggtgatggtggtggtggcagcggtgatgccggtggttgtggtggcagtagtggcaaaagtagcagtgtattaattcactttgcattgctataaaggaatacctgaggctggctaatttacagggagaagaggttttatttgggcccatagttccacatcctgtacaagcacggagctggcctctgcttctggtgagggcctgaggaagcttccattcatggcagaagagggcaaagcgggagcaggcagtcacacagtgaggggagaggggaggaggcaccaggctctttcgaacaaccagcactaatgagaactaacagagtgaaaactcattcattcccatgagacgagcacccagccattcatcagggatcc

SEQ ID NO: 15499 - DNA, 1010 bp, Artificial sequence
  DNA replication origin
tccgggagccttcctcggcatgggctcgctggcctaggcccctgtgcggtggcctccttcctgactctgtgcaatagattccttgctggcctcgtgtgtctcgctcagctgcagctccgtgcctattgtggagcctggcacacagtaggtcttcagtgtgtgtttgttgcctggaagagcaaacatttgctggaagggtgctccctacgggtgagtgaggcaggtgtaatcgtaggtgagggtgtgctgccccaagtgggaatacggagtggagtggccgtgggagcgaatgactctgggcatggacccagcggggagagtgagtgggtcagtgaccctgaggcttgaaggctaactaggaactattcaaatgaatgggggtgggctgtggggggagtccacagggggcagaaagagggttccaggcagaaagaacaacgtggtggtaagagagaacatggtacatttgggggacctgggggtggtcagagtgggtggtccaggccagggtggcagagatgagacaggctggaagggaggcagagggccgacctgggttcttacacacggtgccaaaggatgctggctttctctggagggcattggggctgctgcgttatttgaagagagatgtggtcaggtgggcagttcagagccatccctcaggatccaggatccctgttgagatgggaaggactggaggcagggacagcagtgatcaagcttcagcgatgacccagggagaaagggacagaggtaggcccatagccgtggcctggcagtggagcataggagataggaatggatgagagaggagtaacgaggagtgaagggcttgattcagaatagcacataaccgtaactagtgtgttcacagttgaggagtcagagccttagtcacgcagttcttggttgtttatcctgggtccagactagtgagtgttcatttttagcccgctttgggaacaaggtcaaaaggactgaccttgtattatcagacattgtaatgt

SEQ ID NO: 15500 - DNA, 955 bp, Artificial sequence
  DNA replication origin
ggaaagctgccagaactaaagagtcttcggagactgaagtaggaggggagaggcagagaggaggttgcggaggccagcaggagccggaccacactgggctccagagcaacacttaaggactgggccttgataacaagggcctggcgacagctgtgaggctcccagttgagagatgtcaggggcatattcacactaggaagatcgccgggccacagatgggaggtgggtctgttagcaagcaagaccagggcaaaaacaccagtcccagtgcttttgtgacaaaccctagaagagttatgatctgcaagaccggaaggggcagtggaggtggagagaagcagcagttctcaggaagcactgagggagggaggtgggggtgctgtgacagacagcgagggtcaggatgacccccaagaacccgttagggcaaatggctgatgggaatgcccgcactgagatggaggcttgacgggggcaggggcagttttggggaggcgaggtagggagttctgatttgcatgtattatatgcgaggcgcccaggggccagctgggaagggctggaggtgcaggctgggaagaagtccagccctggaaatcatctgcacattggaggaactggaagacagcaaggccagggcatcggtgggatcacctaaggtagcctgtggaagaggaagagttaacagggccagggaacacagggcgagagatggggaaggaaagaagtggggtgtgaggaaggcctgactgaggagtgggctgcagaagacaaaagagacccaaacagaagggccagagaggcagtaaaacatccagagaggcagggtcacagcagctagagcagagaggcggtaaagtatccagagggtaggctcgcagcagccagaggagagggcatgcctagtggagggtcagccagggactcaaagggcactgaggagcgaatttagaaa

SEQ ID NO: 15501 - DNA, 1260 bp, Artificial sequence
  DNA replication origin
caccagggaccaggagcactgggctgagaagaatttgccatcggcaactccagcagctctaagaagggcattcactcagatgacaactgaacaaaaatgtcagtcaaaggtgccatggcaagtgtttccccctttccgaggcgctgggacgccaggggtcctgctgttctgccactcacagctgactggataactgggtgactgtgggcagaccacttcattcacatcacaaagcacgatggcaggacaccatctgccccatcaaatcccaactaagtttcagtgatagtcaaatgagcaggagggaggaagcaatcagaagactggaaaagaacttcacataaaagagatacaacaaacaaacctgcagaaaaaatccaaccttgcaagtcaccaagaaaacgcaaattagaagagtaaggcagcgttctgcacacactcaattagcagccctgctgctggctgcatccagcagtgtctcaacagcaatcacaacgctcaaaaaggctgacccaggaagccccctcctgatgaaaactctctcctgctaaaaaaaaagccaaagacctaaagatgttcaccacagtgttatcaacagtaccaaaaacaacctgaaaagcaagcaagaaagggaacaaaaaaaagcatgtattattaatgcattcaactataggtgactgccaacatgtgcctctagctagctgtagggtgtggggcttcctttggaggtgataaaaatgttctaaaactgactgtggtgataggtgcacatatctgtgaacatgccaaaaagctgaagtgtacattttaaatggcatctaaaggcatgaggccgaggggaatcaccagacactgggagcaaagagacaagcggaggcagaaccaagccctgacgcaagcgcccagcacacgggaatcagaagtggggaagttccaggatgagctgggaaaaggaagaaagcaccgtgtagaggaagcactggactgagagaacactgttgacagacagaaaaagaggacaggaaatgactcctgctttggaaactggtgaccttggcaagggagaggagagggacgtccggcagagggggctgaaggggggcgtgcgagggaagggcaagcgggggggctgaagacggcgcacgagggaagggaagggcacacagcgggggccgatgggggcgcacgaaggaaggacacaccagggggccgaaggaggcgggcgagggaagggcacagaagggggccgaagggggcaca

SEQ ID NO: 15502 - DNA, 1129 bp, Artificial sequence
  DNA replication origin
aaagcaccgtgtagaggaagcactggactgagagaacactgttgacagacagaaaaagaggacaggaaatgactcctgctttggaaactggtgaccttggcaagggagaggagagggacgtccggcagagggggctgaaggggggcgtgcgagggaagggcaagcgggggggctgaagacggcgcacgagggaagggaagggcacacagcgggggccgatgggggcgcacgaaggaaggacacaccagggggccgaaggaggcgggcgagggaagggcacagaagggggccgaagggggcacacgacggaagggcacagaggggggccgatgggggcgcacgaaggaagggcacaccagggggctgaaggaggcacgcaaggagagggcacacaagggggccgaagggggcgcgcgagggaagggcgcgcgagggaagggcacacagcggggccgatgggggcgcgcgagggaagggcacacagcggggccgatgggggcgcgcgagggaagggcacacaggggggccgaagggggcgcgcgagggaaggcagacgaccctggcagaggttccgcttcagagcggaaggttgcttggcttggctgggctgagctgagctgcacatcgtggtaactacggcatgtctgcacacagggaagccagtggggtgggagagagggaggcggcaggagggagcggggaacacggagtgggcaggagggcatgagcgcttgtgccatgggctttgcggcccttccgcaacattccaatgagacaccaggcctggcgaagtcaacatccgcccccttccagcagtgccccttaaagcatggcactgcaccaagaataggggcgggaattggggaaggtgaagaagacctgatgagggtaacgggctgccaccacgtccaggtagcccggcaacggtagcacagggtgtcaggctgcagaagccacctctgcccagcaatgcctctctcactcagctacacggtcagcagatgatttacatcctctaagtgagtaaccaagccttgctctgattaagtaatccttcccttaactcccttttctaaaaacgtcttcacaatcatctaacataactggttccctctgccacaaagtcaag

SEQ ID NO: 15503 - DNA, 945 bp, Artificial sequence
  DNA replication origin
cggcaacggtagcacagggtgtcaggctgcagaagccacctctgcccagcaatgcctctctcactcagctacacggtcagcagatgatttacatcctctaagtgagtaaccaagccttgctctgattaagtaatccttcccttaactcccttttctaaaaacgtcttcacaatcatctaacataactggttccctctgccacaaagtcaagaagcaccttttgagggaacagtgggatctgcggcagccttggttaggaagacgcgcctttccagcaaacatgcccactaaggtttagaagcagagatgctgaattctgctctgaaaataacattttctgaagcaacaaactttgctttctttcaaaataattgcagtgattatttttggtctcctgtattcagcgacgtctgctgccacttccaccctccatcaaggtgactttgatagagacaagcagcccatgacaagatgagtgacctgcaaggtgcaatcaccagtggccaccccaggcaagtcccattagcaaaccagatggggaagtgacatttagacttctcctaaacagccatcgcaatgtgacagggacagtggcaaagcggtgtgcaggtaaatatcaaagggaggctgtccatccatttaacagtatttcttcacacctactgtgttccaggccgtcccaggacaaggcagatggggtctgctagcctctcacgttaagactgggaaacgcaaagcggcgggtatgatgcagaagagccgggggtcacggtggtctcctggagaagacggcactggaggtgagccctcatgcagaagcgcaccgttcaagatcgcccaggaacaggcatgtggggctctggggtggaaaagtcttggcacgtaagcattaattaaggaagccaaaggaactggaaccgggagcagacgagaaagtaagggaca

SEQ ID NO: 15504 - DNA, 1036 bp, Artificial sequence
  DNA replication origin
aggtgtgggccgggtcccggacaggtgtccgccgagtcttcagcgggtgtgggacacggccttggacagatgtaagcagagcgccaacaggagcaagggcgcctcgagcaggtgcacgctgaaccccggcccggcagcggacccggacaggtgtggcgggctccgcccggacaggtgagggccgggcgagcccctccgcgggacgcgccgactccacggccagccgcgcagccctccccgcagccggtccgaattgcctgaccgggagcccccccgctttgcacttacacagccggtggccccgggcccggagcgggagcccacgacctggcgggcagcggggccgagcagcctctgcggccacttcccaggctctgggctggcgcttcctactggcggccgagccggcgctgctcctgcgcgtgcgcggaggccaggcctgggcccccgatccgtcccgggttttgcaagagacgcgagggaagcaagggggtaggagcgagggagaaaagaggaaggaggagcgagggagagaagaggggacagggagggaggggacatggggagggaggaggaggagggaggagggagagaaaaaggtggggtgaaagaaggagggaggaggagcgagggagagaagcggggacggggagggaggaggaggagagtaggaggaggaggggtgaaagaaggagggaggggcagcgagagagagaagcgggggacagggagagggtggaggagggaggagggagggaaaaaggaggggtgaaaggagggaggaagaggaggagggaaggagggagatggagggagatggagcgaggagggagggagggaccggagcaagagaacagagactaggaggaaagcttctgcacctggggcggcgcagctggaaggaggcccagttctgtccccgccgcttaccagtccttcagggcgcgcagctcaaatttcacttcctctgtgaagctcaggggtggaggccccgcggaagcccactgtggatccctgcggcaccccctgtgaccct

SEQ ID NO: 15505 - DNA, 824 bp, Artificial sequence
  DNA replication origin
gaaagaaggagggaggggcagcgagagagagaagcgggggacagggagagggtggaggagggaggagggagggaaaaaggaggggtgaaaggagggaggaagaggaggagggaaggagggagatggagggagatggagcgaggagggagggagggaccggagcaagagaacagagactaggaggaaagcttctgcacctggggcggcgcagctggaaggaggcccagttctgtccccgccgcttaccagtccttcagggcgcgcagctcaaatttcacttcctctgtgaagctcaggggtggaggccccgcggaagcccactgtggatccctgcggcaccccctgtgaccctcacggtaccccccgtgactcccacggtcgtgccccccacgtgggtgggtgaccgtggcgcgcgcggcctgggagcgcctccaggatcgcagggcccgggaggcacgtgaggtgcgagccccagcctgggccggcttccccctgtgtggcgcgcggtcttgatccccagctggcaccatggcactcccgactttgagggccccaacaatccatccacataaaaggttccaaagaggcgacaggggctaggacagctgtcgttagttcagtgccaaggcgccaagcttgctaagtgcgggcagaagccatttaaggatttaaacccctctgggttcaaaaataaaataaaataaagcaggagatgggggaggcttacagacttaagatgcccagcacatgaattaacagtggcatccgcagggaaaattgaaaacagagagccgctctccgttatgtatgtttaatgttctgtt

SEQ ID NO: 15506 - DNA, 1034 bp, Artificial sequence
  DNA replication origin
cgcctccaggatcgcagggcccgggaggcacgtgaggtgcgagccccagcctgggccggcttccccctgtgtggcgcgcggtcttgatccccagctggcaccatggcactcccgactttgagggccccaacaatccatccacataaaaggttccaaagaggcgacaggggctaggacagctgtcgttagttcagtgccaaggcgccaagcttgctaagtgcgggcagaagccatttaaggatttaaacccctctgggttcaaaaataaaataaaataaagcaggagatgggggaggcttacagacttaagatgcccagcacatgaattaacagtggcatccgcagggaaaattgaaaacagagagccgctctccgttatgtatgtttaatgttctgtttgaatcttttaacatgtacatgtatttctttttcaattaaaaaatcctggccaggagaaatggctcacacctgtaatcccaacactttgggagactgaggcgggtggatcacttgaggttaggagttcaagaccagcctggccaacatggtgaaaccccgtctctactaaaaatacaaaattagccagatgtggtggcgcgcgcctgtaatcccagctactcagcaggctgaggcaggagaatcgcttgaacctggaagacagaggtttcagtgagccgagatcatgcgattgcactccagcctgggcaacaactgcaaaactctatctcaaacaacaacaacaacaaacactaaaaagggctgggtgtggtggctcacacctgtaatctcagcacttcgggaagccaaggcgggtggatcacctgaggtcaggagttcaagatcatcctgggcaacatggtgaaactccagtctccactaaaaatacaaaaattagttgagcgtggtggtacatgcctgtaatcccagctactaggcagtctgaggcaggagaatctcttgaacccgggaggcgggggctgcagtaaaccaagatcacaccactgcactccagcctgggtgacagagagagccca

SEQ ID NO: 15507 - DNA, 1258 bp, Artificial sequence
  DNA replication origin
acccgcctcggcctcccaaagtgctgggattataggtgtgagccaccgcacccagcccacttccctgttgattctgtctctgtggaagaacctcactaatacaccttacttgaccttcaaaataataatgctcaaaagacttcttgcaaaaaaaaaaaaaaaaaaaaaaaggaaggatccactaaagggctaaacatcttgtcatttaataaatgtaaacttaaggcttggtgccatggcttacatctgcagtcccagcactttgggaggccaaggtgaaaggatcacttgaacccacaagttcaagaccagcctgggcaacatagtgaaaccctattgtgtccagagttggtgggttcttggtctcactgacttcaagaatgaagccgcggaccctcgtggtgagtgttacagctcttaaggtggcgcatctggagtttgttccttatgatgttcggatgtgttcagagtttcttccttctggtgggttcgtggtctcgctggctcaggagtgaagctgcaaaccttcgcagtgagtgttacagctcttaaggcagcgcatctggagttgttcgttcctcccggtgggctcgtggtctcactagcttcaggagtgaagctgcagatcttcgcggtaagtgttatagctcataaaagcactgtggacccaaagagtgagcagtagcaagatttattgcaaacaaaaaaaacaaagcctccacagtgtggaagaggaccagagcgggttgccactgctggctgaggcagcctgcttttattctcttatctggccccacccacatcctgctgattggtagagccgagggggtctgttttgacagggtgctgattggtgcatttacaatccctgagctagatacaaaggttctccacatccccatcagattagttagatacagagtatcaacacaaaggttctccaaggccccaccagagcagctagataagagtgtcgattggtgcactcacaaaccttgagctaaacacagggtgctgattggtgtgtttacaaaccttgagctagatacagagtgccgattggtgtatttacaatccctgagctagacataaaggttctccaaggccccaccagagcagctagatacagagtgtcgattggtgcactcacaaaccctgagctagacataaagactctccacgtccccaccagactcaggagcccagttggcttcacccagtggatcccacactggggctgcaggcggagctgcctgcc

SEQ ID NO: 15508 - DNA, 1664 bp, Artificial sequence
  DNA replication origin
ggggagccgcgcccgctgccccgtgggagttgtagtgtggggaggcgaggccgcgaggccgggagcggcccgtccgggaaactacgagctccgtgaggcctcgcgcccccgatctgcgcatgcgccgacgctcggacaccgcccccgagtgcgaggcccggcgcggaaccggcagccgagagcctggcgggggcggggcgcaccgcgccgctcccgggagtctccgggctgcggtcgcggaatacgactttgatccgcgggtgagggctctgtgaatgggcaagcaaagccctctgactccgggcctcgtggctgggtgctgtgtgttaagcgcctgcgctgtactaggaccgggcgtgccgccgtcggcaaaaagtgacgctttcttgaagcacaaagtccaggggggacgaccaagcggacagcggatgcgtcctgcgccggtagccaggcgaccggtggaagagcagagtccagcgcgggcgatgcggcggggccaggcttgctgcgccgcggggtgattgggagaagagccttcctgcggggtggaggacgaagagctgccctgaggaggtcccggagtctggtgggaacggcctcttcgggactgctccgagagacggtgtgcagagcctggcgtgctcgccgaggtctgacaggcagcccggggctaggtcctgttggatttttttttctaaggaaaatgggaagtggtggtagggtttgagcagtggagtcccgggcagttttaaaaggatccctgcagctgccggctgggagggcgtgggtgcgcgtaaggccggaatcacagagaccaggtagaagatgattacgagaacccaggaacgtggccctcaggaggccggcagtaccaaggggacagcagctgggaggagagaggcaggagatggtcaggggccagaccagggaaggccgcggagaccgcagaattcgctctgaatgagtggggaggcccttggaagagtaaggggtccaacttaacttttttttttttttttttttttgacacagagtctcgctctgtcgccaggctggagtgcagtgcgatctcggctcactgcaacctccaacaccccgattcaagcaattctcctgcctcagcctcctgagtagctgggattataggcacgcgccacccagctaattttttgtatttttagtagagacgggttttcaccatgttggccaggatggtctcgatctcctgacctcgtgatccgcccgcctcggcctaccagagtgctgcgattacaggcgtaagccaccgcgcctggccaccaacttaacttctgccaggatcatgggaagtggtagggtttggggtctgatttcaagagggagctgctgtggagtatcagcacagcttactgagatatcagaaaggccttggtaaagagccctttactgagacagggagcacattttggcagaggtttgaattggagcgtgttaagtgtagtgtcttcttcaccactgtgacgtgaggtcctggcgcaaataattgagcacagaaatacatgtcaggcattgctaggcacaagggtacagccagtgagcagggctgccatggtccctgccctcttagagctgaccttcaggtctgagggagactgaaaaataagtaagaatacctccagccgggc

SEQ ID NO: 15509 - DNA, 1011 bp, Artificial sequence
  DNA replication origin
caaaaaataaaataacgggtcagaagtgcctgcataaatcctcattccttaataccaatagaatgaaattgtataggaaaatacaaatgtccccagatgaaatgctgaatatgcaattatttccctgggctctaggaaaacatggctctgacataaagcgggcaagaaacctgtaatttcccacttcccttagttctagtccaacactgcagggacatcatatacttaactacaagtagggactggaaaatagaatccaagacaagctaaagcatttaactgtgtagctgaaacatggcccagtgtcagaacaggaaaacatctggcctaacactatcgagacgcaatttttttaaaaaaagacaaaattatctattttgcacccaggaggatgctaagcaggctgtaaaacttaagttccccggacttccttaaattctggttggggaatgtgctgcctcttagacgaggggccccagctgtggcgggcgggagggctcgaaagcctcggaccgctggagctggcaccgcacgcgcgggaaaagagcctcgagtcgcgggtgaagcgcccggctgcccctcccacgggacactggaggagttagggccctcaaagcacgaagcagtccagtgacaagaaaaaggcaggccgggagtagggagtcgcgggtgaaagagcccccaaagaacccaaatgagaagagcgccactaggcgccgacgcccacgggtagggccggaaactgagcgccgcacgcgagggaggacgtgagcgcacaggtgggagggacgaaaggcgcgcagaggaacgcgggagcttacgggtttgccgaatggaagcgcgagagaaacggcgggaggacagtggggtgggcggggcgaaggtgcgcacggaaggaaggggcgggcggagcgaaggaaggcgacaaagggcgggagaggcgcgcggtaggcgaggcgaagaaactggagaacgtgagggagcggcgaggggtgggcggggcgaagacgc

SEQ ID NO: 15510 - DNA, 1215 bp, Artificial sequence
  DNA replication origin
catgggtctgggtgatgcagagctcatcggtgaccttggggagaggagccctgttgctgtggccgtgagaagtctgactagaaggggcctgggagccagcgcaagcagtgatgggttcggctgagtcggagctctgccgcaaggcaggcgatgggagtgagaggatgtgggcggagagtgagtcacaggcatgcagggaaatggatgcggggagagggcagcagaggcgagggcctcatgtacctggtttccaacaggcagggctggcagaacggccacttctgatgcttcctgatgttgcctgcagcagccgagcaaggctgggtggggtgtgcggcggtgcactctcaacccgggaggaaggtgctgtcaccacctccgcctttccccggagagcccgaggcccacatgcctgtccttgcccctgtgcgtgctgcctcccagggaagtccccactgggatatactcagggtctgaaagttctccatggggtggttttgctgccaggggacgcgtggtcatgtctggagacatgttggggtgtcaggcttgatggagtgctactggcatccagtgagtggaggcctctcagcgtctgcccatgctggggacagccccctaccccaacaaagagcgagctggccccaggcattggtggtgctaagggtggcggtgagaaaccctggcgtgggtgtggctgcagagggagtagagggtagaagggtgagccctcctgggcctgggcctgagccccagcctcaacagctgtcagctcctggcccatctggtctggagtacactccacccaagccccccaacccgtggctattctgaagcagatttcagaccttgtgtcatttaatctgcagggtttttagtattccggttaaaagataaggattcttttcaaaagcattaccatgatacactgaccacctccaaaaggtgatggtggcacctactagcgtcagaggtccaggcgtgtctcaccgtggcccctgacgccactcctctccgcaggccgccggtgttccagcagcccgtcatctttctgggagcagacgtcactcacccccccgccggggatgggaagaagccctccattgccgccgtgagtgtcagcgcttccccatgggtcttccattgacaacatgcaggacgctgtcgaagtcccactgtcacagcgtggccaggggtccttcctgaaaggcatgg

SEQ ID NO: 15511 - DNA, 1100 bp, Artificial sequence
  DNA replication origin
ccctggcccggccaatggtacgtgacagggaaaggctgatgaaccctgacatcaaaacccataccagcaccctcacccccaccccaaccagagtcagccctgcaagtggtcacttgagctgcccatcgggcagcacccccaggccggagcctctgcctgtggggggcttacttcagatggacttccgtgcactggcgctggggggcgaagcacgcaatggcccacaccttgatctcgatgcccgtgtggaactgcttgttccgcatgtcccagacgccctggacaggggtcgcaatagctttattctgcaaatggcaaaaggttcagggtgagaaaaaaatggaaaacatattccttcaaccttagactttgtcactctcactgttggtccccctgaccaacaactgcttctcagggaaagaacttttgtgttgtctcctgtctctgacctgcctagtgatgcagacaactgacaggatcggtagatggatgggctggtggaagatgggtgggtggatggttgatgggtgggtggatggttgatgggtgggtggatggttgatgggtcggtggatagttgatgggtgggtggatggttgatcggtggataaggtaggtgggtggtccgttgatgatcggtggataagatgggtgggtggatggttgatgggtggataaagtgggtgggtggatggctgatgggtgcataaggtgaatgggtaaatggttgatgggtggataaggtgggtgggtggatggctgatgagtggataaggtaggtaggtggatggagagatggagagatggatgaatggatgaatggatggatggatggagttagatggaggatggatgggtaagtaatgaacagacagatgggagctaagccaggaggagggaggcccaaagctccatccaacctcatgagcagcctggaggaagagaagtgccttgccatgctacaggccttgccatgctacaggaaggcctcctgttctatacagagctttccctcatttcccctcctctatcaccaatgatgtgggaaggggagatcagagctgggactgagcccatagctttttccactcagcatgcca

SEQ ID NO: 15512 - DNA, 709 bp, Artificial sequence
  DNA replication origin
cctcttgggggaataatgcacatggggtctcctcttgggggaataatgcacatggggtctcctcttgggggaataatgcacatggggtctcctcttgggggaataatccacatggggtctcctcttgggggaataatgcacatggggtctcctcttggggtaataatccacatggggtctcctcttgggggaataatgcacatggggtctcctcttgggggaataatgcacatagggtctcctcttgggggaataatgcacatggggtctcctcttgggggaatgaagcggtttggaagtagacagcgatgatggctgcaccacactgtgaatgcgctacacgccactgaattgttcatcttacaatggttcatccgatgtcactgccacacgtcccccggcactccagccttggcctgtctcctgagggcacacagggaggcagtcagcctccagcagccagtcagcagtcaggcccccggctggacacgggtcacacctggacctagcaacatccagaagggcagggctggtgggagcggagggtgccgtcttgctgcgtgccccctgatgtggccatgcttccctcccgtgcacacctgttacctgtctccatcagtgctatggatgcagccccatggcccctccctccataatggccaccatcatcacccctgccaggccacagacgtcatctcccatcccaaac

SEQ ID NO: 15513 - DNA, 1158 bp, Artificial sequence
  DNA replication origin
ccaccgggcacgtggctcctggctctctcggccggcctggccgctgggacggggcaccgcctgctcccctttgtccgctgggccccagccgggccgcaggcggcgcaggccccgccgggctctgggcttatgtttacccggccgggcgaggaggctcgcattcccgatgctgccctcgttgctgcagaccggccccaaattgtggggtccggaaggccccctggcccaccttggtccgttgatggtggcccccactgctggagctgttggctctgtgccttgcgaatgtcgcgtcttttttctgatgtcatttagaaagcttcaacaaggcggagtctgaccaacttttcaacccctgagggccatcagcagtttgaagaatgattttccccctccacctgggaggggccgcagtcctggagcaggtgctggcctctagaggccttgggtggccaggccccctcttgggaaaggaccgggcatccccttgtgagttgggaccttccagctcctctttgtagaggaacccagcttatgggactgacagcactacattttttcaggttatcggttttaaaagttggaggcccagaaaaagtgaagaggctttaaggaaggtcaagctttctgtgttgtgttttgcgtgttacttaattcactccacttgctgaggttggtggtgtttgtgaagacagacagccgaggctcacagaggttgagaacttcaccaaggtcacacagcagtgagtgagtatcaggacaatcggtccgacttccgagctggttctctgggtgccttcctcagggcagtccctttcaagccctataacccagacccacagtaagaagtctctgttagggctggactggaccagcacctgcccgcatacttgtcattgacagcggggcttcaggaagccaccccagctcactgctgtactgtgtgcactgccccgggatgctgtcttgtcgatttcatttttcagcgtaccttggccctcatgatccacaggctcgtttctgtcactcgctgctttttggagattgttgccttggtgtgggcctggtagggagtggaccctctggaacaggacagtggttgaaagaataaatgtgtctgcaggataattcatagctaatggcaggatgggaatgaac

SEQ ID NO: 15514 - DNA, 912 bp, Artificial sequence
  DNA replication origin
gcgctcctgcccgtggttggcgggcccggcgcgggcggcaggggccggggatcggggggccgcggggtcggggcggcgggggccgggggcgggcgagccggggccgcgcttgggggctcgaggagcggcggcggcggggccgagccggccgttttctcggccccgcgttggacgcgcagccccggcctcctcggcccccgcgagtcgtcggggcgccccgcgcggcctgggcccctcccgcgcctcgggcccgcgtcccagcgtcctcgcatcccccgcccggggcccgcgggctggggccggggccgaggcggccgccgcgtgtaggcccgaggcccggagcgccccgcttggcccggcctcgctgcccgggcggggatgggggcgccgcagcccggcccggcctgaccctgagcgcctgagcgggtggaggccgggtcggggcgcccggctcggggcgcgcacgggcgggaggggagggggctgcgccggtcccgaccccagccgcggtgagtctgtggcgcgctccgttgtggcccttcttgttgccggcacttcttcggccccttttcccaaggaaagtctggaaatgctgaattttggccaattcctgtagttagggctgtcgcctggaaaggggaggacgcggctccccggaaccctcaaactgcgtgcgcggctcgttctcattccagacacgccggcctccccattcaagtgctaattccttttacaatttcctaggagaggtgaggcgaggtggattcctgtagcaccccttgttgctagtcggcctttctctggaaaagttctaaaaaacttaaagcggtaacgcgttgtttttctttttaaatgcagagtagaaggcggtctccttggtgggccaaaaaaacggtcaggtgttctcctgct

SEQ ID NO: 15515 - DNA, 1737 bp, Artificial sequence
  DNA replication origin
ccgccggccgcacgatccgccccggcgcggccgcctcgccaaacaggtttacccgacgcggccggggcggcgggcggaggcggcggcgggagcgggagcgggaggggcgggggaggaaggaggagggagggggaggggaggcgaggccggcggcgggagcgcgctcgcggggggagcggggctgggcgcgcgggcggggtccgcggcggcggcggcggcggcgccgggtctggcggggcctggggcggggacccggggaggggcccggagacctcgccgggcggtgggaaccgcgggcgggagcggggacgagggccgagggcggcgcggcccgtgtggcgcgggggcgggcgcggccccggggacccttcactgccacccagagaagccgcgtcttcccgacggggaggagccgggccccccggctgtgccgccggagccggaggggaggccacgcgcccccgctttccccgccgccccccggtggggggcgcagaaccctcccaccctcagcccctcggcccccagcctggctctttaagttactacagaaacacggaggtcgggaagctccctcccagcccggagcttgaacttgaacgcggccggccgctcgcgcaggaccacaccgccacctcccggcgcggccccagaacccagataatccgtttaaagcactgagaaaatctaagaagtttttagtaaactgtagctggtatcagggatcagatcagcggacacgcccattccagcagtcaggggcctgctcggaccgtcgtgcacctccgagcgtttctgtccggtccctctgggtccgtctggttttcggaggctttcctggaaaagccagcctgtggctacctcctttctcccctaagtgatggaggattagaaggcagaggttgacccacaatctaaagtgcctggtcgccttttcccagatttcccggagcattccttcaccccgtggcatcggctgtctgcatatgggtgcaaggccctgttccgggcggagaataaacaggagttctgactgacaggagctccgcagccagcagggtggtcactagttctctgcagtctcggaggacagccctgaagaagggcaggagaaccagcacttcctccgaaaactcaaaaggacatcagtcttcaccaagttgccgatacaaaacgtgctcctgaaatgtgtagtaatgaacaccaggaaacctgggtaggagtgtgcatggcattcttcatcaccgcttggactgcatggcactgaatacccacggagagcaggatggagaaacagtgtgctcatattcacaggatggaatctagccattcacaaaaattccaaaacaggcaaaattaaactgcattctttagggaagcatcattaagtagtaaataattgacagaagggcaagaaggtgcttactctaagtgtcagaatggtggatacagctgggggtgagagggctgtgaccacagcagggcccctgggggatttgggggtgccaggcctgttccttcctgcaatggtgccctttggcagccatcccttaaactgcacttttactttatatgcttttctgtacctttactgtagtatttcacggaaatttttaaataatcatgaatgttaccactttcctatttatgaaccatgcaacctcatcaatcttcccagttcgcagatgcccaccctctctctctgcccctgtctccttcacatatccccaaaactcg

SEQ ID NO: 15516 - DNA, 817 bp, Artificial sequence
  DNA replication origin
gggtttgggacaggttgcatactgtctcatgccctccttcctctttgtagaagcatgattcttctcaccttgctacaggctctgagaaggcctgcagacaataaacttatttatcattgtttgatccagtgcttcccaatttacttgacttcccaaagctgctttaatcatgtgcagaacatgttttaggaacaaatgatttattccattgcctgcattttagtcttgaagaaacaaagtgcccccaaagccgagggctttgtcagccctgtggcctcaggagctttctctgtacttcccctcaccccttctttctctctcatggggagctggtgctttagactgagtgcacccagtgtgcagagctgcaggccaggctgctgcaaatgtccctggctgtgattagagcccacggtcttatcaaagcatcaggatcctaaaacacagaggaaggaattgtatcagggagaagcactgggtccagaagacccagagtcggctgagtcaccatccgggtgtgggacgtgggtctgggggacagagcagcaagggctggagacatgtcacagcaagcaccgagacgcacagtcagatgagttaagcaggttcactaatggcaggagaggtaacaggcagaggggactgcagttctcagctccgttgggtggtggatctgttagccatgctgagtgagggacaccagaagaaaagcaggttgggaggagggtagggatggggctgcaggaagcgggctgaattcctgaacacaggtgtggagggtagagacctgcagagaatgggcttatctaggaaaaga

SEQ ID NO: 15517 - DNA, 918 bp, Artificial sequence
  DNA replication origin
tgggcataaattggcacaaaaaggtatgtcctactattgaggtgtaaggtaacctctaagaaaaatccttctttccttctgcatatgtggcaggggggaagaggaagaaagaaggaaggggaggaggaggagaagaaagggggggggaagaggaggaggaggaggaagaggagggggaagaggagggggaagaggaggaggaagaggaggaggaagaggagggggacgaggagggggaagaagaggagggggaacgggaggaggaggaaggggagggggaagaggaggaggagaaggaaggggaggctgaagaggaagaggaggaaggggagaggaagggggaggaggaagaggagggggaggaaggggagaaggaaggggaggaggaggagggaggaggagggggaggaagggaggagggggaggaaggaagtaggaggagggggaggaaggaaggaggaggaaggaaggaggaagagggggaggaagggaggaggaggaagtgaaggagaagaaagacgacgacaaccatttcttttttcctatggacatatgtgaccttggggtagcttcctaggttttcctctagaaatctggtaagtaggagtgtgtaattcatttactaagcaaccatctttacagtaaaaatcactcctgactggtgaattgctgggggaggaggtgaaatgggattaaaaatacctggtggaaagctatagctagaagctgccctgagtgtggagactatggtaactgggtgtgttccttgcaaggccctggaagccacaacccatggggcactcacaaaggatttctatcttagacataaatggttcctgcatccaccactgtggtcctgtcctcttaaatttaactggttgctttcagggccctataaaagactttctactgggcatg

SEQ ID NO: 15518 - DNA, 1381 bp, Artificial sequence
  DNA replication origin
gcgggggttcggggcgctgggtggtcgggaggcttggggaagactgggaggctgagggacgtggggaggccgggagctcgaggaggtcgggggttttgggggcgcgcggggaggccaaggggttcggggaagacagaaaggctgggggacgtggggagtccgggagacgtgaggaggaaggggggggcggctttcgaaaaggccgggcgcgcggagaggccgaggggcctgaggaagacgaggaggccggggctctgggggcgcgcagggcggacagaggcgcggggaggacgggccggcctccgccggagcggacccaatgcctgaaaaacaaaaggggagaggcaggaggaggaagagggaaatcgcagggacgtcggcagggttcgcccggacgcgagagggaggctcgcgacggcccgacctccgtcccccgggcgcggcctcgcgggcagccaagggtgggctccgagcggcctgccggtgcccgagccccaagcccgccgtgtccccgaacgcaaaccctcaagtttggtagagccccgtgggcttcttggcgggagccctggagccctcactgaagtcctcactggagtcattgtgcttcccaagttttctcctcttccccgcccccagcccccgactctgccgcggtggcttaggcgcaactgtttgccgaatttctctctgggttccttgtgtagcggcatcctgttctttcttagaagaaggggtgtgtgtgtgtgtgtgtgtgtgtgtgtgtgtgtgtgtgaattggtttcatttaattgcagaattttgtagctaaattcagtgagggtaaagtttctttttttttttttttccgagtcatttcaacagtgtctcattcttgcatagttagcctgcagctgggtttttggcaatgagactaagataatagtaatattgtagtaattatgggaactggttatacattcaagctgaaagctgaaggcagtgcaagagtttggggatttgtatttaagacttaaccatcgctaggatttttacttagaatgtaaacgttttcatggctggaaaaacagaccagtactatttgaaatgaaataccagagcctcaaccttaatattttatttgggaaacgggtaatgaaaatgatgtcttcgagagttgagcactccgtcccatatttgaaaacttatgagcagtgcgatgcaagcacacggatgaactagttacaagacacataaaagtaaactagcattcaacgtatttttgttggggtacagtatagataatattttcatccagttatactagccaattaattagaaaagccctatgatattcaaacaaggaacattttaaggatgtttgtgtcccaatatctttgtgttt

SEQ ID NO: 15519 - DNA, 1009 bp, Artificial sequence
  DNA replication origin
agagcctagcggcgcgctgggcatgcgcgggggcggcgcgcatgcccagtccccccgagaggcgggaactccggactgagaccgggtcgggcgtgcgctgccgagagaggacgcgcgcctcagccggctgccgcgcacgcgcgcgggcccgcgccgacgcagcacggcctcgagggcgcgagcccgcgccgccgccgccgccgccggtcccggaccactgtgagcccgcggcgtgaggcgtgggaggaagcgcggctgctgtcgcccagcgccgccccgtcgtcgtctgccttcgcttcacggcgccgagccgcggtccgagtgagtgcggggcgccgggcgcggggcgcgggtcgggggctgggcgggctccttctgtgcagcggtcgtgggctgggccgcggccctgagggcggaggggcagagcggggccgcccaaccagtcccggggcggatgcggcggagaccggcccctcccgcgcccccggcccgggttctgggaggaggggaggccggtggccgtgaggaggttgggggccctcgcggaggccgagaggcttaaggaggtcagggggcgcgctgggaggcgggggttcggggcgctgggtggtcgggaggcttggggaagactgggaggctgagggacgtggggaggccgggagctcgaggaggtcgggggttttgggggcgcgcggggaggccaaggggttcggggaagacagaaaggctgggggacgtggggagtccgggagacgtgaggaggaaggggggggcggctttcgaaaaggccgggcgcgcggagaggccgaggggcctgaggaagacgaggaggccggggctctgggggcgcgcagggcggacagaggcgcggggaggacgggccggcctccgccggagcggacccaatgcctgaaaaacaaaaggggagaggcaggaggaggaagagggaaatcgcagggacgtcggcagggttcgcccggacgcgagagggaggctcgcgacggcccga

SEQ ID NO: 15520 - DNA, 1044 bp, Artificial sequence
  DNA replication origin
gaggcgcgcgtcctctctcggcagcgcacgcccgacccggtctcagtccggagttcccgcctctcggggggactgggcatgcgcgccgcccccgcgcatgcccagcgcgccgctaggctctgctcgcgtaatttgtcctgtagtgaccgcgccggggtttcggggtggcccgaggctgcgcgcgggcgtggcggccggacgaggaaagccctggtctcgggggtggccggggtcgccccgccgagcggacatcctggggtcccacctgcctcgctctccgccagcgggattagacggacttcgggaaagtcctccccatctccttccctgcccccaaatcccgaaggggtcccctctggagaacctccctcctgagcggccctgcggccccgcccccagagttggacgcccgctgtcgggcacccgctgcgggccccgggccttgcagtgcactctccaggcaccacaccgaccctaacgagcggttcctgggccctttttgcagacaaggaaactgaggctcagagattcttttcatggcattatagctaagttgggctgggccattatttgattttggaagatgaaaaatcatgaaagggacttagaagtccactggaggtagacaggttacctaaatgaacgccagcagggaacgagccctgcaatccctcccgagggctacagacctgagacgggctccaggaaaaggagggaaggctcgccccgacaccgacccgggcttccgcggtgtgagccagtttcagcgaggagctagttggttatgaccggaacgtgccgtaggtggggtgggggaaatagcaaaaggcgaggttggagggattgaaaaatgcagacggctgcgtggggcttgcttaggtgcctggagtttattctttaggcaacagggaacctttggagggctttaagcaggaagtgataactgatttgtgttatttaaaaaaaaaaaaaagtcactctggcaaccttgtggtcggaaatgaaaccagaagaaccctcaaggctgcaactttcatttttatg

SEQ ID NO: 15521 - DNA, 1397 bp, Artificial sequence
  DNA replication origin
gttcatagtcctatgcagtctgaccttagcctacctgcccagcccaatccctctgcagctgccactcacaccttccagccgagaacatcttcccagctaggaaaccgtcacacctgtacacctttgcacctgcttgtcccctcactccctggggcatgcccacccgtgcatcagttgaagcccaaatgtgccatcatctgagaaacattcccagtgtccccacaaaaagaggctggtgcctcctctcggccactgcagcctggacatctgcctattcattcatgctgtcgccacactgcactgccatggctcatgtatgtgagtttcctcttccctgctgttgagtgtaggcttcttaattatctctatatatcactagcccctaggaacaaggttcgccacacagtagctgctcagggcttttgatgaaagaaggaatgagattgctggcaaggtaggtggggggatggtgggatggatggatggatgactggatggagagaggatggaaggatgggtggtgataatggatagttggatggggaagtggagggatcatggatctctggctgggtggataagtgaataggtgggtggataggcaggtagggaggtgatggataggcgaataggtagatagacagatgggggaggggatcattgtggatagataggtagaggaggaatggtgaatacatagataggcagacaagtgggtgggtggctggataggtgggcaggtgggtggtagatggataaaggagtgagtgggcaagttgtactttttgaaccaatttacatctgggcaacacagtaagaataaaggattatgaccaaggacaaaagttgctgggttagatttcatggaggagtaggtggatggatgatgggtgggagaggacaaacgataggctggtgggctctgtcatgattcccccaaatggggatgcagcaagtccagttccagctggttccaagggacggactcaggtagatgggacgggtgctgatcataatcccaaagacacaatcccgatgccgtgatcccaaacactgaaaccccaaaaggtcaaaatctccaaagtctaaatcccccaaatcacaattccaagaggttaaaatcttgaatgttgaaatcttgaaagccaaattctgaggaaaggatcagtgcgttttcggttgtacacgagatagttgcaccatgttcactgcatcaagttaggcgagctagtgccttgttattgtctttatttggaaatagcatggtttaaggagacgtgtatgggtgccgagttgacaatgggtggatttgcggactttatttcaggtgttgacttggctggattaaggaatctgggcgtgggccaggtacggtggcacatgcctgtgatcccagc

SEQ ID NO: 15522 - DNA, 1217 bp, Artificial sequence
  DNA replication origin
tgtgtgtgtgtgtgtgtgtgtgctttaccttgagaagaaaattgattcaggcttctgtaaacctcccaactgacttcctgcatcaagttgagaaatggagctgggctgggtgctgactgatcacggctccctgatgggatccctgcctcccccgaagcctgagggaccaggctggacaacactgaaccccaaagccttcatctggtcataaacccccagctcctgcctgcagccccagggggttaggccacgcagggaggggcagggcacatgccaggtagggaggcccattagcagggtgcaggcgccaggtgggcactcggcccccttgaaaagccttggtgcacggaggctgagctgatgtgcagctcccgcagggcactccgagctggcatgcatgctggcagctgtgtagcccatctgggagagagtgcgtggggcacaggccaggcaagtgggggactgggatccccagaggaggggactcagaagtgggggctcccaaagaaacacaatccagggccatttgtttcaactcctctcagctactgcgtgctggggacacagaggtggatgggggctgtccccgtcctgtgctgtgttaggtgctttccctgtgctggaatcctgtaaggcggagactctgtccacttttgcatgaggaaacatgtttcacagaacttgactattttgcccagggtcattttcatgataagggttctagtactgattgtgtaacaaactcagtcacttaaagcatttcataaatcactttgttttgttcccaaatctgtagactggggaggacttggcgaggatagtgtggctgtgctctgtggcatctgctagggcagctccgtgagccgaggtagccacctcggagcggggccacccccttggcctgctggctggagccggtggtgtgttgggagctctctgaggctgtgtgctgggagctctctgtgggctggaggcgccttcctgggtttcctcacgctgcagcagccggattccaagagcaagcggcctagagacaggaactgcccttctctccaagcccaggtccagaagtacatcactgctgccatatgttgttggccaagcagacacaggtcctgcctctcaacgaaaggatgctaaagaatgtgtggccatctttagtctaccttagtgacagagccaggacttgaacctagatcttcaggatgcctccaagc

SEQ ID NO: 15523 - DNA, 1284 bp, Artificial sequence
  DNA replication origin
ccggggctgcaggtggagctgccttccagtcctgcgccctgcaccggcactcctcagcccttgggcagtggatgggactgggcgctgtggaacagggggcggcactcgtcagggaggctcgggccgcacaggagcccaccgcggtggagaggctcagacatggcaggctgcaggtccccagccctgccccacaggaggcagctaaggccaacgagaagtcgagcacagcagctgctggcccaggtgctaagcccctcactgcccagggccggcagggccggctggacactccgagtgcagggcccactgagcccacgcccacccggaactcacactggcccgcaagcaccgcgtgcagccctggttcccgccggcgcctctccctccacacctctccacaagctgagggaggcggctctggccttggccagcccagaaaggggctcccacagtgcagcggcaggctgaagggctcctcaagcgcggccagagtgagcgccaaggccgaggaggcgccgagagcaagcgagggctgtgagggctgctagcacgctgtcacctctcaccaccacaacgccactaccatttaccttcccctgtcccagtactgccccattcttccaggtccatgtcaaaagccttctcttcctccaggaagccttccccaggtgtcctccttcctcctccccctcccattgccacctctgcaagagtctgctcctgcccccaacatcccatagcaccctgtacccgactataaaatgtatcacattctgctctaacgtgaaatatgccaggtgaccttcttaaaggggttccaaagatgcttccttcctggaaggaaagggattttgaaggatgagtaagagtttgccaattggccaaaagtttgatggctttgtcctggtcagtgagtttatttatttacttatgtatgtattcattcaataagtatttgttgagtaacttttgcactgacttgttcctcagaatgtggcccctgggggcaggatagcacctcatggatctctggccacacccctaaccaccatgcttacccctcccgcccaagagctcctggcagctctgggtcagcctcagcctgaatttatgcttagccaaggtttgtgaatcaagggtgttttctaagtgtgtgtggcaggaggaagaggacagagggcctcctgggttagagaaaatggaggcccctctgtgttgaaaagcacacgggctggtcagacagtcccgattccaaatccttgctctgctcctttccagccgcgt

SEQ ID NO: 15524 - DNA, 1540 bp, Artificial sequence
  DNA replication origin
ccgccgcccgccgccagtaccgcactcgggcgcctcagccgcgcagtcgcccgcagacccctggggaccagccgcgccgcctgggggccgggggcgctgcgagcgccgtctgcggggcggggctggaggcggggcctggaggggcggggcccgagccgaggcggggcctggagagccccagaggataccgcggggagacagagtttgggggcggggcttgactgggcggggaggttctgggcggggcctggagtggcgtgcccggccctagggaccgggacttgggggcggggccggtcctagggcgggtgctgctggagacccgcgcgcggtcgtcatttcctaacccgcctgcgggccctggcgcgtgcgcggcgtcggagcaagcggccccttccttcggccccgcccagccccgccggccgcccgctccctggggaaccgagggaggaatgggcggggtcctcaggtgcccggcgacgtcatccagcccccaaggctccaggacgcaaagggtcccctgatctggcagtccctggacctaccctggagagcgtggggggacaaaggccggacgcgccgcccgctgccgcctccaggaagccctcccttgccaggacagtggagttggccgggtgtggacagcaggaagggccggcgggaagggggggtggaaagagccactcctggttaataactctgcggggttaacctagggccggccatactcaagtacggacttgagtaaaattcagcaggaaaaggagcagggtgggcgccgctagagggaggcttcaggactgagggtcagaggcccaaggcctggcagggcccttccctggtcagctccaggcttggcctgatgcccggtgggccacgggcctcttccagcctcaggctgaccccagagaaagaggacagcccacaagcccgggaggccggcttgctgcctggtcattgctgcagagcctggagggggcctgcgctcagtccccgctgaccgtcccctcccttgaccctgccatagccatctgtgtaacccaggggaaattattccaaagggacttccacttctgataatctatgattctattttctaaaaaacaaaactctaaaatgcttaatgtcaaacatctgtcatcagctgaacaggaaaaggaacagtaagtacaaagcaaggcaacatcagaaaagggagccctgaggaatttctccctccttccctgagccgggtgaggccgtgactgcagcctgactcacaggttttatttcacttattaacctaaagatggtgaggatctgctggttctcccccaggcctggaggctgcctaccatcggtggctctcatcggtgagctgaggccacagttgttatagtctctgacttcaaaagaaagaccgatttcatgaacaattgcctgtctctctcgacggtggcctcggttttttgttgttgtttttctgtttgtttttgagacagagttttgctcttgtagcccaggctggagtgcagtggcatgatctcagctcactgcaacc

SEQ ID NO: 15525 - DNA, 997 bp, Artificial sequence
  DNA replication origin
ccccgcccctccaggccccgcctccagccccgccccgcagacggcgctcgcagcgcccccggcccccaggcggcgcggctggtccccaggggtctgcgggcgactgcgcggctgaggcgcccgagtgcggtactggcggcgggcggcgggcagccatggcggaggccgcgtcgccgcacttgtcgctgccctcggggctgctggagctctgcgcgctgctgggcgccccccgggacagtctccgaagtctcgagcaggtgaggggcggggaaactgaggcggacgtgggccacgagtcggcagccgggacagcagtcggagagcgggcgcccgggtgccctgtgggttggcgcggactttccgagggctgagtcccggtcccccggcggtgaccccgcgcgcctgtggccggggatcgcgcccgagctcaggcaggtgccctggagcagcgccctgctcccctcccctcttctctcctctccccgcccggggcccttggtgtgagacatgtcttttgagagctgcgaacttggtccgccggccgggaatctgggggtgccgcccctcggagagtctctggggcctctctcttcagtcgctcccatcttgggcaggtgcttctgaaggtggggtgcaccagacaacgggcggaagccgccggagcctcacggtctagcgggcccagccctcgctgctgaaatgatttcattctttatgctgggatgtgttgtcccctgagtagtgggttttgcaccaggcacagaataacgagagagcaatcttagagttagccgccggcctcgcgtattctgcatgaacccctttgcgatgaagcctatagctatttttctcccttgcggtaccacccccacccccaacccttcctccatctctgcaccctcgcagccaaagtgacaacttcatctcccttctgctgggaaagcggcagttttggaaattctcgttttcctttttcttccccagcttttcttaattc

SEQ ID NO: 15526 - DNA, 870 bp, Artificial sequence
  DNA replication origin
gatgtggggagcgcctctgccccgccaccccttctgggatgtgaggagcgcctctgcccggccacgaccccgtctgggaggtgaggagcgtctctgcccagccaccccgtctgagaagtgaggagaccctccgcccggcagccaccccgtccgggaaggaggtgggggtcagcccccgcccggccagctgccccacccaggagggagtggggggtcagcccccgccaggccagccgccccgtccgggagggaagtggggggtcagcccccgcccggccagccgccccgtccgggagggaggtgggggtcagcccccgccaggccagccgccccgtccgggagggaggtgggggtcagcccccgccgggccagccgccccgtccgcgagggaggtggggggtcagcccccgcccggccagctgccccgtccgggaggtgaggggcgcctctgcccggccgcccctgctgggaagtgaggagcccctctgcccggccaccaccccgtctgggaggtgtacccaacagctcattgagaacgggccatgatgacaatggcggttttgtggaatagaaaagggggaaaggtggggaaaagattgagaaatcggatggttgccgtgtctgtgtagaaagaagtagacatgggagacttttcactttgttctgtactaagaaaaattcttctgccttgggatcctgttgatctatgaccttacccccaaccctgtgctctctgaaacatgtgctgtgtccactcagggttaaatggattaagggcggtgcaagatgtgctttgttaaacagatgcttgaaggcagcatgctcgttaagagtcatcaccactccctaatctcaagtacccaggtacac

SEQ ID NO: 15527 - DNA, 1226 bp, Artificial sequence
  DNA replication origin
cccatgtctacttctttctacacagacacggcaaccatccgatttctcaatcttttccccacctttcccccttttctattccacaaaaccgccattgtcatcatggcccgttctcaatgagctgttgggtacacctcccagacggggtggtggccgggcagaggggctcctcacttcccagcaggggcggccgggcagaggcgcccctcacctcccggacggggcagctggccgggcgggggctgaccccccacctccctcgcggacggggcggctggcccggcgggggctgacccccacctccctcccggacggggcggctggcctggcgggggctgacccccacctccctcccggacggggcggctggccgggcgggggctgaccccccacttccctcccggacggggcggctggcctggcgggggctgaccccccactccctcctgggtggggcagctggccgggcgggggctgacccccacctccttcccggacggggtggctgccgggcggagggtctcctcacttctcagacggggtggctgggcagagacgctcctcacctcccagacggggtcgtggccgggcagaggcgctcctcacatcccagaaggggtggcggggcagaggcgctccccacatctcagacgatgggcggccgggcagagacgctccccacttcctagatgggatggcggccgggcagagacgctcctcactttccagactgggcagccaggcagaggggctcctcacatcccagacgatgggcagccaggcagagacgctcctcacttcccagatggggtggtggctgggcagaggctgcaatctcggcactttgggaggccaaggcaggcggctgggaggtggaggttgcagcgagccgagatcacgccactgcactccagcctgggcaccattgagcactgagtgaaccagactccatctgcaatcccggcacctcgggaggccgaggctggcggatcactcgcggtcaggagctggagaccagcccagccaacacagcgaaaccccgtctccaccaaaaaaatacgaaaaccagtcaggcgtggcggcacgcgcctgcaatcgcaggcactcggcaggctgaggcaggagaatcaggcagggaggttacagtgagccgagatggcagcagtacagtccagcctcggctcggcatcagagggagaccgtggaaagagagggagagggagacc

SEQ ID NO: 15528 - DNA, 999 bp, Artificial sequence
  DNA replication origin
gtgcggccccgccatgtcccgccccgccgtccctggcagggaggggctgtggaagcctccgcccaccacggcacgcccggcacccccagactcgtggctgggctttgggaacacaggtggaggcccagggcgcggagggcggcgggacccaaaatccaggcgcttccctcccaggtgggggaggcagcgagcgagaacagcttcctgcaggggacgcccggccaccgcgccgcaatcccgccgcggccacagagacgctccccgcccctggacaggcctgaagcagtgggagcccgagacgctgggagccccgcaccccggtggccgcccggggcccagtgcctgtgggcggggaggcggaatcgacaccccaccaggacccccgccctcgggtggtgggcggccgtgacggcggcgcaggggccaggggcgtgtgttcccccgcccgcctcacctggcgcgcgggtgcctggcccacctgagcgagcaccagacctgcaccccgccaaccaacgctccccccgagcgaccaggctaggagggaacacccggtgctgcgcccctttcctggcctttccccaggatgctcaccaaggatgagccctgcgtgcccagcggccatcacggggcaagaagaagtcgccaagacagagaatcagtgacccaggcctcccaacccggtctttgttcgtttttgagacggagtctcactttgtcacccaggctggagtgcaatggtgcgacctcagctcaccgcaacctctgccttccaggttcaagcgattctcccacctcagcctcccgagtagctgggataattgacgcccgcacccggctaatttttgtacttttagtagaggtgggggggtctcaccatgttggccaggctggtctcgaactcctgactcaagtgatctgcccgcctcggtctcccaaagtgctgggattacaagcgtgagccaccgcgcccggcccgtcttcacatctttgtctccacac

SEQ ID NO: 15529 - DNA, 1008 bp, Artificial sequence
  DNA replication origin
gactcaataaacttttccctctgacatgatgatgtgggtgtgtctgtcacttccctgtggcctcctgccctctgccttcctggagcctggtgggtctagtgggctgtctgaggcctgcggaggggagctgggcccaagtaccagagcatttgcttcccagagggccgccagctggcaaatccggggcctgtccctggaacccacacacaggcccactcaggtggggttgaggcctgggccttctgcaggcctgttctggtggagccggggtggggcccgcggtctacctctgctgaagggtccctgactgtccctggagccagtgtcttaaggaggcagcctgcttgctgttgctgccagcaggaggggccacgctgggctgaggacggggtggcccggtgtgtgcacctggctttggcgccccaggggacatatggggtcctggggcggctggaagagcgctccattgaccttcctacaggcagagtgagtcatctctgtcctctggcaccccactgagggctgtgactggcagttggcagtggaggaaatgaaagggaggggacttgccccgggttacccagctgctggggtttgaatccggaagcaagttttcttcagtggctcttctgatttgtggggcgtggaaggggtcccagcagggccggggtgtggagtagaagggatctgctcagacgagggagaaagggacgagggactttgatagttggggggtgtcaccacggggctcctggatgggacctgcgcagttgggggcccacggaagccaggaacctccggacctggggacaagtcccagctgggccactctggcgctgttacctgggcgccctgctgcaaaacgcaggctgatggccctgtggtggggactaaagggatggtcgctgtccttcggccagacgggagtggggcggtgagccagggccgcccagactctgcacccaagaccccatttgccatctgggaccctgcctggcgccctggctg

SEQ ID NO: 15530 - DNA, 1011 bp, Artificial sequence
  DNA replication origin
ctcgtccctttctccctcgtctgagcagatcccttctactccacaccccggccctgctgggaccccttccacgccccacaaatcagaagagccactgaagaaaacttgcttccggattcaaaccccagcagctgggtaacccggggcaagtcccctccctttcatttcctccactgccaactgccagtcacagccctcagtggggtgccagaggacagagatgactcactctgcctgtaggaaggtcaatggagcgctcttccagccgccccaggaccccatatgtcccctggggcgccaaagccaggtgcacacaccgggccaccccgtcctcagcccagcgtggcccctcctgctggcagcaacagcaagcaggctgcctccttaagacactggctccagggacagtcagggacccttcagcagaggtagaccgcgggccccaccccggctccaccagaacaggcctgcagaaggcccaggcctcaaccccacctgagtgggcctgtgtgtgggttccagggacaggccccggatttgccagctggcggccctctgggaagcaaatgctctggtacttgggcccagctcccctccgcaggcctcagacagcccactagacccaccaggctccaggaaggcagagggcaggaggccacagggaagtgacagacacacccacatcatcatgtcagagggaaaagtttattgagtcagccacagaggaacagagaaacagacacaaggaggttctgtgtgcatggaggaaatcagggcgccgcacagctgaaccctgcgcaggacagaggggcgcggacagcagcgcatgccacaaacattcacctggcaaagaaacagagcagaacctaagggctctgtgtacacacagacacaaacatgaggccactgttacccaactaatagaagagagtcatgagcgacacgacacttccttacgacctctctctcctaaaacgtaacattatgtgtttaacacacgcttaccaccac

SEQ ID NO: 15531 - DNA, 921 bp, Artificial sequence
  DNA replication origin
gaatcctagaggatgaagccagatgtttcagctgcataaagtccagaaagaggcaagagtctgcctgtgctgcggctactgagcatttgagataaagctcgtctcatgtgtgatgtgctgtgatgtaacatacacacaatttcaacgatgagcaagagtgtaaggtatctcgatgacttttttcatatagagtacatgctgaaataatgttttagatacaccaggttgaataaatatgctatgaaaatggccttcactggccttttcactttctaaacgtggccgccaggaagtctaggcatacctgggtggctttcctcccatccaagtggaaaacacggggctggagcttccccctcagggaaatgtgactgggcctgaggggaccaaaggggcagggacagtgcttttgcctccagaagcctctggaggtgctaggggggtgggggcggctgaaggagaagaccctttgtggccagggaccgatcaggggcaggtggtggctctgtgggctttggaaggggccatctcagaaccggagaggaaggagggccatctgtgtcgtgaacgtccccccggggaagcacagggctctgctctgtatggagggaaggcactcaggaggctggagcgcagatctcagggctacggtggacgcacctgcttgatgtcatggtactggcccagcagggcgtacgggcagtaggagatgctcatggagacgatgcccatggtgctgatggtgaccatggcgacgtagacgttgggaaacatggccatcacggctgtgccgacagagaagcccagcgtccccagcacgtagatcaccctgacgctcaggtcgtagttgtccaagtacttctgtaacagggctgcagagaggggcacagggacaaggacagtgggcaggcggctggctcc

SEQ ID NO: 15532 - DNA, 1520 bp, Artificial sequence
  DNA replication origin
gccgtggtgctgatcaagccgtcgcgcagcatgagcgacctgtacgacatgcagaagcggcagcggcagcaccggcaccggaaccagagcggggccaccacctccagcggggacaccgagagtgaggagggggagggcgagaccacggtgcgcctgctgtggctctccatgctgaagatgcccagggagctgatgcggctgtgcctctgccacctcctcacctggttctctgtcatcgccgaggccgtgttctacaccgacttcatgggccaggtcatcttcgaaggcgaccccaaggtgagtgctcggccaccggagcggggccgctctctctgcccacctgcggctcacggagaagctcacgggctgggccggggggcctcttcctcgtgcccacgcgtgtcagggaggccacacagtgcctcccgtgcaggtgagggacccgcggcaggcagctggcccgcgcgcgcctctgggaacttggtgggggccgtcctggggtcatggggtgggttgcagtgaggcccgcggtgagcagtcgtgaatgctgatactggtgtgaacggggtgtctgttactgtgtgtcagactaccccaaaacggcagctaagataatggcctgctgttgaccatgccaggctcattggtggcccttctggcccctgtggtaacggctgggtcacacctgtggctgcgtttgccaggagaaccaaggtgccctcagcacacgctcgggcctcctgtctccatacggtccctccctttctggtccagtctgagctgctccatgcagtggctccgagagggccacggcagaggctgcgggagcgtcacttctgcaagtccagaccagcccagactggggaccgggagacacacagaaccctccgcctcttgccgcggtggcagagtcacgtcacagaacattcgtggtctgggaggcatggaaatgctttacagatagcaaccgacttgggctgggctctcctcctggatgggactttcctgtcaccgctcttagaatgagcagccggccagcagttcccatgggaaatacgctcctggcctggagggcccagcagatgccctcgtcagcccccgtctcatttccggaacaggccccctcgaactcgaccgcctggcaagcctacaacgccggggtcaagatgggctgctggggcctggtcatttatgccgccactggtgctatttgttcaggtaagagctccccaagtcaggtcagcactcgcaccccagaaaactcagtgattagaaatgcagacgagagaatcctgcaccttagaagctggggccatcagtcgcactgacttctgggtccctcaaaacagggccaccccttggggagaagcatcgaaattcccatgtcctcgttttagggaaaaggccgctgtgggctggcaccagaagcagtgtggttctgagacccttttggggcctgtcctgcctgtgcggtcccatgatgctgtcccacgtcaatggtgcctccagacacgctgtcc

SEQ ID NO: 15533 - DNA, 2676 bp, Artificial sequence
  DNA replication origin
acgcgtgggcacgaggaagaggccccccggcccagcccgtgagcttctccgtgagccgcaggtgggcagagagagcggccccgctccggtggccgagcactcaccttggggtcgccttcgaagatgacctggcccatgaagtcggtgtagaacacggcctcggcgatgacagagaaccaggtgaggaggtggcagaggcacagccgcatcagctccctgggcatcttcagcatggagagccacagcaggcgcaccgtggtctcgccctccccctcctcactctcggtgtccccgctggaggtggtggccccgctctggttccggtgccggtgctgccgctgccgcttctgcatgtcgtacaggtcgctcatgctgcgcgacggcttgatcagcaccacggcgttggcgcgccggtagcggtagcagtgggacccaagcttgccgtagtaggagaaggtgctggaggcctgcctgcggaacgcgtgccgccgccgccgcatggagctcgacgtggccgagggcttcgtgtccaccctggtgtagccgccgagggcgtcttttgtgggggagccacttccgtttgggactttagcttcattcaagtgattatccagcaaggtctcgtcctccttggcggcttccttgaggaaggtggccaggcggggcagcttggtcttggcgagctcctggctggtgctgcggggggtggcggggtaggaggcgtcgtggaagatggagggctcgatgtcgtgcaggaacagcagctcgggctccaggtccagcgcggtgtccggcacgtgcaatgccgagtcgcttttgctgcgcatgatgtccacgtccgggtagtccagggccagctcgtgctccgactgtacctcgtctgggaaggcagggacgccgtgcggctcgcccccatccagggcgccgggctcctcagcgctgcgctcctgctgcgggctgtactgctcctcgtcgatgctgaacaggtgcagggccacggacaccgtgaagatgatggcggcaaagaagaagagcacctggttctgggtccggaaccagctgcccaggaaggtctgggtccagtccagcccacccagcacgtagccgatggctccgccgaggcctgcgtgggaggaagcagcagccggtgagccggtggcaccaggccacagggggggaagctctgggagggcctctccctctaacagggggccggggctgccctcatgatgggagtcaggggctggagaaggagaaagcagtaggaaaacaaaacaagaaactgcagctgctgctgggtctgagaattctgacccgacagaactgccccttgatcaatgaagggcagactaccccaggacggatgcaagtgtgcgcctctctgcactgaagggcattccctctgcatacggagctggccacgttcaccctggatgggagtactgccctgctggagggcaaggtcagtgcagggctgggaggttcactgtgccagcatgcatgtcaccctctgcaggcctggcctcctgccccttgaagctcctcagtgccttggccccactgtgcttggtggtcaggaggggctgcccctggttaccttccagccctaagaccctgcccactgcctcaaccctccatgcagcctgatgaggcagcgctgacaacacaggctcctgtcccctccccacaccaggcccgggcacgttggaacccggccacccagccttggtgcggcagcgttaccggcagagaaggcgtggatgttgagggccatgtcctgctcctcgctgtccaccacgtccagcagataggcacggatgggcccctcggtggcatcggcgctgaagtccaggaccaccactcccagcaccgtgagcacgatgccaatgggctgccggttggggacatcgccgagggccagacctgcgcagagcacacgggagggcggtcaggtcctcaagcactggccagggtgggcctgatagcaaacagccacatggaaggggcatgcggagggggcacggccacaaaaccatgccagccttccagcacaagagagaggctcttaggcacagaggcagcggaaaggagttgggctttgttccacgcacttctgagggttccagggtttttctccccgttcggttagctgtttatcagacctccaagggtttacgcgcccttgatgtttttcaaacagaaaggggaagaatagacctttctaccccggccatcagaggacggctgctgtgctggaagcatgaattcactgtcgctaagaaggccgcacatggtagtgcagacgcccacagggaaaggcgctcatgccacagacaacccgcaggggacactgatgaggcttcgcgaggcaggcgcagggggtctcgctgggcctgctctaggtctgaaaggaaacgacaccccaaactttaggggctttgcacacaagttctcggggcagcctgggttcaggagacgtggctctagagagaaagatgccagtggccgcacctcacctacgagtcctcctgcagtgggctgccggcactcaaaagcagtcccacccatgtccctcctgcctcaggggagtctgcccctgaatccagatcaatgttgatggctgaggctcaccttgggtctccacttcccaccagggagacaagcagtgccctcctg

SEQ ID NO: 15534 - DNA, 963 bp, Artificial sequence
  DNA replication origin
attttgaactcactgcccatggatgtcatcagagcaccacggcctcgggagtgcaggcagggatctagtgtccagcgctgagctgtgcgcaccatgttctcctttaatctccataatgcccacctttcccagcgtgcccctttacatgcagggcagcacgttcaaagcccaagctgctccaaagtcccgcagccagagtggggtgggctgcaagctcagagccgagcatttctgcttggaggccttgtggcccctgctgttggccaggctttggctgtgagggaggtgcaggtagggaagtcaggctcatcacccagtgggtctgttgtcagggcccacctggcacgcactggagtggcagcagggtctctgccatgggtgcaggccgtggtctgcgggtgccgtcacctgccacgtgcttgttgagagcctcctaggatgcggtcctggatggtcccactgccttgaagcttgtggccttgacaagggagtgcctggacaccaggggagctgcccctacccggggaaggcactggctggaccctccccagtggccgtggctgaggttctgagcgggatgtgagcctggtgttttctagaagaggaggtagggtggggtgggcggttggagtctggtgtggagagggaagcggtctggcatgggctgtccagccagtgggtagggtagggtgttgtgggctgcaggcatgaggcaggactttgagggccctggacgccacggcaggtgcaagcagtgggttttaggtggtcactctgactgcaggtggcgggtgggttacggaggatgagggaggaaccaggggtcagttggaagcctgctatgctcacaaaactctgctcctgagagtgcagctcttttaagggcactaagcagttattgaatgtcaggtaaggggggaaggtaaagtacttcaggcagaggcagcagtgtcttcgaaggtc

SEQ ID NO: 15535 - DNA, 1093 bp, Artificial sequence
  DNA replication origin
aagacccactgtggctgtcagggctgggccctggaggtctttaaagttaaaggtgctgtcagagcaccccatctcaacaagggagggccgctcctgaagtccccgcccttccatcagaaagcctctcaggacagaaggcagagagggaagcggccgcaaagacccatgggtgccgagggttcccagcacggccaacagggccctgcacactcacaggacagtccttgtattggagacaaacagctgtgccggagaggggtcctgagacagcagctccggtggccacgtgaaggtctgaagccccaagcgtgcccagctccaggatggggtaagcagcgggggaggtagggccctggtggctggggggccgccaggagcagcgcccaggccagtgctgcctctgccgcccggccttgctgcccgagcgcacgctgtgtctggggacagtccggccgctgccccggcacctatacctgacactatcttcctgtggaattagccacctgaaaagtctcctgcccagggaagtgcaatgctgacactgtccattttctgaagaaatgaaaagaagagaaatgctgccagagagcatgtggcacaggcgtggtgagtgcattctgccagccaaattgggaacgtggcactgatgacggccccaacgacgcggaaccaggcctgccccacccggggatccaggaatgcggatgctggggcagagcacctcctgctccggggacgctgtgctggcggcggcaacagcgtgtgacacccagtgaggcatttcccccaccccgcccggcctctctcttctcccctgtaaaatggagggaaagaccagcacctgacaggccctctctgcaaagaacactagtgtgggagaagccacattcggtcacgtttctagggcttaaggtcaccccggaagagaaaggacctggcaggtcccaggatgggtgcggagggtgggatgaagggcacagtgtgggaaggagcgccggagacagggcagggacagccaggccgggaaggccttggctctgggctgagagtgtggcccctcgcgccagaggcagcagggacccctcaaaggtgc

SEQ ID NO: 15536 - DNA, 1741 bp, Artificial sequence
  DNA replication origin
gaacgtggcactgatgacggccccaacgacgcggaaccaggcctgccccacccggggatccaggaatgcggatgctggggcagagcacctcctgctccggggacgctgtgctggcggcggcaacagcgtgtgacacccagtgaggcatttcccccaccccgcccggcctctctcttctcccctgtaaaatggagggaaagaccagcacctgacaggccctctctgcaaagaacactagtgtgggagaagccacattcggtcacgtttctagggcttaaggtcaccccggaagagaaaggacctggcaggtcccaggatgggtgcggagggtgggatgaagggcacagtgtgggaaggagcgccggagacagggcagggacagccaggccgggaaggccttggctctgggctgagagtgtggcccctcgcgccagaggcagcagggacccctcaaaggtgcctgggctgggacacgcaggtccccgtgaaggccacgctgcaagttggtggggggaggaccatgaggaggccggtttggtccaacctagtactccctggaccagatgaccagctaagtccccgaggtcaaaggcttggatcacaaggtcaccactggatgaagagggcacattaggaggggctgctccaagagggccgcgcagctacctggagtcggatgccacgtgggggagcacccagcaacagcaggtgggcggacggctggcactgcgggacccacaccgagtggtcgggtcacctggccacctggcatcttccagacaaagaaccctcgagccaaggtgcaggcagagacccagggaccatgggggaccctcccccatcagacacagagccactgtgggccctgcccagcccactacattgacaggcacagtaggaaacactcttgccacacggcaccgagccatggatcccactaggaagttactgccacatgagactgctctgtgtgcgcgaaggcccagtacacagcgacgcctctcaacagcgcctggtgagggcaaatggcccgagatcaggagaccccacttcagttctttaccaaggttctcctccctccatgggcactggaaggtagtgcctgggtaaccaaggctccaggtcacgtagcactgcccaggcccagtgaaaatggcaggaacagtacattccagtggggccaggccccacacgccaagtgcccgactcaggctctgcatctctcctctgccgctggcctacagaaggggtcttcaggggtgaagctgagcctccaatggattatatcatctgcctaagctcatacagatgctagggactggagggggcgggggaacccccctcaggctcccacacatggggccggggaacctcaacaatccatcacacgccagccccgctgctctgtgcgccatgctttggccatgggctggttcacgtccaaggcttggacaagatgacagcaaatgtccccttcagctataagcctttatggtttgaattagggacagatgggaaatccagctgccacccttatatactgctgtttgtagctttgattataacagatggccagaaacaccccaaatgcccaagcatggaacaatcacgccaaggcctcaggtgaagacagggaatgctgctgctgcaacatgaacgcacactcagtggctcccaggtgagcactcaggagctgcaacgtgaacacacacactcaacggctcccaggtgagcgctcatg

SEQ ID NO: 15537 - DNA, 1509 bp, Artificial sequence
  DNA replication origin
ccaagcatttaaataatctctgctcgttcttttaacaataattcaaacctagcagaaaagtgaggacactatacatttcttttaaggacagtgtgtgttacctgctctgatccccatgtgttacactccctaacctgtacaccaatactccagctttttgttttcttattttttcctaaagccagcacaaaataacagaaggataagattcctaccacattctacctgtctgccaatgacacaggaaggatgagaccgtctggggaatggaagcgcagggcgctctcagtaatgctgggcagatgcagtggcttttccccagcagaaatgggcttcgattcagaatctaccagcccacaagaatcatctgaccccacaacaattagttcaatcactcatctggtaaaccctcctcgctccgggtcatagactggaaaagacagcccccaaaacagtaataaaaacgacaagccctgttttgctggagtcagctgaggtatcagatgggggtcagtggctaggtctgtgaacctgaagccacactccatcagtgacccgcactggagagacacaaacacctcaggctccttaggaggtcaagcggcccttcccagccctccctagcccccgccttctagaatcattctgaatagctaaccaggaggctgggccccgtgtggatccgcctccgctggaaaagccgctgctggaagtgctccaatccagagcaggatacctgggggaggaacgggttaagcgcaaaggggaaaggggcagcgggtgctgagacgcagaaggtgcggggacttctacagagcagggaatctgggcccggatgaactgatgccctggcctctttcctccagggacaaggtcggtctcaggaaatcaaggtatcttcaaagggacacaagggagcgcagtgccgatgagaccggggcagagccacagtctggcggtgcaggctgggggtccgaggcgggggacactggctagcagtgctgccagggtcgtgtgtgcactgggcagagggaaaggaggggaagaagggaaggggaagaaggggaagaagggagtgtgttcggttgggaggaccggtccagacagaggggagagggggccacttcgcgagtggtgtatcgctggttgaattctcataagttagagatagcaggcaggggttagaaggacaagacagggtcaggaccaggagttagaggcgccaggctcctctctgggtagagaaaccgaggaactgggggcggggaggactgatgggtgcgaaagcgggccgggtccaaatgaaggcgcgcgccccggggtgggggccggggtggggggaatgagggaggctgcagggctggggaccagggcaggtgcaatccggaaagaggaggcgggaaggaattggggggccctgaggagccagcgcaagccgggtgggggcacgtcccctcccccggagaaggtgcggggctggggctgcggcgcggacccgacctggaggcc

SEQ ID NO: 15538 - DNA, 1540 bp, Artificial sequence
  DNA replication origin
gcccccgtctcgccatggccccgcccccagccataatccagccccgcccccgccctcctcccgctacgcccccggccccggccccggccccggcccctccgcaccgagcgtccgccctctctcccctaaagcgctggcccgcaatccaccccatccctctctgcagccgcaggaggtggcccccgcctgtccccaccttctctccccgctcctctcgccactctgtcgcagaggggtccggctagccacgaggccccggcccccggcagcccagccccttggcaagcaccctcccgccccctccgcccctgcccgtggcgcggcgacatgggccccatccaggtgctgcagcccctcctccgctgcaggagaaaactctcctgttttcccctccctgccaccctccgaagacctcctacctggtcccggaccacgcccccgtccccaactcccccaacgccccgcgctctgcgggtcccctctccaacctggagagcggggcaggacgaagacccgacccggagcttcctggaggctgggcctccctctcaggcttggccctggccagggacactgatccgtctctccccacgtgtagaagggccacaatccctagggcaggactgctgggaaaccccatcaagacaaggtctggggaggcggctttaacagacagatgtgatgggctgaggccaaccctgttaacgtcgcagccctgcacccttgccagggtttaagttgctttggaggaattacttcatttctcagaaccttggcgtcctcatctgtaaaatagaaatcgtaagatccatctcacctgttgctaaaggaatttagaagtgaagtgcagagcagagcctccaagagcatcggaaatgggaaaatctgaccatatcaagtgttgacaaggaaatggagcaactggaactgccagacactgttggtggacatgcaaagtggtacaactttcaaaatctttttgaaaggccttgattacccagcaattctgctcctagatacacacctaacattgtgtttctgttgatagcagcagtgtttataattgccccaaactggaaactactgaaatgctcatcagccgttaaatggatacataaattgtgatatattcacacagtggaatgacagcaatgacagtgaataatcaactacacacaacaacatggatgactctcacaaatgatgttgaggaaaagaagccagaggataaaaagccatatttgtttccatgtggataaagtggtagaaggtgtatatgggggtagcagtcaggatagtggttacccttggagggaggggtgccagagccaggaagcagggcacagaggacgtgtctgggggctggctgtgttctgtgtcttggtctgagtgctggttacagtgtgctcagtttatgatgacttttccagctgtgcagtcaagatgcatgtgcctgtggggcacggtgattcacgcctgtaattctaacactttggaaggccaaagcgggtggattgcttgagcccaggagtttgagacc

SEQ ID NO: 15539 - DNA, 1042 bp, Artificial sequence
  DNA replication origin
cggcctcggtcctgagcccgaccggccttcggcattgaccccagcagcgccccgtggtgtggctgctgctacgcgaccccccgggggatgcggaggccctggggctgctgagcaagctgccacgtggtgcctgccatgctggggtctgaggccccccacctgccgtggccccgacacacatagcacatcatgggacctgcggttcacagaggattgtactcccaggggctctgccgaccctacaaccaacccccaccacgaggggcggcaaggacaggatcagcccactttgtgaatgaagaagctgaggcccagggacgtgaagggcacacgggggctggactcctggccaggaggtaaggggcgggcagggtctctgcagacggaaaagatggaaaggcgttcccggctgaaggagcagcgctgcggaaacagcaaggcctggagaccctctaaggctgccagccccctcgagggctgcagccacagaaggcgggggtgggggtggcgggggcaaggacccagagagggcctggggtcaaaggtcatccatactctggcctcttcgcacacactgttccttcagtcagatgccgcccggccttgcccagctcccatgccctccaatctaaactaaaacgcagcgcccctcccaaatgctttctcagccatccctattccagagcaggaacaaagacgctgggaccagctcaagacacagacgtctggacagccttactggagacggtggggacttggaggccagggagggcgaggggccggggggacaaggaggggcggaggaggggaagctttggtccagcctggcagcctgaggtccagtcctactctgcctaccccgccgttaggcgagtccagccctgcaggagtgccctaagcactaaagagatttccccagcttgccagctttcaccccggagctcagcagatggctgtgactgcctatggtggggtctccggcagcttgcttcccgcaaagctccttccagggctcagggcttccttcggggtttcctgctac

SEQ ID NO: 15540 - DNA, 705 bp, Artificial sequence
  DNA replication origin
actgatctctagtaaggggggcacagagcagggaagggtgtgccgggagggctgaagtgtgcccctgggcatcggggcgactgtgccagcacccgcctctaggtttacagcccttcctgagaactagaaaaatcccctcctctgagcagatgccatccttggactcatgggcttggcacctggtttggccccacagaagagactcctacccagttctcttttctagcccagaagaatggcatttctggaccatctggaacatctggatcatctcccctgctgatgcacaaacagccaggcctccggagaaggggggtgggacagggtgttgcaggcagagggaacggcccctgcaaaggatcatcagggagactgagcaggtcaggatggctgccggaacaagcagcgtctcagtggacctgtggagggcaggggatgagcaggtgaaggaggagatgggtggagagcgtgtacctggggcaggcctggaggcgggagggaggggctggagccagagaaaggggcggctggtggagggaggtgaggctggaggggctgggcctggtactttggatgaagccaggtcactgcaaagatgaaatgtgatagcactgggcaaaggaagcaaagcccatcaccatgagaccagctcccaatccttccctggaattcatttaggaaaagatctagagaagtcaaggtggg

SEQ ID NO: 15541 - DNA, 651 bp, Artificial sequence
  DNA replication origin
atctcccctgctgatgcacaaacagccaggcctccggagaaggggggtgggacagggtgttgcaggcagagggaacggcccctgcaaaggatcatcagggagactgagcaggtcaggatggctgccggaacaagcagcgtctcagtggacctgtggagggcaggggatgagcaggtgaaggaggagatgggtggagagcgtgtacctggggcaggcctggaggcgggagggaggggctggagccagagaaaggggcggctggtggagggaggtgaggctggaggggctgggcctggtactttggatgaagccaggtcactgcaaagatgaaatgtgatagcactgggcaaaggaagcaaagcccatcaccatgagaccagctcccaatccttccctggaattcatttaggaaaagatctagagaagtcaaggtggggcccggaggggatgggatcagggtccgtgggaagcaagttcatgtctttgcaccgaggatggacaggagtgtggagtgtgggagggaagaggaggaggaagcagccgaggggagctggaggggaggggtgagaggaggggctggaggaaagcctggggttgtgtgcagggacccacagaggactcaggtgagtgagaccgcaggcaggccgtgaa

SEQ ID NO: 15542 - DNA, 1043 bp, Artificial sequence
  DNA replication origin
tcactcctgatacacgttgagccctggccctacccacagtctcaaccaggggcctttattgggcagtgccagtgctcaaccagtccttgagttgggattgcagctccatgacctcctggccccagctccaacacctgaggatgtcagagctgcgtcccctgcctgtgagctgccccgtctctggaccgcgaacctgcaggtcagtaggagtcctcagggctggcccccgtgctccgcacggagctgggtaccaggtactgggtggagagctgcatcacgtccgctccccccgggcacccagcaggaggctggaacaagggactggagctgagggcggcgatttctctccagaatatttcccgtgctcctactgtttaccaggatctgaaagactcacaggcccgtgggttcccctctctcccaggctgcggtctgcagaggaggtgccagctgtgtggggtgctgggcattcgagcagtctcgggtggccggaggtgtcagccgggcagagtggacaagagccatacagacagaagtgcgggggcccctgggagaccccaacagtccacgggaggttggggcatccaggtggcagcaggagggtgtggaggacccaaggcctggaggacagagaggggatggcagcaggctctgggagagcagtggggctgggacagagagggacgaggggatgtgcatttgccggggtcttggcctctggttgtgaagcctgtggtcgggtggggctgggggtaagggcctgagctgagccccagggctctggctaggaggctgggaaagcggtggaggtgcttgtgcacacgggtgtgcatacacacacacacacacacactgtgtttgcaccattggctcctgggcagatgcttttccccactaccatcgtaacttccgttcccctccaccctgccaggacatcttttcccagacttcccacccccatgcccttgccccactttctccccatctaaatcttcccaaactgccagccctcctcctccaggaagtccttcctgtctactcct

SEQ ID NO: 15543 - DNA, 1096 bp, Artificial sequence
  DNA replication origin
caggggcaaagcccaggctcagaggtgacctggaatcagcgaatcaggggccgagctggactaggcaggagggtgtgtggttgcagcaggtgagctcatctgtaaaacgggggtgcgacacccctggccctgccagcctgtccaggtctgcgcggcacttggcgctcccagcaccacaccctccaggagaggcccagctgggagtcatctggaagaagtccctcctggcccaggtgggcaaagagaggaccaggagggaatgacgtcgagcacctcttcctcattggagccctcctgggtgaccccgtcctgtgcccaacacgtgactgttctccctggggctggccacgtgggggtaggatctgagcacccctgcagctgagccacgagagcacaggactccccagggctctgcagggggcctggcctcagctccagctgagttctggagaggtgctgcaggggagagttaggtagacacacctggaggcccagaactagccgagggatggtgaaggggtcatccgtgctgagtccttgagggctcagtgaggccgaggaaaggtggggcagggtccagtctggagggtgaggctgggccttgtggcctgtcctggggtgggggtggggaggaatcagtttcaagaggcagccccaggaagagtaggggcagaggagggggtgggacttgacaagcggaaggccctggctggggctgggcacaggctgctgggccagtggggcgggggccaggagtcatggagcaggtggtccgaggagatggggtgagggaccatccagggggagggaatggcaggggacaggactgggagcaggagagtgtggtctcatgggcggagccacttccccaggcctgtcctggccctccagccgcagcccctcccctcggcccctctatctcctcccacctttcctactcacccctccactccctcctgcacctgggcccgcccctccacagccagagacgttctgcagacgctgagcttgactgccccctctccctggcccacagctttctggtggggggtcaggatgtagggggtggccttgaccctggagtcaggcagggctg

SEQ ID NO: 15544 - DNA, 1823 bp, Artificial sequence
  DNA replication origin
caggccaggggctgtttgaaggcagggctcattgttccccaggggtgggatggggccacgcactggtcagagggagtggcggggcacagcctgtttacagcaggggccaccaggaggggaaggggtaagtgtcctcccttctccagcaggtgggggaggggcgctgtgcagaagaaacggcccacgagcctccccaccctgctggccccaaagacttctcctttctcctgaaaaagccagaaatgcccttatttggagggtcagcccagctgtagggtgggggtagggccgttaacccttcatttataaatagagggataaatcactgccgagttaaacacgccagggcaggaacataaacagagtgggtggctccggcacagcccctcgcccgccccccaccctggcccccctgcccaggccagacgggagctcggtgtttatttgactcacactctggctccaggcttcagccccaaccagccaccccacaggggcctctgtctccttttctgtagtttggggggatcataggggtgcccgcctctcagggccagtaggagcctggggtgcccagtgagactggtccttggctcccatgcagccccactggacagcctaattccctttgtaaaggtccctcatgaggacccccatccagggcattgacctgatgctggcctaggaggaggggagaacagatgggtggtcccggaggatgggggccatgacggtgggtgtggggacaggggagtgggcagggcagtcagaggtccccaccatgaacaaggctctgtcccagcagaactgggtcatcagccaccaactctgctggcgctgccgtgctgacccgcttgcttagtcaccccagcagcaacgcgatcccagtgacatggattaggaagcaggtagagaggttaagtggcctacccgagcaagcacactagtcagtggcacagctggggctggagccaggccctggaactgcacactggagccccgtggtcttgcccttatcagctctccatcccgaggacagccctgcaccgcacgtgtttccgcctccccctcgtgccaggacggtcgcagaaacctccgtattttgtcgagtctccacgctggcaagtgccagtcctggaatttgaacacgcgtctgactctgaaagcctgtgccttttctgctgctgtccgaggctccctctgggtagagccaagggagcaggcatttgaggccccagccaggcgagggcatggagaagggggatgctgggcgtgcaggggcagacgggccagctgagttctgggcctcagggcagggcttaaggccaggctggcgcctggggtgacctggtctccttgcttccaggcctggggtgtgctggctgccgtcatgccctctgtgtctccagcggggccctcggccggggcagtccccaatgccaccgcagtgacaacagtgcggaccaatgccagcgggctggaggtgcccctgttccacctgtttgcccggctggacgaggagctgcatggcaccttcccaggcctgtggctggcgctgatggcggtgcacggagccatcttcctggcagggctggtgctcaacgggctggcgctgtacgtcttctgctgccgcacccgggccaagacaccctcagtcatctacaccatcaacctggtggtgaccgatctactggtagggctgtccctgcccacgcgcttcgctgtgtactacggcgccaggggctgcctgcgctgtgccttcccgcacgtcctcggttacttcctcaacatgcactgctccatcctcttcctcacctgcatct

SEQ ID NO: 15545 - DNA, 907 bp, Artificial sequence
  DNA replication origin
ccaggaaagagggaggagacaggaccatctcccccacacccaggtttggcttagggaaactaggcttggggacagggccctgcctcccctctccggccggctctgagggtaaaaccatgcctctcccctcagtccaggctaccagggcgaggcagagctgtggaaggcacgagtgaccccattcagcagatgaggacggccagcctactgaccaggcccaggtctcagctgagggagtggcagggctggactcaaacccgggtctctgtgctggtgactgctcatcacccgggccctccggagagcagagtctgtgcctctcccacaggcagagccaggctgtcccaggaggggcggaaccttctcctttccccaggcactcgccagggagccacttccatgggcccctgcagggtctagagtccccgcttgcattcctcctccttctgaacaaagagggtggtgagtgggagccccagagaggccccgtaataatcgaatcgggacatccgtcgctgtgggaggcaggtgggggttgacaatatggagacagagacagccagacgaagctgggagaggagggcagagacagggacagaaggtccgggctgagggcccaggtcgtggctgggatcagggctcagagcgccacaggaatcaacgcccattgtgctattaggattggggtcagtgtgtgaccagggtcagggctcagagtgggacagggatcgaggttcatcacattactgggatcatggctcagtgtgtgaccaagatgagggttcagctttgtttgagatcagggtcagacccttagtgcggggaatcagagcatgctttgctagctccctctcctctccggtctggcctctggggtgtccagcacattctgcccatccccccagct

SEQ ID NO: 15546 - DNA, 1302 bp, Artificial sequence
  DNA replication origin
gagagggaggctggggccagcccacaggggaacttaccgcgcttcacccgggcaggctggagatgggagtcctcagctctcagctctgcatgcagcccggacctcgccttcctacggcctgacgtcaggccagcgcttggggctccttttgggcaaaggcagggtgggggcggggcaggctccttccccgcccccaggaggagtcaaggctcagagcctgagggacggtgcctggggcaccagagtccccacacccactggagacagaagaagaaaccgaggcacagaggggcctggggcaccagagtccccacacccactggagacagagggggaaactgaggcaccgaggagctgagcctcagctgcaccatccaggaggtggtggctggcacttgtgtgtgccgtgtgcagggcaggaggtgggaaactgaggcacggaggggctaagcctcagctgcaccatccaggagacagtggctggcacttgtgtgtgctgtgtgcggggcaggagggggaaactgaggcacggaggggctgagtctcagctgcaccatccaggagatggtggctggcacttgtgcgtgctgtgtgcggggcaggaggggaaaactgaggcacagaggggctgagtctcagctgcaccatccaggagacggtggctggcacttgtgtgtgctgtgtggggggcaggagggggaaactgaggcacggaggggctgagtctcagctgcaccatccaggagatggtggctggcacttgtgcgtgctgtgtgcgggacaggaggtgggagcacacgaaagcccaatttccttcccgggagggggcatgtgcatggtagcttcagcccacgcaagcctgggttcctgcatggctctctgttttgcatgtgtcctgggtttggctgtgtctgtgtgtacccatgaccgacagcctgcacacctggcatctgggcctctgtttgcacccatgcaccggtggcatgtggcatgtggggtcaggtgtgtgggaaagacctggacgtgacccaggccagcaggtggggagagcgtgtgggacccggacctcagtgctggaggaagcgtgagctcatcaacaggcttgatcccagagggctgctggagggccactctccccagacagcttcagagccaggaggccttgtggccagcctggggtggcagcgggggttgtcggggagcggttggggccatttagttagtgtctcctctgccgagagcaccatctcctcttgttcccatcccgtgtgcttctgctgatactcacactttaaccttcca

SEQ ID NO: 15547 - DNA, 1994 bp, Artificial sequence
  DNA replication origin
gtggctgggatagaaacctctctgagattttgggcaggagaggaggaaaatagcatgaaacaggcagggggtgttggtgctgctcaggctagatgaagccaaacatttatttattaatgctttttttttttttatcttttttgagacaggctctcgctctttcacttaggctggggtgctggcgggatcagggcttactctagccttgtcctcttaggctcaggtgatcctcccacctcaatctccaagctgggactataggagcatgccaccatgactggctaattttttattttttgtagagatagggtcccactatgttacctaggctggtcttgaattcctaggctcaagtgatcctcccgcctcagcctcccaaattgctgggattatagtgtgagtcactgtgcccggccttaagctaaacatttaaaaaataagaattaaaatgcagccacagtgaaacgggaaggggctgcttttacaggtgctgaacttcccggcaatagaagcatttaatgggaggttccctttttcctaggacctcaaagctggagtaccagggatgttgccttgaccttcccatgtgtggatttctgcttgaacacaccaagtacaggacaccctgtttagcagctaaacgtgggaattgcaccagctttactcccaacttgctgggcaatcttcgggagttgctgaccttctctgtgtctcatcagcaaaacagggagaacactagctctcccaacatgggctgtgtgaggaccaaatgagctgaggagcccagatttgaacccgggtctgcaaggttatgtcctctgagccatccccacccctgcccttaaggaccaggggcctctggacaccatcagcttgcccacctgtccaggatttgcacgcacctgctcggtgccagatgctgggcactggggacaaaccaggtgaggtgtggaccgtgacctgtgttgtcactgattgggggactttctggcagagtggagagtgcagtgggctgagagacaggatggccagtggagactgagctctcagaggcggcggcagctgatggggaccatgcaatgggaaggatggaggccctgggatagtctgcggtgaacttccaggcagaaggaacagcaggtgcaaaggcctttagctgggaaggaaactctgggttggaggaatagcttgcaggcgctctgagagaggctggcagccaggtggcagggaggcagcccagtcaggtggtcttgggacagtttagggtctctggccttcaccagtgaggtggtgtctggagacttttgcagacgaaggcagctctcactcccatcttcccggggtccctctggctgctgagggtggatgggtggaaaagcatctttcagggaagtggaggcagggctggagcagttgaacatctgactgggccaagggtccagggactggcatggaacagggctgggtgggtgaggccgcctgggagaccccagcttgcctctgtttccccctgtactggggcctcctgcgtgaaccagcactggtttttccagtaactggagccacaagcctccctaggaacggctgacccataagaggacgtcctcaaggtccccaagggctagaggctgagatgccgccttcgcctgggcgggcctcgcagcctggaggcaggcggtggtgcagctcgggcaggccccgtccacacgcctccccgctcttctgagcaccacgcgtcccgtgggctccctacccgtcctgataacacggcggtccgggggcctcgaagccggtctgaccccaagtacccgggccaggcggctgccgtcttgtcgccccagcccatcccctcagccagcccgcctggcggcacgggacctagccccagtcgacttagggggaaactgagaactccagaagtttcgtgaactccctggcttcgtccgcatcccgccctctgcctcttcgctcgggcttcaaaactgcccctccga

SEQ ID NO: 15548 - DNA, 1119 bp, Artificial sequence
  DNA replication origin
aggagccaaggtcagtccccgaggccgcccgcgcgaccggagccgcctcctcccagcccaggggcggcctcgggggcggcgggcgcgcggccgcggcgtggggagcgctcccattgggccgtgcccccacgtgacccagcgggtccggcgcgcgccctaagccggtggagccgcggccgcgcctgtgcgcgagggcgcgcgcgtcccgagccctccacccgtcgtgccggcgccgcccggaccgccaggtcagtctcctccgcgcccgctcggggcgggggcgcgcggcgctttgtggaggcgcgtggggggccgtccgcgcgcgagcccgccgcccgctccgggcacggcttcggggccgcgcagccgggagggccgccgccttccccctgcccgcgcgtcccgggaccctgcgcctggcggccgatccggcgggaacgtgggcctggaggctgccacgtgccggggccgagcctcaggaggccgctgtttccccaggcgagccacagaacacccctggctggaagggggtgacccgctcccgtttctgggtgcgcgggagacctcctaccctgagttcatcctgcgcagggtcccgcccaggatctggctctgcccccattcacggctcattttcctcagctgcacagtttggggggctggaaccccacagccttccgtgcctccagggcgggtcgtagatgtcagtggaggtcaggggaaagcagagcgtcaggtctcaggccgggtggagtccgcctcagaccataccagtgttgggactcgggcggcgcctcagccctccaagcacaccccggtagaatcaggtcagcagccttgatccacgtgcctcagggattaaacgggtgactcctgacacgcccctgggcagctggtggcccaggggtggggtggtggcatgcttagctccaagtgggcagagcagtttcaccctgccggttcccggagggaagccctttatgagggaggcttccctggccctctgtgatagcggctccaagggcagcgtgaggtccaggctagctggtcacagtgtgtgcccgggcaccctcagccaagacagaaaggcacgtgctgcaccccctctctctgcctgcg

SEQ ID NO: 15549 - DNA, 2193 bp, Artificial sequence
  DNA replication origin
tgtcagtggaggtcaggggaaagcagagcgtcaggtctcaggccgggtggagtccgcctcagaccataccagtgttgggactcgggcggcgcctcagccctccaagcacaccccggtagaatcaggtcagcagccttgatccacgtgcctcagggattaaacgggtgactcctgacacgcccctgggcagctggtggcccaggggtggggtggtggcatgcttagctccaagtgggcagagcagtttcaccctgccggttcccggagggaagccctttatgagggaggcttccctggccctctgtgatagcggctccaagggcagcgtgaggtccaggctagctggtcacagtgtgtgcccgggcaccctcagccaagacagaaaggcacgtgctgcaccccctctctctgcctgcgggctctggggtgtgccccgcacacgatggtgggtgttgggcatccacctagtctgtggaccctgggggccctgctcccaggttggagcagtgtcctcggctgcagaccagaggaggtcactgaacacagggtgcctgtggccttgcacagacagaagccgcctggcagccctgtgcagagccgtgcttcactgagttcctgcaatcctcccaagaagttcgttaaccccatttctcagatgaggagactgaggcccacaaaggtggagttggtgcagcccctagcctgcggggctaagcagagccttgttgtccccatctgcaaagggggcgttggagctgctgtaaatgggccccgaacctgtcacctgagtggaattaggcattggggatctccccatcaccacgccggcccccctcactgtggttacgaaggaggagaagctgccctgtgtaggaattcctgggctgtttccaaatagccccgctagggagctggtcacccctcaacacccccaacgtgttctccaagcacttactctgtgccaggcccaatgctggacctggagatggggcatggctggctggctgagcggggcaggttgcggacaggcccccgcaggcagtcggcgtgatgggagaaaatgcaggcggggatgagatgcagcctccaggtggtttcctcagctgcctgctcctctctgcctttgccctcctcccggaagcttgcgctgaccactggagtaaggctgggggcctcagctggtcccctctctgtcccaagtaacagcccagaacatggtgagggtggctggctgatgcagtcaggcactggacatgggaggcaggaggaaggccgggaggtgggcagctttctcagacaagtgggcagtttggatggcgaggaggtcttggaggcaccatgggtggctgggctcaaagatgacatgagggcatgcttaacagatgcttaaccaaatcctgaattggcattggccaatttctgtggtgtaactactcccaagctacacagacgtgactttactggctgaggacttgggcagaggtgcacacagtcagactgagaggggggcataagctggtgtgagccctccctctcaccgccagggtgggcagagtgtccgctggtgcccaatgcctatgcacgtgacctccttagggacttacatccagatggcggtgatacagcttggggaggcctctccctggttggcaggtcctggcgaaagggtgagttaagtggaaagtgtaccaggctggtgtccaggtggcatttggccagaggggctgagctgggagctcctgggcctggggctggcagatagtggtgatttttcgccccccaagaccttgggcttgccttgttccatgaaggtcccaaatctgaccaaaggctgtaaccagatggtcactgtcccagaccaccccagggcgctttctcacctcgagagcaccgtttctccccacctccaccctggccgcccttgctgtcacctactccctctggtccctggcacccctccctgcctgcagtggtgtttcctagcaagtgcagcagcccgaggctgggctagaggcaggagggcctggcctcccagtgtcttgctggatacttggtttcttgcccctccgtttccacacctgtaaaatgggagcaatgacaggtcttcctggcaggacagtggtgaagcttggtcacacgggtgaacatgtgtgaggtaaaaaagacttcccatccctccttctgacctggacc

SEQ ID NO: 15550 - DNA, 1117 bp, Artificial sequence
  DNA replication origin
gggatgcttgccaggcccgaaaccccaagacactctcagggagggctttactcaagacgatcatgagtaggcaccttctaaagggatgagaaagcggaagcaggggggaggggtggggggaaagtgaggaaaaaggggagcaggaggtatgggggaggggaagaggggtagccagaggcggaagggccaatcctcagcctccccatgtgggcgggggcagggctgcctgcccccactccacccagctcccgaaggcaggaggccgggacaggcgcgaggccgccaagaacacagggcgcaaggccccacggaggtcaaagatccccctagggccaggtagtccctgctggcagtgtctgtgggaaaggccctgggcctagccagctacactcaggcctgtcagtgggcactggggctgccacaaatgccggggcagctggacccatcctgtggagtggaaacccaggcccctgagcccactccaggagggtccagacctacagggttatctgggggagccctccctgagcagggcgccagagggctggaggaggtggtggagagaggggttctgcagggccacaagtaccccgactggtcccatccatgccttcagcccctgccagctgtgcctgcccacctctcccttcacctgctccacccacaccttgcagcctcagacccgtcacccagggcggcctccaatgtttctagaggctgcaccctctgctggcacccctctccccaactcccttctcctggacaccccagctgctgcccaggtctcctcctccagccccgacccagggtggcttgtgtgatatcaggggaggtgtgggatcccgggagctggaggaatggccctggcatcacggggcccccctgggctgaagctggagtggcctcgtccatgccttgagactgtgagcttcatgggactgggccctgctggggccacagcgggggaggggtaggtgactgtgtggatggacagatggatgcgctcggtaaatggttctgtccatgctccggcccacgtgctccagtgccttggagccccgctccacctgctgttctctgagctccctgcccccgcatgctatcctgggactccaca

SEQ ID NO: 15551 - DNA, 1775 bp, Artificial sequence
  DNA replication origin
tccactcatagcactgcacgtgctttttgggagggagctggctcagagaggaaaggccatcagcactggtccccccagtaggatctaggcaccatggggaacctgcgggcccctccagcccctccaccatgtgtcctgggggtagccctatccccctgggcctcagtggcgccgtgtgcactggctctgggggtgccaggctgcgtctcaccatcgggccagcccagaaatagctgtgaccttccgcagccagcttggcagcgcttggggccaagaggcctacgtgcatgccggctgagtcccctcaccgtgcagggctggctattttggacgtggcctcccgaggccaggtcagagctctttcccgcggttcctcaggcccctctgacgtgcgtccactagagcctcggccagtggccctggctagctccatgatctcgatcccccttcctgtccccgaccccacgggccctgggtggcacagaggaagggatcccagggactgagcacagggtgaccgcgcctgctggggctgacatggagtgtagggcttggctgttttaagaagaaaatgcagagaaagtgcccaccctgggtaggccctgaatcctgtctcagcctctcagagctctcgctgactgcacagcctgagcctcggtttactcatccacaaaatggggtgatgggcgccttccaggactgctctgaggatggacatgggcattgcctgtgctgagggcaccacgcgaggccactacacagaggggttcttgggccttctccgccttccatgggactggacactgggttcagggaggggcgtcatgggtatatgggggtgctgcgctgggcagtggctaagcgtgggctcttccttttctgtgacacagcagaggtgtacatgcctgctgccctgtccagggcgtctgggtatggtggaagtggccccaaggtccagccaccctcagggaccacaagcttcctggacaccctgctgacagggtcccactgtggaggaacaggccggcccagctccccacctcccaagtgagcatgggtggctgggtgggcgtgagggattggctcccctgctagagggcagaactcctgttcccgtgaaggtgctgggtggggtgtgagtctgctcctgggtttggggtcaggcatgccaggaacagcaagcaggggctgcctgcctgcctagtgctggctgcatgctcatggccctcagggccctgtcccctggatggtccaggggtcccgaggaggagccatggcctcttctccgtggagaggccctgtgggcccaaggcctggctccatccaggcaggcacatggaattcagccaaactctggatcctttctgcagagcaggcttagcttgagccctcccacagcgagctcgcccactgcccaccctgccctctcagcctctgtgacaactctgtgggcactgccaggggcagttcctgtgtattctcatctggtgatgggttcataattctcatgttgtgtgggtgactaacaaggtctgggagctcaggagaggggcccagaggcacacagcatgcacgggacggttttgcagttcccagggggcacctggggtggaggcttagccaggcccagtgggctcagggctggcctcatgcccttcccctgttgtggaccactttggggcctctggctgatgctggtgggtgaggaccttcctgggcagcctcctccggccagcaggagggaccatcaggccatgcggacccttggagagctt

SEQ ID NO: 15552 - DNA, 2420 bp, Artificial sequence
  DNA replication origin
tggcctcatgcccttcccctgttgtggaccactttggggcctctggctgatgctggtgggtgaggaccttcctgggcagcctcctccggccagcaggagggaccatcaggccatgcggacccttggagagcttgggggtcggttcctgccctggagtcagctgtgtctgctgagggtccactggtgtgtggcacagaaggggtaggggctgtgcctggtgtgccagggaggccctgaactctccgggaggccagatcaggggcctcctctgggcctgctgggggcctctgcattcttggcagggcctcagggactggggcggggagaggctccttctcagaggctgtgagctccgaatgaaactccatgccctccgggacaccatgcccacttctgggtactggccttcaggggccttggatgtgggtggcatggcactggctaaatggggcccaggaggaaggcagcaggaccgtgggcatgcaggcctaatgccagggccagggcaggcttcatgtgggcttcctcctgtctggaatcctggagccgcacaatttccgacccaacaccccgtactccagagcgactggctcttaacggaagctgctgctggcaggtgtgttataacagagctctggggtgggaggctgggggcagggagggttagggccgtcagaacacggctccctcctgcccagggcaaggtggggccacgtgtgcgcatgtgagtggggcacctggtctgggtgtggcctgggaacctgcatgttacagacgccatggctttggaaacactcaggagtccagctgtgtctgttccaagatgggtcagggttgccgcagggagggcagtgactggtccacagctggtgtggctgtgccatcctccttccagcctgggcagaggccttccaggcaagatgaaagatgcggtatggacaggaggacatggaggattcagggctcttggtgtaaagatgctgtgtggacaggaggacatggaggattcgggctcacggtgtccctggaggctctggtgggcgtcgtggggctggactgctgcggggcaatggggtccccatcttcccggcacaggcatctgatctggtcatctgtttctgtggcgtgtgtgtgtgtgtgtgtgtgtgcacgtgagcacacatctctgtgtatgcaggtcagtgtgtgtgcttgccagagcttcccattgggcggtttccacactggcttctcagtcatcctgggaggtaaggcatgagcactggactgggagtcctgtctgagccaccgacttggcctgccattgtggagctgtcctgtccactcgctggacattaggccatttgtgtacaataatcccctgagatttgtatcctcccatggggagatcaaaaggggccgagtgtggccctagggtctgggggcccagcctggtgggtagacctggcttctgggactgtagtggtggaaggtggctggggcaggggaggttcactcactgggaggctggaagaggtggcccggtagggagagagaagggcagccagacagagggcacgtgggagcagcagcctggtggcaggtgtgtgagtctctgcacctggccggggtcttgaggagcaggagaggttcgggcaggtggctgaggagaatgcgggcactgagcttgggaagagccctggactggggggggggtagggactgttgggcagccccagactggcacaggtggatcgggtgcctaggcagggggtggtgagttatggcgcagctgtcttggtggctggggggagcagggataagggtggacttcttagtgaccgctctctgccccaggaggtagagtcctgggggctgggctggcctgagagacgccccctcatcctttccagggtgaggtacgagggctccgccccctcctgatatcaccaggcctagggcagcatcctgatgggggaggggcaagtgacccgggccctggactgcaggaacagcccctcctccactggtggagttcccacttcctgcggaaggaactatgttagaagttgtgtatatggggtgggggttgggtgtgggtggcggggggcctgggtggggtccactgagtcgcctcccctgtctccctgcacttcctcctggaggaaatggggacaacaggatgaagtgagggcctgctgagcccagggctgccacctgggagtgaagccggggcaggctgcagggtccgggcccttctgtgtgggcaggtggaagtggtggggatgcagtgaggctccctccagcgcggcaaggaacgggccctgggaccctcttcccagcctgcagcaggcagtggggagacaggccggagccctggacagcccccagtctttccccaccccaactacagggcctgggtctccgtgcgccatccccct

SEQ ID NO: 15553 - DNA, 1766 bp, Artificial sequence
  DNA replication origin
cccacctgccaggctcacccgcgccgcaggcgtcccaccgcctccatacgcgccggcctggcggtgcccacggtgctggccctgggtcggggcgccgcccctccgccgcggagccggctccaggcgctgccgccaccgccgcctgcggctatttatagcgcccgggcgtcacgtggggggcgtgaccggcgggcgacccggctgccgggggctcccacacctgccgcctaaatatagccgcgccctgcccgggaaacaaaggggccgcgcagggcgggcgcggggaagaggaagcccagccaggaaagggaagtgcggggcgcggcgagggccgggggcgctgccgcccgggacccctccttcctcccgccggccggcccggcgccctctcccggtgcgcgccctccctagaacctcggagctccccctggccccctcatggggctgcacgggcctgtgggctgggggtccggagggcaggagccgccgggccgcgctcctggtggggaggcctggacagagcgcgcccagctttggaaatggaaatgcggccccgccgtgcaggtgctgtcctgcaccctgaggaggagggcgcccgagtccctccagttcagaccccctgcccagcccaccagccccaccgcccgggcactcctccatgaatttactcagcacccaccgtgccagacactgctgtcccctcacttaatcctcacgaccccgctgtggctggctacgctggtctctcctagcgtactggtgaggaaactgaggcactgcaacgaggaacaccctgaggtaacaccggcaggcaggattcagccaggcggcgggctccacaaactctgaggctcggcactgatgccccctcttccaggaagccctcccagaccctctcaagcaaacgcctccctgcgactcctggctctgcctcctgggagcattgtgccgggaactcatgtgctccccagactatgaaccccagggatgcagctggcatcaccacccactctgtgcccgccctggccacccagggccctcagagcagggtggagcggcaagggtggtacccccagcacagggtccctggaggtgtggccctgcttgcagctctcaaacaacctggtccctgcaatctgaggtcatcaaggggcccagctgagagcacgaccccccctccccctgccaggctctccccacccacacttccagaaaacatcaccatcagcctggcccagctgtgccggcaaccctcgcctcctcccacctccaggtgggcaagcaggctggggagcagaggacaggagggctgtgcccagtctgaagggccccatgggagcctccacccaagggcacaccaagccaggtagccctgcctgccagctcatggacccccaagggtgtgagctccctggcaagggcacccacccacgtgggtgcacccagctccacagggagacgctaggctctgactcctgcccagtgctctcagctcaccacttccagcagcgtctccctgaaggttgaaggcaagaatgggtcagcttcagggactctgccccaccaatctccaacctcagccactttctaaggataccaggctagacactgcattccacaagcaagacacacacctgccacactgcactgacaaaccataacagcacagagaagctgagcaacccttctgagtcacacagccagaaggcagaaaaaccacatttggagctgggtcttgctgcccccgagaccctgcttatccccac

SEQ ID NO: 15554 - DNA, 1465 bp, Artificial sequence
  DNA replication origin
cccgcacttccctttcctggctgggcttcctcttccccgcgcccgccctgcgcggcccctttgtttcccgggcagggcgcggctatatttaggcggcaggtgtgggagcccccggcagccgggtcgcccgccggtcacgccccccacgtgacgcccgggcgctataaatagccgcaggcggcggtggcggcagcgcctggagccggctccgcggcggaggggcggcgccccgacccagggccagcaccgtgggcaccgccaggccggcgcgtatggaggcggtgggacgcctgcggcgcgggtgagcctggcaggtggggacgcggcggacccaggccttccgggaccccagccccgccggggaggaggtggcgccctccggagggctgggcgggagccccgctggcacccagggagggggccgcgccccttaccacgaccccacccgcgactggttccccgggactccccagagcgcccgcctcagccctgaccgcggcgcagcttacttctcctgagacccgctgagccccgggcctccagcctcctcccccaaaatcacagggggcgccctgtctgaagcgggggctggattcaaacttcttaagctgctgtgccatcgggaaggagggcggtagcctccctgaacctcgatttcctcttctgtgcagggcgctgcgtgttgttcctgcctcctagatttgagccagagagaacccagttaactggacgcctggtgtggccctggtggagaatgttctcccctctccctggcttgtttcctcatctcgcaaacagggacaaggatggactctcccttaaagggtcttgagaaatagctgagggctctgggcctgctggcccgaggaggctgagccagatcttgggaagggttctgcagggcttggtagcaggagggaaggaggtagcaggagggaaagaggggccacggctgccagtgggtccccgtgctgtgggccgcgggcctggtgggggtggtagcgactcaggacacatggaggcaggggcaacctgtccccatttcgcagatgggaagcctgaggctttggcttcagggagttctcagtgcccatccctggggatccttaacccttgctctcagggccctacctggtgacctcactgggggcgtgtggttatggaggggttttctcccttgggggacagccaccaggcagggcagagccacatagtggtgccagggcatcattgctttgctctcacctggggcaggggtaggggccctaggctgcagagacaagtgggatgtgtggcaagaccctggtccagcctctccctggacccctaaccccattctagcctgggctgtgacccctgagcgtagcccaggctaaccccctgattccggcagatgtgtggcatccttaggccttcagtggggggtagtgtggggtggttcggagcctcctccctcccagtagcc

SEQ ID NO: 15555 - DNA, 782 bp, Artificial sequence
  DNA replication origin
gaaagggagagaggcaggcgtggaggtgccttgggttgctgtggccccccctgccgcctcccctcttcagggccctgtcatggtgtgaacccactcctggccacctgtgctgtcaccaccttggcatgtgtgcctgatggctggcccattggcgtgttctgtccccgcctccctgagctcctggaggggcagagctggcctgtttatccccgagcctggctgagacctgtgtgagcagtggagacacagtggcggggggacactggtggacagggggctgctgacaggcaggagactttctgcagaaagcaagaggcgattagggtggcccacggccgcgtgtggggccaggcccctcacctccctgtgctggcagcactgaccgagtgcctgggccccattccctgaggatgggccacccagagacacctgggctcagatgttcacagtggctgagaatcggaagaggagagggcagctgtcctggggtggagtttccgcagatcacagcaggtgggcaggggccaggctcaggcttcttaggaactcggcctctgtccccacagagggatctgtcatctgtgtgctggggttcatcatgtcctcgggggtgtgtgtgtccctgaaatccctgtcccctctgtcctccgtcatgccctgctggctgtgtggtggctaccctgtcgcctctgggccctgggtcagtcctggcaggagccgtgcttccttgtgctcccatataaggaaatagacccaaaagggtcattctctcagcatggtca

SEQ ID NO: 15556 - DNA, 1365 bp, Artificial sequence
  DNA replication origin
gccgtggcctgggctggggccctcccgagccctttgctgtcccagatgttgctgggctctggatgaggcctcaggttagaccaggctggactaggggcttcagggcccagatctctgtgtgaggagggactgagcaagggtcagcgctgaccacaggagggagggaccactgtgccctggagaggcagcagagatacctgccgctggcaaccctggcagatgggacgagatgcgtttacagaagctttcttgggagtggagtctggagcgacctgcatggcctcctggaggagcctggcctctgcagaacgccctgctgtttgcaggcctggggccgtttgcagcgtctgcagttgtgtgcggggccgttgacagagcctctgactgtgccaggctgtgtgagaggctgcagctgtgtgcagggtcatttatggctgagtcctttcccctgtgacatgagataagccatcatggtcttgtcataatgaaacagatttgggcgtgagagggcattaagaactgtagagcagcaggaggcattgggcaccttgccatcagggagcctggaccctggacactgagccaggtgccctacagaagatggctgtccctctcgcagctgagacccctgagataacagcagcatctacagaaagattggcgagaacagcacggtgagtggccagggtgaggcctcagaatatgactgggatcagggttaagtctgtaaccaaggtcaggtctcagtgtgtgaccaaggttggggctcactgtttgaccaggatcagggctctgtgtgaccagggtcagggttcggtgtgtgtctgggatcagggctcaatgtgtgaccagggttgaggctcagtgtgtgtccaggatcagggctcagtatgtgaccaaggttgggactcagtgtgtgtccaggattagcgctcagtatgtgaccaaggttggggctcagtgtttgaccaggatcagggcttagtgtgtgaccagggccagggtttggtgtgtgtctgggatcagggctcagtatgtgaccagggtcgaagctcagtgtgtgtccaagatcagggttcagtgtgtgaccaggattgaggcttagtaggtgagcagggttagggagggctcatcctgtgaccagggttaacgcttagtgtctgaccaggatcagggctcagtgtgtgacccagatcaaggctcggtatgtgaccaggattagggctcaatgtgtgaccagggttgggggctcagcacgtgatcaggattagggctcagaggtgtgtgactatcaaggctcaggacgtgaccaggatcagggctcagtgtgtgaccaggatcaggaagggctcagcctgtgaccag

SEQ ID NO: 15557 - DNA, 929 bp, Artificial sequence
  DNA replication origin
tgtgaatgtgtgcctgtatgacccccatgcgtgtctgtgtgtgagcgtgcacatcccatggtccccagggagacctgagcacctgcaggccacgctctcgcacagacccacagggcgggccacgctctcgcagacccacagggcgggccacactctcacacagacccacagggccagctggcatggctgggaacaagcctgcctctgggaggaagagatggccccaccagccaagcctgtccgaggagtaccacaggtgtgtcacactcacgggcacacacatggtgggctgggcaggggcaggcttcaggtgccgcatccgttcctccagagttggccctgccatcccggccagactcccccaggaccccctgggcagtgggcagatggcagccctccccagggaggccaccaagtgacagggatggggcaggcgagctggcctagaagcctctaaggagggcggggaggggctgagctggagagctcggggttggggggaggggtggtgagcagctagactcagagtagtcctgagacactagcccactgtcagcgtccctgggggtggacacggtgtggtgtggggtttcaggttctagtttttcatggagggactgaactggctggctctgggggtccttccacccccgtcaggatggctgcgacagaaggagctctgtctgtggagggcgggcaggacggcgtggcgggtggcctcgctgtgtccctgtgtggctgcatggtcactcgggggctgctgtccccacccatcagaaacacctcaggcttccccgtttctgcagcaaggcccagcttgtgctgatcgacgcagcctcagagcgacggaaccacacagccaatgccgccacccttcgtgggcagccggatctcccctcccccagcgctcacagcccaccccaccaccg

SEQ ID NO: 15558 - DNA, 1454 bp, Artificial sequence
  DNA replication origin
tggcggggacagggtgagcacacagtccagtccccgctgtaaggaccaggtggcggggacagggtgagcgcacagtccgggtccccgctgtaaggaccaggtggcggggacagggtgagcgcacagtccgggtccccgctgtaaggaccaggtggcggggacagggtgagcgcacagtccgggtccccgctgtaaggaccaggtggcggggacagggtgagcgcacagtccgggtccccgctgtaaggaccaggtggcggggacagggtgagcgcacagtccgggtccccgctgtaaggacctggtggcggggacagggtgagcgcacagcccacgtccccgctgtaaggaccaggtggcggggacagggtgagcgcacagtctgggtccccgctgtaaggaccaggtggcggggacagggtgagcgcacagtccgggtccccgctgtaaggaccaggtggcggggacagggtgagcgtacagcccaggtttccgctgtaaggaccaggtggcggggacagggtgagcacacagtccgggtccccgctgtaaggaccaggtggcggggacagggtgagcgcatagcccaggtccccgctgtaaggaccaggtggtggggatggtggggacagggtgagcacacagtccgggtccccgctgtaaggacccggtggcggggacagggtgagcacacagtccaggtccccgctgtaaggacccggtggcggggacagggtaagcgcacagcccacgtccccgctgtaaggaccaggtggcggggacagggtgagcgcatagcccaggtccccgctgtaaggaccaggtggtggggatggtggggacagggtgagcatgcagcccaggtccctgttgtaagggaaggtcgcgcagctgggctggaattctgggctcagcccctcccttactcacaggccccccttcctggatggtggaggtgcccaggcaccacccttgttgtctgctcatggccttggggtgggtcctaccgagctagggaagcctgggggccgtagggagcccagagtcagcctggaggaggtggcgctttggtgagtttggaaggcaagcaggggtgagctgcagggggccaggaaagggtgactgtgactctgggagcagccgtgccaaggccctgggacaggaggggcttggccagcctcaaggccttactccagcccactgcactctcagattccagctccctggggcaggtgagatggccgagccaggtccttggatgatctctgttcctgttcccctcttcccaggaagcgccgcggagccatcaacagcaagcagctcacctacctggagaaataccggcccaaacagaggctgcggttcaaagacccacacacgcacaagacccggtgctgcgttatgtagctcaggaccttggctgggcctggtcgtcatgtaggtcaggaccttgg

SEQ ID NO: 15559 - DNA, 841 bp, Artificial sequence
  DNA replication origin
gtctccgccactccctctggcggcgctggccgtggctctgtctctctgaggtgggtcgggcgccctctgcccgccccctcccacaccagccaggctggtctcctctagcctgtttgttgtggggtgggggtatattttgtaaccactgggcccccagcccctcttttgcgaccccttgtcctgacctgttctcggcaccttaaattattagaccccggggcagtcaggtgctccggacacccgaaggcaataaaacaggagccgtggccgtgtgtgtggagtgggctacagcgtcaggcggggcgggctggtggcctgggggccccagaggctgctgtctggatcctgggctggtgcccaggatggggctcccgcgtgctcttgcgctgccctctggtggccgctctgggtccttgcaccccgacccaggggccagcctgccctgtcctgtcctgataccgaggtgggagccctgccttggccagggtggccgtgttgacggttcttgggactgtgacattggaaggcgaggcaggtcaccagcactgtcctctgcaggatgggctgggattcatttggcagcttctcagggcctgtgtccggctggttggtccctgtgctgcccaaaccaggtgtccacatttccggctccgaggcgcagagaagggggcaggtggtggcttgggtggaggaagtcaccatccatcagcccagggagggagggtgccacctgggcacctggggctggatgtgagaggcctggaccagggcccgccggagggcgtggaccagatgctcatgtgttcctgggtgcagtgtctgtgttgggggctggccccac

SEQ ID NO: 15560 - DNA, 1122 bp, Artificial sequence
  DNA replication origin
aaagccccttctcaggcagccctgcccccaagaccgacagatggctaagggggccgcagacctggctcccccagctcctgtgtggagaaagggcaacagctgtcccggatggttattctctcctttcctcaaacacatttggaactcaagtaaatccaatgcatgttgggtgaagtttgctgtattttttcaatccaccagccaagttttggggtcacctctgctggccctgtgtagccatgtccctgccccaagaggctcacagtctagcagggttggggggaagacaggctggtaagcctcccagttacagctaggggtgctccacctcggggggtggcggggacagggggcatggaggtggggccttggggtgctgcaccttggggggactgagggacagggtgcatggaggcagggcctcagggtgctccaccttgccggggggacgggggaatggggggcatggaggcggggccttggcgtgctccaccttggggggcaggggaaatgggggcatggaggtggggccttggtgtgctctacctcgtggggcaggagaaatgggggcatggaggtggggccttggtgtgctccaccttgttagggggcagggggacaggggcatggaggcggggcctggggggggcacagtgcagagtaccacgtcgggaggtgggggagatgccccaggtggaaggactgcctgagctgagtgtggagtgggggtccgcgctggccaggaggggaaaaggggtgcagtctggattatcccattggtgggatggtggctggcctggcaggatcccgagacagatgcagcatgggatggggccccaggcagagctctgcagggaggggctctccaggagctgtgtggaccccaggccaggcggaaacccaggccgaggccgaaggttgggcaggtcccctggtggctctctgggagtccagggtacctgcctctggactcatccctccaagggtctcgggagaaaggtcttactgcccattttacagatggaacagctgaggctcagagaaccaagactcctgcttcaggcgacagtgtgtccagggtgggcctggctggttctgctgctagccctgaatggactgagg

SEQ ID NO: 15561 - DNA, 846 bp, Artificial sequence
  DNA replication origin
ggtctcgggagaaaggtcttactgcccattttacagatggaacagctgaggctcagagaaccaagactcctgcttcaggcgacagtgtgtccagggtgggcctggctggttctgctgctagccctgaatggactgaggaggatgttggtgggggtggagggagacgctgggggcccgaggctgggggtcccgactgaggggaccccgtccgaccgtcagcccccagccactgtggcgcgccaagatggagacaactgaagattgagtggccaccctgggcggaggctgccctcaatttgagtgcctgcccagccccagcccccaggaccctgggaccctggcaggctgtggcttgggctcaggccccagtcaaggtgaccctgtctccaggagtggacgggtatccacctgcagggcacttcacagacttcatagtttgtctctgtcccctgggcctgaccctgagtttgtccccaagtcctgccagtgtctcctggggcttggcttggtcacagcagaggggcctgtggtgggcagggagctgacacgcataacgcttcttttgttgaatctagatctttctttcaaatggaaaaacgttatgcaaccaagctctgtggggggcggatggggcagggctgaccaggtggacacgggaggggaaggcggtgggtgggggaggatggctggaggtcactgcttgggtctggccgacaccttctggaggaaggagagctggctggtggcgaattcccggatgctgggctcagggtcacttctgagatgttcaaaagctccagaagaggaggagcaggtcagaggtgaccccagcgcaggagcagcccc

SEQ ID NO: 15562 - DNA, 1722 bp, Artificial sequence
  DNA replication origin
gggcacttcacagacttcatagtttgtctctgtcccctgggcctgaccctgagtttgtccccaagtcctgccagtgtctcctggggcttggcttggtcacagcagaggggcctgtggtgggcagggagctgacacgcataacgcttcttttgttgaatctagatctttctttcaaatggaaaaacgttatgcaaccaagctctgtggggggcggatggggcagggctgaccaggtggacacgggaggggaaggcggtgggtgggggaggatggctggaggtcactgcttgggtctggccgacaccttctggaggaaggagagctggctggtggcgaattcccggatgctgggctcagggtcacttctgagatgttcaaaagctccagaagaggaggagcaggtcagaggtgaccccagcgcaggagcagcccctttactccagcccaggtgttgggggggtggggggtggggtgggtggtgggtggggccagctcagaccccacctcctgtgactccaggcctgggatgcttccctccaccactaacccaccacccccattccccagccccttgttctgttggtgccatgaggcagctgtggagtgagtgtgagccttaggccccaggtgccctgatgggggcctggggaggggaagggccaacctcagcctccagacatgaaggtgggatggcggctgggtgctgcccaggaggcctgtgtctttgtcctgatgctgatgctgggtagggggggcaggagggggttcccttctggggcctcagtcttgctgtctgtgcagtgggtcttaagagtgcttgggcaggggtgggagggtgcgggctgcgggagctctggagggagggctgcttactgcggaacagcaggttggtgtccacagcattcagcatctggaacacggcctgggggtggtagcagatggtgtggcctgtgtaacagacgggcagctggtggctcagggctccctgtctcctggggggctgtagcccacccctgcccctcttcagccccaagctcctcctcatccaccccctttcctctcttgtgggtggtgagtcagggagggtcaagggtgcttgggtgggggcaggcctgggggtctttaagcccggcctcgccctcccacctatgaagagtgtcacccaggtcttgatgtggcaggagtggctgtgcaggtagctgagggcctgtgacaagtggatgctgaattcctcctggctgcgggtcatctggccggaggagagcacacctggctgggacgggctgggggccctgggcataccagggtcctccagccccagtttgccttgcccagcccctggagctgctatagcagctgtgtgtgagacgggagtgaatgggggagccgcaagcctggtctcccccactccctggccctgttcctccccaccgatcccaggcctctcaccaggcaggtccagaggaagtggcgggcgctgaggcccctctcccaggccagcgtgcagaagagggtgtgcagtagccgccagcggagcagcacagcacagcggtagaaggtgaacttggcctgctgcagggacaggcgtggagggtcacccaccgcctatgtctgagccctttcccctagaggccacaggcctccatgggcactggaggcagcctgctgtgcgggtgttccctggttctgtcctgcttgtgcccctcggcaagcctccccgac

SEQ ID NO: 15563 - DNA, 1294 bp, Artificial sequence
  DNA replication origin
gcggcccttgctcgacggcttcttccagagcagcgaccaggtgatcgtgtgcatcatgggcaccgtgtcagacacgctgcaccgcctgggcgcgcagggcacagggagtcagagcctcggcgttgccatcagcacacgctccttctttaatgacgtgagcactggggcagggcggggctacctcctgctcacgccctccaggaccctcctcccaacccagctcccttcctctgccaaagggggaaccccaagctgcaagcagggaggcccaggccctggggagctgcccgcttgtggccctcggttgaggtgggcgctgagcaggtgggctgggtgggcccctggcgctcaccccttctccacagggctgaactagttctcacgttcagtctccaagtgcagtggtctccggccccacgacagcctacccagatttgctttctgacatgtcagcacggttagcgtggctgtttttccttcactggggaatctgggggataggcgcccctcaaatgcattcatgaggcctgggctgccaggatgcagttgtgggtagaagggagatgtgattcttacatcctcagggacaccagagagccctgtgtgaggggggagccccagcccttcccttccccgggagccgagagcctgggtgaaggaatcctgcagaaagaactgagttgtacccctacaaggtgtggggtcccaacttggaccaaagctgggacccctggacaggtctggccgtgcctctgagcctctgccttgcaggagcgggacgggattcgggcggcagccatggcactgttcggggacctggtggcggccatggcagacagggagctgagcggcctgcggacccaggtgcaccagagcatggtgcccctgctcctacacctgaaggaccaatgcccagctgtcgccacggtcagtgcccaccccaggaaaggcaggtgataggccttcaccttggccagggctgggacccacaggaggccagggtacggggcagacggatggcagcagcactgcctgagagttgggggagctcccacggggcagcaagtggcgggcagagggtctggccatctgcactggtttctgtgaccacagttggcctgcccgctcccccactgcgcacacgcatgcgagcgagacttgccgtcgatgcggcaggacccggtcttttctgctcactgctgtgcccccagtccctgtaacggggcagggggtccagcagctcacagagcttgtgtgaatatggactgtgccctgcctgccgtggcagcacatg

SEQ ID NO: 15564 - DNA, 1314 bp, Artificial sequence
  DNA replication origin
ggtgagaaaagaaaagaaaaatgcatagcatggcgtatttccactcagagtggagtggggtggcctgccccagccacacctggttcagccttcccatccccaagccggcaggcctccctggctggcagtgctctcggggcctgtctcctctggtctgctgtggctgcttgcccatatcccacctgatgccaggcggggaaccattccctcttctctggacctggtcctcctgatctagcagggcccttctttgcctttctgtattccctgtattcagtgcagggtacagaggaggcacatggaaacttcctactgatcatttccctgcctgagagaacatttggtgcacagataaccgaacactgaatgaatgaatgagggagcaaacgtgaataactgggtgaatgaatagacataaaaagaatgaacaaaataaataatgcaagaatgggtcacagatgaaggacccaaggaacaagtgggtgggtggagggatatgtgggtggacggggggatctatggatggatgaatggacgggtgaatgagtgagtagatggatggagccatgggtagagatgaatgggtgggtcgatggttgaatggagggatgaatggaggaatgaatgggtgggtggatggatggaggcatgggtggagggatgcatgggtgagtggatggataggtaggtgaatagttggatgggtggttggatggatggaggcatggatggagagatgaatggatgggtaggtgaatagctggatgaatgggtgagtagatggatggatggatgggtggagggatgaatgggtagatggatgggtgggtggatggatggatggagggatcagtggatagatgggaagatgaatgggtgggtggatggatggaagcatggatggagagatgaatggatgggtaggtgaatagctggatgaatgggtgggtgggtggatggatgaaggatggagagatgaacagatcattgaggaagtgctatctagtctccatcttccattaagcacctactatgcatcacgcacaatgcaaagagctttgccaactgtgaccctgatggaagtcagtcttgttaaccatgtggaggcctgtggttggaacagaatcacagtgaactagtctgctaggcaaatgactttgggatctctttggaaacgaccccttctgctgccttcccatgatgacagttttctcccacaagccctgaaaatatttatgttcataacagcctcctccaacagcaacagaaatgggggctgggcatgtcgccttccctctggggtcttaatgcagc

SEQ ID NO: 15565 - DNA, 1348 bp, Artificial sequence
  DNA replication origin
aagcagtgtggtccatccatacaatggaatactattcagccttgaaaaggaaggaaattctgatgctacaacatggatgaaccttgagcacattctgctgagtcaaatactgtgtgagtccacctacttaaggtccatgagtagccaaatctacagagacagaaagtagaatgctgggtgccaggggctggatggagggagaatggggagttaatgtttaatggggacagagtttcagtgtgggaagatgagaatgttctggagatggatggtggtgatggttgcataatattatgaatatgctcaatgccactgacctgtacacttaaaacggtaaattgtatgagatgtgcattttaccacaattaaaaataaaaccagaagaggaggaggtaatgggagagggaagagggtctcatggaccctcaggctggggaggagtatggaaagcagaggggctttgcctcctctttctcaggtgcctttgccctctccggggccagagtggggaaaggacggttggtcgagtatggggcaggcatcactgggatgccaagtgtccaaagaggctgcaggcaggcaacgacgttgagaccagcaggaacggaggatggttccttgagtccacagcgaggcagagactcaaggggctccaccttcatcggtcttgggactgcgtatggatttcaggagacacatgtccttgagcattgccgggggtcctgggctggaggtggttttgtgttctatggacctgcaggggagttgggcatggattcccaagaatgctgaatcagcccatctttctggaagccctgctggggctgcagggacaaggcaatcttgaagaacaagccaatacagtgcccaagaagtcacaggaccagaagcttctggagtcctcccagagcaaacaaaatgccactccccccaccaagtccccttcttctgaaaaccattgtcgcattatggctgagaccagtgacctggaaaatgctgcctttttttatgacacagcttggggtgagaggacaagccagctggcatttggattggcactgtcagaactttcacggatggcatttcatcatttgacacttggttttgcaaatctgctcagaaacgtgcctggtccaagctgacagcctcgtccaggcatgctcacacatccagggtgatgcacttacactgaccgagcacaggggccgggccaggggtgtgtggctggaacagtgagacaggccagcaagccagggccatctcatgtttcatgggcctgcattctggggctttctacctgtgccccagggactgcgttcagtgacagtgacatcctgtgacagtgaca

SEQ ID NO: 15566 - DNA, 2153 bp, Artificial sequence
  DNA replication origin
ctggggaagccactccaggaccatctgacccttggctaggtgggcacgacagctcggaggactctgtgagtttccacctagccggaaagagccgggcctttggagtcagaagggtctaggctcagaccccttctctgccccaagctggctgtgtgaccttgggggagtcacttaacccctctgagccttggattcctggccgcagagtagtgggcaatgcctgcctcaagaggcttaagcgggaggattctccccgagcgagcgtgcatgcccagagggtgggtgtttctattctgctgcctgcgggcctgccccccagtcagcaggtgtgagccgagcgccactgcatgcagacagtgtcccggggaccaagtagtggcggaatcggcaggagtccccggcctcctgtgcatgacagcctcacggggacacagcaggaagcgcagtgtgccggatgctcagtgctgcttgagagaaaaaagcagcgtggggggcgggggagagtctgggtgccttcggtttcagacagggcagtcggggacgcatcccctgagaagggggcacttgagcaaagccctgaggatatcgggagggagccaggcagcgatgcgggggagagaagcttccagagagacagccctgagacagctcaatcctggtgtgttcaggggacagaaagaaaggccagtgtcattggggtggagtggggaggggagaggaggataggaagacggtgatatcatcggggccacagcacgaccttgatggctgctgtggaggctttgaatgagatgggaccactggaggatcttacgcagagacgtggcatgggcctacgtgtgttcttcaaggactggggggtgggcgactggaagtgggcaagtcactgcaggtgagagccggtggtgtcctggactagggtggtggcagcgggggcgggacacaggcagaggtggagctggcagggtttcctaggggatgggatgtgggtgtagaggagtcggatggcatcaagaattccagcctgagatgctgggagcacagagtcaccagcggtgacatggggaagcctgcaggaggggcaggttgggggaggccaggggtgtggcctggctgggtcagtgggagacgcctgtgtgacatccaagggctgccgtcagggggttaggggagaggcctgggccagaggtgtcagtatttaggggatatttgaagccacgggaatggaggtggtcactgtgaaactgagtgtagctgaggaggaggatcaggggtcagccctgtggcctcagggctatgaaatctgggagatgaggaggagccactggaggaggctgagcgggagtggccggggaggtaggaggagaaccggggagggcagcgttcccaggaggagagagtcactggctgagtcaaattctgctgacaggtcacataaggtggggacagagaatggactattggacctagtgacgtgaggttactggtgaccttgacgagaaccattttattggagcagcagtggacaaagtctggttcatgtgggtctaagaaggaatgggagctacaagtcacaacccaaagacaaacaacccaactccaaagtggagaaagggcttgaagaggcatttctccaaaaaagatagacaaatggccaataagcacatgaagagatgctcaggggaacacaaatcaaaatatgtcacttcacacctcctaggatggctacagccccaagatgagagacaccaagtgctggtgagtatgtggagaaacagaaaccctggtactttgctggtgaaaatagagaatggtgtagttgctatggaaaatggtacggcagttcctcaaaaagctaaacatagtacggccacatggcccagaaacttcactcctaggtacacacccaaaataactgagagaagggtctcgaacatgctggtatgccagtgctgacggcatcgttattcatgacggcccaaaggtggaggcaacccgagtgtccgtcaacagatgaatggataaataaaatgcggcctacccgtgcagtggactattattcagcaatgaaaagaaatgaagttccgatacatgctacggcatggatgaaccttgaaaacattaggcggagggaaagaatccagacccgaaag

SEQ ID NO: 15567 - DNA, 1543 bp, Artificial sequence
  DNA replication origin
gcaatttttagaactaaagcatttttaaattaaggtaagtacattgttctttgaaaagacacaatgctattgtctactgactagaccacagtatagtataaacagaactcttatgtgcactgggaaacacggaggcacacgtgactgctctattgtggtggcctggaaccgaacccgtaatatcctgagatatgccggtatctcaaactctacaccctgacaacagaaaatacacctccttcttgagtgccaatgggacattcacaaaaagcatttaaaagattagtaaatttcataaagtaaaaactttacagacaacactctctgaccacagtgcagtaaaactagaaattattcacagaaccacaaatgcgcttccacatggaaattagacatcttcctggaaacaactcttgggctctgggagcttatgacacccctgttctggtggcttctgagtgttcagtgaaatgggagcaaggccagcagctggggccagggacctgtgtgtgtgcgggagtcactgtctcactgccaggtgtgccccaggctggaaggagggtgacagtgaggacaggtgagggggagtaagaggggtgcagggcagtgcacggcaggtcctggggacaaggctcgctgggtctggaggcgagctgtaaaggtgggagtgcctgaagctggtgatggtcacaccaagggatggccgggggagtgggtggctgtgggggatggaagacaaggtccttgggagggaggagatccaggcctggagaagtcagggtgaggggaagacagggaaatcccccaggagtcaggcatggggagtgagctagggggtgtccctgactggagcgaggggccatccaggacaggtgcatggtaggtaggtggcagggggtatggactgaggacttgggaggcagagctgggactttgggaaggaagggccatgagcagtgacaaggaccctagcccatctctaggcccaggggtctgagggctgtgagagaaaagccagccccacctgagagggctttgatggcctctggcggatatagtggggtggtctgtagaggggcaggaaggagaatagagtgtttgtagatgagaagagacagaggggtttgctgctgggcggcgaggcttcagtgtgggctggggtcttgccaggagcacccagggtcctgtggcctctccatcaggtgacagtgtggcctggctggggcaggtgtttcatgtggagccaggacaggagacagtgagcagtgcctcccatgtgcccgcccaggaggtatgcaatgatgaacagatgtgggctccctccaagcacccagccctatagaagtccctgtgggccatggcgggggcagacaggagggcagaggtcaccacccctgcctggggagaggatggggagtgggcagtgaggcaagaggggcaggcacctgtccaaggggatggagatgttcaggaaggtggccaccagctcacaggtgtggctccgggccagcagggtgatggcgtgcagggtcttttccttggc

SEQ ID NO: 15568 - DNA, 1400 bp, Artificial sequence
  DNA replication origin
gatagaacacgcccatcctcccagagggttctctgcacagtggggacacacagcattgaaccgaaggaagttagaagctaaaggagggataggagagcagcctgacagaaaattagggcatttgcaaggatgtcaggatggcaaaatgcttctttgcatgttaggatatttgttggagtgcctgcaatctgttaggacatttctaagtatattagaatatcaaattaagtgttaaataatggatgttagaatatttattagaatcttttaattctaaaattttgatacagtgtttgtgagaatgttagagtattagcacaatggttagaatgttaaaataattttagtggaagatttgtggtaagaactttttaaaagaatattatgttacacatctggctagaatatttgttagaggaataaaatcattggctagaatgttaaacttttgcttaaagctagcatttagaatgtttgtgaagaaattcaacttggaatggtggttagattctcagaatactacaatctcaggattggtaaagactttggagccatctcccttcaatcaagggcaggaataaatgtgagataaaggtggcagtgatggtagaagtggtggtggtggtgataatgatggtggtgcagggtcatagtaatgcagatggtgatggtggttgtagtcatggtgatgtggtggtcgtggcaatggtggttatggtgatggtggtggtgacagtgatagtgatcatgatggtgatggtgatgatgcttatggtgatagtgatggtggtggtgatggtggtgataatgttggtggtggtgacagtgaccatgatggtggtgttgatgattacagtgatcatgatggtggtgatgatgttggtggtgatgactgtgggggtggtgatggtactaatggtggtggtggtgatgatagtgatgttgatgatgcttatggtgatagcaatggtggtggtggtggtgataatgttggtggtggtgacagtgaccatgatggtggtgatgttgctggtggtgatgactgtgggggcggtgatggtactaatggtggtggtggtgatgatagcgatggtggtgatgatggtggtgataatgttggtggtgacagtgatcatgatggtggtgatgatgttggtggtgatggagatggtggtgatggtggtgatgatgatgctggtggtggtggcggtggtagtggtggtgatgatgcttgtagtgatggtggtggtagtgatgatggtgatagtgatgctggtggtggtggctgtgatggtgatggtggtgataatggtggtagtggtgacagtgacagtgatcatgatcgtggtgataatgctggtggtgatgatgacagtgggggtggtgataaagatgtcatg

SEQ ID NO: 15569 - DNA, 882 bp, Artificial sequence
  DNA replication origin
gaccagccctgtgccatcatttcttcatcatttggttcaattcagtttataaaacttgaggaagggatgtggtaatgtctgtgaagcccctggcataggtaataagtaggcatctaatgtgtgctggctccccaaaccttcctggctccacttcaacaacatgagagagagtgagcgagcgcatttacccaccactccccactccccagatatgtcgtgtgctctggtcacgcccctgccctgccctccactctaaggactttgaccttgatgacttggaagctgcagagctggaagatgtggttctttgccatctcctgggggcccaggggagtggccttctggtctctgctgttccagagtggggctccgtccgaatgggcctgggagagctccttgggggcctgtgattctgcctgcaaagcttctcctgctggccaggggcagggtgggtgagggcagggcgaaggtggtcttggggtctagtttgggacagggcagggttagggtagggtcatttgtaatcagggtcaggcctgtgcccaatttggggactgggatcagagtggtgggggtcagggtgaggccattacagggttatggctcagatccaggttgggtctgggggtaaatttggggcaaggttgaggtcaggggtgcgggtgtgggtctgccagaggttgtagctggggtggaagttggtgctcagaactcacagaactcacttttgtggcacatcaagagctggtagagatggcttgccccttccaggctgcagcgctgggtggccctgtctgggtcctggcacagcatccccagtatgcccaccaattgcccaatccttttgaagtcctcttttggctgtgttaagattacgggaat

SEQ ID NO: 15570 - DNA, 1156 bp, Artificial sequence
  DNA replication origin
cagggtcatggctgaaaggggacagcagagaccacccaccgaggccgcacctggggggcttcttaaggggtggggctgcatggttttaaaactgtaatttacaacgtttaaacactgggacagtgcctgtaagtctcttgagatgtggcaaccccatgccccagggccacagcagcagcgacccggggcagcgatgtggctactttggggtgggggcagccctgcggggcccctcacagtgacctgggctggaggccactggtgtgaggtgtggagtcaggggcttgtcatcataacacgatggacgtcagcctggcctctccgtacccatgtcccccacccgcaaagtgaaacccagggtttgctttaagaggagaagtgagggtagaggcatcatgaagcccagcgaactttcggtgggatggacggacgaaatcttgggccaccagaaagctgggcctggttcctcatgattccagggtggggtggggcatgggggtgggctccaaggccctgggaggtcctggaattctctgctctgagaggccggtggggcggctctgggctggggtccgggactcggtcttggtggggaggggcaggtgttgggatgttgcaggggcagccagaggcctacccaagagctgtagtggaagtagaagaccatcctggacacgatgttgtccacccacgggaggatgtgggcccgggctttggctgccacctggccgtatgccaggaggatggtgctgctggcccatttccagcgcaggtcctccgagttctggcccaggggtggcaggcaggtgaggagtgtcagcaccccgccctaccctcctctggggagctgtggaggtggttgcctggctctagcagggccctgggggcaggtgtctgtcctgaggggcagtgagcctccatctcctcagtcggaaaacaaggggactaggactggctctttgggggatggctggggccttgttagggccatggtttgggtggggtgttagggtggggtgtgtgtggggcgctcgtctctgctggagctggctggggtccaggccccttgccttcccctccttgtgggggcccctcccacacccacctgaatggggtgggtgaacggggtagtgtcctaggagtccccagaggctga

SEQ ID NO: 15571 - DNA, 1018 bp, Artificial sequence
  DNA replication origin
ccttcccctccttgtgggggcccctcccacacccacctgaatggggtgggtgaacggggtagtgtcctaggagtccccagaggctgaccttcacagatggtgggggtcttgctgtcctagacccctgctggtctctgaggacccctgagccagtacctttggggaggagctggggagactccatctgatgggcctgctcctgccaaactggtccaggacggcccagacgtcatccaggtggcgtgtggccgccagccccaaggtcagagccatgccctgtgggtcgggtatcagggtcactcatcaggggaccccaaagtccaggaccggacccggctcctcccctggcaggagggaaaactgaggaggaacaggacccccagagggggttggggctcatccagggccccagggcagccagcaaccaccccactctgtcaggacctgtgaccgagcccatgccaggggacacccggcttatggggtctggtggggggagtgaggggcgtggggggcagaggtgaatccctggaggcccattatccctcactgccggctatgagcaggctgtgccggagtggcaacgaggagatgtgtttaagaaggaggaggagggctacgctgcggctgagatcacggctgtaactggggtcaggggttagcctgtgatcagcgtcaaggttcaactgtagaccaaggtcagaacttagtttgtgaccagggtcaggggttggggtgagaagaaggagaaggctcaggctgtggtcaggattagggcatggtgtgagaccagccatcaggctcagcctgtggtcacggtcaggtggtggcggggacagggtggggcctgggtcctcacctccctctgcttgggccactggtgggatgtttccaggagggcttgcaggtgtctcctgaccgtggcaccatttttttcagcttgaaggattagcccatagtaggtaaacaggaaggcctgtgggaagggcagcatcttatcctgtgcttgacccccccc

SEQ ID NO: 15572 - DNA, 1490 bp, Artificial sequence
  DNA replication origin
tcctcccacagaggagctcttcagccaggaagacaaggcctgctgggaagagcaactgatccaggtagggaaggagcccagctcccagccaccagaccttctgtgggggcaacaggggagaggcagcaggatgggtgcctgggaggaggggtagggggaaggagggaggaggaagggaaggcagagagagagaaaaggggaggggagggagaagagagggtagtggggagacagggaggatgagaggaaggagggaatgtcagggaggaaggagggaggaatgagagggaggggggaaaggaggaggaggaggcaagaagaggggattgagggggagggaggaagatgggggaacaagagggagcagggagggaaggagggagggaaggagggagggaaggagggagggaggcccctactctgcagatgagcacacaagtctggaaaagggaggggactgcagtcacagggccagtcactgcagcactgggattgggaaggggaccacagtcacagggcccgtcactgcagcactgggattgggaaggggaccgcagtcacagggcccgtcactgcagcactgggattggggaggggaccacagtcacagggcccgtcactgtagcactgggattgggaaggggactgcagcactgggattgggaaggggactgcagcactgggattcgggaggggaccacagtcacagggcctgtcactgaggcggtgggattcaaacctcggtctccacatgcctggcacagagcacatacgcaacgcactcagccagagctgtcaccctggaaggcaggaagcaggttggggtgaacagagggagccccagccaagaaacagagtccgtgcaggcccatccctgaacacacacccgagtgagtgaggggctgacatggctgagggaagggacacgagacccccgccccctggatccaagcccatattcaaccaatcaccactctgtgacctgggggacccacttcacctctcggtcccttagtttcctcatctgtcaaatgggaatccaagcacttcactcaaatggtgggtatgacgagtatacgaggtaatccgtggaaagcatcgggcaccgtgccagtgacgcaggaaaccctcgctaatgtcattattgtcctatgggaagagctgtagtggtagtgacaggagcagcagcggtggcggcaggagaatacttggaatggaatggtatccagtagaaatagcaccagcagcaacacaagcaattgatagaacaagaagacaaaaagttacggaggatagagaaaacttgaacaatacattaaccaaattcgtctaataaagtgcaaacaaaatattcgccagggggtttggggggaaatggagatggttaatgggtacaaaaaataggaaggatgaataagatcaaggtgactatagtccattagtcaattgtagattttaaaataactgaaagaggctgggtgtggtggctc

SEQ ID NO: 15573 - DNA, 784 bp, Artificial sequence
  DNA replication origin
tctgcacctgggggtactgctgaggctgccagatccctccccaaatcagcctttccctctggggtaggttccaaagttccggaaaagctctccactctcacaatgcctccctcccaaaggcttattttcccactcttgagaggccatgcttggcagcgcccctccattcaccatgagtgagcccgaggcccagagagggagcccagcccgcctgaggccacacagtaagagcagctgggccgcaagcccaccccagctctctgaacccagagccaagcccggctcacatccctccagctcccgcgccccacagaggtagggcaggcagaggccagcagcatcagcccgggccagcgctaaaggccggaagagacgggtgttagacagggccctgtgacccatccctcctcccacagaggagctcttcagccaggaagacaaggcctgctgggaagagcaactgatccaggtagggaaggagcccagctcccagccaccagaccttctgtgggggcaacaggggagaggcagcaggatgggtgcctgggaggaggggtagggggaaggagggaggaggaagggaaggcagagagagagaaaaggggaggggagggagaagagagggtagtggggagacagggaggatgagaggaaggagggaatgtcagggaggaaggagggaggaatgagagggaggggggaaaggaggaggaggaggcaagaagaggggattgagggggagggaggaagatgggggaacaagagggagcagggagggaaggag

SEQ ID NO: 15574 - DNA, 1155 bp, Artificial sequence
  DNA replication origin
gaagtcccattacaatgccctcaacctgcctgtgtccccgtagctcctaggagatgtctctacttcattacttcccaccaccatggccctgaaggcatgttcagatggtccctctgtctgctttctgacccccgcctgggacaggcctgtgtggccccgtggggtgtgctgtgcctcttgctttggggagagctttgagtattaaagacctttcagtggcctttgcctcctgcacaatcatgaattaagactcggcaccacacggagggtaaatggtgtctactcctgctttgtggggcaccctagtgtgtgtgcgtattgaggtgtcccctggggctgccctggcctagtcagtctaagccacctgctcccaagtctccactcttggagtggagattgttggcggctagggctggctcttggactgcaagctgcaggtggggtggggtggggtgggtgggacagttcaggtccagacccccaagtctccatcaagcaggaacccagaaggtggccaagggcaagggcagagttacagcctgcagactgggttagactcacagcaggccttccagaggctgggctgcaggcagctgccatgcagtggtgaggaaggcggtgcagaggggaaccatagcctgcttcagggagagacctcctttggggagagggccccccaacttacgagccccttggctttagacaagcaatgctctcttgagcctcaccttcctggaatgggaacgtgagatggaaaagtatgattgtcccgctgaaggggctgggggtaagaacgtgagtcactggatggaaattgcttggtaacccacaaggctgggcatgcccagcatcacttgggtccctggggcagctgctggcattcccagaacccgtggggggttggcccacttgctgtgggaggggaggcccaccgtggccttggtcatgttctccagagcgagccgtgtgaaagttttctcccaggtctcctccaggacgtcactggccccgatgaccatctccagggtctggaacagccggaacttgtgcctgctggagatctgtggatggcagagcaatggtggcttggggacagatcaggtcagatcgtgtgggagatgtgggtgggggcgtggatggggaggggtgtgagag

SEQ ID NO: 15575 - DNA, 2023 bp, Artificial sequence
  DNA replication origin
agggcaaaaatgagtttctctaggaaagtggggggcagggcgcattccaggaggaaggcactgcacaaagcctcaaacctggctgcagcctaggaaccccggggagttgggcagggacacagagaaggagcctgggaggccagggggctgcccggcccttgagtctggccccttcctcattgcaggcgaacagcaggagggggaacggcctaggcaaagtctaggtggtgggacccacgtggcgccctccggcttcactgcccccagtgggtagtgcccgcagccccaggcctaaggcggtgggatgccaggcacccctacccatgacgccctttctgcgggtccctggctggagggagggtgcggcggggagggcgcgtgggctgggtggcacgtgcgcctctcacaggccccccgtccaggccgcggccctcctgccgcgcgagtcctgcctgggcccgcagcgccatctgccggccgcgcgggggccgggtcgcggagcaggcggcggggagggagggggtgccactgctccaggggcctcgtcctcaccctagactcgggtctggggacctgagtttgaggctcatctccaccactgattgctgtgcgaccagccgctggctcctggccctctctgagctccaccccaatcccagggcggtgagcagggccaggcccacagcggccgctctgaccctcggtcctgctccagtcttacagacggggaggagtgcacagcgaggcacggcgaggttcccgggcacgcggtcagcagagagggggctggatttgattcggggcagcctgcccagccccacaggctgagctcccaggctctccccgctcctggttccttcggctggagaggatcccagaagcggcaagcacccgcacccagaggggagcccaccacatggcaggtgctcactctcacgcccagaggggagcccagcacctcgcaggtgctcactctcacgcccagaggggagcccagcacatcgcaggtgctcactctcacgcccagaggggagcccagcgcatcgcacgtgctcacactcagacccagaggggaagtcacagctccagccccgggacctgccacccacacagggacctggacttagcaaacaaatggcccaagccggatcatccacgggtctcccaggagacaactgaggcccagagaaggaaggggcaggcccgggaccccttgaggacccacgtctgagcacgcacccacaaacacaggcacacacgcacacctgctgtccccacaacacagacagaccctagaaaggatgctgtggacactggaaccattgtgacctcaggggtgaggtcaggcctgccagggcgggggagggccagtgccgtagacagggccggcccacaggcgtgaggccagagttagtggtgagctcctgtgggtctgcactgcaccccaaccatggacaggcagtgttctgaaaggccatacagctgcaccccgacgggtagagtgtcgtcagccgtgtcccaaaactccaggtcagctcaaccccagcagggaccccctgacccccccccaccggtactcagcctcctcatctgtcaggggagcctccctgcaggccatccaggggcccctgtgctgaggaaggagggtcctgcccccaggagcagcctgcaggggttggagtggggatcaggttggaggagaggaggtcaggagggcggaagcttaaactggagtgagggccttgcccacatagcctgcacctgtgtgagggccagagggaccatggcctgtgttgccaacagtgcctgcaggctgtgtgaacgggtcagtgaatggatggacagaccgttcacctgcttctctgggcctcggcttctattcagcagaattgagatgataccacagccagagtttctgcagagatttaagggacatgaataaaggaaggttcctccacagccttccagggtccccagggaaccccagtgtcccaggaacctggaaagacacaaagggcatctc

SEQ ID NO: 15576 - DNA, 1711 bp, Artificial sequence
  DNA replication origin
aaatccagccccctctctgctgaccgcgtgcccgggaacctcgccgtgcctcgctgtgcactcctccccgtctgtaagactggagcaggaccgagggtcagagcggccgctgtgggcctggccctgctcaccgccctgggattggggtggagctcagagagggccaggagccagcggctggtcgcacagcaatcagtggtggagatgagcctcaaactcaggtccccagacccgagtctagggtgaggacgaggcccctggagcagtggcaccccctccctccccgccgcctgctccgcgacccggcccccgcgcggccggcagatggcgctgcgggcccaggcaggactcgcgcggcaggagggccgcggcctggacggggggcctgtgagaggcgcacgtgccacccagcccacgcgccctccccgccgcaccctccctccagccagggacccgcagaaagggcgtcatgggtaggggtgcctggcatcccaccgccttaggcctggggctgcgggcactacccactgggggcagtgaagccggagggcgccacgtgggtcccaccacctagactttgcctaggccgttccccctcctgctgttcgcctgcaatgaggaaggggccagactcaagggccgggcagccccctggcctcccaggctccttctctgtgtccctgcccaactccccggggttcctaggctgcagccaggtttgaggctttgtgcagtgccttcctcctggaatgcgccctgccccccactttcctagagaaactcatttttgccctttcctatttgtccttggagacccccgcccaggccacctcctcggggaagccaccctgatttctttgggctcccatagcatttattctcgaggcggtttgttcaaccttgctgggcttgactgggcggcgggatggtgggggctgtggtttgactggaggtgacaggaggggccaggtggacacccatgccccttgtccagctgggtcccacctccagctcccctggctgctgccccaaggcctgactctgtgaatttcccttcccaggagacagtggccctgtttgaccagtggacacccccacagaagacgtaaacataagacctgaagctgtaaaactcctagagggaaacaggggaaatgctgtttgacatgggtcttggcaatgattttttggatatgaagccaaaagcacaggcgaaaaagcaaaaatagacaagtgggactacaccaaactcaaaagcttctgcacagcaaaggaaacaacaaaatgaaaaggcagcctacggaatgggagggaatatttgcaaaccctctctctgataaggggttaacatccaagatatataaggaactgctgtcactcaatagcagaaaaccaaatcagccaattaaaaagtgggcaatggatttgaatcgacatttatccaaagaagacaaataatcagccggtatataaaaaggcacccgacatcacttatcaccaggacatgcaaatcaaagccacagtgagaccgacttgcacctgttaggatggctggcatcaaaaagacaagatggcaagtgttggccggggtgtggagaaagggagcccttgtaccctgttggtgggaatgtaaaatggtgcaaccagtataggaaacagcatggaggttcctcggaaaactaaagatagatctgccatctgatccagcaat

SEQ ID NO: 15577 - DNA, 823 bp, Artificial sequence
  DNA replication origin
ttgtgaagagccaggccccagctcaggcccctgggagcacttacctttctttccctgaggccatctctggctgccaggctccttacaagccacacctgctggggatacagcagcccacggctgtttgggcaggcggggtagctctgaggccatctccggtaaaactgtgctgggatgcgtcttcccaggctttgttcccttctctgtctcatgtccccacccctaccagcacttgatcccactttgggggaactgatatccccatgagctctttgtggctgaggcaaggtctgacctgcttcatagggactactggagttgctgaagatggggactgctgacctgggctctgaagacttcgggaatgcctgtgggagccccgtggtctggagggacaggccagctgaggctggatcaaggcctcggctgccctgagagcactcacaggctgcggctgtggacaccaggctgacccgaggtgagtcaggaggaagagtgctggtggggacaggctggcggtctctgggtgccaggttctcatggtctctgagcagggcaggtgagcagatgtgactggggattgatctcggagggttgctgggtgcaatgggaagggttaaggatgggaggctggcccagagggtggccctgcagggtccaggcgaggggcagggtgctgggtgaggggctgcagtgatgcccacagagagtttagtgcgcaagaggccactgagcccacaggtccccactcagcctcccccacagccccagcccactcctgagtggaggccctttaaacgcaaggttctgtcctcccctggga

SEQ ID NO: 15578 - DNA, 901 bp, Artificial sequence
  DNA replication origin
agcgagggggcagaggccatggcaaagatgtgaggaggggtggaggaggccagacaggtggaagacactgtgggcttccacctcactaaaggagtgctggggctggccctcgagggcaggagctggggcaagaatccccagagtgcggtggggacaaggggactgcagtttgggtacagtttgtcgggtgggtggctgggtgagaggacaaaatccttacaggagtccgaggggctgagagaaatcaccaataggatgacaggagagctagggagagggcagggcaggggccagggtctttaggagtgaaggcattgaccatgagcagggtgcacggatgggtgggcagatgagtgggtggaggagtgggtggatgggtggatggatggatggatggatggatggatggatggatggatggatggatggatggatggatggatggatggatggatggatggatggatgcatggatggttgggtggatggatggatgggtgggtgggtgaatgggtgggtggatgggtggatagatgggtgagtgaatggatggctggctgcccctcccactgcctctgagatccagagctgagttttagaagaggcaagggcaggagaatgatccggaaggggccctaaagagtgagaaggaccctgcacacctccaggtccatagatccaaaggcttcaggaagagagccaaccccttccctggggacttcagagcatcagagcattggggagcgtagggaggagaaggacctttacagggaggctttgatgcccgcatgcccccatcctggcccagccccactgccactctccttcatgaccttggcagagcatcttcttctggaagatgggtcagagggccgcttcctgctcccacattctcagagcc

SEQ ID NO: 15579 - DNA, 1515 bp, Artificial sequence
  DNA replication origin
gcggcggcggggccgggcagcagcaggacgaggccgggcccgggccccgcgcgcgggcgcagctcagggccagccgctccaggcgccgcttgcgcatcgctgcctgggccgtggcgtgcaggggccgcagcagcgctgggggcgaagctccggggccgcgcagcaggaagtcgaagtctgcgcggtcgcgggggtcgtagaagagcggcccgcaggcggggtcggaccccggcggccaggcgaacgggaagggcagcgtgaagttctcggtgagcacgcggatggcgaagtcgtcctgcttgcccagcgcgcggtaggcgcgcccgatgccgcggaaatgcgcctcccagagctgcgcgtccccgccgtagatgtccgggaaggcgggctccgggggcgccgcgggacctgcgggcggaggggacagtgaacgcccggcagggcggggagggccgggagcggcccgcgcaggcgggagaccaggaggccgggcgcgaagagaggtggccagtctggaaggagccgccgaatgagctcgaaaggcagagctggggatggccagggccacctggtgatgaggcgaggccgggccctgcatttctgagggaacagcaacagcaaaccaggaagagagggaggtcctgggtgtacggaaggggatgctcactaagtactctttgggcagagccttcccgatggcgaggaggctgcagactttggccagcgtgaccacgtggggactgagcgagcttaggatgttgaggttctccctgaagacagtggccagcttggggcaggaggtgaagcagtcactctcagttgaaagttgatccggccgctgtgcagagaatggactttgggggcccagcttcaaggtcagatccaggggaggacaagatgaacatgaggatgggaaaacgccacctggggagaggctgcagggccagatcgccaggccttgtagacagagacagggaggagcctgtgggaacagcctggctcgcagcctggacacagctgaccctggaatccagagggaggtgcggccccaggagggagcggaggtggaagaggagtttggttttggttcagtcatgccacccttcagcctatccgtggtccccagaaggcacccacgttgctggcccatggtccacaccctgcccaaatctaggtcctccattcaggagagacccctacattccttctttctttctttcattcagcaaatgtgcttagctgtagggatactgaagtgagcaaagcagccatgggacctcacttgggcacacagtccaggaaagaatgtagtcaggtggacacaggagccagaccaggcagctgtctggggatggccacactgggaggctaggaagtgggaatggatgaatatgaccatgaattgtcagatccttctcccaacacccttgggaggggtaacaatattcagtctgttttactggtgaggatacagacccagagaagtcatacacagatgccaagctgaagccctgg

SEQ ID NO: 15580 - DNA, 1888 bp, Artificial sequence
  DNA replication origin
acttcacgctgcccttcccgttcgcctggccgccggggtccgaccccgcctgcgggccgctcttctacgacccccgcgaccgcgcagacttcgacttcctgctgcgcggccccggagcttcgcccccagcgctgctgcggcccctgcacgccacggcccaggcagcgatgcgcaagcggcgcctggagcggctggccctgagctgcgcccgcgcgcggggcccgggcccggcctcgtcctgctgctgcccggccccgccgccgccttcccggagcccgaggccagcgcttccagcgacggcacccccaggctggcccaggccccgccgctgccccgagagcgaacagaataaataaagagtttccccagctctcccgcgcccggcgcttttctgcacacactccgacaggcctgggcggctgggcccggcggggaaggggggcggtgggacggtgggacggtggaccaggaacccaactgggacaccgggccaggccgggcagcggtgggcctgggaagccgcatgggtccgaaggtgcagtgaacatattcgcagtagaaacggtgacggaggcaggccctcttcagagggaggaggacccgggtacggtgggtgggggggccgggcctccaccctcagtgcccacgccctgggaccctccccacagctctgcggtggggactagcgtccccatcccacagaccagcataccaaggccccatgcctccagggaacagctgggatttagtttgccacatgcagacaccaagtctggcagctttcccgtttcccatgatagagggggcagcaggatggggagggggccgggagaaggggcgacgcagcagaacagaggaagagaaaggaaaggagtggagagcatgcgtggggcagagagacgcgaaggagggggcaccacaaggcacctgcccctcacttgctgcctcccccttcctggtccttggggaggggctgcctcctgcttcccccgtgtggggctgagagagtctgttgagcccagcatggccagcaatgacctggcctctgccctggaccacctccctctgcaggtgacaaacccctgccagaggcctggctctgctgtgggcccgctggtggcagggcgggacgacggcatgaccccgatatctcctcctcctcctccccacagaacaccaagcagggaggccaagtggccttcaggagaggtgccatggtctcacgctgggagcttgcaacccaggcgtgcaggggagaccacatcaagtgcaggtggaatccgggtgtttttttttttttcttttctttttttcccgaatccaggagttatttatcacatgccagtcatggggagaaaaggtttttccaagccctggttttgctgaagaagcagttgtggatgggaacagtcatctctggagaaggaggaaaccctgggctgggaagaggcatctccagcctccccctcctctgctgccaccggccccagctgagacgccagcccctgctccaggcttctcccacctggggccttgtttcttcagttctacagatgcacagttacattgcaataataaccatgcgtttgaatcctgacggggcagcagcagtaatgacattaggtactatatatcctatattgcgtatgaattggggtccccagaagcagtccctgaacatggattttggtgcgagtggtttgtttgagacgtggtccttggaaacacaggcagggagtgaggacgcaggacaggcagggaaagaagccaggaagggtgcaatgggagcaagttacccctgtgggcactggaggtcagtcctatgggggacccctgggagacagtgtggtgcgtgccccggagctgtcccacccagggagagtggcac

SEQ ID NO: 15581 - DNA, 2979 bp, Artificial sequence
  DNA replication origin
ctgcggttgggggcatgaggtgggcaggagccctgccacttctgctgcgcttccttcttatggcatgtggcccccgagggagcaggaccgactgtacctccgtttcctccctggactgggcccctggggacttggggatgagtcctgccttcctggcttgtcccctggcctactgcttggctgggtgtgcctcaacctggaaagcccccacctctatgtcctaggctgttcgccactggccacgttggccttggctgcggtgtgtggctcagaaccactggccacggtggccttggctgtggtgtgtggctcagaaccactggccacggtggccttggctgcggtgtgtggctccgaaccacttgccacagtggccttggctgtggtgtgtggctgagaaccactggccacggtggacttggctgtggtgtgtggctccgaaccacttgccacagtggccttggctgtggtgtgtggctcagaaccactggccagggccttggctgcggtgtgtggctcagaaccagggtctccaggacagaaggtagagcctggggtcgctgggcggcgggcctcttgtctccgcaggcagctcagcccagcccagcagtcagggtcccagcacccgtgtaccccgcagctgccactgaggagcaatgggtgtcttcctgagccagcccacccgcttgaggctccacccctctgctcggcccaggaggcctcatagtggagggcactgttcctcctgtcactcagtggactggcccagcccagctgtccccaaggagtcctcaggcctcacgggcagcccaggcctgtcctctgcagccccatgacatgggtcatcctgccccaggcacccagccttcttctgatgctttcccttaccacctgctgacacaggcgtaccctgtgagtccccggcaggcgtcactgcccccagggctccacgtcgtctctcctgcatgtgctcagtgctgggtgggccactcccagctggaacccatgtcctgagccacccttcacagtcaggcccgtcagctccccacgggcccagagctgggcctgtatctgccaagcacggtgatccagtgggtcggggtggacatcagaagacaaaccaggtgagcagggaggaggatggccaccgtcaggcagattccaggctaaggactcctcagcaaggctagtgccgcaaaagcacatgcagcagagggagcaggggccaggggtgcttccgcctggtgggcaggggtctgtctgggagccggggcgcttctgcctggtgggcaggggtctgtctgggagccggggcgcttctgcctggtgggcaggggtctgtctgggagccggggcgcttctgcctggtgggcaggggtctgtctgggagccggggcgcttctgcctggtgggctggggtctgtctgggagccggggcgcttccgcctggtgggctggggtctgtctgggagccggggctcttccgcctggtgggctggggtctgtctgggggccggggcgcttccgcctggtgggctggggtctctctgggggccggggcgcttctgcctggtgggctggggtctgtctgggagccggggcgcttctgcctggtgggctggggtctctctgggggccggggcgcttccgcctggtgggctggggtctctctgggggccggggcgcttccgcctggtgggctggggtctctctgggggccggggcgcttctgcctggtgggctggggtctctctgggggctggggcgcttctgcctggtgggctggggtctctctgggggccggggcgcttccgcctggtgggctggggtctgtctgggggccggggcgcttccgcctggtgggctggggtctctctgggggccggggcgcttccgcctggtgggctggggtctgtctgggagccggggcgcttctgcctggtgggctggggtctctctgggggccggggcgcttctgcctggtgggctggggtctctctgggagccggggcgcttctgcctggtgggcaggggtctctctgggggccggggtgcttccgcctggtgggctggggtctgtctgggagccggggcgcttccgcctggtgggctggggtctctctgggggccggggcgcttctgcctggtgggcaggggtctctctgggggccggggtgcttccgcctggtgggctggggtctgtctgggagccggggcgcttccgcctggtgggctggggtctgtctgggggccggggcgcttctgcctggtgggctggggtctgtctgggagccggggcgcttctgcctggtgggctggggtctctctgggggccggggcgcttccgcctggtgggctggggtctgtctgggggccggggcgcttccgcctggtgggctggggtctgtctgggggctgggctggcgcccctctagaggaccttagttccctggccatcctgagcaggggctgcctgcagagttgctcctttatgtgctgggcacacccaggcctagcacggaggcacagtcggtcccgctccctcagtggctacatgccacatgaagggagtgcagcagaggtggcagagcccccgaccccctcatgcccccaactgcaggtggagccatgcctgccccccaccccccgacctccatgctcggccccatccccttccgccctaccctggcccatgtccctcctgcaggcaccagtttccctgcagtctggccctgccatgcccacctcagctgtcctgagctgggatgccaggagacgcagcgccagccccatcccttccagacccggccagctccacctcctgctcatgaggccccaagtctggctccttccccctccctctctgagcagtttctctgcctctctttgcctcattctggtccctgggcctccctccagtgtccttgagagtctcagcccagctcttggctgtgcgagatgcctgctactctcctgtgg

SEQ ID NO: 15582 - DNA, 1564 bp, Artificial sequence
  DNA replication origin
cttgttcctcattcctcctcctcccacctgggcagaggtcgaagttccctcagcttgggcgcgtggtcctccctcagcttgggtgtgtgtgtgttgttctctgagcctgggtgtgtgatcctccctcagcctgggtgtgtgttgttccctcagccagggtgtgtgttgctccctcagcctgggtgtgtgttgttctctcagcctgggtgtgtgttgttccctcagcctgggtgtgtgttgctccctcagcctgggtgtgtgttgctccctcagcctgggtgtgtgttgttccctcagcttgggcgtgtggtcctccctcagcttgggcgtgtggtcctccctcagcttgggtgtgtgatcctccctcagcttgggtgtgtgatcctccctcagcttgggtgtgtgtgtgttgttccctcagcctgggtgtgtgtgtgttgttccctcagcctgggtgtgtgttgttccctcagcctgggtgtgtgttgctccctcagcctgggtgtgtgttgttccctcagcttgggtgtgtgtgtgttgttccctcggcttgggtgtgtgtgtgttgttccctcagcctgggtgtgtgtgtgttgttctctcagcttgggtgtgtgtgtgttgttcccttagcctgagtgtgtgtgtgttgttctctcggcttgggtgtgtgtgtgttgttccctcagcctgggtgtgtgtgtgttgttccctcagcctgggtgtgtgtgtgttgttctctcggcttgggtgtgtgtgtgttgttccctcggcttgggggtgtgtgtgtgttgttcccttagcctgagtgtgtgtgtgttgttctctcggcttgggtgtgtgtgtgttgttccctcagcctgggtgtgcgcatgttgttccctcagcctgggtgtgcgcgtgttgttccctcggcttgggtgtgtgtgtgttgttccctaagcttgggtgtgtgtgttgttccctcggcttgggtgtgtggtcctccctcagcttgggtgtgtgtgtgttgctccctcagcctggatgtgtgttgttccctcagctttggtgtgtgttgttccctctgcttgggtgtgtgtgtgttgttctctcggcttgggtgtgtgtgtgttgttccctcagcctgggtgtatgtgtgttgttccctcagcttgggtgtgtgcatgttgttccctcggcttgggtgtgtgtgtgttgttccctcagcttgggtgtgtgtgtgttgttccctcagcctgagtgtgtgttgttctctcagcttgggtgtgtgtgtggtgctccctcagcctgggtgtgtgtgtgttgttccctcggcttgggtgtgtgtgtggtgctccctcagcctgggtgtgtgtgtgttgttccctcggcttgggtgtgtgttgctccctcagcttgggtgtgtgttgcttggttcagttgagtgtgtgtatctgttttgggcccagtcttgagctctgaggcgtgtgtttaaattccagggatcaaactgccctccttcctctttccatccccgccttccttggctctattttctccccgggaagcgctgagattgact

SEQ ID NO: 15583 - DNA, 1305 bp, Artificial sequence
  DNA replication origin
ggcagggacagggtgaggacccagacagcacgtgtgtggcccatggtgcccacaccaggaggcaggtgtgcgggcgaggacctgacttatctgcctgctccttagggtcttgttaggcatggaaggcagaaccagggccacttggttttggctacagcctgaggtaggggaggaagtaaaggtccagggcttgcacctcaccctggtgggtaaaatggtggtggggatggggaaatgggacacgtgcaatttggcaagtgcaggctgcgtgtccagggtagagtgacagagtgaggagcttggagagggtggtgggatgggagtggcaggagagtcattgtttttaagaatgatttgttccctcttattttctgctccctcctaatcctactacctcatatgcataaagggcagatgagttttggggtcttttccagttataatggcatattgctcttgttgagtgcatagccaggagcacatagatacatgctcagcaaatcttggatgaatagatggccctgagagagagtggatgagtggtggatggatggaggggtggatgaataggtgggtgggtgggtaaatgatgaaagggtggatggatggatgggtggatgggtgggtggataaatgggtagatggatgggtacatgtatagatggataggtgagaggacggatgggtgggtagatgcatgggtgggtagatggatgggaggatggatgtgtgggtggatggatgaatgggtggatggattggagggtgattggatggatgggtgggcagatgaggaaggggtggatggatggatgaggtgggtggccagataaatgggtagatggatgaatgggtgggtggctgggtagatggatgcatgaataggttgagtggtggatggatggatggatgggtgggtggatgggaggatggatggatggatgagttggtgggaggatggatatagatgcatatgtggatggaggaatggatggatgaatagatagggggatgcgtggtgggacaggaagatgtccggatgaatagattttgggtaaggggatggatgatgcctgcaacctttctagtagcaaaactttgggctttctctcctattagcaattagatagtgggggagctaagtgcccatcaaaagccctggtctggtggatggaatctctgggcataattttcactctgtcactgtgtgaccttgggtaagtcatttaccctctctgatgttcccttcctcatttgcaaaatgaaagggattggagtcattgcctccaagtttccttgctttgt

SEQ ID NO: 15584 - DNA, 789 bp, Artificial sequence
  DNA replication origin
cagtcttgctcccaaccactgtgctatgagagccctctgaagaagggaacaggacacaggagaaaataaaagaactggtcctgagctgaactggggaccagggaaagatatttaaagtaagatcaaggggcccccaagaagcttgccagcacagggcaccaggaagcatgtgccaagttcctgtgcagagaagaatgtggacagcaggaaaaattgaaacccacatggctgcagctgttaaccaagggaagtgagggagggccatggagggcgaggcgggcgtgaaaggagagggtaagttgagggccacatcccccaggcttgccggcccatgaggcctttgggggtttatctcaggtgccctggaggccatgggggacatcagtcagggggcatgattggatcccccagtcactggtgtgggatggatagtaggggggccaccggggcaccagaggcccctggggaggcttcggcaatggttcggatcagagatggcctggattctgtggggaggtgggtggcatggagggggaaagaggatggattccaggcatattacggagtggagggatgtgcagggttgtagttgctgggctcaggggtgagggagaagagctgtcagaaatccacccatttccggagtgagggggttacagggagagccatcaccaagagggagtttctggagtgaggagggtgcagggagagacatcaccgagagtgaacttcaggaggcccagatgcttgggttgaggtccgggttcttcccagggcctgttctgtcag

SEQ ID NO: 15585 - DNA, 705 bp, Artificial sequence
  DNA replication origin
cggtgcgaaagaacagcgtgggcaatgtattctgggcgactcccagccaggacctcggaaagccagtccctgggcccctgccccatcaggtgttgcctcctcggtctcattcttgggcctcgctcctgtcccccagcacccctaggtccagcggaacccatacctgcttgtttccctgccctccgtcccctgcgggctcccaccccaggcctccgagaccccagagaggaatggggcgatggagagggccgtgctgggaggagggggtgatgggggaggaggggccaggactctgagcagaggggaagcagagacggggaggctgcgtgcggccacagcacaggagccaggagcagactctgcagaggggagactgatggcagcacccagggcgggtggccccagcagcagctaccagccccagtgtgggcccagcccccatgacagagcgctgctggtggcctgcctactccagccccacctgccatgggctgtcagtcaaggcagggctgtctacatgctatcgagtatcaggtgggaggaagggagtctggggcaggggccactgggggcacttacaggtttgggctcttgactgagactctgggtgctcccagatgacctctccgggtgagcctgggcacatgtggcacaaattgcctctaagctctgccagctcagaactctctgggccagaatgcgatg

SEQ ID NO: 15586 - DNA, 1263 bp, Artificial sequence
  DNA replication origin
gagactctgggtgctcccagatgacctctccgggtgagcctgggcacatgtggcacaaattgcctctaagctctgccagctcagaactctctgggccagaatgcgatgggcctcagcccctgagagagggcggcggggagaaacttcccccgcactcaatcccatctctctgcttcccttcaagtgggggcagtggccgtggctccctgcagctccgcagtgcagctgggcctttgtttgcagctctggagaaaggggagacacaggatagtgggggtggcctagccccagccccgcccaggggcctctgagagttgagcctgggctgcattctcagctgcactcagctggactgcactagacggcagacaccaaagcgatccgagctctcccccgtgccggggccgcctcctccctcacaggccgggtgtgtgttagtttcctcgggctccgccaagcaccacacacagcgtggctttcacagcagacgtctattgtctggcagcggtggaggctggaagtctgaaatcaaagtgtgggcagggctgtgctccctccagatgccaggggaggatccctctgcctcttccagcttccatcagcgcctgctgccccggcatgcctctgcccctgccccggcccctaccattcttgaattccctgcccacccttctgtcttcttgaccagacgtggagctccctgagggcagggactgggtcttattatatctcctcaagctcggcctggtgctgcagcccaggagtgtctgtcggatgagcgggtgatggatttggtgagagagagatggggagtgacaggctcagacgtgcaggtgtgggggtggccagggcgcactctgggacatttctggaggatgagggttagcaccgggacttgggctgcaccggttcaggaggcccagagggagacagggcactcagagcaagggcagctctaccaaggtgagcagcagagaggccgttctgaggctggtgctgagctggggcttagggtggggaggcagggaaggcaggagatgcagcttgtgaagggtgggctggatgtggcggggggcacgggagctgggagcagttcagtcactccagcggcctgcacgtgtgggaccagggaagaggagcctgctggcttgtgcggacaaggaggagggggctgtgattctgcgggtgggagcaggggtgcgcaggaagccactctccctccttccctccctcttctcgccgattaccctcaactgcgggtca

SEQ ID NO: 15587 - DNA, 1917 bp, Artificial sequence
  DNA replication origin
aggcaagggtggccctcaaggggggggcagtgtagcacaggtgtttcaggagagccacagcccctcaggacttgtgacagggacatggatggccttgtcctgaaggcttccctgacccaggcgactctcagtcctgatgttacaaaatatcaaaaggaaagtttaaaaagtgcccttctctagggtccaccacagtccaaataaattggaatcccctggttgtctttatttttagctacacagatgtttatcctgtgcagccattctctgaggtgcaaaacttattaattatggtaataattgtgatactgtgaatcaacagttgacaaccattcgggtctcttcagtctctaaacacccctatataagcaccagggagctccactctccaatctaagtggactggtattgccaatgcctggctttcctgagaggtaaagaggtgaggggttcaagctgtcctggcatgaggagcatagggctccaagacaggggcagatggggggagatgaggagatggggagatgatgacatggagagatgagaacatggagagatggagagatgatggagaggtgatggggagatgggaagatggggagatgatggggagatgaagagatggggagatgaaaagatggcgaggtggggagatgaggagatgtggagatgatggggagatggggagatgaaggggagctgagcagatgataggaaaatggggagataatggggagatgatgaggagataatggagagatgatgaggagatgatggggagatgagggggagatgaggaggtgatcgggaggtgatggggagttgatggggagatgggaagatgatgcggatatgatgaggagatgatgtggagatgatgtggagatgatgtggagatgatggggagatgatgaggagatgttggggatatgatgggggaatgatgcggagatgatggggagatgatggggagatgatgaggagatgatggggagatggggagatgatgtggagatgatggggatatgatgaggcatgatgcggagatgatgtggagatgatgaggagatgatgaggagttgatgaggagacgatggggatatcgggagatgatgggcagatgatggggatatgatcgggggatgatggggagatgacggagagatggggagatgatggagagatggggaaatgatggggagatgatgaagagatgatggggagatggggagatgatgtggagatgatggggatatgatgaggcatgatgtggagatgatgtggaggtgatggggagatgatggggagatgatgggtagatgggcctcaccactgcactctcctcccctgatgtgtgatgtgggaatatatttctatttccctctcatatcgtggttgactggactcaatggctgctgaagtgctgtccagctcgaacatcctaggatcatataagggggcgggtgtgaatgagttttatacactctgtggtgccctgcagccactggctgctctctcgacctacaaggagctgatgccctgggtgtgtgggagctggtgctggattcctccttgggtagtgggtctccctcctcactctacctgcctcctggtggggctaggctctggatctctgaaccgccactccctcccccagcctcagtcccttgaatgccacacagacatttgccaagcacttcattgcccagcagggtgggttaggggtccccagggctgcaggaaacagagggtccgacaaggaaacgaagctgaaagcaaaggacacggaggaggggcaggggagatgaggggaggggcaaggcagttccgaggctgagattgtcgggatccttctgcagtcaggatctccagaatgacacatttgtcaaaattatgacccaattaggcagcggtaac

SEQ ID NO: 15588 - DNA, 941 bp, Artificial sequence
  DNA replication origin
ccccacagaggcctccttctttcatggtggccaggtccttaggcaaaaaggcagcctctaaagccctgcctgggctcactccccaccccagggactcaggaagagaccaggagggaagtagaggaggcagaggagaaggcctggagttcctggggttgaggggtccatggggggacgcagggggcaggcattaggcaggtgcggagagaaagccagcccccgtctgcggatggcggggcctgatcacccctcacacggtcaaccatggtgattctgctcacggcagtgtctgctgacccatacacagcagagcagcgggacccctgctccccaaagctcccattcacgctggggtgtggggaggggggtgccatccatcaaccaaaccaggagtgacgtggacaggaatcaatctgtgatggacatggtccaagcaggtagagagtgggcggggaccctggccctctgggggtcgaggaaagctccacagaggagtgacaaggatggacaacaggatgctgagctgggctagtgaatgtcaggtggaggggaggaagtggggaggtcacctcccttcccagaggacacagcagatgcaaaggcatgaggctgaggcaggagcagaagcaggagaggagggagaaggcaagtggggggagggacagggcacatggggtctagggtcaggggtcatcccagcagtggactatcagcaccaccaggtgtgtgcgctcacccgcctggagaccccttggggcatcttgcagtggtccagaggcgaaagaaagaaggggactgagtcaaaggacattttggattggtgcttgtcatcccagccaacccatcaaaaacagcgacaaaaacacatgtggaagaaatggggcttgggtgtcatctgaagccagctctctgagtcacctgctcccctccctcctcagtga

SEQ ID NO: 15589 - DNA, 1221 bp, Artificial sequence
  DNA replication origin
ggcatcccggggacctgccaattccctcgggccgcggggccggcccagcccagcagagctgtctgcctggtgtgaaaatgaagattgatcatcgtggaaaggcagccccggctctccagagccagccgggagttgcagaaatacagagcttcattattattttaagtgttactcagctgctttattgaattctccaagtcaggaaaaattctggcgagataagaagttgacattttcagaagcggcagtgagaactgtgcgggcggcgaggacagagcagagcctgcttggcatgagagtgtctcagcccaccgcccgccacccgcagccccacgcacacatgcaggctcttgctgactcagagatcagggtggcttagccagcctcgacggacagccagcccagaggaaggcagtctcagcagagaaagtccagctgctgcctgtccctcccttcctctctccatgtctctctcccttgctttgttgagcaactactatgtgccaggcctggggcatggactagcttgaagatgccatcctttctctacttagcctcagtgtgatggtgggcaccacagcaggtcattgcttgtggtgatacaagtgtgcctgagtgacagcagaggacaggtacagggccccggggaggggcatcacctccccagctcagcgtggctcatggtcctcctgctcacccctggtgtgcagagatgcttagcagttatgtgtgaagtgcaggatggaagagcatggtaagggaagagggtgtctctggaggggctgtgagaagaagttgccattctggtcttgagggggtgtgggtttccttggagagcacctaggaggtcgctctgcaaaggtactggctggacaaaggctcctcactgatggccaggctggtgcggagggagggcagaggatgaggcggaggatgggggtgaaggcctctccgtctctctggttcctcctcctcccttgcgcccagagccgcagccagtccccagcctgctgtgctcagttccctgccctgtgtgcctggccctccaggcaaattggtcctggtccctgtcctgggccaggccacacagcacaagatgatgcacccagctcctccttccagggacttgccgtccaatcatgagaacaaacacacgtgtgcacagagccaggcctggggtgtctgtgtgccttgggggctttgtatggacatggagcctgg

SEQ ID NO: 15590 - DNA, 760 bp, Artificial sequence
  DNA replication origin
atctgccccagcagaactgagggcccgggaagtgggaggcccactcctgctgctgatggctccagagataatctcccccggatattgacaacgcaggcttcagggattttaatatcatggctccatggggacactgtgatgtctgctgttactaagcggctcagcatctgaagcctgggtgtgggagggaccaactcagccacccatctgcgcttcttatagcggtgcactcactcattcactgactcattcatccgtcccgtccctctttacccacacacccacccatcctttcagccactcattcaaccgtctacctgccccttcatgtattcatttatccacatgcccacctgcctgtccaccttatcatctaacaaggttagaagcatctactatgtgccagggcaccagtctagagagacaaagatgacttgtgcatattccttacatgcgaggagctggaaagtcaagtaagggagatgctgctactgatggtggtggtgatggtggtgatggtgatggtgatgatggtggtggtggtggtggtgatggtggtgatggtgatggtggtgatggtggtggtggtgatggtgatggtggtgatgatggtggtggtggtggtgatgatggtggtggtggtgatggtgatggtgatgatgatgatggtgatggtggtggtggtgatgatggtggtggtgatggtgatggtgatggtgatgatggtgatggtggtggtggtgatagtgatggtgatgat

SEQ ID NO: 15591 - DNA, 1346 bp, Artificial sequence
  DNA replication origin
ggcatggtgaagtgtttaccagccctgggcagagggagaaagcacctggctgtgggcacggctcattccgtggctcctggtgagggctgcccccagcagccggtgcccgtcctgctccaatcaccagcacagcttggctttggcagctccacagccggcagccccactcttctcccagctcctgtctgcccatagcagtgtcaccttccaggtggcgccagaatgaggacagcccagcacagcagttccgcgtctcccacccccgggtcggctcctgggtccgcggcacaggcggacagcccagcgcagcagttccgtctccccccggggctcctgggtccgcggcacaggcggacagcccagcgcagcagttccatctccccccggggctcctgggtcctcggcacaggcggacagcccagcgcagcagttccgcgtcttccgcccctcgctgggctcctgggtccgcggcacaggtgtcagccttattgatttctacgaccctggtgctcaccccacgtgggactcatcagggttgactggatgcaggcagtgaatgctctgagccacacctgccttgtccttctacatgagcctcaaaacagttactgggatctttgtccccgtggacagaaacagtcagggaagagctggagggatttgcctggggtcgcagggccagctaggggagagcctgcactcgaagccacctcacaacctcagctcccgggagacatgcaggaccacaggtgccacacagagaaagaaggcaggtgcctgcccagggacactcagcaacacatgggaagagtgttctcactcagaataagccaatgcccaggcagagagggaggccactccaggggaaaattgtctgggctggaggcaggccagtgtctgaactccgtgggaccaacaggggtcaggcaccatggtcgcaggccccatgaccaggtggcgctgaccaccagatccaacccccgtgataacatgtcactctcctggtacctcaatgtgggagagagatgctctcccctgggaggaggcaagtccggccctttcctgtcccacccccaggccagggagagtgcaggaatgaaaggcagcggcgagactggcaaaatgagggctggacagggggaaatggtgcctccggggctgtgattcccggcgctgctggccacatcatgccatttttccaggacctgtcagcttagggaggcagggtgcatgctgcttcagccagcatggggtcaggctggtcccccagaaccaagcatcctgcctcaccctgcactcttaccacctgtccctggccaagtccaggcagggagcaggtggactca

SEQ ID NO: 15592 - DNA, 1987 bp, Artificial sequence
  DNA replication origin
gtgtggcacctgtggtcctgcatgtctcccgggagctgaggttgtgaggtggcttcgagtgcaggctctcccctagctggccctgcgaccccaggcaaatccctccagctcttccctgactgtttctgtccacggggacaaagatcccagtaactgttttgaggctcatgtagaaggacaaggcaggtgtggctcagagcattcactgcctgcatccagtcaaccctgatgagtcccacgtggggtgagcaccagggtcgtagaaatcaataaggctgacacctgtgccgcggacccaggagcccagcgaggggcggaagacgcggaactgctgcgctgggctgtccgcctgtgccgaggacccaggagccccggggggagatggaactgctgcgctgggctgtccgcctgtgccgcggacccaggagccccggggggagacggaactgctgcgctgggctgtccgcctgtgccgcggacccaggagccgacccgggggtgggagacgcggaactgctgtgctgggctgtcctcattctggcgccacctggaaggtgacactgctatgggcagacaggagctgggagaagagtggggctgccggctgtggagctgccaaagccaagctgtgctggtgattggagcaggacgggcaccggctgctgggggcagccctcaccaggagccacggaatgagccgtgcccacagccaggtgctttctccctctgcccagggctggtaaacacttcaccatgcccaccccgctgtgactttccctgctcctgcccccaggccgccccagcccacagcagagctccctctctctccagtctcctggcctctccgatgcaggccgtgctcccagataatcccgctatgaacaggggtttcaccgagacttcatcctccctgggcagggttgggtgtgcagagtgggtgtttatggctgaagggcggggtctggaaactgtgcgggcctgaacacagacacaagggaagctgtgtgcttctccttctgaggcaggcccctgacagggcagtctagaaattgtgagtcaatcacaggctgagatggaactcggcaggtggcggggaagggggtcctcgggactcttgttgggtgaagaattaacagcgttcgtgtcctgtactccaggtctcccaggctggcctctcctggtctcagcctggggcccatccagaatgacctgctgttggtgggcacggcagtgggtagggtgacccagggcgggcaggctgtgtgtatgtagtgggtggttactgagtgagtggatggcaagcctcaccgtctaggtgtgaactgccctgcagcccagccctgctcccgcctgctgtgtgattctctaacccgtctctgaggctcaggccccatgcgcgtgggtgcggggtggctgcgggtccccacgagatcctcgtggtgagtgagctgcacctgtgctggggacttagggagtactcagcgatctagtggtgacagcagctgcagtcgtggcaggaatgaatattgtgaggtgttttacacacatagggcttcgtttaattttccaaacaaccccatgaggggctataatagtccccactcgacaatggaacgaggctcacagaggttcaagggaaacttgacgatggaatgaggctcacagaggttcgagggaacggctggaggccactcagctcaccacagagagagcttgcacatgtcagagtgggctggaaagtcaacagctgcttttgagtctgtgagccaacaaataaatgaaagggcccagcatagactctggacccagtgctgggttattctgccctgagcactggagaggttcaaatcctaggggacacctcggcggaactggaggctgcatgtgtcttagagagtgtcgggctgatggcctggagcctggctttggagtcccaggctgggccagccctgactgctgctgctcctgcccagcctcgtggacgaca

SEQ ID NO: 15593 - DNA, 1023 bp, Artificial sequence
  DNA replication origin
atgctagaagttggccagcaccaagtgaggtcaggatatggggcacgagccgtcccacccactgctcatgagtggacgttcccaccaccacccggtgcagccgctcatggcctacgacccagcaatactgcttctagaaagttccacatggcatgcacagacagacgtttctaagattgctcactgtggcatccttgcactggcaaaattgaaaacagcctaccttgcccaccaagtactggtgagtcaactgtagtgtatttaataagagggcaggcatttaaaatgtgaactagagctacatctaccaataaggataaattgcagagatgactgtgagtgagaacctctagctgggggaggtgagtacagtaacatggtattcggtaaagtttgaaaccctgcaaaagaacattctctattgtttatgggaacataaaaatgtagtaaaagtgggaaacacaagcaagtgataaacgtctgattccttgcggtggttatctctggaaggggatggagggggacggaaatgaggagggtagctggcccggcaaaggtccctccgccatgacagggtcagcaccggtgtcagggaggctggatctctaggctggggtctgagaaggtgacaggggcgggggtccctgctgcagaaactccacagggacagaggccgggagagcatttccaggacagagggagcgccagtggcaaagctgggggtgacttgaagccggaaactggggattcaagtccttcccctgagggtggggcacgcgcagatgatgtgccaggtgggccctgatgcagacgtcacaggcctgggctgcgtcactgagtcctgggacttggttctggaggccaaagaagctggttgaagaaatgtgagggggacggccggggcccaggggaggcgcctttgggagtggatggagggcctgggcaagttcagttagagggatgcagctgggggagatgggacaccccggtggggagatgccctagagggctccgctctggctg

SEQ ID NO: 15594 - DNA, 1461 bp, Artificial sequence
  DNA replication origin
acagtgaccaggggcctgcagcctctgcctggccccagcccagcctcagaaggggctggactcaccgcccagaagcccatgcctggctgctgtcttccgcctgccatttggctccggaaggccgtggcccctccccaatctgcctgcatgaaattctccttatctgcagcggcacaaatctgaaagcagatttgctgggggtatgtgcggctggcctgggattaaatccctgcctttaccacatcggggaaggtgatgcccttgagttgatgtcacaattttctcttaattaaagagaaagctcagccaggaagcgggagggaatgaagaattaaaggcgtttgcctgtagaagcccggcagtttgaggctttccatttagaatttaaaagcctccccgcgtgtctgctgcacagagataggagtggtgaaggaaatggcaatttcgcaccttcccgccacccccgcgtgtgtgtgctgggttgtcggggggcagctgtgggaaaccagcgaggatgctcctgaaacgcccgcaggggcctcgaaggctgggacctctccaaaaacagcacttggcaaatgcatgactaatcttcactgtcttccgctgttggccttttccctcccctaggtgggaacccagcggccatggtgctgctagaaacctggggagggcagtcctgggcgtcgtggaccatggggcccttcccaccctggcctaggtgctgctgagggaccaggctttgtttgtagagcccctggaggttctggagggcgctctcctggcatgggaattttctcttcaagggctacagcagggcttcctttccagtctcctacagtcctgcaaggtcactgctatcattcctgttttgaagccagggagaccagatcagggccgagcacttgctctcctcaccagtgtggggctgagggggctccaactaggtcttcaaatcccaaggccagacctgcaaacagcagttgtcccttggacccacagatgattgattggaaaacgccacagctccgtggaagggaagccgggagctgcccaggaggaaggggcgtggatgggaccgagactcgtcacagaggctgtgaccacctgccctccagcagcccaagagggaaggaagctcagggagaggaagcctgcaggcagaacccagcccaggccacctgctgtgtttggggacagaggtgggcagtccgggtgatgaccggagcgtggggatgagcttgggggatgagcaggtccgaggctcccctctctctgaaagttttaatgtttcccagccagcaacagccctctcaggacggtggccccacgtatcccgcagtttctgggaagtttatatttcatctcgttggagtcactgtctctgatgagtattgactggggctctatggtcaccctggattcaggcctgagccaagcactaaggcacaatcggcacac

SEQ ID NO: 15595 - DNA, 1256 bp, Artificial sequence
  DNA replication origin
aagctgctgccctgcccttggacttcccggcatccagaacccgagccaaaaaaagttcatttttaaaaaaattacccagtctcagggattctgttattgcaacagaaaatgaacttagacgtatgcttacaacacacagcatagtgcttgccatgaaggaacacctgttaaataaataatagtggttggtgggtgggtgcggttgtcatgagtgtccttgtcagggctggtgtgggttgttagagcagccgtcaggattgctgctgccagtgctgtgctcttgtcagagttgatgtcactgttgtcagggttgccattgtcagggctgttggtgatgatgctgggagggttgctggccccagaattgctgctgctgttgttgctgtcagcattgccatgagcgttgctgcctatgttgatattggtggtgttatcatggtggctgttgcccatgttgttggtggtacttgggttggtgttaacgtgctgtggttgatgtgtcactgttagtgtggatgtcagtgtggttggcatgctggtgtccatgttgctgttattagtggtgatgtcagtgttgctggtgtgctgtggttggtgcattgctgttaatgtgtgtgtgagtgttgctgctggtgtgttgtggttggtgccttgttgttagtgtctgtgtgagttgctggtgtgttgtagttagtgtgctattagcacctgtgtgggtgttgctggtgtgttgttgtcagtgttgttgtgtgttgctgccagtgctggtgtcaatgctgttatcagtgttgttgtgtgttgccatgccatggttagttgtgttctagtccatgtgctgtggttggggctggcattgctggtgttggcattggtgttgttggggttggggttggtggtggtggtggtggtgtggtgttgttggtgttagtgttggtgttctgatgtggtgttggtggtgttggtgttggtggtgttgttggtgtggtggtgttggtgtggtgttgttggtgttggtgttggtggtgttggtgttggtgtggtgttgttggtgttggtgtggtgtgatgatggtggtggtattgtggtaataggatggtggtggtagtatggtggtggtggtggtaacagtaggcatggtggtgattactatataacgatgataacgttcttgtggaggtgactgtgtcgatgacacacttgtgtgtctgatgccaagtgctccctggacttctgtttgctcctgggctcttttccat

SEQ ID NO: 15596 - DNA, 1067 bp, Artificial sequence
  DNA replication origin
tatcttctctgtcaaagtctaccccaggggactgtgagccccaccagagctggggaccttgtttggctcacagtgtaaccagcacctattctagtgccagccacagagtcagagatggagtgctcagagagggtcctgatggatggatagatgggaagatggacctatggatggacagatggagtgatagatggctggacagatgagtggatggatgagtgggtggatggatgggtgaatggatggatgggtgggtgagtgaacaggtggatggatgggtggatggatagatgggtggatggatgaatggttggatgggtggatggatgggtgggtgaacaggtggaaggatggatgggtggatgaatgggtggttgaacaggtggatggatgggtggatgagtggatagatgaacaggtgggtgggtggatggatggatggatggatggatagatggatggatggatggatggatggatggatggggtggataggtggatggatgagtgggtgggtggatggatggatgggtggataggtgaacaggtggatggatggatagatggatggatgggtggaaatacgggtgggtgaacaggtggttggatgaatggatgggtggataggtggatggctggatgggtgggtgaacagttagatggatggatggatgaacaggtggatgggtggataggtgaacaggtggatggatggatggatgggtagatggaaagtatggaatacaggaaaggtggtaataataacagcatagctacagctggcttttgtggtgacagtgacagtccaggggccatttggtgactgaaaatggtgatagcagtgacgacaaaggtgacaatgacagcacaaaagcttgtccagcacttctttccagtccaattccctgtgcttacaacaactgacggtgccctccctctgccatgtgacaggacagggctgtttccttgacaattcattctctgcaatgacagctgcccctggcgcttcccatacaagtgagggtttcctcctgcgtcctgccgcagccactggaatccaatgcaca

SEQ ID NO: 15597 - DNA, 1466 bp, Artificial sequence
  DNA replication origin
tgcgccagccacttctagagggtaccttcctcagcgggaccactgcggtcaccggccacatggtcagctttaggcaccactgtcagaggctgttagaataggcacagctgggtctgtgacccaggagctgtgtaaccttgcctaagttacctgacctctctgaatgtcaagttccgatcagtagagggcgagtgatgcagctggcatctcaggccccctatgggtgctgtgggaacagccagcaagactgcctgccaatgagagatggtggtggagtgggatgaggccccacaactccacgctgtctaggtgggggggtgcagagggctgggaagcactggagggtcccagggcaggggtagccacactcatgcagggctgccaggaggaggctgctggggggacaggctgaggggacaagccaaggggacaggccaagtggacaggctgagtggataggctgaggggacagacctggtggacaggcggggtggacaggccaaaaggacaggctgagggtacaggccaatgagacaggcctggtggacaggctgaggggccaggctgaggggacagacatggtggacaggctgggtgggcaggccgagtggacaggctgaggggacaggccaggtggacaggccaagggaacaggcaaggggacaggccaggtgacaggctgagtggacaggccgaggggacaggccgaggggcaggcaaggggacatgccgaagggagaggctgacaggacatgacaggtggtcaggccgaggggacaggctgacaagacaggccaaggggacaggctgaggggataggccaggtggtcaggccgaatggacaggttgggttgtcaggctgagaggacaggcttggtggacaggccgagaagacaggcagacgggacaggcctaggggtcaggccatctcagggagtggtggcggggatatttgtgcaaacgctcagaggccaagaaactcactggtgggtggtgggagctagagagccacctggcatggctggggcatgaggctcaaggagggtgcaggaggtgggccattagattctggccacagggtgggagccatctatgccaagggcagtagtgaagattggatgtgtgagtcactgggggcccataaggggcttaacttgggaagcgcatagccaggtgggtgtgttagggacagcagggactggcagggtactgggagggggtgtgccttgaggcggggcgacagagaggctgtggctatgtccagaatggggccagcaccacagcagaggccttgggggtggaggcagggatgcactgggtgggatcccaggaaaggacttcccaatgctgcacctgtagtctgtcccggttctgtaaatgtagtggggagtcccaaggacgagtgctctatccaggcttgtgcctctgctgggggctggggatatgggttggggctgtggtgggga

SEQ ID NO: 15598 - DNA, 714 bp, Artificial sequence
  DNA replication origin
gagagcagctgcagcggggcacactactgtctggatggccagatctgggaggcttctcaggaggagtattttaaagggctcttgaggagtgggtagaaattccatgacccaaggaagggaagggggttcctgtgggaaggcaggggaggcaggggagccctggagagacgaggcggggcaggtgggagggagctagagtgcgggtcctcacacactgtgctcagtgagcacagggcagtgagactccattcaacctccggggtgggtgcctaagggccacaaggtcaaaggtgagcttgcatctgtctccaggcagccctgggggcttgggcggcaggaaggcgggaggtcaatacaatagccctggtgggacccgggaggtgtccttgaaggttatctgggagccagaatgaggagacttggcccagggcctctgtagcccaccccgagcagctgatggggaggggagtgaggaggcagctgtggttctcacccttcaccgtggctggagggtctgggtgggaagggggtgcagggaacaggcatattacactctgaatgcggagcgggaaacatggaaggattcattgtcgggagactggggagggatgggctctgctggtgaagggctttgaatgcgcactggagagttttggttttattcttcttgaatttccttcttctaaacagggacagacttggggtctctgagca

SEQ ID NO: 15599 - DNA, 1135 bp, Artificial sequence
  DNA replication origin
caggggatgagggtgctgggggtcaggggatgagggtgctgggggtcgggggtgagggtgctggaggtcaggggatgagggtgctgggggtcagggagatgagggtgctgggggtcaggggatgagggtgctggaggtcaggggatgagggtgctgggggtcagggagatgagggtgctgggggtcagggatgagggtgctgggggtcagggtatgagggtgctgggggtcagcggatgagggtgctgggggtcaggggatgagggtgctgggggtcagggagtgagggtgctgggggtcaggggatgagggtgctgggggtcagggagatgagggtgctgggggtcagggagatgagggtgctgggggtcagggatgagggtgctgggggtcaggggtgggtgtgctgggggtcaggggtgagggtgctgggggtcagggtatgagggtgctgggggtcagcggatgagggtgctgggggtcagggtatgagggtgctgggggtcagggagtgagggtgcagggggtcaggagatgagggtgctgggggtcaggggtgggggtgctgggggtcaggggtgagggttctgggggtcaggagatgagggtgctgggggtcagggagatggatatggtggcaggctctgcccagggagtctgcttggggctgcgaccgggtatgtgtcctgtttgcgttgtccctggcctttgagacaccaactttctggagcaattggactgggctgggaagggtggggatggctgcagagatggggcctctgttcccccaagaggcagctctgtgttctattaaactttgttggctgtaacattttgcactgagagagctctctccgccaaacatcacccagactcatgcattatttaccagctaatatcacaagagcgatgtatacagaccagccctccccgccctccccgccctccccgccctggaggcaccgtgagccctgccagctccacttgtactacacgcctgggtcagccacgccacctctggcaccaccgacgcgcttatgcctgacttctgtggccaaaacagggagtaactggcagaacaaagactcagttcttcccagcttgtccagctaagatgaagaatggagaaggagcc

SEQ ID NO: 15600 - DNA, 974 bp, Artificial sequence
  DNA replication origin
tcctctgggggctgtagcagtcaggtgtcacaccagtgcccgtggcatggagcagccagagctggagggcacttggcacctcttgcaggacctgggggtgtgggggtgctccccagatgagcagacgttagacctgaacagtgaggggctgggggaggtgtcctggggaaagaacggtggggaggaaggtgttgtctggagaaggcttgtcctgcacagggaaggagggaaggagcagggagtggaggcacctgagcatggccaaggccaagggacctcagctcctgccacaaaaggtggagtggggctggcggtggagtccggaaagtggcatctctgcagtaggataccaccttgggctggcagagcctgcaccctgagtctcctggggaaggtagaaaagtctctgctccttccttaccagctgagtgagcttgggcaagtcccttaacctctctatgtctcacttcctcatcagtaaaaatggggataaaaattgtccccaagtcagagggtggttgagggttaagttaatgaacattcgtcatatgctcagaacagcactggggtttgtaagcctcaccttgaggatggtgacgggggaatgggagaggggaggagggccgagcacctaggggcatctgcagtggccctggatgaggggaagccaccagagcccaggagtgcagcagagaggccaagtgtgaggctttcgataacgcgggctgggaatggagctccaggggtgcaggggcaggaaaagcaggctggcctggagcaggctgcatgcggtaccggagggtgagggtgacaggggcaggagggcaggagagcagagtgggacagaggacaggatcctggggacacggtactgtgtgtcaagctgagtgggtggccagcggtagaggaaggtttgtgcaaaacagacggagagatgctcacgtccaagaaagccagggcacggcacccggggg

SEQ ID NO: 15601 - DNA, 1107 bp, Artificial sequence
  DNA replication origin
atattttaaattgccacgctagacaggtaagcgaggtagggggacagaaagagtgtctgggaggacgcagggctccatgggggacagaagccatcaccccatgagagcaaagcccactctgctgtgagcattttcctttttgggaggcgtggagaaggaggcctctggtgggaactgagtttgggttttcctagtaggcgccatgggaggccaggaggcagggaggcaatgaccaaggtcgggttataggggagagtgtggtccaccacaggcagggaaagcaaacccagaggctgctggacctggaggcagtgggaggccaagacctggtgccttgggaggggcagagcctgtgggctggaagggcaggaggacaggcagagggcaacattctgccttgtgaggtttcagagctggtgagggcgactggaattgcggaggcagggagcaaagaccatcctggttaaacactgcagttacactggatgaccgctggtgggggcagtgtgggaggggcagactgaggacaagaggtgggggtttgaagatcccaccaatttctttaccctggggagttgcaggggtagcaggggaaagtttggggaacaggcgcagtggggagggagacagagcacagcgtgacaatgagggccctggggagaaaggggctgggctctcagggctcctgcatgggacagtgatgggaggcttgcagctctggggctgagagcttctgtgtgggcctggcctttggccccagaggcatcaaggatgaggattttcacaggcaagccactggtcttgcaggggacctgggtcatgctgacagaaatcctgggcttgagatgtcacccccaggagcaagggcaagaaaaactgaagatgctttataggagggtgatgctagctagcagcctcctgttaaaggaagattgctggatgatgggtgagaagatgggccagcatagtgagaatggcattgtgatgggggtaggggctgccaagggctgtgatcagaaggacaggcagggttggctccaaggggtgagcccctggctgacaggttgactgcaaaccctaaggggccatgtgcaggagttcagggga

SEQ ID NO: 15602 - DNA, 2123 bp, Artificial sequence
  DNA replication origin
atgtttagggtggcaggtattagtatttttataatcattgagttataataaatctaaagtaaacatgcaaaatgtggtgtccagattggtgaaaactgacaatagtacacagatgatttctaatattccagaatttttctcatgccatttggcatttacttcttcccactcccagaagcaaatactgctctacacggattctagagcttcacaggaacggaatcataaaatatatacctcttttgcctctgatcttttcattcaacatgttttgggaattcactcttgttggtggatatttcaatagtcaacttccttttattgttacatagcattgtgttgtatgaagatacctcgattttgcttatttctggttaatggacacagggaaataatatgtgagataacaacaaaatactaacaaggagggcaggggaagttggagctaatctcagatgatggaatagagatggacaggttgtagcctccaaggtcacacaatatcagggtgagcaccagaagcaggtgagagtgctggtggtgggcacggtgtataggtgagagtgatgggcatggtgtgtaggtgagggtggtggtggtgggcacagtgtgtgggtgagggtggtgggcacagtgtgtgggtgagggtggtggttggcactgtgtgtaggtgagggtggtggtcgtgggcaccgtgtgtaggtgagggtgtgatgggcacaggggcaggtgagggtggtggtgggcacagtgtgtaggtgagggtggtgatgggcatagggtcaggtgagggtggtggtgggcaccgtgtgtgggtgagggtggtggttggcactgtgtgtaggtgagggtggtggtcgtgggcaccgtgtgtaggtgagggtgtgatgggcacagggtcaggtgagggtggtggtgggcaccatgtgtaggtgagggtggtgatgggcacaggggcaggtgagggtggtggtggtgggcacagtgtgtaggtgagggtgtgatgggcatagggtcaggtgagggtggtggtggtgggcacagtgtgtgggtgagggtgtgatgggcatagggtcaggtgagggcggtggtggtgggcacagtgtgtgagtgagggtggtgggcacagtgtgtgggtgagggtggtggttggcactgtgtgtaggtgagggtggtggtcgtgggcaccgtgtgtaggtgagggtgtgatgggcacaggggcaggtgagggtggtggtgggcacagtgtgtaggtgagggtggtgatgggcacagggtcaggtgagggtggtggtggtgggcacagtgtgtgggtgagggtggtggttggcactgtgtgtaggtgagggtggtggtcgtgggcactgtgtgtaggtgagggtgtgatgggcacagggtcaggtgagggtggtggtgggcaccatgtgtaggtgagggtggtgataggcacaggggcaggtgagggtggtggtgggcacagtgtgtaggtgagggtgtgatgggcacagggtcaggtgagggtggtgggcacagtgtgtgagtgagggtgtgatgggcacagggtcaggtgagggtggtggtggacacagtgtgtgggtgagagtggtggttggcactgtgtgtaggctagggtggtggtcgtgggcaccgtgtgtaggtgagggtgtgatgggcacagaggcaggtgagggtggtgggcaccatgtgtaggtgagggtgtgatgggcacaggggcaggtgagggtagtgggcaccgtgtgtaggtgagggtggtggtgggcactgtgtgtaggtgagggtggtggtggtgggcaccgtgtgtaggtgagggtggtggtgggcacaggggcaggtgagggtggtggtgggcaccatgtgtaggtgagggtggtggtgggcacaggggcaggggagggtggtgggcaccatgtgcaggtgagggtgtgatgggcacaggggcaggtgagggtggtggtcttgttcttaggggtagagcagggttgtgaagtgcacagtggcctggaaaggtggtggtgggtttcagtgcagattcaggatgtgaggactgtgacacacatttgaacacaatgacatttgtgaccatgccgccttctgagattgct

SEQ ID NO: 15603 - DNA, 1322 bp, Artificial sequence
  DNA replication origin
gggagagagctgtgctaagtgtttggcgcccacttatccaatccgctcagtgtgaagggcacgattcaataaagctcctgtcacttctgcttgtggctgtgcaggagccaaaaaattgatttcaggatcagacaccttaatcagggcaggagtgaggcatcttctctggcagagagaaaatggggcttgcattgaatttggcctaaagacaccacacatggctgtcgtctctggacatcactgagcctgggtgctgccgtgaagggtggagagcagccttcctggcctggactgtgttccccgcccacctgtgcaggcgccagacagtggagtcaggctgcagctcctggctccaggagaggagaggtttctgttaatggacacagggaaataatatgtgagataacaacaaaatactaacaaggagggcaggggaagttgcagctaatctcagatgatggaatagagatggacaggttgtagcctccaaggtcacacaatatcagggtgagcaccagaggcaggtgagagtgcttgtggtgggcacggtgtataggtgagagtgatgggcatggtgtgtaggtgagggtggtggtggtgggcacggtgtataggtaagggtgatgggaattgtgtgtaggggagggtggcgatgggtgtataggtgagggtgatgggaactgtgtgtaggggagggtggtgacgggcatggtgtataggtgagggtgatgggaactgtgtgtaggggagggtggtgacgggcatggtgtataggtgagggtgatgggaactgtgtgtaggggagggtggtgacgggcatggtgtataggtgagggtgatgggaactgtgtgtaggggagggaggtgatgggcacagtgtgtagctgagagtgatgggcacagtgtgtaggtgagggtgatgggaactgtgtgtaggggagggtggtgacgggcacggtgtataggtgagggtgatgggaactgtgtgtaggggagggaggtgatgggcacagtgtgtagctgagagtgatgggcacagtgtgttggtgagggtgatgggaactgtgtgtagtggagggtagtgatgggtgtataggtgagggtgatgggaactgtgtgtaggggacggtggtgatgggcacagtgtgtaggtgagggtgatgggaactgtgtgtaggggagggtggtgatgggaactgtgtgtaggggagggaggtgatgggcacagtgtataggtgtgcagtccctccgcggccagctgcccttctggtcaccacttacaggtgtgccctgcatctacctggttcccacgtggacgtccc

SEQ ID NO: 15604 - DNA, 1936 bp, Artificial sequence
  DNA replication origin
caccagttcttggaaatgaaaagcaaaacgcttgtcactcatctttgtgatcatcccgagagacagaaaaggacaaggggaacgaaaagtgtggggtggccggtgttgcccctggatgagaccttgagcggtaacggggtatggatcttgggggacggggtctcagtccatccgactgctctagccatgtgccacggactgggtgggatccaaaaacccggcctgcattcccacggctctgcagcccggacgcccaagaccagggcgggttccgtgtctggggagggctgatgttcccggttcacagacggcgccttcaggctgtgtcctcatatgaggggagggggagggaagctctggcctcctctaaggacactcagcccactgacaagggctccgtccccaggacctcaggccctttctcctaacaccatcacacggggctacaaggtttgcacgctcactcccgcaactgtgtgctcgcatgcctttgtgtgtctgtgtgagtgtgtggagagcatacatgtgacagtgtgtctatgtgtgagtgtgtgggagagtgtgtggtgtgtgacagaatgtgtgtgtgtgactgtgtgagtgtgtgtgtgggagaatgtgtggtgtgatgtgtgtgtcagtgtgtgagagtatgttttgtgtgtgcatgagcatgttgctgtgtatgtgtaagtgtgtgggagacagtgtgtttgtgtgtgcgtgtgagacagcgtgtcataaatgtatgtgagcatgttggtgtgtgtgagtgtgtgggagacagtgtgttttgtgtaagtgtgtaggagatagtgtgtgtgtgatttgaacttggtgtgagtgtgtgtgggagactgtgttgtgggcatgttggtgtgtgtgtgtgtggaagactgtgttttgagcatgttggtgtgagtgtgtgggagacagtgtgttgtgtgtgagtgtgtgtgggagacagtgtgtcgtgaatgtatgtgagcatgttggtgtgcatttgtgtaagtatgtgtgagacagtgtgttgtgtgtatgagacagtgtggtgtgtgtgtgagagtgtgttttgtgtgagtgtgtgtgggagacagtgtattgtgaatgtatgtgagcatggtgtgtgtttgtgtgagtatgtgtgagacagtgtgttgtgtgtatgagacagtgtggtgtgtgtgtgtgagactgttttgtgtgagtgtgtgtggcagacagtgtgctgtgcatgtatgtgagcatgttggtgtgtgtgagtgtgtgggagacagtgtggtgtctgtgagtgtgtgtggtgtgtgggagacagtgtgttgtgagcatgttggtatctatgatggttaatactaagtgtaaacttgattggattgaaggatgcgaagtattgttgctgggtgtgtctgtgagggtgtcgccaaaggagtggtttgccaggggctctggggccttcggccacagactgaagtgcaccgtctccttccctgcttttgaggttccctttatatacatctatcctattagttctgtccctctagagaaccctaacacagtatgtgtacatgtgaatgcgtgtgtgagagagtgtgtggtgtgtacgtgtgaagaatgtgtcagcatgtgagtgtcagcatgggtgagtgagtgtgtgtggggtgtttcaggatgagagagtgcatgtgtggctatgtgtgtgacagcatgttttgtgtgtgtgtgagcatgttggtgtatgtgtatgtgtgagtgtgtggtgtgtgtgtcagcaagggagagtgtgtgtgagactgtgtgtgtgagagcatgttttgtgtgtgtgggtgagcatgttgatgtgtgtatctctgtgagtgtgcaatgtgtgagtgcgagtgtgtcagcatgtgagtgtatgggtgtgtgcctgctcgtgtctcctgatgtgctcagtgtg

SEQ ID NO: 15605 - DNA, 828 bp, Artificial sequence
  DNA replication origin
tcaaattaattggttcagctgtgacctctggtccccaggaaaggttgggagtgttggctacacagggtggaaaaacccagccgagcggacacagtaattggtcctgaactctgtgccagctgggtggtccatgaggagagctgtttcctgcctggcccctgacctctcctgtgatgtctgccttcggctgccaatctgcaaagggaaattgggacgcagccaaggggagggagccacaggagactggcaggaatcacaggagtctggtgggagcttgggaggctggtgggaccatggggggagcttgggaggctggtgggaccatggggggatggtgggagtcctgggaggctggtgggaccatggagggtggtgggagtcctgggaggctggtgggaccatgggaggttggcaggaaccatataagtctagtgggaatcttgggaagctgatgcttatcctgggaggctgacaggagtcctgggaggctggtgtgaatcctgggaggctggtggggatcctgggagacggctgatgggaatcactggaagctggtgagaaccctacgagtctgctgggagccctgggagtgtggttgaagccatggcaggttggaagaaaccatggtctggtgggattttggggaggctaggaggaaccacaggaggcagtgtgagtcatggaagtgatggaggtctggtgggacttaggggaggctgatgggattaggactggtggttgtgggaagaggtggccccatggacttgtccctgtgcctgcagctgacctctgtcctgagaaggagattgaagtcacacagggcctcag

SEQ ID NO: 15606 - DNA, 935 bp, Artificial sequence
  DNA replication origin
cctcaggcaacccgcacaggagctgtgaggcctcactggccccagctgtaaagcagaggaaacagttccagtgattccagacccaccaccaaatgccaagccagctttcagctggggctttgccagggtttcctgacacagagaaagaacaagccagtgattcccttctgactctgcaatggagccaggccacaggcagagtgagggccagactgcagctggagcaggtagggccaggtcaccttaggccaccaaggaaggctctactaggaacgggcattcccgaggacactggggaactggaggggaggcctagggaggaaggagaggcctggggaggaggggaggtgggggaggcctagggaggagtggcaggcctagggaggagggggcagcctaaggaggaggggaggaggagggggaggcctagggaggaggaggaggcctgaggaggaggtgaggagggggaggcctaaggaggagggggtgcctagggtggatggctagacctgagggtgggaggcctgggggtgtcatgaggaaggcttcagtgggggtggaggtgtgttggggtagattggtctgcagggcactgccagccatggctgagcctccatctccctcaccccctgtggggagagctggtcagatggctccgtgtgggcagggacagcctctgggtgggatgctccatggccatggagctctgtgctggtgggtaggctctggccctgagtgcggagccaccttccctgcccaccattggccttccctgcagtcagctgacagctgtgcctagcgacagggtcctgggatctagtggccacagtctacctggaaccggcaaggtctatgcccggctctccatccacagagtcccacagagagagtgctctcagacacccctcaccgcccaggccaggagtcagacaccc

SEQ ID NO: 15607 - DNA, 787 bp, Artificial sequence
  DNA replication origin
cttcatttgcgtgagtccagctgtgcccagtccccgtggagagctcctggaaatgcaggtgcagtgcagccctggcctctgagtgacttcaaggaagaagcacgttcccagagaaaccatgatcctggattgtgttgagtgggagtcctggcagaggggagcctgatatggctcatggggggcctccaggatgagagggcagcaaccctgagtaagtgaggggagtgaaggctctctgggcagaggagccaacagtgggacaaggccaacaggtagcagagagcagagggtgtctgggagcgaggcttctccaggcgcaggtgcagctgggagagatgaggctgggtgggggaagggccttgggtcaaggtctgcaacggggcattgtcctgaaagtggtgggaaacactgatgacattgaaatgaggctatagcggaagctgatttgtgacttaaagactgctctggcttttgtgtggggtgctgaggctggaaaggcgctgtcactatcacctaggcggggctggtggtctcaccgtggtgggagcagggagctagagcccaaggactgaattccataagcagttcagaggcagacgggacagaatttagtgaggggttggcatggggatgatggaggagaaagagcctcaggtttctggtttgggcagctgtgtggcgggaggggcgagactgggaatttaagaaagagtggggatcatgagtgttgggaggaagagaaaatggcctgaagcctgggtgtgcagtgctggtacccaggtgagtg

SEQ ID NO: 15608 - DNA, 1184 bp, Artificial sequence
  DNA replication origin
caagagggagacagagggaggtctcctttgtgcttagaaggggaggggaccttggaaccagtgacaagcattgacatccaccacagtcaccaaggacaaaaactatcctggtctcaggacctctcacctgggaatccccatgacacactcctccctgcatccatccacagtgcaaggctgtggaaacaagtgtgggggtggctttgaatcctggcctgtcacaaccctcagcacaaactagtctagctctgattcattagcactggtgaaggaatgaaggaaggggagaaggatgggtggtgacggatggatggatggatagtgggcggactggggatagatgaatggatggatggatggatggacggatgggtgtgtgagtgaggggatgaatggatggatggatagtgggtggactggggatggatgaatggatgggtgggtgggtgggtggatgggtggatggatggattgtgaatgaggggatgaatggatggatggatagtgggtggactggggatagatgaatggatggatggatgaatgtgtgagtgaggggatgaatggatggatggatagggtggactggggatggatgaatggatgggtggatgggtggatgtgtgagtgaggggatgaatggatggatggatagtgggtggactggagatggatgaatggatgggtggatgggtgggggggtgagtggatggtggatgggtgggtggatggatggatgtgtgagtgaggggatgaatggatgcatggataatgggtgggttggggttggatgaatggataggtacacgggtagatggtgggtggatgggtggatggatgggtggatgagtggatagtgggtggatgggtggatggtgggtagatgtgtggacaattgggtgtgtggatggatgggtgggtgtgtggatggatggtgtgtgaatgaacggatggatggatggtgggtgggcagatgatggaggaatagattcatttttgtttattttgtaccacatgttttcatgaattatgtaatttatcctcgtggccccatgttatcatggtttctaatggacaatcaaggaggctgaagtcgagatgcctagctggtgtttccagggtctcactggaagtgcagggtaactgaggtgggatgtaagcccagcccatgcatggtcaggaca

SEQ ID NO: 15609 - DNA, 1175 bp, Artificial sequence
  DNA replication origin
atttccacttgtgaattctgagagatgcaaacatcgggaggcagcacccggatgcccctcgaggctggcacagagcgcggctccctggacgctcgtggagtgaacggatgagttgatggtctctaagccggtattctttcggtaaagaggaagttttgtctgatgacccatgaagtccacatcctcgtcaagataaaggtgggatcagttaggagatgaattcatgctgcatggaagcagggctcccagtaatgactcaattccacagtcagtggagctagatacggggtatgtgtgggtgatgggtgtgtgtgcacacacagtaggtgcctgcacggtgggtgtggtgtgtctgtgtgtaggtgatgggtgtgtgtgcacacagtaggtgcctgcacggtgggtgtggtgtgtctgtgtgtgggtgatgggtgtgtgtgcacacacagtaggtgcctgcatggtgggtgtggtgtgtctgtgtgtggtgatgggtgtgtgtgtgtgtgtctgtatggtgggtgtggtatgtctgggcatgtgtgcatgtctgtatggtgggtgtggtgtgtctgggtgtgtgggtgtgtctgtgtggtgggtgtggtgtgtctgtgtgtgggtgatgggtgtgtgtgtgtctgtgtggtgggtgtggtgtgtctgggtgtgggtgatgggtgtgtgtgtgtctgtatggtgggtgtggtgtgtctgggtgtgtgtgtgtgtgtgtggtgggtgcggtgtgtctgtgtgtgggtgatgggtgtgtgtgtgtgtctgtatggtgggtgcaatgtgtctgggtgtgtgtgtgtgtctctggtgggtgtggtgtgtctggtgtgtaatgggtgtgtgcgcatgtgtctgtgtggtgggtgtggaaatgtccaggtgtgtgtgacatgtccaggtgtgtgtgacgggggtgtgtgtctgtgtggtgtgtctgggtgtatgggatggtgtgtgtgtctgtgcagtgggtgtgatgtatgtgtgatggctgggtgtgtgtgatgggggtgtgtgtctgtgtggtgtgtccgggtgtatgtgatgggtgtgtgtgtctgtgcggtgggtgtgatgtgtgtgatgggtgtgtatgtgtgtgtctgtgcagtgggcgcggtgtgtccaggtgcgagtggtggctgctcaggggc

SEQ ID NO: 15610 - DNA, 1617 bp, Artificial sequence
  DNA replication origin
tcagggagagcccgtggtggaggcagaagccaggaaccctgaaaggctgctggagaaccttcctcgcctctctggaggcagaagagggaaggggtgcagccagccaggaaggagacatcgtggctcagtaccagggaccagctggcctcgggtggagccgggagggctgggatttcacagcaatcactgagcgtcagcctcacacggcccagagcacaaagctactcagcctcccacagtctcctgatccagtgctgcaacctcgtgatcctggacactaagcagcgtatttacctgcttattaagacccccatggagcagcgagcaagggctactgctggcaaaatctaagaggggtttgcagcttgctggccaaagacttggactgactcaatcaccatggagaccagagcatctggcaccacgtggcacagcccaggacctcagccttgttcctcagcagccctggggggaggcttcttagctcccgtttttgtagaaacataggtcacttgggacagccattgatgatgatgatagtgatgacatttgtggtggtgatggtggaggggtgacgacagtaatggtggtggtgataatgatgtaacgatgggggtgctgatggtgacggtggtgatggaggtgatggtgatgatgtaatgatggggtgctgatggtgatggtgatgatgaaggtgatggtgataatgatgtaatgatgggggtgctgatggtgatggtggtgatggaggtgctggtgatgatgtaacgatgggggtgctgatggtgacggtgatgatggaggtggtggtgataatgatgtaacgatgggggtgctgatggtgacggtggtgatggaggtgatggtgataatgacgtaatgatgggggtgctgatggtgccggtggtgatggaggtgttggtgatgatgtaacgatgggggtgctgatggtgatggtggagatggtggtggtgatgacgtaacgatgggggtgctgatggtgatggtggtgacggaggtggtggtggtggtgatgatgtaacgatgagtgatggtggtgatggagatgatgatgaggtaacaatgggggtgctgatggtgacggtggtgatggaggtggtggtggtgatgatgatgtaacgatgagtgacaatggtgatggagatggtgatgatgtaacgatgggggtgctgatggtgacggtggtgaaggagatggtgatgaggtaatgatgggggtgctgatggtgatgaggaccatgtaactgtggtgatgttggcggtggtggcaatggagatgactgtgatgatggcagtagtggttatggggtcttccctctgcatggagaacacttggagcctcacaaatgctccatgtttcatgatggaggttccagaggttgtgagcagaggtggggcagataacgccaagtcctacagctgggaggaggggagggcagcactgttggcactttcttgtgttgaggatttcacttgagcctcccagcagccctttggaaccaagcacatcacctccatgactccctccctcccccaaagccttaaaacggagataaccccggttccccttccagcatcagtgtgtgccatccccctc

SEQ ID NO: 15611 - DNA, 1047 bp, Artificial sequence
  DNA replication origin
aggacttatgttgacacaaaaatctgtacataaatgtttatagcagctttatttgtaagagccaaaaactggaaacaaatccagatgtcctttagtgggtgactgatcaaagaaactgccacaccatggaagactactcagtagtgaaaagaaacaagctactgctgtatgccacaatctgggtgagtctccagaggataatgctgggtggaaaaagccagtcccagaggattccatactgcatgattccattatatcatattactgaaatgacaaaactgtagagatagagagaacagattagtggtttccatgggttaaagaggtggtggggcagaagacaagtgaatgtggctacaaagggtgacacatggattctttacagtaatgaagagtttctgtgggatctttgtggtgatgggaatgttctttagggtctttgtggtgatggagatgttctgtggggtcttcatggtgatggagatgttctgtggggtcttcgtggtgatggagatgttctgtggggtcttcatggtgatggagatgctctgtggggtcttcatggtgatggagatgttctgtggggtcttcatggtgatggagatgttctgtggggtcttcgtggtgatggagatgctctgtggggtcttcatggtgatggagatgctctgtggggtcttcatggtgatgtggatgttctgtggggtcttcatggtgatgtggatgctctgtggggtcttcatggtgatggggatgtcctgtggggtcttcatggtgatggagatgctctgtggggtcttcatggtgatggagatgctctgtggggtcttcacggtgatggagatgttttgtggggtcttcatggtgatatggatgttttgtggggtcttcatggtgatggggatgttctgtggggtcttcatggtgatggggatgctctgtggggtcttcatagtgatggggatgttctgtggggtcttcatggtgatggagatgctctgtggggtcttcggtgtggtggagtcattctgtatcttgaccgtttcc

SEQ ID NO: 15612 - DNA, 1994 bp, Artificial sequence
  DNA replication origin
gtgttccagtttggataatttctctagatatactttattccacactgaccctgggagagcccacatcccacctctctcctgcttcattccacgctggaccctggaagagcccgcatcccgcctctctcctgcttcattccacgctagaccctgggggggagcccgcgtcccacctctctcctgcttcattccacgctggaccccgggagagcccgcatcccgcctctcttctgccgtattccacgctggaccccgggagagcctgcatcctgcctctctcctgctgtattccatgctggaccccgggagagcccgcatcccacctctctcttgttgtattccacactgaccctgggagagcccacatcctgcctctctcctgcttcattccacgctggactccgggagagcctgcgtcccgcctctctcctgctttatcccactcttattttactggatgcttgtttacctgtgggtagaggcgaggaggggcttctctgagtttctgattgagcctctgcctccacagaacctgtgtcctggaatgtgtgtctgggatgtgtgtgtgtctggggtgtgtgtctggggtgtgtgtgtgtctgagatgtgtgtgtctgtggtgtgtgtctgggatgtgtgtctgggatgtgtgtgtgcctgggatgtgtgtctgggatgtgtgtgtgtctgggatgtgtgtctggggtgtgtgtgtgtctgagatgtgtgtgtgtctggggtgtgtgtctggggggtgtgtgtgtgtccgggatgtgtgtgtgtctggggtgtgtgtctacagtgtgtatctgggatgtgtctgtgtctggggtgtgtgtctgggatgtgtgtgtgtctggggtgtgtgtctgggatgtgtgtgtgtctggggtgtgtatctggggtgtgtgtctgggatgtgtgtctggggtgtgtgtctgggatgtgtgtgtgtctggggcgtgtgtctggggcgtgtgtctgggatgtgtgtctggggtgtgtgtctgggatgtgtgtgtgtctggagtgtgtgtctgggatgtgtgtctgggatgtgtgtctggggtgtgtgtctgggatgtgtgtctggggtgtgtatctggggtgtgtgtctgggatgtgtgtctggggtgtgtatctggggtgtgtgtctgggatgtgtgtctggggtgtgtgggatgtgtgtgtgtggggggtgtatgtctggggtgtgtgtctgggatgtgtgtgtgtggggggtgtatgtctggggtgtgtgtctgagatgtgtgtgtgtctggggtgtgtgtgtgtccgggatgtgtgtgtgtctggggtgtgtgtctacagtgtgtatctgggatgtgtctgtgtctggggtgtgtgtctgggatgtgtgtgtgcctggggtgtgtgtctgggatatgtgtgtgtctgggatgtgtgtgtgtctggggtgtgtatctggggtgtgtgtctgggatgtgtgtctggggtgtgtgtctgggatgtgtgtgtgtctggggcgttgtgtctggggcgtgtgtctgggatgtgtgtctgggatgtgtgtgtgtctggagtgtgtatctggggtgtgtgtctgggatgtgtgtctggggtgtgtgtgtgtctgggatgtgtgtgtgtggggggtgtgtatctggggtgtgtgtctgggatgtgtgtctggggtgtgtgtgtgtctgggtgtgtgtctgggatgtgtgtgtgggggggtgtgtatctggggtgtgtgtctgggatgtgtgtctggggtgtgtgtctgggatgtgtgtgtgtctggggtgtgtatctggggtgtgtgtctgggatgtgtgtctggggtgtgtgtctgggatgtgtgtgtgtggggggtgtatgtctggggtgtgtgtctgggatgtggtcctcacaaccatggctcctctggctttagttctggtcatagcccgtgatctcgcgtcacccccagggctcgacgttttgatattttctcttccctctcccag

SEQ ID NO: 15613 - DNA, 728 bp, Artificial sequence
  DNA replication origin
ctccagacctccctctctagaaacgggaaacgtctaccctttgcaggtggcggtgctctgttctggaccacacatgtggacttctgtagcacacggcgctcttccagacactcagaccaaaacaggtgacatcccacagagggtcagatggtgcaggacacacagcatgtggggaaatcacctcatatgtcagaggggacacctggtgtggaaaaaacagccagggagctgcccagagggctggggggctggggagggctggggggctggggagggctggggtacatttgaggattggaggtggagaaggcactggccacgtgagctggggaagaaaatgcaggggccatggctgagtagactccgtatggttaaggcccatatggagggacccaggggtcaacagtgggggccaagttcggggtcatgggaaggggctgtgagccagggagccagggaaggtggccctcatggcaagggtggagcaggagagccctggcctgatgcttggctggagcacgctggctgctggggacaggtgatggccaaggagcccagacagaagctgctgccacagtccaggagaggtatgctggggactcagcctggggggacagaggcctgggaggaagtggtcagactggacatatctgaaggcgggatggcgtggggcgtggcttccagccgcgagtattctaagctttctcaccctgggtgccccctctgct

SEQ ID NO: 15614 - DNA, 1484 bp, Artificial sequence
  DNA replication origin
acagatgatggatggacgaatggaagatgggtgagtggatggattgactgaattcaaggatggatggaggatgggtggatgaaagggagatggagatggaggatggatgggcagaggatggatgggtggatgaattgatgaatggatgaagaatgaatggatgaaagagagatggagatgaaggatggaagatggatggatgaaggatggatgggtggatggattgacagatgaatggaggagggatggatgaaagagagacagagatggaggatagaggatggatggatggaggatggatgggtggaggagggatggatgaaagagagaggagatggaggatggaggatggatggaggatggatgggtagatgtattgacagatgatggaggagggatggatgaaagagagacagagatggaggatggaagatggatggatgggtggatgaattgatgtatagatggaggatggatgggtggatggattgacagatggatggaggagggacagataaaagagagacagatggaggatgaaggatggatgaacagaggatggatgggtagatggatggatggaaggatgaaggatgaacagatgaaagagagatggagatggaggatggaggatggatgaacagggatggatgggtggatggattgacagatggatggaggatagatgaatgaaagagagatgaagatggagcatggaggatggatgaatgggatggatggctagttggatggatggatgaaggatgaagggatgaaagagagatggagatggaggatggaggatgatggatggatgggtggatgaattgatggatggatgggtggatggattgacggatggaggatggatgggtggatggattgacggatggatggaggagggattgattaaagagagatggagatggaggatggaggatggatgaacagaggatggatgggtagatggatggatggaaggatgaaggatgaacagatgaaagagagatggagatggaggataaaggatggaaggatggacgggtggatgaattgatagatggatggaggatagatgaatgaaagagcgatgaagatggaggatggaggatggatgaatgggatggatgggtagatggatggacggatgaaggatgaagggatgaaagagagatggagatggaggatggaggatggatgaacagggatggatgggtggatggattgacagatggatggaggatagatgaatgaaagagagatgaagatggagcatggaggatggatgaatgggatagatggctagttggatggatggatgaaggatgaagggatgaaagagagatggagatggaggatggaggatgacggatggatgggtggatggatggaggatggatgggtggatggattgacggatggaggatgaatgaatgaaagagagatggagatgagggatggaggatggaggatggaggatggat

SEQ ID NO: 15615 - DNA, 1027 bp, Artificial sequence
  DNA replication origin
atgaatgggatggatgggtagatggatggacggatgaaggatgaagggatgaaagagagatggagatggaggatggaggatggatgaacagggatggatgggtggatggattgacagatggatggaggatagatgaatgaaagagagatgaagatggagcatggaggatggatgaatgggatagatggctagttggatggatggatgaaggatgaagggatgaaagagagatggagatggaggatggaggatgacggatggatgggtggatggatggaggatggatgggtggatggattgacggatggaggatgaatgaatgaaagagagatggagatgagggatggaggatggaggatggaggatggatgggtggatggattgacggatggatggaggagggattgattaaagagagatggagatggaggatggaggatggatgaacagaggatggatgggtggatggattgacagatggatggaagagggatggatgaaagagagatgaagatggaggatggaggatggatgaatgggatggatgggtagatggatggatggatggatgaaggatgaagggatgaaagagagatggagatggaggatggatggatgggtggacgaattgatggatgggtggaggatagatgaatgaaagagagatgaagatgaagaatggaggatggatgaacgggatggatgggtagatggatggatggatgaaggatgaagggatgaaagagagatggagatggaggatgcaggatggatggatggaccggtggatgaattgacggatggatggaggatggatgagtggatggattgacggatgcaggatgaatgaatgaaagagagatggaaatgaaggatggaggatggacggactaaggatggacaggtggatatagtgacggatgaagagttagaggatgtgtggatgagtgggtgatgtcatacgcaggggatcatgaggagaacagtgcagaagagaaggcagtttctcacagggctctgtggtgac

SEQ ID NO: 15616 - DNA, 831 bp, Artificial sequence
  DNA replication origin
ggaagtgggactgctggggcgtaaggggattctgtgttgaatggttttgaggaactgccatgccgttttctacagtggctgcaccatttttcattccaactggcagtgcacaaggcttctaatttctccacatcctcgccgacacttgctgctgtctgttttttgttggtagccgtcccagtgggtgtgagtggcgtctcactgtggttcgatctgcatttccctgtgcttagtgatgtcgggtgtcttcccacctgcacgctggccacatgtgcatctctctggagaaaggtctagtcaagtcctttgtccctttctaaattgtgcctgttgtttccctgttggactgtctgccaggttccttttggcccttccctctaacggtgagctggggtgcaggggtgggccctggggccctgcccatgtggtggcagtggttgtggtgggccggggtgatggtgggggggatgacactgtggccgtggtaagaggggagggaggggtgactcaggtggcggtgctgatgatgaggatggtagggatggtgaggaggtgacgaggtgacagcgagggggctgccattgatccaagtgtgtccacctggtccctggcctcacagaagctttgagtgcgttgggggaggattaagggccctgcagctgtgatcaaaccagggggacagggacaaaccgggcaggtgcagagggaggaaggatttattgagcaatgggctggacaagctgactcctctagcttcagaggaaagtatagactatccatcaagtgtggctactgactgaagctgagaccaaggctgacattcttcctacc

SEQ ID NO: 15617 - DNA, 982 bp, Artificial sequence
  DNA replication origin
gcacacccactcctctttcccacggacccccggtgcttccctttgctgctgaccctggaagttcatttaggttttacttgtaatttacgtgagtgcactcgtgtgctaaagtcacagtgggcggattctctctttaaattgtgcaaagtacgtatcttaagttaccaccttaagcctttttctgcgtacagagtggtagatagtgcccagcacaccgtcatcactgcgccaccgcctccaccgtccacctccagacacttctcatcttgtaaaactgaaactttgccccactcaacaccaactgcctgttcccccaccgccagccctggtcccgccatggtcctctgtctctattgactttgacgactctgggaagcctcgatgccaggaatcacaccacatttgtccttgtgtcccgcttatgtcactcagcacaatgtcctcccggttcatgcacgtcggcgcggggtcggaatttccctttctgaaggctgaatgatgctcgctgtccatgtatcccacattttgctgatccctttgtgtgtggatggagacctgggttgctcccgctttgacggttgcgaatcatgtgccatgaatgttgtttgagtctctgcttcccatgcttttgggtgtacatctggaagtgggactgctggggcgtaaggggattctgtgttgaatggttttgaggaactgccatgccgttttctacagtggctgcaccatttttcattccaactggcagtgcacaaggcttctaatttctccacatcctcgccgacacttgctgctgtctgttttttgttggtagccgtcccagtgggtgtgagtggcgtctcactgtggttcgatctgcatttccctgtgcttagtgatgtcgggtgtcttcccacctgcacgctggccacatgtgcatctctctggagaaaggtctagtcaagtcctttgtccctttctaaattgtgcctgttgtttccct

SEQ ID NO: 15618 - DNA, 1469 bp, Artificial sequence
  DNA replication origin
gagccaggactcaaacccaggtctttccagttgaaacatccatactctgaacatgccactagctaggacatccctttgtaacttccacaaacctgtccttgtataagggatcccagtgatcccctcccccgcactctagagccactttccttgggtgaagggggctgcagtctgtggggaacctccaggtttaacgtgaggggctgtggccactgctgtctcttcccaccagccccctttcctgggtggacctagctcccaacctgggtcccaacagtcctctgctctccagctcccaggtcaggagagaacccttcctcacacctggctcgtgctgggccctgtccctgagcggggtctacaggggacacactcgggggcaaaccaccaggggtccccatgaaggcagcctcagcactggcaccatctgtttcacagtgaggactcagcccagggatggaactacagccaaagccatgaaaggaagatgaagagcaggaaggagggaaggaggagggagagggagggaggagcaggagggagggaaggaagagggagagagaagagtgagagggagggaggagcagggagggggaggagcagggaggagggaggagcatagaacagggaggagcagaagggagggaggagcagggaggagaaacgagcaggagggaggggagagcagggatgaagagggagtgggagggaggagcagggacggggaggagcagggagggggaggagcagggaggagggaggagcagaaaggagggaggagcatagaacagggaggagcaggaggaagggaggagtaggtaggagaaacgagcaggagcgaggggagggcagggatgaaggagagtgggagggaggagcagggaggggggaggagcagaagggaggagagagcagggaggaaaaaggagcaggagggaggggagagcagggaggaggaaggaacaggagagaggagagagcagggagaagggaggagcgggagggaggagagagcagggagggaggagtgggggactgggctcactggtgcaaaacggagccactctgtgggagccagtaaactaagcccaagcagagagctgggcaccccgcctttccctcccaccctcagccaccccccactgccatgcaccctgacccagttggaagcgcgctgggaggtgcctttgtcatcaggagcccagcccagcccacagcagcagacaacagaggcctcctgacccacagttaaccccacccgggcctcggggacccaatctgctctgtgccagcttcaggcccacctggcctccggctccagactctgccggctgtcaaaatgcccaccattagcaagagtgtctcccccactcagaggtcaaagagacgacggatgccccagactcatgcatcgcatgggccacaccggctcacgtcttcattttacagaaaccaagaaacgcacatcc

SEQ ID NO: 15619 - DNA, 1216 bp, Artificial sequence
  DNA replication origin
ttcaggcccacctggcctccggctccagactctgccggctgtcaaaatgcccaccattagcaagagtgtctcccccactcagaggtcaaagagacgacggatgccccagactcatgcatcgcatgggccacaccggctcacgtcttcattttacagaaaccaagaaacgcacatccagatggtggcccgcctcccgccagcctggatcctggatcacagcctacacacgggaccagccgccccgccaccctgcaaggcaacaccacactcccagaaactcgatgacctcaggctctgagaggcccgtctcctgccctaggtcacacagctggccagggcagccaggatctgaacaggaaccacaagctctccccagggggcagccagataaggagggtattggccatggtcatgccccagcctcctggtatcggtccccgtcccttcctcaccaatgtcctcagcccaggacccaaggagggccttcagggggagggcagcaggtcagcattggggcccgtgagggtctccaggacacagccactttgggaccacggacaggacctgctaagtgtaacggaatgcagggcccttgggccctctgtggtctggtctctactgactgcgccccaaagcagggcacctcccacatgcaggcgcagcccctccctctgcatccgctcaccctgacccacggacggaatcccaccattcctccccacaccttggcccctcctcccagctctgagctcctgcctgtctggcagtacaaggtgcccttttggctttgagagaggacacacataaagtgtgctcagtaatagcacttgtcagctccctgatgggagatttcacagaggaggggggcttcaagtcgggttttgaagaatgtgtaggagttcaccagggggttcagagagcaggtgaggggcattttgagtagaaacaaagaggcaggaaatattcaaggaagggagaggaatgagacaggcttgtgcagagggcctggcatgggggtgtggaaggtgacagcctcttcggcctccgagtgtcaggccaaggactcaccagtgtgagcgtcagaggggcctcggaaggtcagaggaggttggcggtggagggtcaggctcgccattccaagggggaccgggccactgctgtgtgacggggcttgggctggatccatccggaggtgcagccagggccatgacgggga

SEQ ID NO: 15620 - DNA, 2139 bp, Artificial sequence
  DNA replication origin
aaattaaaaagaaatccattcgaggtgtaattgtaatacagtgtatcatagtcaattgaatcacaaatacaagctggtcccttgtcgattgatttcagcaagtaaacaatttgggtatctaaattggaaactcgccgggaaaaggagcaatgatttggttaaagggagaactgaaaacgtcaggccaaaaattggttctaggtgtctggctgctacaggactgtgcaggtgaccctagatgggagggaggtcaccagctcctccctgcctgcaggtcaaggtcaccccatctggaagctacctagaccccagcaatgttacctgacctgtgacacctttgttcctgtgtcctcctctgtgccgcccatggtgaatgtggcttctctgtctacatggatgcactcccaccacactgggagcttctggggcacaggagtcctgctttacttcctatgttgagcccaggtaggtggggtgggggtgcttagaaggcagctgtccagagagcaaatgaatgaatgggtggatatgtgggggacaggtggcgaaatgaatgaatgaatgcatagataggggatggatggatggatgagtgggttggtggatgggtggatagatgggtgggtggatggatgggagctggatagggaatggatgggtggatggtagatgaatgggggaattggatgaatagatggatgggtgaatgggggaaagatgggcaaatgtctggggaatggatgggtgaatggatggatgggtgggtaggggatggatagatggatgcatagatgggggatggatggggatggatgagtggatggatagatggggcttggagagatagatggacaggtaggtgggtgggtgagtggatggatggggaatggatggataaatgggagatggagggatagatggataaatggctagatggggaggaatggatggatacgtggatggataggcattggagggatagatgggtgggtggatgggtgggtgggtgggtggatggatggggaatgggtgaatagataggggatggaagaatagatggctgaatggatggataggtggatggatgggggttagagggatagatgggtgggtgggtggattgatggggaatggatgaatggatggaaggatagatggataaattgatgatggggaagaatggatggacaggtggatggatggatggatggaggttagagggatagatgggtgggtggatggatgggggtatgggtagatggatgggtagatggatggggaatggatgaatagatgggggatggaaggatagatggataaatggatggatggggaggaatggatagataggtggatggatggatgggggttagagggataaatggatgcatggatggatggggaatgggaggatggatgggggatggagagatgcttaaacagacttaaaagactaaggtattgacagcaggtagccatttctccccctctgcaagaactttggacctgagattccagagccctttttaaatcttccaacaaggaaactattttgtagcaaaaaaaaaaaaaaaaaaaaagcagagtcacacctgaggcctccagaattccctggcttcctccatcaccctgaagcaggtggcctcctgtgcaatgaagagggtgcctgaagaccccagttagaaacaatgccccatgcggagggggtgctgtcctacaggatggggtgtgtgctgagaacgagggacttatatctggagctccttctcccccaggcagaacctatggggtggtgtctctcatggttacattctccaccagttcacattccccttctagggactgcccaagataatgcccagtgcaggaatgtttccaccaggggtcacaggaatggctctgctgccctgggggctgagttggccacctgtctggtgccaccaagttaacaagcaaagcagcatgaaggcagtggctggggaatcaaccctgattatcaaggataggaggcctgaagaaccacatgaagagagtgcccacaacccagaggatctcctggatacagctgtgttaccatgatgtccagtggaagacaccacaaccccattcaggagggacctccaagcctgaaagcctcag

SEQ ID NO: 15621 - DNA, 1404 bp, Artificial sequence
  DNA replication origin
cggccaggcaactggcgtttgtccttattggacttttataggggttttcagttttttgttttgaaagtagatttattggttgtgcaaaaatgatacatgcttgctgcaaaaaagtcatcatggaaaagtacagagaagcagcaactgcccccttgccatctgcccaaggctagaggggcacgtgatggggcctcaggagcaagtggcctgctccccaggagaggggctggaggaggggcattctccccagccccggagtccgcacaggatttccctggcagggaaggattagagaggaggggagggagggcagagtcggaggggagagagggaggcggagggggtagggaagggggagaggaagaggggagggaggggagagagggaggggagaggaagggagggggaaaaggaaggattggagagaaggtggggagggggagggagggaaaagagagggagagtgagggaggggagacaggaaggtggagggggaagggagggggaggaggaaggattagagagagggaggaggagggagggggaggaggaaggattggagagaaggagcagagggggagggagaggagagagggaggagaaaggatgggagagagggagggggagggagggaagagagggaccgggcaggagagagggaaggggaggaaggattggagaaaggcggggagggagggaagagaaggagaggggacaggagagggagggacaggggggggaaggattggagagaaggaggaggaggggagagggaggggccagggaagaggtagggtcgtctcgtgggcttggaagtcaggtggaagcgtgcccaggagagggagggccggtgggtgcgccaggcagggcctgctgtactgggcctggggagctccggtggactcgggaaggctctagctgcaggagtccgcagcctgggcacatggatgcggccaggaaggatggactgggcagggatggagtgcagggcaggggatggtgctgagcgtggggatgggtgaccgaggcctgcgtggagcctgaccagggccaggagagtctggtctggcccctgcagctgcaggtggccactcccctctcagggccctacctccatggacactgtcagcccccagaccaggcccaggtgcttcccaccccaccctctggcactctgagctctccctgtcacctggtcagggccctgactgagcctccactttctcatctgcagcatcggccgctgaaccgtcagctggctgtggtgtgggctctccagccccgagcacccctcctggcccggagctgggagctgatggagtccgctgcgttgtcagctgatgccgtcacttggcctgcaatggacccgagagcttcacagctgcctgctgtcctcccctgcac

SEQ ID NO: 15622 - DNA, 1018 bp, Artificial sequence
  DNA replication origin
ctaaatttatcctgtagcctcctgaggaatgcggaggcagagcccagccttcagggccagcatggccaggacagcatggactgaacaggtcttggatttgtgtgaagacacactgtgaaccttccagatgttgtttcgcatccctggggtctccccagtcagctcgtcccgcaacagcagggcttctgtgtgttcacattaggcagggcatgtgaagaccccaggtggccttacctcatttgggtcagccgaggtcttgctactaaaatcctggatggcaaagagaactcctggtatccagagctgctggtgttggggttgtgggcagaatggggggcctggctgtcactggggttatgggcaggaatgggggcctggctgccattgtggttgtgggtgcagtggaggtcctggctgccactggggttgtgggcaggttggggctcctggctgtcactggggctattggcaggatgggggtcctggctgtcactggggctatgggcaggatgggggtcctggctatcactggagttgtgggcaggaagggggtcctggctgtcactgttgtgtgggtgcagtggaggtcctggctgtcactgtgattgtgggcaggatgtagggcctggctgtcactagggttgtggatgcagtggaggtcctcactgtcactggggtgtgggcacagtggaggtcctggctgtcactggggtgtgggtgcagtgggggttctggctgtcactattgtgtgggtgcagtggggttcctggctgtcactgctgtgtgggtgcagtggggggcctggctgtcactgctgtgtgggtgcagtggggggcttggctgtcactgctgtgtgggtgcagtggggggccttgctgtcactgccgtgtgggtgcagtggtggtcctggctgtcactggggttgtgggtgcagtgggggacttgttattgtgtccattttccagatgaggctcagcagcttgcccagggagcaggtgaggtggggcagggcccacag

SEQ ID NO: 15623 - DNA, 1471 bp, Artificial sequence
  DNA replication origin
caaacattgatttggtttcagccactaagctttaagctaacttggcatgcagtaccagtaatggatatacctgcttaacatgtttcagaggctccacggacactaagggccttcccatgttctgtcccagccctgcccggctgcagcccagggccctgtgccctggggacagccatgctccagtgccagccatgtgtctcagtacccattcctccctgcctacaggagctggtgaagcttcctgatgagctctcctcactgacgcctcattcctctcctctccggtccgaatgcacactcaccacatggcccaacatgttctgtgcactgactgctagccccagagaaattgccagtcataaacttctggaggtcagtgcctaggaaaagagaggcttcagggtggccttgccccagtggctctgagttgcaagaacacagggcacccctctgccatgtgcaccactgggtccctagagcccatcccatgcctaacacaaaggagatgctcaacaaacacatagaggatgatgaaggaaggaagaatgaatggatgcaaggaaggaaggatggaaagatggatgatgggtggataggtgatagatgaatggatgggtggaaggatgaatggtggatgggtggataatggacgaacagatggtgtacaggtgcatgggtggatggtagctaggtggatgtgtgaacagattgtggatggatggatagatgggtgatgaatggaaggtagatggatggacagatggtggatagatgggtggatgagttgatggatggatggatggatgggtggatgagtggatagatggataaatggtgggtgggtggatggatggatgaatggatggatggatggaaggatggatggataaatggatggtgggtggatagatgggtggaaggtggatggatgaatggagggtggatggatggacagatggtgaatgggtggatagaagggtggatggtgggtggatggatggatgatggatggatgaatggatggatggtggatgggtggatggatggatggcagatggatagatggatggatggatggtggatgggtagatggatggacagatggacggtagacaggtggataaatgggtggatggatagatggatggatggtggatggttagatggatggtggataggtgaatgaatggatggtggatgtgcagatgaatggatggtgtacgggtaggtggggtactcaccacgggtagcatcactttcggacagaggtggcgatgatgatgatgatgacaagcagggcagtgactccagctgataggaagcagcacttgatcttgtgtctctggagctgggagagagagagaggttgtttccatatcctggtcctccaacctcccatcctcaggggcatttggcttgtgcatactttgggctgtggcatgcaggggctgagtccaccctggggcagggt

SEQ ID NO: 15624 - DNA, 1359 bp, Artificial sequence
  DNA replication origin
ggcgggtggcgtgggccagcagggaaacgggaggtacaggagatccttgtctctggtagacttgccttcccccaacccgacgcttctctaagtcagacgcattaaaaagctgtaagccaccctgcggggctggtggacaggactcacgagcagccactgcaagcatggttcgggagagagaggtccaggagagatccagctcatgggccctccctccgcatccacccggggcctgctggtgggaccgcatgactccatccttggagtgacagtgtccaagcatggcccgtccgagctctgggaaggggctgtctgcaggaaggagagtatgcctgtgcactcacagcatgcggccacggaccaaacgtgcagtcatctctgccatcctcaggaggacttccttgtcaaaatgttcgattgataaggaaacggaggctcaggggagggcccgggtggttccgctggcacacggtggagagagccagggcctgtgcactcacgggggcccctttgtgccaggccctttgggtggagaggccatgaaaggccctgtggcttcacttggtggggatattcagcagggaggtccacaaaaccacgagccgcccgtgtgccagtcattgaccccagcttagggctggggacacaggcctgaacaggccaagactcctgccctcatggagccacacactggtgggcggagcagtcaaggaacagcaggcagaggaagcctcagcccctccagggagagagtggtccacgcagggagaagcaggaggggtggcaggcgtgtgactgcaggcggcaggtgagtcgggccgcaggaggggaggctgagcaggaggtgggctctggggaagaactgggcagagggaacagcgagcccaggctacccgcccaccccgccgttctggaacctcaggcccctggctccgggcttttgattgcctaaaaagctcccccctcataaccatgggctcttcccttcctgccttcaggtctggactcagaagtcaccttggcagtgacgcctttgctgaccagcccctgcccattttcctcatcatgaccgccgcagggtgcatttcctctgcgcctgcttcctgtgtctgcgccagggcggggtctttgtttccttccctgacatccccagcacctaggacagcccctgcacataggcaatgaatatgcaccgattaactaattgatacgcaacatgaggagagggactggggcagacaggtgtggttgtcagctctgctcagggagggtgggaagaggtggtggtctggagggtcagggatgagctcatctgtgtggaggtggggtctaggggagcctggtgtctttggggatttc

SEQ ID NO: 15625 - DNA, 720 bp, Artificial sequence
  DNA replication origin
gggagaaatggggctctggggagcagctggcagatggtggcaggagaggtaccacggtgtggggtggagcaggtgtggggctccatctcctcagattccggcatttgcttctggctaccagcatctgtctgtcgaatgtgtctccctgctgactgggctcagcggcagggttttattccttccgtgtccctagctcctgacttgtggcaagagttcagttaatggtgtggaaaggaggcaggaaaggagggggaacaggattgccagatatggaggtgacaggtggtggcccaggagccaggaggatgtgagccgctaggagccctgggttgctgcctgcagaggggccaggcccagtcgaggccctgcacattctgagcaacctgggagggtggggaatgtaggccggggtcctggagacccagggagacagacggcactccttctccccagaaagaggccaacaggggtgcagggtggagggggggcgggtaacgcagtcaccaggatgcctgacagtcacagcattaggtgaagcggatgtgcttcctgggtcgggtgagggagccgctgcctccctaagtcagatgcatggagacctgggcgggtggcgtgggcaggcgggtggcgtgggccagcagggaaacgggaggtacaggagatccttgtctctggtagacttgccttcccccaacccgacgcttctctaagtcagacgca

SEQ ID NO: 15626 - DNA, 1283 bp, Artificial sequence
  DNA replication origin
ccttcctgaataatgcatggacctttaaacgcttgagctctgattactcccttccaacttccatgctattgttaccggttatttttagttcacactctccaggcctgtcttggctcttacccaaggggctttaaggctccttgtggaaagggcgtggctgcccccggccaccttcttctgcagaaaggaggggtgtctgctctgggaagcccacctggctaaggtttggctgctgatggcagcggaggctcagtgggaccttgaactcagttttctggctgtgccaagcttcccctgagccctagaactttctctcctgtaggccttcacccaaaccagtcccccttcctgggggcctttcctgcctgccctctggctcccacatcccacccctaggcccagctggtgcatctgcacatttgtttaccaagtgtcatggagtctgcagtgccagggacgagccagacaccacccctgccccggtgggattctgtggaagccgtgctagcaacacctcccctggctggtgagcagaagtctgagaggcttcctggaggagatgccacctgagctgaggttgggagactgagtaggcaggagccaggtgaggaaggggagacaggtgtttggcagaggcaggtgtgcaggggtgggtgtacaggggcaggtgtgcaggggcgggcgtgcaggggtgggcgtgcaggggcgggcgtgcaggggcgggtgtgcaggggcaggtgtgcatgtgcaagtgagcagcaggagtgtgcaggggaggggctggggaggtgaggcaggaggagtgtggcttggagccttgagcatggttctggctggagaatggcgtggaggggagaaatggggctctggggagcagctggcagatggtggcaggagaggtaccacggtgtggggtggagcaggtgtggggctccatctcctcagattccggcatttgcttctggctaccagcatctgtctgtcgaatgtgtctccctgctgactgggctcagcggcagggttttattccttccgtgtccctagctcctgacttgtggcaagagttcagttaatggtgtggaaaggaggcaggaaaggagggggaacaggattgccagatatggaggtgacaggtggtggcccaggagccaggaggatgtgagccgctaggagccctgggttgctgcctgcagaggggccaggcccagtcgaggccctgcacattctgagcaacctgggagggtggggaatgtaggccggggtcctggagacccagggagaca

SEQ ID NO: 15627 - DNA, 1098 bp, Artificial sequence
  DNA replication origin
ggcgtggcccttctagaagtggaggaggcgtgggtagtgggcgcagcagtgccctccctgctgagtacccagccctgtgagcgaggccctcagctgccccctgctcccgagaaccatccgtgactggcaggagcctgcaaccgagtgatacagggcagcaggaggctggcctctgttcctccaggtgggagacgtggagcccccgtgggccaggctcagggcagacactgtctgagcccaggatgccctgcttcccctccctccgggcttctcagtagctccacctccgtaaaccagacccagaccccagcccagatctgctcctagggagtccactctcagcgccacgagtccccagtttccagaccatctgcagtgccaggaacctactctgcccagagccggccccacagggcagcatttgggaagcacttcctgccgtctgggggccgcgttctcagcctgggagctagacagagatcagtgaggcaagagcaatctttatgagtctgagagagagagaacaccaggagccccgtgggtgctgagtttctggctggggctctttgtcccgttactcaatccctttaactcctctggggagctgtgcgggcatcctggagctgccatgttggtgctctcagagccctcttctgaacttgggtgtcttcatccatttgtgctgcgaaacagaacacctgagactgggtcctttctaaagagcagagatttacttctcacagcactggaggctgggagtccaaggtccaggtgccacatcttgtccgggcagggtctcccagctgcgtcctcaggtggcagaaggcagagggcgaggtggaggatgctgcgtgaagccttgtaagggccttggtccccgtcatgagggagcagccgccaggcctcatcacctctcgataccgtcacggtggtaacacctgggttttggaggggccattcacacctttgcattctgtacctagcccccaaaattcatgtccttcccacatgcaaaagagcatcattccatcccagtatcccccatgcgagctcgttccagcactggcctttaagtctaaagtctcatccagacaccac

SEQ ID NO: 15628 - DNA, 2153 bp, Artificial sequence
  DNA replication origin
gtgctgaaagtggagacttgcctccctcggagagaggtgatgagggacaccgccccacgtcagggtgtctgtgtctatggtgattgggggatgggtatgtgtgcgtgggaaggtccctttcaaggcagaacaaagcagtttggaagtggtggggaattgtggctccttttagcaactgtatgcaaatggcatgcaaatgagcctgttttccctccaatacctgtggctcagagcaacagtgttccccaggacccctgaggcagcccctgaccctggtcctcattcaccaagaaaagcccctgcttcagaaattgtgctgagtagcagtggctgccattgtttgcttaacaaatgaggattgtccccagagtcaggcagaacccggttctaatcccagctctgccagtgacgagttgtgtgcaacttcgagcatattgcttaatctctgctcctcattgcgctctcctgtaaaatataataccaggaatgcctcaggattgcctgtgaaagcatgtggcacagttacttctgctgattgtggtggtggtggtggtggtgatgatggtgatgatagtgatggtgatggtggtgatgatggtgatggtgatggtggtgatggtgatggtggtgatggtgatggtgatggttgtggtggtggtgatggttacagtgatggtgatggtggtggtgatagtgatggtgttggtggttatggtaatggtagtggtgatagccatgatgatggtggtgataatgatggtggttgctgctggtggtattggtgatgatgatggtggtgatgatggtggtgataatgatggtgatgatgatggtggcaaagatggtgatggtggtgatgatggtggtggtgggtgtggtgatgatggtaatggtggtggtgatggtgatggtgatgatggtgatggtgatggtggtggtggtgatagtgatggtgatggtgacagtggtggtggtgatgatggtggtggtgatggtgatggtggtggtgatggtgacagtggtggtggtggtgacggtgatgatggtggtgatggtgatggtggtggtgatgctgacagtggtggtggtggtggtgatggtgatggtggtggtgatggtgacggtggtggtgacggtgacagtggtggtggtgatggtgatggtggtggtgatggtgacggtggtggtggtggtgatggtgatggtggtggtgatggtgatgatggtggtgatggtgatggtgatggtgatggtggtggtgatggtgacagtggtggtggtggtggtgatggtgatgatggtggtgatggtgatggtggtggtgatggtggtggtggtggtggtggtgatggtgacagtggtggtggtggtgatggtgatgatggtggtgatggtggtggtgatggtgatggtggtggtgatggtgacagtggtggtggtggtggtgatggtgatgatggtggtgatggtggtggtgatggtgatggtggtggtggtggtgacagtggtggtggtggtgatggtgatgatggtggtgatggtggtggtgatggtgatggtggtggtgatggtgacagtggtggtggtggtggtgatggtgatggtggtgatggtgatggtggtggtgatggtgatggtggtggtggtggtggtgatggtgacagtggtggtggtggtgatgatgatggtgatggtggtggtgatggtgatggtgatggtggtggtgatggtgacagtggtggtggtggtgatggtgatggtggtggtgatggtaatggtggtggtaacagccatgatgatggtgatggtgatggtgctgtggtggtggtgatggtggtgataatgatgtggctggtctggtagggatggtggtggtggtgacacttggtgatggtaggtattagggtgatggtgttgagtcctccatactaggcactgcatagggcactgggagaatgggataaagaaagtgacctctgtcttacggtgctgagttcttactgacaggttcatggggctggggacagagtccccacctgcctcactccccttcagccgctgggggcctctgtatctgagagctctcctcttgccccctgctgttctctgttatgggacagggatctgccttccccacctggcctcaagatcct

SEQ ID NO: 15629 - DNA, 1571 bp, Artificial sequence
  DNA replication origin
ccctttgttggccttggattaactcagaagcccaaactctttagccaccatctgacccagcctcacttctcagaaccttgagccccgttcccctggaaagcttcgatgtggccagagacctctctgcatgtcttcatctcaccccagcagtcggctgagtcccccgggaaagatcctgacgccccagcctcaccagttcctgggggaagcacagagggcacatgcactctgtgatctgcctttactgagcacctactgcatgcagagctctgcctcaggcactaaagccctgccccagagctaatgttccacagggagggagaccacagggcagagcctctgcagctgggtcagggagggaagggaaggtgagggcagatcttctgataagcacatatctgagacctaaggggaagcagcaaggcaggatgcagagaggacaaagcagtcagggagggagggagggaggagagagggaggggggtggggagggaggagaggagacagggaggagagaaagaggagggaggaaggaaagagggaagcaggagggaggagagaggaaaggaggaaggagggaagagagggggagcagggaaggagagagagaggagggagggaaggaggaaagaggtagaagggagggaggagagagggaaggatgtgggaggaaggagagaggaagggaggggagagggaggagggagagaagggaagagggagagaaggagagagggaggagggaaggaaggagagagagaggatagagggagggaggagggaaggagagaggaaggagggatggaggagagagggaggagggagggagggagagtgggaggatgagggaggagggatggaggagagaggggggagggagggatagtgggaggagagaggaaggagggatgaaggagagagggaggaccggggagggagagtggtgaacacctgctgggaactcagcacatgctgggatgctggcactccctgctttctgtagttatttgaagactatagccgctcccactgcacaggcgctgtgatgcctcaatgcattgacccatgtgagccccaggatgttcctggcggaggaaagatctgtgaaggcagcatttctccttgctcctcatcctggccacggccccggggtgggggtgcagggggttattattctcctttaacgattgcgttttcccggccttcctgccaaaccacgagctccgacaaggcagctcacgggcatagaggggtctgaggctgccctcgctatacccagcagagcctcctccaacatgctacgagtctgtccttcagacctgccctgggggcacaggtcacagtgccagatgccagccaagtccaacctgggcagcagggcttatgcccaggagagtcctgccggccacagctgcccagggcatctccccaacagccactccttccatcccacggcggggccagcctgctcccagccccatcaactcttgcctggtgtccctctcacaggctcatgaagctgctcacgccaacctgctcatggtaacaagacaaggcccagccctccagca

SEQ ID NO: 15630 - DNA, 1709 bp, Artificial sequence
  DNA replication origin
ggaaaggagggcagtggcaactgggccagccacctgtgccatggacgccgtgccgcattcccagtgagcctgtgggctcagtcctggcagagcaggcaccgcccccccgacacactgcagaggaggtgggcaaggctcaggcccaggaggcggccgtgaagtcacctctgcatagactgtcccactcctgttcccgagggggtccaccagggagtatcagggagggatgaggcatctgtgaagttgcctctgcatagaatgtcctgctcccacctgcctgcgaggggccttccccacggtgtcaggagggttgaggcatctgtgaagttgcctctgcatagaatgtcctgttcccgcctgcgaggggccctccccacggtgtgtcaggagggaccaggtgtctgtgaagtcgcctctgcgtagaatgtcctgctcctacctgcaaggggccctccccacggtgtgtcaggagggatgaggcctctgtgaagtcgcctctgcatagaatgtcctgctcccgcttgcgaggggcctctagatgggcgggtggatggatggaaggaggaaggtgtagatgggtgggtggatggaaggaggaaggtgtagacgggtgggtggatggaaggaaggtgtagacaggtgggtagatggaaggaggaagctgtagacgggtggtggatggatggaagaaggaaggtgtagacgggcagttggatgggtggatggaaggaggaaggtgtagacaggcgggtggataggtggatggaaggaggaaggtgtagatgggcgggtggatggatggaaggaggaaggtgtagacgggtgggtggatggaaagaggaaggtgtagacgggcgggtggatgggtagatggaggaaggtgtagatgggcgggtggctaggtggaaggaggaaggtgtagacgggcaggtggatgggtagatggaaggaggaaggagtagatgggtgagtggctgggtggatggacagacagcatggataaatgggtgagtagacggatggatggatgaatagaaggaagaggaggttggaaggggttggctggacagtgatgaacagacaggtggacagatgagtggatgtggtgggcgtgtctatgtggaggaatagacacttgggtagcaggatggcgggtagaccagagggcaggcggacgagcggatggagcacaggggagtcggtgggaggatgaatacaagtggtgctgtgatgagtgggcacgcaggctttgcatttggacaggctgtggcttcagtcccagcactactagagtaaatgtgcccacctctctgggtctgtttcctcatctctcaaacgggtgcaactcccactgcagacggagcatcgtgagacccatacagctccaggtgcagaggcctcacatgggcactctccctgcaccctgctcaccctccagatcactgggttttgggtgtgcaggctgacattttcctgtctccctctgttagctgatgaggaggacgagacccccagctgcttgtggctgcccctgaggtccctggaagggcccagcctgcctgaacctgaccccctggacttacgaggagtcttccacgcacccacctcctcaccctccccacctgcttccccagcctccaccccaccagcaaccacactcatgggggccttccagccttccccgccctcttcggcgccagcacctccct

SEQ ID NO: 15631 - DNA, 1087 bp, Artificial sequence
  DNA replication origin
ttccgagcccacgggcccactccagggaccaccggaagccaggcgtttctgtctggtcaggcctcgtctgcagcccgcagctgccactggctccaagggtgacgctggctctgagggtgatgctggctccgtgcttcctcctgccgcctccgtgcctcctcccaccgcacctcctctcctcctcaagacaccgtgccaggagctccttcgccgtcctccgcatatggtggcacacccttcgaagcagagccccgctggaccctccccttcctgggagctgctggaaggactttgggaacgaagccccggaagcaggaccagctccttgagggccacagagtggacagaaggacccagcctcacaggacaggcaggggctggcctcaaacgcccccagtggcagccatggcagaacttggagcgctggggcatcctcagctgctcctgctcacagcggtgcatgaggctgggacccatgggcagagtgggccggactggttgggagacgcatgtagacccagccaaccctgtggctgggcttggacaaggggcctgggctgtgggccttgggcgatgggcctgggcactaggccttgtggtggggcttgggggatgggcctggtcagtgggcctcctgatggggtggggctggaggaggatctgggtcctctcaggcctgtgcaggccagggatggctggatccacccccattgaggccacattgtctcctgaagggcagattcttgcagccaagggtcctatgggcagaggcagacctggtttgggggtgcttcatggcaaggatagacatgtggtgtggggctgagaaggaggggcctggcaggggtggcactggtgtggcccaggtgcttagtccttttctgcaagtcctcagccctggaggctgcaggaactcaggtttgctcaccctgtggttccctgccctagactgagacccagcctcgacttctgtgacccctggtggatcagccactccaggtccccaggccgctgggctcccctgcagcacgggagtctttggtgcctgtgagctgctttgagtggcctgccctgctgctgacagcaa

SEQ ID NO: 15632 - DNA, 932 bp, Artificial sequence
  DNA replication origin
gagggggaggccactgcaggccagagtgaggcacagcgtggggcggggaagagtcaagctggggcccaggctcctccctggctctgcccaaactcctcaacgtgaccaatgaatggacaggtcacctgctgctccctgggagctatgtcaagggccagctggctggaggtgcatatgggctgaggctcctcccacctgctggctggccttgccttctcatggtagctgtacgctggggctctggggctgggggagagcggagggaagccctccttcttcccagacacccctgtcttcagaccctggggccagctgggccctgctgccctgcatgggaaagtagggacttctccctgctgggacccactggtttggaagacctggctgcctaaggacagccgtgctcaccgctggactgcatctggaaggggagggctgcccgtggagaggaaggccaggccgggacccggggccaaacaggcctccggccacacgacaccaggcgggaacggcagaggccaagatgggggccttggagggcaccagggcaccctgggctgcacccgctgctgctgcacgtcggggagctcaggccttgtctctgcccctcaccaggcactggtcccagaggccaccttgtgaccgcctccccacggtagcgctcacctctctacagtgactaggacccagcatcccatctggacacccggtgggcacggcttgaggtggcgtatatggtcgagccccttgatggcacaatgcttggcaatgcagggaggaccctgagctggaaccgcagcccttccactaccgagacaggcagaaccctccctggccccgacccttggtttccccacctaaaagaagagatgggccaggagggtggcgggccatctccatgggcctctgggtctccctcggagggtctccct

SEQ ID NO: 15633 - DNA, 4494 bp, Artificial sequence
  DNA replication origin
cccactcgccggccctgcttgccccagggcagtgtggtccgggggggcgggctgtggggaaggcccacttacttggcaggggctccgtggtctggccctcgccttggggaccgtgggcagaaaaggtctctgccaccatgcgctccacaggtgtgaggaggaggccgggggcggggccgccctccgccagcttcttgcgcacagcacctcgcaggtcccgccacttgtgcttgaggtcccccaggtcgcggcggcagtagcccagcgcgttcactgcctgcaggatgcggctccacacgcggtgctttcgggcaggtgtgccccgcagcgccccgaacagcagcgggtagtggcgccgcaccctctgcaccagcacctccgtctcctgggggctgaagttgggcttgcgtgtcttggtgcgggagtgggggcccggccgcaggggtgtggagcccggcccggcacccagcagcagggctgccgcggccggctcggggctgcagctctgctggcagatggctttgctgctgctggaccctggaaaggcaccagaggctgagcagggggcagagaccctggggagagcagccaggttcggggtcacaggtcatcacaggccctgcatctgtgcacagcggccaggcctcgcatcggcacccagcataggcagcctacatccactatacaggggcccttctgtctcagctactctctgggcctcccgcctgtccacccggcaggtgccctctgccctccccggagccctgaccacgtgtggtgggtcagccctggtttgtccccctccccacgactgctcccttccctgaactgctggcatgagtgcccctcgtgatcagtccttcactgggactgatcaatctgtcactgggactgggtgggcacctgaagtggacaaagcgctccacagactcagcacatcccagcccgcgacaggtggccaggggcagaaatggctacagccacctctggaagctgacagtggggagaaggggggaggacagagcgataggaggggtcctggggagaggaggtggtaagggagtgatggggcagcccagcaggccctgtatggggccacagagcagctggagggggccacagagcagcttgaagcccaggctccgaggggattgaggggccggcctggcccagccccgccccagggagcagcagggtgcttgagccgcagtcactcttctcctggggacacagcacagtacccgggaagaggacgccagctgcctgagggtctccggacacactgccagttgtcagagcaggagggaccaggaggctgttctcggcacaggccccaaggtgaggccacagctcagtcagggcatggagggagaatgagtgggtggggtggagcctgagagtgctggtgggcagctgagcgctttaaccaaaggcccgtgggcaccaggggcagcctggctcttcctcaactgaggaaaagagacacccagccagagccaggagcctctgccccactggcctgggagccagggctcctggcagcagcaggtatagacagggcgggatgaatgggtcagagccctccagtgggagcgggaaagacaccaaaacacagcagggatggggtccctgtgggaggggggcaaggtcagcatcccctcaaaagccccctgcaaacctggagccccaccatggttgggggccgcacaggcaggccagggctgctgtgtgactacagtgggaagaggacatgagagactctggctctccacaagcagaggaggccacagcgcatggagtcagaactggacacagtcaccccagggttagggtcagggttaaggggacccagagcttttagacctcatggtgaggacctctctagggaagccaagggcaaccccatagaggaagggctgtggcccagggtgggtgagcaaccaaggcgggtgggggcgctggggagtcggtgggcctgggcggggtcactgggcactgtgacctctgtcccatctgggaaggcccctcccttgccccaggtgaggtttcctgaacggagcctccagcctccctggctccaagctcagccccttcatcctgacctctcgcctgtcaggtccttgatgggtggcctccagcagcaaaagggtagggcttctcctggggactcagaggcaagggacaagactgtgggcctcccacttcctgcccccacatacagcctggcgctaaggtaggacctgactctaggcacccgggcacccctgctgcttcacttccttttccagaggaacgcagagctgagggcccacggtgctggctgggaggtgccctggcttgcggtgcagcccctcttctcgtggatgcagggacttcaggacaccatgccctggccaggcctgcacgttcccatgccgctctccctacacccccccagcacgggtacatccatagcagaaccagagctccagcctctacatctctgcaacctcacaaccctatccaccccagaacagcctcactgtggggaatctctgggcagaggcccaggatgaaggcgtggaggctagtatctgtcaacgagcggagcagggaccagcgtctgtcaatgatcagggtggggccagtgtctattaatgagcggagcaggggccagtgtctatcaatgagcaaaggggaggccactgtctgtcaaagagcaaaggcggggtcagtgtctgccaacgagcagaggcggggtcagtgtctgccaatgagcagaggcgggaccagtgtctgtcaatgagcggaggtggggccagtgtctatcaatgagcagaggggaggccactgtctgtcaatgagcagaggcggggccagtgtctgtcaatgagcggaggtggggccactgtctgtcaatgagcagaggcggggccagtgtctgtcaatgagcggaggggaggccactgtctgtctaagggcaaaggcggggtcagtgtctgccaatgagcagaggcggggtcagtgtctgccaatgagcagaggcgggaccagtgtctgtcaatgagtggaggtggggccagtgtctatcaatgagcagaggggaggccactgtctgtcaatgagcagaggcggggccagtgtctgtcaatgagcggaggtggggccactgtctgtcaatgagcagaggggaggccactgtctgtctaagggcaaaggcggggtcagtgtctgccaatgagcagaggcggggtcagtgtctgccaatgagcagaggcgggaccagtgtctgtcagtgagcggaggtggggccagtgtctatcaatgagcagaggggaggccactgtctgtcaatgagcagaggcggggccagtgtctgtcaatgagcagaggtggggccagtgtctgtcaatgagcggaggtggggccactgtctgtctaagggcaaaagcgggatcagtgtctgccaatgagcagaggcggggtcagtgtctgccaatgagcagaggcggggccagtgtctgccaatgagcagaggcggggccagtgtctgccaatgagcagaggcggggccagtgtctgtcaatgagcggaggtggggccagtgtctgtcaatgagcagaggcggggttagtgtctatcaatgagcagaggcggggttagtgtctgtcaacgagcagaggcagggacagtgtcaatgaacagaggcggggccagtgtctgtcaatgagcggaggcgggaccagtgtctgtcaatgagcagaggcggggccagtgtctgtcaatgagcagaggcggagttagtgtctgtcaatgagcagaggcggggttagtgtctgtcaacgagcagaggcagggacagtgtcaatgaacagaggcagggccagtgtctgtcaatgagcggaggtgggaccagtgtctgtcaatgagcagaggcggggccagtgtctgtcaatgagcagaggcggggttagtgtctgtcaacgagcagaggcagggacagcgtcaatgaacagaggcggggccagtgtctgtcaatgagcggaggtggggccagtgtctgtcaatgagcagaggcagggttagtgtctgtcaacgagcagaggcagggacagtgtcaatgaacagaggcggggccagtgtctgtcagtgaggggagcagggaccaggttctgtcaatgagcagggtgggggccagtgtctgtcaaagagcagagtatggagccagtgtctgtcgatgagcagggtgaaggctagtgtctatcaatgagcgggtaccagtgtctgccaatgagcagagtgggggctagtgtctgccaatgagcagaggcggggccagtgtctgtcaatgaggagaggcagggccagtgtctgtcaatgagcagagtgggggccagtgtctgtcaatgagcagagcagggaccagtgtcaatgagcggagcagggactagtggcaacgagcggagcagggctggaggaagacagggcaggaggggagggagcagatgctcagac

SEQ ID NO: 15634 - DNA, 1110 bp, Artificial sequence
  DNA replication origin
gcactgctcagcaaatcctaaagaagtgggatagatggacgaacgggttcaggggagtggacaaaagggtggatgggtagatgaaaggatgatggacagatgcgtgaataggtgggtggacaaatggaatggtggatgggtgggtggatggatgaatagatgggtgagtggatggatgggtgggtgatgggtggatgggcgagtggatggacagatgaatgggtggatggatggatgggtagatggatggatgcgtaggtggatggatggatgggtaggtggatggatggatgggtaggtggatggatggatgggtaggtggataggtggttggacagatgggtgagtagatggatgggtgggtgggtagatgtatggatgggtgaatggatggatgggtgggtgggtggatggatggatggatggatggatagatgtgtgggtgggtggggtaggtggatggatgggtgcatgggtgggtagatgggtggataggtgggtgggtgggtagatgatggatggatggatgagggatagatggatgatggggggatagatgagtgggtgaatggatggaagagtgaatggacggtatgtggatggatgatggacaggtgggtgggtgggttggtcaatgagcggctaagtggatggttgctccactgctatccaaggactgagtggctccatgaagctagtgaacagagtaaggaacagaaacgtgggccaggaggacttcgggtacccctccaccccggcatactgtgctggcctcttccatcttccatgctgtctacctttaccctaactcctttttcccagttaagtggctctgatgatcctaagagacgtggccacgccactctcagagcacacacctgggctgtgcttcaggcaaggcacataccatccccttcacacctggcacccacccaggggcatcctagcacccatctaacagagcagggattgggggctcaagtggtcccatgacctccagggcctctcggaaaggggaagagttgggattcagacccctgcccaccgaccagatgcccactccttccctgactgccacgctgcacctaggacggctcctccgctggccag

SEQ ID NO: 15635 - DNA, 757 bp, Artificial sequence
  DNA replication origin
gtgtggccgtggctgtccacgtgccccacacccaccctcctgccacgctgggatctccacctgcccctccctccttcaagcgtcccggccctctgcctcgggaatgcggccaagctctggggtgagcaggtgaaccctgggctttgctgttggctcagcagctcactgtacgctaaggggttagccttgcactgctgccagctggggtgtcggtgccactgagaacggcagcagatgctgctgatggcctgcggtgcggctgctcgagggaggggtttgcgttttcttggggactcctgaggaaggaaagcactcaagcctaggaggttccggagtcctgggatttcttcatgtggggtcctggagctttctggggcaggaaaggcgagccgtggtctgacacgtggcccccccactttctatgtgctgagtgtgggggaggtggagcttgccaccccgtgaagagcccgactgacagggttgtgcttttgtggtggtgcggggctgtagatccacactggcggggcacctggtgaaatgtgttctgcccgcgttggtctgggatagggctgggaactgtttggggctctgaaaggcccttggtgggtctggtgcagcctggagtagggctccatgctcaatgcgctttggggcttaggtggcgttctgggggctcgggacagtcttcctgtgatttgtttcatgtctgctctccttccctgtcctcaccccactggtgaccttgaccttgaccttg

SEQ ID NO: 15636 - DNA, 1731 bp, Artificial sequence
  DNA replication origin
gcctgtggccctcggggaccctcacagctcagcactgtgcggacggggggtagcaggggggctgggagtggtgcagagtgggcaggccccatggccagcctggcccttctagcctcactttctttgtctgcagcatgggggtgacgcagaggatgtggatcttcatgccagcaacagcaggcgcgggacggagggcggcggggtgggagtcgttcttggaaggcgtctgtacacctcactgcatcactccctccctttggtctctgaaaacgggaaaaacaaaacgcaaattgtcattagcctttaggaagccctccccacggtctgcagcaggtcccggtgacagtaactccagcgtgacgcatgagaggctgtgacgcagcggaggtcgcacgtgccaggccctgctggcccgattgctctgcagccatctttgcagcctgcgcagggctcggggggtgggcggcagggttttgtggagctgtgttacgcacctcggctggctgtagccctttcctgtggagccggcaccctcatcccctcatctctcctcccacattcactgggggctttgggatttgcaagattttgtaggttcagaagtcccctagggcagacttgaggtctgagagagagccccctttgtggccagccttcaatgacttactaggtggctagtggggtgtgaacacacgggccagctgaggcccagggaggggaagcagtatcacagtagtgggccagtgttgcgcgattcctggtgcccactttccgccttgctcttggtctcctcgagtgtccgtggctgctgtcaggcagggtgcagatcggggttgtgttgggggctcctgtccactgggacagatggccacgcccagcatccctttcctttgtcctccttcccagcatcatccttgggacaaaacaaagggccaggctggggacatgctgtcctggctttaggcccgtgtccgctcactggttgggtgaccttgaaccccgatttgcctcattcatttcatctgtgaagtgggcaggtggaaggtcgctctctgtcctcagggacttgccagctgggacagcccgtgtggccgtaggcagagtgtagcgggccgtgtggaagtgacagcctgtcagaggacccagggggtgccatgaggctggcttgagaggccacccacgggagacagtggagagcaggccagcctccgttctgggcagtgaccttgcccccgcccaggcctggtgcagtcggattctgagggagggtgtcctgccccgtcctggggagcctgtggggaccgccgagacccaccctgaggacccctgctggcttccatgtgcccctgagcaccctgccctgatctgagcattgctgcttccacggcgtgccctcctcagggaggccctccccactgccctcgactgccctagccccctgtccgcctcccacggggagtctctggttggtccctgccctgacagaaggtgagcggcccttgcttgcctggggtcagccccatccccagagcctggagtagtgggctccacagcgacttgccagtacttgtggaaccgacgtgtcaaactggccagtgcccccaaagacagtgactgcccttcccccacagtgaccacctctcccccatgacagtgaccgcccctcccccatgacagtgaccacctctcctccatgacagtgaccacccctcccccatgacagtgaccacc

SEQ ID NO: 15637 - DNA, 751 bp, Artificial sequence
  DNA replication origin
cacacacaatgtcacatggtcacacatcccacaaccacacaggcactcacagtcacacatgcataaccacacacaccttcctaaggtgaaggaaggcccgctggcatgggcagggcaggtggggggcactgtggccgggctcctgacgggaggggaaggaaggcccgctggcatgggcagggcaggtgggggcactgtgggctcctgacgggaggggaaggaaggcccgctggcatgggcagggcaggtggggggcactgtggccgggctcctgacgggaggggaaggaaggcctgctggcatgggcagggcaggtgggggcactgcgggctcctgacgggaggggaaggaaggcccgctggcatgggcagggcaggtgggggcactgcgggctcctgacgggaggggaaggaaggcccgctggcatgggcagggcaggtggggggcactgtggccgggctcctgacgggaggggaaggaaggcccgctggcatgggcagggcaagtggggggcactgtggccaggctcctggcgggaggtgaaggaaggcctgctggcatgggcagggaaggtggggggcactgtggccgggctcctgacgggaggggaggaagggctgtggggtgggatcaccgctgttgtcgcgttttcagttcggtatgaacgtgtgcacctggagggggcggccgcagcatggacccttcctgcctcctgcccaccctcccctctgctgggtgctcccgggcccct

SEQ ID NO: 15638 - DNA, 916 bp, Artificial sequence
  DNA replication origin
ggatgcacagcaggggagaggatggtgaaacaaacaatggcgggccatcagcttccagtaaggccttgccaggaagacccagggtgctcttgtccccactactgcataagccaaggacagcaagagttcaggtggccacaccagctcccggcacgtggtcagcacacggctgctgcctgaatggctgcacacaggttctgagccatggagccatgggaggctgggtgccaggccagtctgtgtccatccacacacgtcagcctccctgtatcctgcctcgtgtgacatccctgctcccatcacaggcagaggggtccattcctctcctccctcccagccccagaccccaggaacataccgggcaggagctgcgcagcagctcggccatctgcttcacggagctggcgctggctgcaatggtcttgttggtctcctgctgtgccgtgtgcctgggggccgagaaggagccaggagcgaaggcaggggaggaaggcagcagagagcaagggcccagaaggacggagcaagcagggacgcacgggccgagtgggggagacagagacagatggatggacaggcggagagagggccgagagacacacagagacagagaaaacagcagagaggaaaacaagagtagggaaagggtagcaaacagaaagaggcaaagactcagagaaagagagaagggaacagagacaagagcagcgatgattcccacagagaaagaggagggggcccaagagccaggacagggagagacaggcagacacccagcaagagacgggggagacgggcagacacccagcaagagacgggggagacgggcagacacacagcaagaggcagtgggggcagaaaggcaggcagagagagacggcgcaggtaagctctggctggggtgggtggcccagcc

SEQ ID NO: 15639 - DNA, 1919 bp, Artificial sequence
  DNA replication origin
gatataattcatgtcttttaaggaatttttctatttcatcttagttgtcaaatttatgggcctgatatgatttgtgtttccgtaatgttcttttaatgttggatctgtagtcaggctcactctttcattcttgatcttggtaatttgcaagtgtggtttttttccctcttgacctgtctaggcagagttgtgtaatgttttgaatgcttttttattttattgtttctattattggtctgtttgctattttattaattattgaacttacctttattatctctgttctacttcctttgtgtttaatttgctggcttctttaggtggactttctggacactgattttattcttttctcttttctaatataagaatttaaagcagtaatttccttgtaagtactgttttagctgcatcccttagctttgtgtgtgtgtttgtttaaaatgtattttctgcttgtttgaggtaggaggtactgcctggtaccatggctgtaagtggaggtctcctctgggccttttattgggacgagcatcatggaaggtggcccctctgtagtgccattccgcctgctgcccttccttgactggtggctctcattccctactcccttcatcatgtcttgggttttctggttggcaacctcctgttcccacgatggacttggcagggtgatctgatgcctggggtattgccaggttgggtaaggaggccttgttcactttgatcctgcatggtgctaacagtttgtgagggaggcacaaatgagacgagatcctgcctggaaagagaaaagcctgacccactgcctacaggaaacgggctgccttcgttccagcactaatggctccatgaggatgtttcagtgggggcatgagtgagagcccctgccacatgggagtctagaggagtggagaggtcagcgcggagcagagaaaagtgtgagtcgtgacctgcctgaccctcccaggggagctgtctgggcaggtgttggtgctgggggcgttgcccacggtggcagcgtgaccacagacagctgctcctgggtcagcaactagggcttggttgtctgcatctggcctaggaaagtgttaaggcagggatttgtccggctcattcaggagcagcagagactcatgggccaggagtgaagtgaacccaggggtggtgtggggaggtgaagttgcaggtacaggaggccacccacgtgggcctagaacctaggggtggtgtggggaggtgaagttggaggtgcaggagggcagtgtggggaagtggtcggaggtgcaggagggcagtgtggggaagtgaagtcggaggtacaggagggtggtgtggggaggtgaagttgcaggtgcaggagggcggtgtggggaggtgaagtcagaggtgcaggagggtggtgtggggaggtgaagttgcagatgcgggaggccacccgcgtgggcttagagcagcgctagagggactttggctttgaccggaatgagatgtggaactgttggtgagctctgaggtttggactggcaagatctgaactgtctttagcagaatcgctcaggcctgctgtgcacagaatgtgaggggatgcagtggtgagtgggccggggacgggaggccgagtggcagcccagggagagggacaggaggctgcgtggcagcccagggtgaggaggggactggtgggagcgggggtgaggggcactctgcttctgcatccttctcacagtgttaagccagtggttggccgaagaggcgtgtttgggagctggaggcactggaggctctccaaagcctcagacgccagctgcaggaggaggcggccctgaccaaggccccggggaagaaagctcctgtccccgcgcttcccgcctagtctgtagtaaccttatggctccttgccctccttggcccacacc

SEQ ID NO: 15640 - DNA, 2009 bp, Artificial sequence
  DNA replication origin
gtgaggccggcagagggcagcgcgggcagaagcctgaggccgtgggactggagggggtggtgtggcccatgagacaggtctacagttgtcagggtcatgctgggcggacctgaaaggccacaacacagactctgggttttactttacagggagggaggccagtggaacatcctgagcaggaactgatgtgatcagatccacatttttaaagatcgctttgagctctgcatggacaatccaccgtcgggggcaagactaggggtggggaggccaagaggagacagtgcaggagcccaggggccaaggccgggcctggaccaggaggtggagaggaggtgagaagtgcgtggacacggggcagctcaagaggagtggacaggccagcccacgaccggtgagggcagggtggcgtggggtcctggaggtcccttccttggcctgggactaacagggagaccccaggtcagtccagaaggaccctaagttagcaggagagaaggtggcagggctggagggacacctggggttctggggccccactgaggagggattccgagctgcgggatatgcaacaccaccaagggaggggaggaggtcagagaggaaaagaggctggagtagatggatgacgaaccagcaccaacgaagaccagggccctggagagcatgagagggatgaggaaccagcaccagtgaaggggaggggccccagagagcacgagacggatgacgaaccagcaccagcgaaggggagggccccggagagcacgagacggatgacgaaccagcaccagcgaaggggagggccccggagggcatgagacagatgaggaaccagcaccagcgaaggggagggccctggagagcatgagacggatgacgaaccagcaccagtgaaggccccggagagcacgagacggatgacgaaccagcaccagcgaaggggagggccccggagaccacgagacagatgaggaaccagcaccagctaaggggagggccccggagagcacgagacggatgaggaaccagcaccagcgaaggggagggccctggagagcatgagacggatgaggaaccagcaccagcgaaggggagggccccggagaccacgagacggatgacgaaccagcaccaacgaaggggagggccccagagaccacgagacagatgaggaaccagcatcagcgaaggggagggccccagagagcacgagacggatgaggaaccagcaccagcgaaggggagggccccggagaccatgagacggatgacgaaccagcaccagcgaaggggagggccccggagggcatgagacagatgaggaaccagcaccagcgaaggggagggccccggagagcacgagacagatgaggaaccagcaccagcgaaggggagggccccggagagcacgagacagatgaggaaccagcaccagcgaaggggaggggccccggagagcatgagacggatgaggaaccagcaccagcgaaggggagggccccagagagcacgagacggatgaggaaccagcaccagtaaaggccctggagagcatgggctgcacagcaggaggaaacttctagaaggaatcaactcaacagtaaaaagaaaaatacccgatcaggacatgggcaaaggatctgaatagacattccttccaagaagatatacaaatggctaacaagcagatgaaaagatgcttgaagccttcaattaccaggaaaatacaaatgagatcaccacaagaccccacttcgcacccactaggatagccacatccaaaagacatataacaacaagtgctggcagtgaggtggggagacaggaaccctccaacactgctggcgggggtgtaaaatggggcagctgctttggaaagtctggcagttcctcaaaggattacacaaagagccaccgtataacccagcaagtccagtcctggggatatatccaagacaggtgaaaatctacacccacgcaaacacctaccgcaaacattcaccgca

SEQ ID NO: 15641 - DNA, 966 bp, Artificial sequence
  DNA replication origin
gcactgggctgcagtgggccaaggttcccctcaagacattggctgggatctgcccccatacctgagcccagtgtgtggcgaggaccgcagtgctggctgtggtggagctgacagtgtctggaagaggatctgagcaagtgctcccagccccacctggacggggcagacctaagtaggcatctctggtcacgggcgctgaggcctcctgctcagctgcaggatgaggtagcaggcagtggcagtcccggccccgagtcacttggccttgctgccggaacttcctcgggactgtttcagcttgagggaggtctttatggggcagcccttcctcttggcacagttgggggccgtgggggagcccctctttggccgtcagtgggatagctggccccagggcctcccctttgctgtgtccgaggacagggcctctgctctctggcagccgctgtagtggctcagtcgccccagcagtggggtcagcccctattgtaggtggccggcagggcctgggactggggtgacacagagcactgctgtcatgggctgtgggctgcttgtctctggcttttacatgaagaagtcctcctgccctcctcacagggttcgagtgggtttcctggtgctgtcagggctgggggtgctgagtgagccggtggttgtgctgggcactgggtaattaacgggatggtggaggaggtggcaaagttagagacacagtctgtggtactccgcaaaaggcctgggctgcaggagggctcattgcagcctgccgggcagtgagtggctgatggacagtgacactgacgggggtgacctcgctggtgtggaagaagaggaggtggtcccgggtgggaggtggtgggatggcttcatatcctcttctaccttgtgctgtcctagcctgtgtccaagacctctggccccagccgtgtgtctggatgcgccccaggtgcgcactctgcttcg

SEQ ID NO: 15642 - DNA, 1339 bp, Artificial sequence
  DNA replication origin
gtcaccatcacccagtcacacactgggaccacggccgtggcgagaagggcatttgccgttgctgcctggggtagacacacacaccgagaatcaggcatttctagccgtgccgacgctccccatggccacgcgtgctcatgttcctcctgctgcgtcttgtgctactcatgaaagaaaaagctgattgcaacttactaaactggttttctgacctgggtttcagcgccgtggtttgaaacatgctgctctgttactgtttttaacacccagaagaggccttcctacaggctggcgccgccctgtggtgtcagggtgggcaggttgagacctgggaggcagcatctgctcagagctgcagtgggccttctgcagaccctgaggctgaggctcaggcagagtcccttttcccagggagagcatcgctttattggtgtctgatgggtcagggaggtctgcaggaggtcagcgtgggcccagtgtctgagctcctgctgtggtgggcccgggcaggtgctgggacaggtgcagggcgtaggcatggcatgctgagctcttgctgtggtgggtctggacaagtgctgggacaggtgctgggtgtaggcacggcgtctgagctcctgatgtggtgggcccgggcaggtgctgggacaggtgtccggaagttgcctggacaggtgctggaacaggtgtccggacagttgcctggacaggtgctgggcgtaggcatggcgtctgagctcctgctgtggtgggcccagacaggtgctgggacagttgcctggacaggtgcagggcgtaggcatggcgtctgagctcttgctgtggtggcctggacaggtgctgggacaggtgctgggcatagacatggcgtgcactcaggcctcttgactgttgaacgaggccgtgctataggagatctggaagaggagggcggcagcctggttcctgcactggattccagctgtgggcgatgaggcctccgtcctggtgtggaagctgcctggacatgccctgccccgggactggatgggtccctagagcactgggctgcagtgggccaaggttcccctcaagacattggctgggatctgcccccatacctgagcccagtgtgtggcgaggaccgcagtgctggctgtggtggagctgacagtgtctggaagaggatctgagcaagtgctcccagccccacctggacggggcagacctaagtaggcatctctggtcacgggcgctgaggcctcctgctcagctgcaggatgaggtagcaggcagtggcagtcccggccccgagtcacttggccttgctgccggaacttcctcgggactgtttcagctt

SEQ ID NO: 15643 - DNA, 1005 bp, Artificial sequence
  DNA replication origin
ctgtgactctggggtgccgtggatcgaaaggcacatcgtggttctggagattttaaaaggcttttataaggtgcatctgaggatcaatgaatttcaatgaaatgtgtccagaaatgttttgtgaacaaatggaaataattagagaaaattacgatgcgttccgtgcgggggctgggagccgggagatggggagcacgcgtctctgcctccgcaaagccgagtggggacagcagtgtggctttgcttttcatctcccatacgctacggagtggcacttttataaaatgcagtagaatgattctgagcgtggaggtcgcagcagtttcaaattgccttaaacgatgctggagccgcacttcccattttgtactttgttgctgactggtaatagctgtccagggattaatctgtggctacccctgcaagccctgggggttgtttgctagtttgcagtcacatttcagaactggttcagagaaaagtccggaacacctaaagttctgaactccttgctggcattcagcagaagggggatgatccagaggatatagcaggcagggagggcttcctggaggaggagccctgagtggagcatctcgggtcctgggtgtctgctgtccgtgcatgggggcctggcactgccaggagcgccctgagctgagagtaatcgtgactgtcccttgctgtccgtagagtgcgctagatgttggaccgagtatggaatccgccatttcccctgcccgtcgccagagagcaagctgcagaaccgctgtgtggggaaggacggggaaggtgatctggggccagcaggcacgcctattgtcccaagggccaggaagcgaggtacttcactcagacgctgggtctcaggggtcctgggaaggcggcttggagatgcaggtgctgaggagggcagggtcagcaggtgggagctgcagggaggaggctgggaccaggaggcaagggacctgcatcccctgccccctgccaggccttcccctgagt

SEQ ID NO: 15644 - DNA, 2109 bp, Artificial sequence
  DNA replication origin
ggcctggacaaattccccatgggtgtagggtcagctgcatgtgcccagtccctgctgtgtgccaaagtcctgccaccctaactgtgcagcaccttagggccgtcgtgtcactataacgttctctggacagaggcagcaaaaagccagctagtgagtcgtcaactcataaataactcagatacacagaagaaagctccccagagctccatgcacacgggccagctctgtggacagctaggacatgtagctgtctcctcagcgcaccagcagcggtcagcctcacgataacctggcaggaaaagaaaatgtcgacacgcccttggcagcctggggcgggagcgggggccaggggagggtgggcatggggtgccgggagcagccagctttggggcagcctggggcgggagcgggggccaggggagggtgggcatggggtgccgggagcagccagcttcggggcagcctggggcgggagcgggggccaggggagggtgggcatggggtgccgggagcagccagcttggggcggccgggagtgttccttctcttagcccagccgtgcttcctcttggactctgtcttaggagatagacacacgggcagaggtgttcaccacatgtgatttgtgcgagtgctgactcagaaatactgtaagcatctggctttagggagacgatgtgttacagctgggatagaatttgacgcaggcattaaaatcacatcgtcgaaggctctctagtgacccgcgcacgttctgtgatttgtggcgaatgtggtgcgtggaagaagcaaagccatacgtgcagcatttgcttgtgggagacagccgcccacctccagggttaatgtttatctctggatgttgtgatctttatttttttatttataactgtctgcatttacattttttctgtaatttgtgggtattattctattcaaaagcaaacagcaaatgtcccaggcctgtccctgccatgttctaggttcacgtggctcaggtgggcagagcatactggcccctcgaggggcgtggggagcagcgtggaataacgttggtgcagtgggcaggacctggacttgggtgagtggatgcagtgtggtgaggtgatgacatgtccttctggacttgggtgaacggatgcagtgtggcgaggtgatggcgtgtccttctggacttgggtgagcggatgcagtgtggcgaggtgatggcgtgtccttctggacttgggtgagcggatgcagtgtggcgaggtgatggcgtgtccttctggacttgggtgagcggatgcagtgtggcgaggtgatggcgtgtccttctggacttgggtgagcggatgcagtgtggcgaggtgatggcgtgtccttgagtgacagcagggcctgtggtctctctgggggcctgtgggaccccatttctgagcagaggctgagctcagtcaccaagtgcctggatcccctcacaggccattgtccggggtttccagcttggagagtgtgtctctgtgcagagagaggatggtgtggatgccaggggagaagggcctgccgggagctggagggacaggccctgccctcttgggagggggacccatgctggaggctcacttcatcaaacactgagaggcgtctgtgacttgggatccctccctctgtgacttgggccccctccgggccttggtcagtgcctcttcgtgggtgcctggttttcccagggcagtgtctgtctccaggctgcggctgctccctctccatcccctccagagggttgtcttctgactctgatctactttgctgcacttctctgccctgcggaaacctccgccccgaaatgagccaggcagctgccctcccgtccttctgcaggcttctccctcttccccccaccagggcccagagctggagggtgagcgtgccccagtccagagcagtgagctgggcactggaggccctttcctgagtctgtgtggccgtaggcctgtctctgcctgtgtggtttgggcagtgctgtctgggggcaggaggatggaccaggtagcctttgggccctcgcccacctcgtgggggtccgatgagaggctttgggaaagtccttccctccctgtcacgttg

SEQ ID NO: 15645 - DNA, 1017 bp, Artificial sequence
  DNA replication origin
cgcagctgcacacagcccaagagtcatgctgtgccctcaggcagggacctcctggcagagagaaggtctggccatggggtggccaggagaagcagagccacccactgtcaccttcaggccataaggaggaggggacccatgggccccatccactcaggcacatttcactccagaggaaagctgttcacttcaccagaggccagctttccaggagagaaggggcccggtaggccctgcctagggccagtggccgtcacttcagtgagctcccaggtctgtgcggaaggcacttttctgtccttccacagatcacagagttggagatcaaccacggagtgggcccggccctcgtccagggtggaggcagcaggcagcaggcggtgagggcccgaagtgcaggctcttcaccactgtgctggaagcacagccccagccgagcagggtctggggggaaaggagggcaggggggcaggaaaggggcctcaagagaaggtggggaccctctctggagaagggcacagggacccacaacaggacagggaaaggctggccctagccctgcctgggaccaagaagagccccgtcatgcaggtggttttcctacaggcagcctcagaaacaggggtggagtcataggccacaggacctaagggaggggagacaggagaaccaggggtcagtgtgcgtggagaacaacccagggtcaggctggtcagcagcagctgagagagagctggagaaagacaggccagggcagggcacagaggctgggtaagacgtgtggtcagagaacaggatgctgccacttcagggcccagagacaaggcaccacccagtacagagtgcaaatgccagacagccatcctctgtgggaggccccaagcacacccaggacagagtgcaaatgccagacagccatcctctgtgggaggccccaagcacagctggccaggcgctgtccgtggtgctgagagccacagacggcaagctgcccccaccagcctagtccacacccac

SEQ ID NO: 15646 - DNA, 1324 bp, Artificial sequence
  DNA replication origin
agaagggcactaccaacaatgacaagccaggtgccttgaataggtttctgaagatgccttatgggcggggtgtcctcacctacggagcccagttgggcggtgtctcctgcaggggccttgcttcggggtgtcctgcttgccatccagggctgtcctcagaagccagctgtggctgtcctgcctggccttatccaggctatgagattctctcgtcaacttgcggcttgctgagtctgggatgggggtgaaggtggctccgtgtgggcttcaaatccggactgtgctgcacagggcccttccttttttgtccttgggtaggtcctgttaggatgtgaacccacttgggggccactgcaggcaagcaggacagtctactgggtgttcctgcctggacagggtcattggcaagtccccagcccctgcccctgccatcagggctgctgtctgagatgtgtaatgttctgtgagactatgctaaggccatgcctggcatgagtcttgggatggacacagtggcaagcaggatcaggctgtcctggccttgctccggacactgctgtgcaccttacagagcaaggtcgaggcagtggagtgaggaggtggagagggcaccttacagagcaaggttgaggcggtggagtgaggaggtggagagggcaccttacagagcaaggttgaggcggtggagtgaggaggtggagaggggagctgactctgctggggttgtgctttggcagggctggggatgtgctttgggagggtttgggggcatattttggggctggaggtgtgttttgggtagggccgggggcatgttttgggcagggctaggggtgtgttttgggcagggctgggggtgtgttttgggcagggctggggacatgttttgggcagggctaggggtgtgttttgggcagggctgggggtgcgctttgggagggtttgggggtgcgttttgggcagggctgggtagatacctgggaagaatcctggatgctggtgaggcctgagctgtgtctggagagctgagtggccttagctggggagggcaggagaggcagctactccaggcagcgggaggcccaagggaaggcacagcagtgctggactcctagtaggcaggtctgactcgggtcagcctgtgagggtcttgggaggcagggtgaggcctgggcttttctgatggctgttggtgctgagcagggaacccggggcccaggctgaggtttgccgaagaggtctggagacagggctgggtggagcagtgccacaccgagggcctgtgtctggagcctgcaggggccaggctccatgccttggcact

SEQ ID NO: 15647 - DNA, 1567 bp, Artificial sequence
  DNA replication origin
gattccatctcaagctccagcatcgtgacctagctgtacttctcaccacattctcctcaaagtcttacgtgtccagtgtatttattcatcaaaacctgctaggtgcttatcctactctcggtgctgggtggggtgctcaggacacaagggtgacacagcagaggtctatgccacagaggctcccaggcacacaggagagacaaacacgggagtgccagggcattccaagcagaaggctctgcatcgacaggcacaccagtgagaaaagccacagactatgcaggaaaaatgactgcactgtcagggacataaagcagggactgaagatgtggcaggagctgctggcaggagccaaacccaggacctcgctctgcaggccatgaggagctgtggaagagacttagggacacctggctgcccatgagcccctagactgagtgcctaggtctaggctcttgacccagcatctacagaaggccagactcaggggaagtgtccagggaaggttcctggatagagtcagagcagccagaggctgccagatgttcatggggccaggccagcagaggaggagagaaacagaggtgacccagccaaaactcaacctcctccaggaagtcgtcttggatttgccagcctcccacagccacctgcattcacggcctgtgctgctgtgtccaaacatttgttctaccagatttctgctgcggtcctgtgatgtatggggtcgaacggtatgaaagcagcggttcagtcgggggaagcactccagtactaacaaacttcagctttctttcaactcaatactgtgtccacactgggagtatcctaagcaacaatccccacccctgtctcacaggcactaaagataaaacagaaaacaagcagatgagtgacaatgacaaacaagaaatactgtagggagagcggtcagaaaggtgagctcagacataccggaagcggagctgcccccaagccaggagcgagccaggaactaaaagaagaggcaagtgtgcagcagaggaaagaaagggcgccaggtgtggctggaaaggcacctggcaggatgaggggcggagaagcaccggcggagcagcacgcgcgaggcccattttgagccgcaccacaccgctcacagaacttcctgtgataagcagtgttccctacccgcgctgccccacacagccgccaccagacacgtgtggctactgagtgtcggacatgtgaccactggcacggaggacctgaatccttcacgttaaggacaatgtaaacagccacacatgcctaggggctaccacactggacatggcagagcttccagagcaggaggagtgcgccatgaggcaacaaacacgaggtccctggagagtttctgcgggggcagcacagatcaacatcacctgaaagtccctggtggggatgtcgcaggccccagtacccaggaagcaccttcttacaacttggagaagggacagaaaggcatggagaggcaagcacacaggaacggggtccccagctcaggctcgaaggcgggctccgctcgttgagctgcagggcaccaacc

SEQ ID NO: 15648 - DNA, 924 bp, Artificial sequence
  DNA replication origin
cctcccgccgccggcgtgcgcgccccctcccgcaccagccaatggccgccggtcccggacgcgcgcggggactacccgccccagaggccccggcgcggagccggaagcggcgcggacggcggtcggctgggccaagaggcctctgcgggtgcgcgcgcgagtcggctgtcctcacttgcctggtggtgggcctccgtttccccgtttccccgttttgcatatggggatgacggcgaaggtggaggtcacgtggagggcggcggcccggcgctgaggcgcttcgggagcgggctccgcccagcccaggccgagcccggacctcacacgggccaaagctggagcttctgcggggctgcgcaggcggcgggtctcggccagggcagggccgggcacctgcgcgtctcgcgctgcggggacgggcgttgggccccaagtcaggctgcacgggctccgcgtggggccgtgctcggccgggggctggcaggccccgcggggactccggactcccagtgtcaccaacgaggaaactgagtctcaagacatctgagggacctttgcccgaggtcgcagcccctccctggaggagctgaagtgcagagtagggagccccttgcggagaccctcctgggacctccttccgcaggggcctggggcgcctccctttccctgctctgcctgcgggcactgagctcccgaaagactccagcccctcgctctcccggtgacctgctggagaagacacctgggaggaacctgcggacaatgggtgtgtgtccttgggccgccagggtcacctttcagcctgtttccccagaggtgaaccaagagtcacacccaaggcaggagagcaagagtgatgagtccgctgcaccttctccggcaagcggaggttctcccgccgccctcactctgtgatgcttgctg

SEQ ID NO: 15649 - DNA, 1790 bp, Artificial sequence
  DNA replication origin
catggctgctgtcctcgggatgccgtgcccacacttcaggctggagccaggagaaaggaagactgtcagtgaggtgggtggccacagctgccccttccaaaggaccaggaggctcgattgtgcctcctgcagtcatcccctgggcaaacagtgtcacagctggcccagctgctggtgaggctggctacattgatgccttgaacaaaactggggttctgttgctaagggacaaaggaggcctgggtaatagtgagggcggctcggcggggttggtgggtgcaggaatcaaggactgagtgcccgtgggctttgctggagcagaagctgtgctgggagcagagcaggaggtgcacaggccttctcctgtccaggcaggggctgcaggggagcaagggatggtctcctgagcaggtgacattgaagccaggcagcagagggtagagaggaagggtgggagggtggggaaactcacgacaaagccataggttgacactgacctggaaattcagcttaaaccctgagaagtccatgctactattcagagagggagcatttctgaggttggctttagtgggtgctgcctcaacgttccttccgaaggccttggaaccaccccctaaccttgttgcccacattccctctgggacctggaatggtagatccaatttggggggtgccagctgaggaccaggcaacccccacccccttaggtaacagaactcagcgtcctggggccaatcccacttattcaccctgttggtctcactggttggccaaggggtgggaccagagttcttcccagggagtcctgcttctctggaggaaggagggagcccagagctgcccgaggtcatgtgatgacctcttccagggaggggcagagatgagggaagggaggggagccccggccctaggcccaggcagctattggctatttccctcatcccttcctgaggaccccttagcatcctcctccccctccccatcggctcagcctgagggagtgggctcctggctcttccacggagaggtttaccttccctgacttgctgtggggcactcaggcgggctcatcccagatttcggaggagccaacaggtacggagcccctcctctggtggttcctacccacgctagaccattccccctgcagtgtccaggcacagaaacagccccatatacgccttgtatggtcaagaaagcggctcctggaggtggtctgccctgggaggaaagggcttcactttcccctcctttgcacacctgaacacggagctgtcagaggaggctgagtgaggtggcggccagacagacagcgccagccacggaaggggaggtgggcaccgtgccaggcacccggcatcctcagtccagactgacagctctcagacaggcattggtcctggcgaaccttccccttcaagtggaagctggggggtcagcagtcatgggcatcctccctggttaggagccggcttccctgcactctagctgtcctagccgaagagtgaagccctgtccaaatcatggcgaggctgcaagacaggcacacactactgcctcctgggagcccaggggagactgaaatacaccaaggcaaggagcgtgggtgggcccaggacaggccggcctgagcaccagcccaggaatgctggtgggcatgtgcccctcttccctcccacccatgtgtgcacacatttgtgccatatactaccgttcccatgtttgcgcctgggcacacacttgtgccagcatacacacacttgtgcacttgcacctggtgtccagga

SEQ ID NO: 15650 - DNA, 917 bp, Artificial sequence
  DNA replication origin
agggagtgtgtgcattgtgtgaaaacatgcatgtgtgcatgagctgtgtgtgggatatttgtgcatgtgtgtaagggagtgtgtgcatggctgtgagaaatatgtgtgtgcatgcactgtgtgtctgcacgtgttattcagggagcatgtgcatgtgtatgagaatgtgtgtgtctgtgttgcatgtgctgtgtacatgtctgtgcatgtatgtgtgagaacgtatgtgcatatgctgcatgtctgtgcatatgtgtgtgtgagagaatgtgaatgagtggtgtgtgcgtgtgcgtatgtgggtgtctgtgcatgtgtgtgtatttcaggagtgtgtgaatgtgtggtgtgtgtgcgtgtgtgtctgcttgtgtgtatttcaggagtgtgtgactgtgtggtgtgtgtgctgtgtgagatgtgtgtgtgcgtgtgtgcattgcaggggtgtgtgactgtgtggtgtgtgtgcgtgtgtgagagtgtgtgtgtgggtctgtgtgtgtgcattgcaggaatgtgtgtgaatgtgtggtgtgtgcacgtgtgtgtgtgggtctgcatgtgtgcattgcgggagtgtgtgaatgtgtggtgtgtgtgcgtgtgagtgtgtgtgggtctgcgtgtgtgcattgcaggagtgtgtgtgaatgtgtggtgtgtgtgcgtgtgagtgtgtgtgggtctgcgtgtgtgcattgcaggagtgtgtgtgaatgtgtggtgtgtgtgcgtgtgagtgtgtgtgggtctgcgtgtgtgcattgcaggagtgtgtgtgaatgtgtggtgtgtgtgcatgtggggcagggtggatgtgtttaggggaggaccttagcagtgtaggaatctcactctacagctttgtgaacaccccagaaggccatcacacccttgagttttgggggcatact

SEQ ID NO: 15651 - DNA, 777 bp, Artificial sequence
  DNA replication origin
cagccctgagaacctggggctggattccccagtggaggcaccgggatcgctgccaccctccgggctccaaggaggaaggctgagtcctgactcagagctgctggcctcctggcctgacatcagccgccccctggtggccatgactgctggtgcagcgaggagacggcagggcatcgccgccaggactgggaggagggggtgccgctccgcaggggatcctcagaggcagcccgggcaccctgcccttttgtcaacaatcctgtcaaagccttggagaagaaggcctttcccccaggaggaaggaggtgtgacactgcccaagaggttggaccgggaagcggactgcccccgccctttcctggctgccctgtggcctgtgtctctgggcaacttctcacagtccctgtggacacccctaggagccttggccacagatcagccttgaggaggggactgatatggacacaacagtgtccggcgagctgtgcgccatgcccaggggctcggtgggcttgagttccctcgtctcctggtgacctgtgttgacggtggtgactgccgttgagggccatgggaggacagggtggggtgggtgctgacattcaggtaggggtggtggtggtccttgtgaattcgtgttggtggtggcagtggtggtacccagtggagactggctgatgggctgacagaagcagccaggccgacggtgggcctgggaagcagcagcagcgtgacctgctgagatgcttcagtgtgcagagtgctggacatccacac

SEQ ID NO: 15652 - DNA, 1164 bp, Artificial sequence
  DNA replication origin
gcgcccgccgccgccgcctgcgcccgccgctccctctccggccgccgccgccgctccgctcctctcgcctgcccggctcttctcgccttttttccccttcctggcgaggggggggggggggcgagccaagccgagccgggggcggggcggcgcggggaggaggaggaggccgaggacgaggagaaggaggaggagagaggcgagagctgcttccccccacccggctgccggcgctccccaatctctcgctctctgaaactggatcccgaatcgggagccagagactgcattacggattacatcaggctttatagagcttccagatcacacattagagggggagcgctagcggggggcgggggtgtggggggaggggagcgagataagggggggcggataaaatgcacacacgcgcgcacacctaggagagcccggtgcctgccccgcgcagcagagaagccaagagttgggttcctgctctcggccttctccaggagcaggggagtggccccactggctggctggatgatggatggtggacggcaggacggacacacagatgaatggagggaaggaagtgaggggttgtgcctaggcaatgcaggtgcgtgggtggatggacggtggacggatggatgagttggtgggtgtagatggaagtggggtggacggatggatggacggatgactggagagctggcgggaggacgatggggattgagggaagagatgggtgaggatggattgagggaagagatgggtgaggatggacgggataggtgggtaagtggatgggcagcacccagtggaggtctgcttggctgaaggctgtgcaggtgcaaggaccaggcatggatgggggtgagagcgggctgagtgggggatgggcaggagagagagtggaggcatagactcctgaccccatccaagagggtcagagagtgggggctgggcggggactgggtagggccagttgaactgctcgggggggcttgtccagttcttcctcatggaccctgtgctgagagatgttgaggggagtggctggggaaagagccaggagatggatttgaaggtgaggtcgaacccaccactgaccctgggtggctgtccccaggcacttcctcccattgtcaccatccgccctcctttgacttgatgaca

SEQ ID NO: 15653 - DNA, 967 bp, Artificial sequence
  DNA replication origin
ctccaagaaacttagaagcccaaaataaaagtggaaaggggtaaggtgcccagcggcctggggctggggtgccagattaggcgttctcttcaggctgccggggagtggccaagcaggagccgccgcggccaggaggagggacgcgggctcggagccgcagcctccgtcaagccctcccggtcgcatcgcttcgcggtgattctcagctccgccgccccctcccgaggccggaggagctctctacctcgcccagggggccgcggggacctagggagagggctcctggccgggtccagagctcccagcctccccaggagggggcgggggccgtgctcgttcctcgaggcagctccgcgcggctccaagctagcgcggcgacggtggagggccggcggcctctgctcaccggcgacgcggacccgggagtgctcggcgcccgggagtgctcggcgcttggagcggagacggcatagggccggcccaaagttgagagcggcttatccgcgcggcctgtccgacccagtggaaaggtagacaaggagggaagagccaggcgttcgcgtgggggtggggggcgcaaaaatagccctccgcccgaagtgggggagagtacctccagggagtctccactgccaatgccaggtctacaggcgagggcttctacgagcgagggcttcgagaaggagtctggggttttctcctgcctgccccgagctctgtgcgtggggggaggacgtctcgggcccttacaatgtctgtagggggccctggacgtgattagcaggagggggacacgctcgggggctctccggagcctgctgcgtctatgtgtggctgttgggggccatggggggctcccttagacccccgccagcgtctgtgtgtgctgggggtacagcgggaacgccctccccagcctgccctgtgcatgtgatgaagaggggtgccaggctgtggtgtgtggatg

SEQ ID NO: 15654 - DNA, 919 bp, Artificial sequence
  DNA replication origin
acagccgcggggcctggcatgaagggccccagggagggcctagcaagcgcccggggtccgagcagcctcctgcggcgtcctccgcccccggtcggcccgaccccgcctccgggagtgggtcgtggggcgcggagcccgtcctccggggacgccgcggggctccaggcccaggcggccggcgcggggccgcagtggcggaaggcggagggccggcgcgctgccgctgactgccgggagagggcgcccgcaccgcgcccgcgcggccctgcccgccccttccgtctcctccgcgcctggcccgcggctccggccccatcttgggcagccccggccgccacctccctcccgcccgcccgcccgcccgctcgctcgctcgctcgccgtccgctcccgccgccgggtcccgtgacgcgcctcgcgtctcggccggagcccccctcgccggcccggcccggtccccgtgtgcggtgcgctggcgtgagcgcgcgtttgcgtgctggtgtccatgtgtggcgcgcatgcacgtgcgtgcccgtccgggaggctgggggcacgtgtgtgcaggcatgcagacttgcacatgtgtgtgcgtgacgggggcgggtctcgcgccggtgtggccccggatggcaggatttagtcaaaccccgttttaccgtcggctctggctctgggctgcccccgggtctgctctgtgtgcacgggatggacccctgggaggaaaactccaacacctgaccctcagcaaagaccccgaaccaggagggtattgttaacccctccgggcccgcgagcccacgccctccctttgtcctctggaagcctccggcctccctggctgcagctgcgccatcggcagagctgtgacttctgggtaaacacgcacaggcctgggatccccctgtagacagccggcgtg

SEQ ID NO: 15655 - DNA, 2268 bp, Artificial sequence
  DNA replication origin
tggcactctccgggacaggcaggtagggccacccaccctcctgtcacagagatgccaacttagcctcagagaggtgctggcccaaagaccaaccgtgtgcccccagggcccggtggtcgggggtggggtgtgggctttggaagcctccttccccgccttgcacccaggccagtgcccagccagcaccatcttctcagcctcctggccgctcctctgcgtttcttacttcaaagacccctcaaccacatgtctcagtcaagagtcagcacccccaaaactggcccacagctgagtgaggagtgggggacaggcaccaggacacaggttctgtctcatctcaaggtccaccccagtctctgagctcccagtaatccctgggtcctcctgacctcagctgtgctgggccgggacagcccagttgcctggtgggctgcaggggaccagcctgccgcatgctcctctcccaggaaggcaagtggttgggggcctgacagcgaagctgcagagaggacttctgtcgtgcccttcccctgaccaagccccagagagggatgcccgagagaacagaacgccacaagcaggaggacagccatgggggcgagtgaaggggacaggagcctaaggtgggggccaaggtgacagcgatcatgctgagggaggtggctgtgaggggtgtccaggtgctgctgaggcgagtgggagtgatggggggaaggtgtttgttggctttggtgttggggatggaggtggggtcagataggaatgatggtgcagtgtggtgccggcggcagggtgcggctgaggtagcctcgggggcaatggtggtgggggtgatggggtggggtgagatggtaggggggcagtgagggtgctggtgtcaaatatgagggtgctgcggctggcgatgagcaggacaggggacagaaggggtgggtgtgtgcatgtttgtgtttgtgaaacccatgcagggaaggagggaggaggggcagaggtctccaccggtccctccaggcagggtagccccgaacaagagcctgtaacggggtagcagaaggcaagaggaccagggctctgtggaggaaggaggctagtcctttggtactgatcctattttttgttgcttcctcaattaacagaaatgagttagtatgaaaaaagaagagagggagggtggggcaggagtggagacgtccggagccgcctcctcagtggcatgtgctttgcgggggaagggggatcctcaccttaaccccgaggagtggagcacagatgaggaaaggaggcgctggggcctgatgaaggtcacagagcagaacgcagggccagcaccccctgggtcccactgccagtctctgcctgcgggggcctccctgccccatccctggacatgaacatccaggctgtgtcttctggatcgtgcggtctgtaggtctgaacctccgctccttcccctctgcgtgtgtagacaggcacacatcgcggggcgggggtgccgtgtgcacccgtgtgcacctcacggtgtgctcgtgctgacccatgtcctcgtgagcccacaatgggacacaggttttcgggccgtggcaccctggtgttccgtgtttcttgcctttgtggggacacgcgtgcctgctctgggtgtctgcctgcacctcacaccggggtgtgtgttggttttgggtggcgtcggggctggctgccgcccgcccactgtgatgaatgtggcctgcgtcttgtgcagtgcagctgtgggcgtggcagcggcactcaacaggctgtgcactcagcctcctgacgcgccctatgacctggcggcccatggggcgccccatctctttggcatccccatcaggccaagccaccaaccctgttcgagaccctcctatggctcctgacagcagctcccagaacatgggccaagaccttcagggctcaggtctggtccggacccctctgcagcccctgtcctgcctcccaccttcctctccagctctggtctatttctcacacccgcacaatgccctgccccagggcctttgcactgccggctcttccttctgcccggacctctgaccccttcatcacccacccacctgcccttccgtgggacacctcctgggtaagccccacttctaggcctctgtaggttgccttcttgcactccccagagcctccttggcagagctggtcaggggctttttcctgcatattcccgcagccttagtgcttggggtgggggattgcacaggaccacgccctcccccttgcccc

SEQ ID NO: 15656 - DNA, 999 bp, Artificial sequence
  DNA replication origin
caaacctgccttttctggatgggccactgggcaatgctgggcaggagcccaggccgttgtcttggctgatggcccctgagcctgccagtgggcacgggcctccccacctgccacactcaccccctgccctgcccccagcagacccacccatccctgagccagccgaggtctcctgcaccccacctgcccgccaccctccaacggggccaccccggagccttctcacaccaaggcaggcccaggcgggcagagagctggccaaggccgggggtgaccagggaccatctcttcaggctcctgtcccccccacgccaggcccgagccgggcactgcagcccaggtcacatggctgcagtgttggccgacagtctagctgagatggggtggggcgtgcaggggagactcctgatccctcctggcacccagggtggcatccaggaggcgtcagcgcctgagtggggccctgaggatgagtgggtccctctgcctgctgggggcaggggcgggcctgtgtagtgtctgggccaggaggaaggtcaatgtggacagggtcacaggagacttccagagagcaaatgggggaggggctggtggcctctgctgagatgtggaaggggagaagcagatgtgtgtcaatgtgtgcacaaatgcatgtgtgcatacgtgtgtgcctgtgtgtgcccgtgcatatgtgtgtgcatgtgttcctgtgtgcctgtgagtgtgcatatgtgagcatgaacacacacatgcggcacatttgtacaaggccacgtggctgtgggacagcctgggcttcgtgctgtacttgctgggatgtgagggcagcggggacagagacggggctgggagaggagggtgtgccccagagggtgcatttagccagaaccacacacagtcacggccttggagaaaggggtccaggcctgagccaacaatggctccaccctggggcagctgctgtggtatctgcacagctgtacctctggcctcggctcc

SEQ ID NO: 15657 - DNA, 1789 bp, Artificial sequence
  DNA replication origin
gccaggggtgcggaggggtcgcagagccgcagcacctcgtcgaagctctccacgcccaggtaggtgcgcgtggactcgaggaaggagtcgaactggtaggtgcgcacgcggccggggccgctgcagggcacgggcgccttggccaccttcatgtagagagtgtagcgccgcgggtccgggttgcgtagcgtccaggagcagcgcgaggcgttggccgggaacacggcggccgcggagaagtagccgaagaactttccctgcaccagcgtggcgcacggctcgggcccgggccccgcgtctgctccggcggccgcccgcgcgcggcgtcccagcagcagcagcagcagtagcagcggggcgaggatccagacggggcccggggcggcggcctggcccctcatcctagctcgcggggccgccggggttccgcgggctgggcaggcaggcgcggaccaggtcttgacatgccagggtccggcggcgggcagggccggcccggtgggggcagggaggcggggcaagggtgggatgggagagggccccgcttcaggtgacagagagggcagcaacggcttctaaagtccagggccctggtgccagcctgtggccaccagcagcagctggaagagaaagagcagagggtcagagtgagcacttggggagacgtgggctctgggcatgggggtgggctctctcagaggaggcagcttagcctgctaccaacgagggcaggaggactttgggccgcagacacaggccctggcaccctcccaggcacctgctccgtccacctgtctgtctgccactcaccaatgtgaccacctgcaggggcagcggcccagcttggggaacaaagtacctccgcctccacccaagcctgagcagggaggggctggcagtccacctggggcttttggtggtacccctttgcccacgcagcctggcgtggctcccgggggccctggcctgcctgcccactcgctcaccacgctctgcgtggctgcccctctgtgagtggagggtgtagctctctcaggctctgtctttcctgctgaccttggtccctcctctctaaccttcctccttcccaggaagattctgcaaaccccgtgggaagggaagtgggcccggagcacaggagaaaggttactcgggccattccccagcctcccgtctggcccccgagccctttctaaaggcttggagagcaggaagggggtgcagagcctcaatagcaatgactggatctttggggtgaggggagttcagatttggtgcccccccaagactgccctctgcagcctccagcagcctgtgcccagctggtgctcctgccaggaagctctctttcggccctcccacgtgtgccctcgtgccctaaagctacaggcacagggcctggggagggatggaggggggatggagccaccaggagccacctcacctctgcccttcctctgcaaggctagcattacttcctatcattcatgatgggaaaactgagacacagagagaatccataatttacccgtcacagtgagtgggtcggagaacccatacgtgagccccaggctgaccctaaatttgtgccaccaggagacacctcccagctccaggagagggcccaggttgagtgactgcccactcacagcgccacgggtgagcagaggtacagtgaaggccctggatccggggctgccctgggcccagcgggcatccacctcgctgtggaccttggcaagttccttctgcctacagacctcagtctcctcaccacccccaaggcctc

SEQ ID NO: 15658 - DNA, 1971 bp, Artificial sequence
  DNA replication origin
cgcccgtgccctgcagcggccccggccgcgtgcgcacctaccagttcgactccttcctcgagtccacgcgcacctacctgggcgtggagagcttcgacgaggtgctgcggctctgcgacccctccgcacccctggccttcctgcaggccagcaagcagttcctgcagatgcggcgccagcagccgccccagcacgacgggctccggccccgggccgggccgccgggccccaccgacgacttctccgtggagtacctggtggtggggaaccgcaaccccagccgtgccgcctgccagatgctgtgccgctggctggacgcgtgtctggccggtagtcgcagctcgcacccctgcgggatcatgcagaccccctgcgcctgcctgggcggcgaggcgggcggccctgccgcgggacccctggccccccgcggggatgtctgcttgagagatgcggtggctggtggccctgaaaactgcctcaccagcctgacccaggaccggggcgggcacggcgccacaggtgagtgactggcggggaaaccttcggacaggggaggtgggcagacaggggaggcgggcagacaggggaggcgggcggatgggggaagtgggcggacagaggaggtgggcgggcaggcggaggtgggtgggtaggggaggtggaccggggtcttcttccgcagggctgccctgctagcaccgctgtctggagagtgtgtaccctggcaccctcccaggcgcctgctccatccacccgtgcacagagtaagagtgaaggtcactgcaggtgtgcagggccagcccgggcacacggcgggtgctggttgagcattgaaggcctaattccctccaggatgggaaagggtcatcctcctggctgggagagggcccgccctttctctccggcaggacaactttaatgggccagaggctgcagcggcctggggctggggactgcaggagcctctggggctggatgatggtcctggggactcgggctgcgtggaagggtcggcaggtgggctctgtggagacgtggtcagatgaggtttcgggttgagtatgctctcggtggatgaatcacctctgccacacgctctaggtgctggggccacggctgcagcagtgaaaaccctccagagccctgctctcaggcagctgcgtaagggagagaggaaggccctaagcacgaagacacgagcagccaggcctcaggcagcaatgagagccttgcactagaaccgggcagggctggcccctcatggcagggttgccattgtacctggaggtcagggaggctgcgaggacgagggaccttgttcaaagctctgcgagaggtgggggaacctcatgccaggaagagagaacggcaagtggcgagtcctgggtggctttgtgcccggagagcacagaggggcaggggccagtcctgtggggctgccagcctctgggacactggcttttcctgctcatgagacaggagcgtgcgcaggagcagcgtcctcggggtagagccctgtggaggccccgtgggcctcagtgcaggagatgggtcccgtacacacctagggcatggagaccccttgctgacgggtgacgtgcaagaaagagaaggaagcccagggttttggtgttagcatctgggaagattgggggattggaggggtttgagtttgcaatgccaggcaggggctgactgcatacatcgggtgttcgggggtgaggctgggctgtatactcaaggctggagggccatcttggggcaatgggacccttaggggtacccaggggccttgacttttctggggccagtgaagcctatggactcctcagaattttgtgtttaaaggcacaaaataggctacgcagggctacagaggaagccatttatgctggagcatggttctacccacaacacggggccatggatcccagataagaagcctctgtgaggccgtgagtggggctagag

SEQ ID NO: 15659 - DNA, 1099 bp, Artificial sequence
  DNA replication origin
tgctgacgggtgacgtgcaagaaagagaaggaagcccagggttttggtgttagcatctgggaagattgggggattggaggggtttgagtttgcaatgccaggcaggggctgactgcatacatcgggtgttcgggggtgaggctgggctgtatactcaaggctggagggccatcttggggcaatgggacccttaggggtacccaggggccttgacttttctggggccagtgaagcctatggactcctcagaattttgtgtttaaaggcacaaaataggctacgcagggctacagaggaagccatttatgctggagcatggttctacccacaacacggggccatggatcccagataagaagcctctgtgaggccgtgagtggggctagagaggggccagaggaaggagggacaggcgtgaggcttggcccagccctccagtggcccgaggaggagggaggcagcgcccctgggcagtggggggccaggaagccaagtggtcatgctgtgtcaggacaggtgggcacctcagctgcgtcaggtgccgccagcggctgggtgggaggggctgaggaccaagcccccaccaggcagagtggaggtcactgtggccttggtgagggcggcttctgtggtgtggcagggatgagtgtcagggggactggggagagaacgaagtagatatggagggctctttcagggagtagagatggggtggtggacggtttgggaggtgggaggctgcaggaggactgggcccagcggtcacaggcacacctggccgtgcatcttggtctgccactcctggtcacttcacccctcagagccttggttccttccttggcagaataccaactcctttgcagagcgttttcctccagttgatgggtctcaggggcccggcccaagattacacccactactgaagagctggtcgttagcagcatcagggggcagcagctctgccattcctaatagtgctcggaacagcgtggagcttgttggaaagagctggcgggacagacgcatgtgacgcgtggagaggctggggcactgtgtgacgtgggtgtcggagggagcgctgagcttcactcctcactgg

SEQ ID NO: 15660 - DNA, 780 bp, Artificial sequence
  DNA replication origin
gagccttggttccttccttggcagaataccaactcctttgcagagcgttttcctccagttgatgggtctcaggggcccggcccaagattacacccactactgaagagctggtcgttagcagcatcagggggcagcagctctgccattcctaatagtgctcggaacagcgtggagcttgttggaaagagctggcgggacagacgcatgtgacgcgtggagaggctggggcactgtgtgacgtgggtgtcggagggagcgctgagcttcactcctcactgggcacctactgagtgcaggcaccctatggtgtaaggtggtcgggcctcccgtgggagatcccacgttatcttgggaacccaagggccttagcagggctttgggcagaagagccagatggttgggctgtgagtgcagaagagatgtcagccctgaggggaagcctgggacgggctggcagccggtgccggcattcaggaggggactgccactggcctggtcaggacgctgcagcagcagtgggagggaagaggagggccttggggtgcagctgatgatcgacttactgatgaaaggatgtggacatgggcagggaacccctcccaggtgtcccgccagaaatgaggatgtcagctgagttgaggaagtggggctgggggttgcagaggagaagaagatctggaggtcagagtgggacttgagtgtgagctgcctgtgaggtagccagctggcagtgtcatgtgaacaggcagctctgacaactggagcaccaggacagggcca

SEQ ID NO: 15661 - DNA, 938 bp, Artificial sequence
  DNA replication origin
tcacagagccatactcccacaggtcccagagaggagagcacctggctgagggtgcacagcagttgagctgcctcctccatagcgtgcttagcccgtgccatgccaggagaggtgggggactcagcacggcctccagggcacaagggcgggacagggtggcacctgcccacagcataggaacaggtgacaggcccttcgtggctgccctgtcacatgccctaactcaggacaaggagaggaacctggacttgaactggtggtcagattccaaacgcccccatcccccagactaaggcctcctgccaggactgtctggggcccaggtgctccgggcctcagtggtctcatctgctgaaggcatcccaccaccccgattctgaggcaaaggcacagacggggtcctaaggggcgggcctgacaatgggtcagggtggcacgtcctgcggcacccccctcgccgtcccagcccagcccccatgcggaagcctgagtgacgtggaaactggcagtgggcgggagagagagggtgtccaagccaggctcatcggaggatgccactcggttcccatggcaactgctgcagcacgcagcctttcaggagagacccaggttaggcctcagctgccaaaacacccactcatttcagggctggttaccttggtgacccaggtggtgaggatgtggtagggggagaaagggcgggggcacatcaggagaggcttcggaggggcgggacactggcccagaggatggatcaccctgcccccacaaaccaagcctgaccctggtcacatactgaaccctgactttggacccgtgctgagccctgatccaggtcacaagctgaccctggacgcatactgagtctcgattctagtcacacactgattcctgaccctggtcacatattgagccttgatccttatcacagactgacc

SEQ ID NO: 15662 - DNA, 1339 bp, Artificial sequence
  DNA replication origin
gcttggtttgtgggggcagggtgatccatcctctgggccagtgtcccgcccctccgaagcctctcctgatgtgcccccgccctttctccccctaccacatcctcaccacctgggtcaccaaggtaaccagccctgaaatgagtgggtgttttggcagctgaggcctaacctgggtctctcctgaaaggctgcgtgctgcagcagttgccatgggaaccgagtggcatcctccgatgagcctggcttggacaccctctctctcccgcccactgccagtttccacgtcactcaggcttccgcatgggggctgggctgggacggcgaggggggtgccgcaggacgtgccaccctgacccattgtcaggcccgccccttaggaccccgtctgtgcctttgcctcagaatcggggtggtgggatgccttcagcagatgagaccactgaggcccggagcacctgggccccagacagtcctggcaggaggccttagtctgggggatgggggcgtttggaatctgaccaccagttcaagtccaggttcctctccttgtcctgagttagggcatgtgacagggcagccacgaagggcctgtcacctgttcctatgctgtgggcaggtgccaccctgtcccgcccttgtgccctggaggccgtgctgagtcccccacctctcctggcatggcacgggctaagcacgctatggaggaggcagctcaactgctgtgcaccctcagccaggtgctctcctctctgggacctgtgggagtatggctctgtgagtgaaggaagagggttctgcagcaggtgtgggggcctggaagactcctcccaccctatggaccccaccagggagaaaatgaggcctcccacagctgtggtgggtcaagtccctctcctgggtctcatccccatgcccctggcaccccctgctggccattcctggcataggtgtggggaagtggggcagggtggggggcactctggctggacactgagtttgctgaaaatcaaagtggggccccgggagtcaactctgacccaagtgacaatgccacacgccgtcctctcatatccttttttgctgtttgacttcccacttgtcagtcctgggaggtcagccattatcctcatgttgtaaatgatgggagtgaggccagtgggtggtggggccactgggggaatctggcagctggagctaccctggggtctcctgcagtccacactcccactgagggaggcagggcccctttcctgaggctccaagaggccctggggcccttctggtgggtcggggtggcctgtgcttggcctgattgctgcccctggggcctcccctgctg

SEQ ID NO: 15663 - DNA, 1271 bp, Artificial sequence
  DNA replication origin
gacccccaggtcctcccaggccaggccttccccggcactgcggcccctccccacccgggccggcctcggcgggcttagcacccccatgacttacccgtccaggccacgagcccctgccctgccctgatccccgccctctggtttccccccaggcggctggaagctgtggtccctgtggggcgaatgcacgcgggactgcgggggaggcctccagacgcggacgcgcacctgcctgcccgcgccgggcgtggagggcggcggctgcgagggggtgctggaggagggtcgccagtgcaaccgcgaggcctgcggccgtgagtgcgggcggggcggggcggagccggagccctggagaggcggggcctgtgagggaggagaggggggtggggccctggagaggaggggcccgtgggggcggggcggggcctcgagcagaaggggccggtggagggaggggcttgggggcgggaccaggtaggggcggggccggggccggggcctggcagacgctgggcggggcctgcaggaagagtgaatagggtgggtctgggctctgagaagcaggacctaaactcggggctggcccgtgggagtggggcctagccgggggagcagaggtgagggccccgaagagggtggtgcttggggctgggtgggactagttggggctttcttccggtttgtggattggggtttttggagggtgtgcggaaggctggctgtgggacctctggccaagccagcccgcctgccccagccggatactgcctccagaatgtatttctgtaataaggctctctaatgaccccatgcattttttagctgcttccatgaagttaaatcacgttgtaatgagactgtcattgtttgggctgttttttccttggtgaactttcctggggagaagagctcctctcaggagcctggggagggccccggggcatcggctgggctgcggaagggaggcagggggctgttggggtgccaggcacgggagagcagccgtcctgcaggtgaacgctggcctgtgggcggtggaggcagtgagggaggtggcgcggggtatgggagacaggacccacaggaagggtcccctggtgaccagatgagggctggtgccaggctgggcactctggtccctggctcccagctgcccagtggagccaggtggcccagtgctgccgaactcagagcactgtggccacagagagagaggacgggggcaaagaaccgctcctgtgctgacctaagcccgtcctgcagccgctggg

SEQ ID NO: 15664 - DNA, 1445 bp, Artificial sequence
  DNA replication origin
ggccccagggtgttctcacccatgtcacaggctgggtgtggggtggtggcccccagggtgttctcacccatgtcacaggctggatgtggggtggtggcccccagggtttactcacccgtgtcccagcctgggtgttctcacccatgtcacaggctggccgtgggtggtggcccccagggtgttctcatctatgtcccaggctgggtgtggggtggtagcacccagggtgctcacacccacattccaagccaggcattggggtgccgggtgttcacgcccactttgtgtctccttcctcccccgggccgggcagtggatggaaactggaatgagtggtcgagctggagcgcctgctccgccagctgctcccagggccgacagcagcgcacgcgtgaatgcaacgggccttcctacgggggtgcggagtgccagggccactgggtggagacccgagactgcttcctgcagcagtgcccaggtcaggggtgcgccaggctggggtcggggggcacctaacaagcaggagcctctaggaaggggacaggccccacagcgggtgggggtaaccatgggccccggcatgtgactgaggagggagtggggtgcacagtggggtctggggtggctgtgggggaaacggagcatggggtggctgcagggtgagtgaggtgcactgtggggtgtggggtggccatgaggagagtggggcatggggtggccatggggagaggagtggggtgcacagtgggacttggggtgtccatggggaagtggagggtggggtggctgtggggtagcagggtgcacagtgggacttggggtgtttctgggggaagttgagtgtggccatggggtagcggggtgcacagtgggacttggggtgtctgtggagaagtggagtgtggggtgactgtggagtagtggggtgcacagtgggacttggggtgtccatggggaagtggagtgtggggtggccatggagtagtggggtgcacagtgggacttggggtatccatggggaagtggagtgtggggtggccatggattagtggagtgcacagtgggacttggggtgtctgtggagaagcagagtgtggggtggccgtggagtagcggggtgcacagtgggacttggggtgtctgtggggaagtggagtgtggggtggccgtggggtagtagggtgcacagtgaggtgtggagggtggtggggttggctgcatgtggggtgtttgctttattttgtatcaggctgatgactgatttctcctctcctggtctgaatttcccttctttgacctcctgccccacattcctgggtccctatgtttcactgccgcatggctctgtgtgggtccctgtctttgtgtcctcctgtcactgtggctcctggaccctgcccttcttgtcgcctgtgccctgtgtctggccacgccccgcagtggat

SEQ ID NO: 15665 - DNA, 1094 bp, Artificial sequence
  DNA replication origin
tgaggcccctcctacctgggctgggctctggggagggctgatggcgattgggcgggcttgggctcagctgtcacccacgtggtgtgttgggggctcccgtcctgtcctcataatgatgcctgctccaggcgccttgcaccttccagagccagctgccggctctcagtaccccttcctgaacccctgtcccgggccccttggcagagccccatgagatctgtgatgaggacaactttggtgctgtgatctggaaggagaccccagcgggagaggtggctgctgtccggtgtccccgcaacgccacaggtgagggctggagagcacgtggtgtatgggggctcccgtcctgtcctcacggtgatgcccacgctgaggtgctgtcagcactgggaggcggcccagacacggagcccagacagcctgcgtgtgctggcgcggggtggtggggccgcgagcccagggcaccgtgtgagaactctgtggcagctgctgttctgagcactcgctaggggctggcacccatgctcagccctaacgcaagatgtccacggagtctaagcaacccaagaagccgccaccatttacagctgggaaactgaggcacagggaagtgaatgcccttgcccggggcttgcggggacaggaagaggaggtctctgttgaatgccagcctcaaggagaaagcagggctccacggggaagggctcgctgcactaggggcaggcctcctttgctcctcctttttgaaggagtgcaggtgctttatgtccctgacaggcagcaggcagagaggatgggagcctgggttcaaactctggttctgcccttgtttgctgtgtgacattcagaaactgccttaacctccctgagcctcagtgttctcatctgtaggatgagggcagttggggttcctctgctcagagctgctgtggggaggtgtgggggacggtggcaggggccctgtgttgccagctgcggctgctgctcctccctcgctcttctgattacagaacagggcatgttctcggtagcagattgcaaatgctgagaagcaaaaagaagcacgtgaatgccgcacggtggcgtgcctcccc

SEQ ID NO: 15666 - DNA, 1339 bp, Artificial sequence
  DNA replication origin
tcaaaggcgggagagacagagaggagggaaagtcacagatgtggcggggcctcagctgcgggagttgaggtgcaggcctggcagtgcaggctgatgccgcggggtgcccatggctcagaggcaggagtgtgggggccatctgccccagccccagcccccagaacctcggtgaggtccaggagcagagacagcaaggagcaccaggcagaggctgggccggtcctggtcctgctgaattggagcctcggtgaggggcagggagcctgcccctcccaccctccatggcccagaaggtggtcaaaggcagattctggggtctgtcctgtggccatggagggatccgcaggcaccaggcacctcctcagcgccccccactccctcctgggacaggggagcccagctgccctccagctctgtgagctgatcccgcctcccctccctctgtagaagggggatgggggctgccctgcctcagggctcaggcatcaaagggcagtatgggccacggtgaaagaagggatccagtgttccctcccattctgggaaggaaggcattgggggtgcggaagggccctgagctcagggtggatgggcatggggatgaggcagcacgtttaggggcaaatggacgtggggacgaggcagcaggtttggggcaactggacgggaagagagtttggggaagtgccgctggggtggaagcaggtgctgacagggacccactgttctgggggaacctggccctggggccgtggcctcagccctcacaggccccagtggagcctcaagaatgcagcccaagatgcggcagggagaggaggagagggcatgcgcatcagtagcgccaaatgcagtgggcggcacggatgcccgagaacagggttttgcaccatggatgtcactggcagccccagtggagggcagagggaattcggactgggtcagcacccagtgagcggaggggcaggagggaccatcagagaaccgggggtgaggacaagaagaaatgtcaaagggcaggtggcctgcaggggcaaggggctgctgggaagctgcagcggggaatgggggcagacggacgctggagcagcaccctggagcaggcgaaggggtgggaggctggacacagggtcatcgaggggcggtggagggctggcatgggcaccagggtgggctgtggcaggtgtgcccgggtaaggggcaaactttgaaatatttcattggaacaagatgaaaagtggcagaattattgaagtagtagcaatcagtcgtgttgatgtttctagctgaggcatttcactatggaaaaatcagaactttgtctttttttgttctttaa

SEQ ID NO: 15667 - DNA, 939 bp, Artificial sequence
  DNA replication origin
gcaagttccacgccccatgtggggttccgcaaggagcagtcaggctgtggggtgccatctcggggccctggtgggtgtgccagagtggggccatcctcccagacagcaaggtgggggcagcgaagagaagctcgcccagtcacaggaagagtctgtgtaaaggcccaaagtgccagcgcccagggctgagctaggccaggacgtggggagatggatagagcgatggcggccgggtcccaacatgcggctccggcctgaggggtcctcagtgtgtggtcggggacctgggtgtgtgcaccctgccgcccgcctcctccgagcgtgttcctccggctccctcagccccagtccctcctggctgctctgacatcaccagcctcaggcctccctgcacccctttcccgggccgagtgtgtgcggtcagcatggccacctgggtgccggtggcacttgtgatggtcccttgcgtggtgggtagttcagtgacaagggaaggctctgtgagtggcaggcgttggaggacaaggctgcctgacagggagagggaggcaggtggctcaggaggagacagctggagcaagggcagggaggctgagggcatgaggagcagggagccggccaggaggagcaggcagaggcaggcaggggctcaggggaggccgcggcagggtgaggacagttagtgggggctgggtgtcatgactctccacctacccaccacccatccaccctctcctctgtctgcctgttctttaatctatacccactgccaccaccctccacccaccaaccatcaaccctctccttcgtccacctgttctttaatctatatccactgccaccaccttctacccaccacccatccaccgctcctccgtccgcctgttctttaatccatccgcccatcgcccactgctcaccacccttcctccggcggtc

SEQ ID NO: 15668 - DNA, 1121 bp, Artificial sequence
  DNA replication origin
caaaccaggtggtttaaaacaacagatatctattatctcccagttctggaggccagaatcttgaaatcaaagtgttagtagggccatgctccttccaaaggctctaggaaagattccttccttgcctcttccagcttctggtggctctaggaaatccttggtgttccttggcttgtggcggcgtcactccagtctctgctgctgtcttttcctggccttctgtcttgtgtatctctgtactttcctcttcttgtaaggaccccaataatggatctgtgcccccccgccaaacccagtgtggtatcagtcaagatccataactcaattacatctacaaaaaccatgtttccaaataaaatcatattcgtaggttctgggggttaggacttggacatatattggggagaagtggatgatggatggatggatgagtagatgggtgggtggatgagtgcatgagtgggtgggcgggtgggtggatggataggtgggtgggtggatgggtggatggatacgtgggtggctggatggatgtgtaaatggtagatagatggatgagtgaataggtgaatgggtggatggataggtgggtgtgtgaatgactggatgtgtggatagaggtatggatggatgggtgggtggctggctggatgtatagatggtagatgggtggacgggtgaataggtgtgtgggtgggtgggtggatgggtgcgtgaatgactgaatgtgtggatggaggtatgggtggatggatagatgggtggctggctggatgtagagatggtagatgggtggatgggtgaatagatgggtgggtagatgggtgtgtgggtggctggatgtgcagatggaggtatggatgggtgggtggctggctggatgtgtagatggatagatgggtgaataggtgggtggataggtgtgtgggtgactggatgtgtgaatggaggtatggacggctgggtgggtggctggatacatgagtggatgagtgaatgatgggtggagaaaaggatgggctggtgggtgacaggaagttgatggaggccagtagcacacattgggagttaggttctgtggtcctgaaaggacagctccctgggtgttttacacgtaagag

SEQ ID NO: 15669 - DNA, 1205 bp, Artificial sequence
  DNA replication origin
ggccggggctggagaaagtcacccacagcctccccgccagtgaggaacagggctggagctctgcccctcccaactgccaagctaccctgtgtgtgggtgccagtgaggggcctgcctggagtgggcattcgcagcccacgggctcccccacttggcacagctggggttggtgggggatggatagcactgcccaccaggaaaggggtgagcaaaggcctagcagcctgtggttggggcaggcctgggagccacagccaagctcccaagagagggagagagaggctggggccccggggaggcagtggcacagaggtctggcaggcagactagcgggtctgttatgcccacctgtcccctcctccactgccgaagcccctcccagctatgccacatgggggctgtcacaggccatgcatctggcagactttctatagaagaaaaagaatggaggcaggaggggtagtgtgggcaggggaggggtgggcaggcgggaggtgtgcggggagtggtaggcaggggaggtgcagcggccctgggcccttgctggtggctggtggtctccagttgcccaggaagctccctggactgggaggagggcacagactctcaatatagtggtccctcatctcctgtcccattgcacagttaaggaaactgaggcctgggcgcgcacagccagtgtggccagatctacgaattctgtgcttgagggaggggctgccctggctgccagccccaactataagacttgcacgcccccagccctcaggacacagaggcccaagcaggcacccggggcaactcacagctgcgtcctgggcagcctgagtgtgtgagccaatgaatgtggaagcccccagctccagagagggagtgaccctgttaacacggggcacactcagactccctgaacaaactcctcctgaggggtgctgtgtgcctggagccatggcagagatccaggccctgccctcgggggcttctgctctgctggggtagggtggatcgaacacacacggatccaaggattcactgcagatcggagccgctgccaggaagaaagagacaggggtaggggggcagggcagtgggcagagacagcctggagcacgtggagaagagggcactgggcagggacagatggggtcccagagttcccaagcaggccctgtgggggagtaagagggcctgggtaagggcagctg

SEQ ID NO: 15670 - DNA, 790 bp, Artificial sequence
  DNA replication origin
gcatgactgagaggagctcccaaggtggaggagggcatgggggggtggtggaggagcggtgtagggggcgggggaggagcggcgcggggggcaggggaggaaaggcgcggggggcgggggaggagcggcgcggggggcgggggaggagcggcgcgtggggaggtggaggagcggcgcgtggggaggtggaggagcggcgcgtggggaggtggaggagcggcgcgtggggaggtggaggagcggcgcggggggaagtggaggagcggtgtggggcgggggcgaaacacaaatgtccagcctgcctgccccgatcccaggcagcgccggacggcagccatgggactggcgtcttgcattgtgaggaacgtgagaagccctgggggccccagtcgcagacctgtccgtgctgagggaggctcagacatggcccaggagccagccctacaggcagggctccaggactagggccggctgagatggctgccagggccatctgggtgcaaaggaaccgggtgggcattgaggggtcgctccacttgggcccaacccataagcctgctgtgaccccattctgagtgccagcttctggtccaggtctgggcctgtctggctcttccaagctcctggcagaaggcccggcaccgagcaggcacccaggaagtggcggccctctccttgcacgcccccgctacccccagctattccatctctgctcaccttcagggccagagagctcaccctgtctgcttctaaaaggcggcatggggacgcaggcaaggggcccccggag

SEQ ID NO: 15671 - DNA, 3240 bp, Artificial sequence
  DNA replication origin
atggctgccgtccggcgctgcctgggatcggggcaggcaggctggacatttgtgtttcgcccccgccccacaccgctcctccacttccccccgcgccgctcctccacctccccacgcgccgctcctccacctccccacgcgccgctcctccacctccccacgcgccgctcctccacctccccacgcgccgctcctcccccgccccccgcgccgctcctcccccgccccccgcgcctttcctcccctgccccccgcgccgctcctcccccgccccctacaccgctcctccaccacccccccatgccctcctccaccttgggagctcctctcagtcatgcctcgtgggggcgagggcatgtggaggggcggctgcaggggtccaggccacggggatgggcctggaaggccgtgagcctcttccgctcagcacccgtgtccctgtccccaggagcacaatggctcatttaaggcagcagaaaaggcttcatcaaagccccaccttcccaggcccctcagtgttaccctgaggtcagagagggagggtggtgactgactgactgttctgaaggatgtgggaaggcaggatatgaggtagacaaagggaaggacttccacgtgagcaaggagggcagagtggccctgagtgtccattctctgaccttgcccttggtgcacaggtgcctggaagcagggggatggtggaacaatctggaggtcaccagagatgactgcagggagtggggtcagcctggagatccctggagggcaggggtgtcaggtgtgacaggcagtggtgatggcgtggatgccctgttgctggtgatggtggtggccgtccctcctgccagcctggttctgcttgcactgcgccttggacatggtgagcacgggataaacacttgttgtcgaatgctggtgactgttaccaggctagtgtcagttccagggacagtgacggagctggttctgatgaggcgatggcagtgttggagacgagaatgatgatgtgcttatagtggaggtgacgctggtgaccatgggtgaccggtggtcattgtgatgactgtgaagggacagtaaaggtgacggttgtggtgacagtggtggtaatgactgtgctgttaatggcagtggtggtggtggtggtgatgatggaggtgatggtagtgatgcagtcatcactgtggttttgatgatgacggtggtggtggtggtcgtggtcatagtgatggtggtggtagtgatggttgtgtggttttgatgatggaggtggggtggtggtggtgatgatggggtggtggtagtgatgtttgtgtggttttgacgatggaggtggggtggtggtggtgatgatggggtggtggtagtgatgtttgtgtggttttgacgatggaggtggggtggtggtggtgatggtgatgtggtggtggtggtgatggtggtggcggtgatggcgatggtggggtggtggtagtgatgactgtgtggttttgacgatggaggtggggtggtggtggtgatgatggggtggtggtagtgatgtttgtgtggttttgacgatggaggtggggtggtggtggtgatggtgagggtgatgtggtggtggtgatggtggtggcggtgatggcaatggtggggtggtggtagggatggctgtgtggttttgatgatggaggtggggtggtggtggtgatgatggggtggtggtattgatgtttgtgtggttttgacgatggaggtggggtggtggtggtgatggtgagggtgatgtggtggtgatggtggtggcggtgatggcgatggcggggtggtggtagtgatggctgtgtggttttgatgatggaggtagggtggtggtggtgatgatgggatggtgatagtgatggttgtgtggttttgatgacagtggtggtggtgatggtggtcggggtgggggtgatgatggggttgtggtagtaatggttgcgtgattttgatgacggaggtgaggtggtgggggtgattatggagtggtggtggtgatgatggggtggtggtagtaatggttgcgtggttttgatgatgacagtggaggtggtggtggtggtgatggtgatagtggtgatggtgatggtggtggtgctggtggtgatgatggggtggcggtaatgattgtgtggttttgattatgacagtggtgatggtgatggtggggtagtgatggtgatggtggtggtgatggggaggtggtagtaatggttgcgtggttttgatgatgacagtggtggtgatggtggtggtggtggtggtgatggtggtggtggtggtagtggtggtgatgatggggtggtgcagtcatcactgtggttttgatgatgacagtggtgatgatggggtggcgttagtgatggttgtgtggttttgaggatggaggcagaggtggtggtggtggtggtgataggatggtggttcagtcatcactgtggttttgatgatggggtggtggctgtagtgaagatggggacggtgacggtggtgatggtggtgatggtgatggtggtagtaagggtcgcattgttggtagtgtatggttttggtgctgatgatggggttggtagtggtggtggttgtgatatagtggcagaaagagtggtatttatgatgttgatggtgtcatggatggtggtgaaggtgtggtagcaatggttgtgttgttgatgatgacagagtgggtgttgctgctgttggtggtagtgacagtactgttgatggcatgatgctgatggtcgtgtcttgaggtgatgattgtggtgtgatgaaggcggatggtattgttggtagtggtggtgagacctggtggtaatgatggtgttgataacacatggagggggtggtggcgatggtgacagtggtggtcctggttgtattgtagatggtgttgatagtgattggcctcagtggtagctatgagggtggaggctgtggtgacaagtggtggtggtggtaggcccagctcttaggtgaatttgcagcccaagccccctgagggaagcgagaccccccatgacacagttaaggaaccagagcccagcagccatgcagatggcaggccaggtgggtgaggaaatggcgggagagccaagggagcgcttccgaggtcatggcggtctgggaggagatgaggctgggctggctgtaatggggggaaggtttgggatctgctagagccagggcagagctcgtgggggtgcccagtgccca

SEQ ID NO: 15672 - DNA, 1219 bp, Artificial sequence
  DNA replication origin
ttcacactagagtgtgaattagcccatcaaatccaaggggaccccgacagcgcacagtcccataatagcacctgcttcgtgggccggcaggaggcatcgtgaatgcagtgaaggctctggcttggtgggtgggtgggtgggtgggctcttagagcgccctccccgtcactgtccccttgtgtcccatgaatgagtaggccctgtgcgggcactgtgcctctgccatcccatggacaggtgcggggtgaggatctgggcacatttcacaggaggaagctgagctccgagggtgagaatagagctggctgctggaccccctgccgggctggacaagcatcgtctaggcgcttgccgggggtgcagggcaggggccccaagagcacaggagccacagtgggctctcccaaggcctcctacctgccccggactcagtggaggtgcctgtgggggctgcccgagcagggctgggcccaggtccttccccatagccagctggggaggccttctctgagctgccctcccctgggagatggggacaaggttgtggccctgcactggggctgagggcgacgtgaggtggggatccacactgggttgggagctgtctgggagctgcggccattgctgggtttggaggggtctgctgggagccgtggttactgacgggactgtggcagaggagagagttgggaggttgggtgagggaggttggggccagtccctgcgggccctgggagcactgtggcctttgctctgagtgaagagggaaccgctggagggctctaagctgagggccatgcggcctgacatatttcaaatgactggtgccctgggaagccaggcgaaggagggcaaggggcggcggccacagtagccaggggcacgggtggtggctgtggagggtgggcactgtggggctctccatgcattttcagataaaggctggtgggattagctggtgggcagctgcagggaggtgggggaggtgaagcggggacccaaggctccgggtgagcgatggcaggctggccgtgccctccccattcattcacgcgcaggcgtcctggctgtgcgccctaccttagtggcgcctgtgggcgcctgtgggactgtcatgcaccagaatgtgtccctggggccacatgtgtgagcagcgtgctgactgagcacctgggcgaccccgaggtggagtaaacagaaccagaacttgtcccttggg

SEQ ID NO: 15673 - DNA, 2096 bp, Artificial sequence
  DNA replication origin
tgggttgtgctgtgcctggcccttgagaagcagagctgtgactggaaacccagtatcagctgcacagggaaaagcggtctgcaggactcttcctggggtgccctctggcctgtactgtgctggccatcttggtgtctggtcaaaggctggcaggcatagaccacaaccgcacacccatccccaggcacggggatgggccctctcggtgggagatggaggctcagggaggcagcgattatccaacgtcacatagcaagacagcggtgggcctggattccagtttttatgtgtctggctgcatgccccctcccacccggggcctacagctgaaccttgacttgaactgcaggtctgcaagggactgtcagagataacctgagacccatcccaagccaggaaataaactcagccaatgcaggtttcctgggagttacctgagcctcccttgctgcacagccaccagccagggcttagcggctctgtgcctggggtgggtctcaggtccctgctccacctgttcctctccagcatggggacagtggcttctgccctggagggtgtaggggatggacacaggtggtgagtgggatgttccttgtgcacctgaatgagaccttggaaaaccctctggccaggatgtaggatctggggtgtcatttggagcaccaggactttccagggaccccacgctccctttcctgttctgtccatagccccaaagcctgcctgggtccaggattctattctgtggttatcaggatctgcactctgctcagggagagggtggaagggtctctctgccccaggtctatgacttttcggccatcctgtgttgcggacgcagaacagcctgggtccctggccgccatcgcagtggctgggtaagtgtggaggatggctgccctttggagcctgcgaaggtcacgtgggctgaggcccctggcacagacagaggcatcctctgagcctgaccgtgctgcagggcccttccaggctcccacgtgcctctgtggcttccttttacggaggatgctggagatgggtgagcctcatgcttctaaaccctggcccgtgaaacaggatcctggcctcacaccgcacttgagaggggagggggcttcccagggtcacagagcccagagccagccctgcagaacctcaggccggctcccgggcctcctctcagctctgccttgtctgtgatctccgccacagttttccttctctgtaaaacaggagcaggtccttcccctaggaggcggagaagatgcaagagataaaagcagatgctaagggcattctcacgggtctcccccgccagccagcggctcacagcatgtcccttctcccctgggcccgaatctcaggaagtgctgctgctgagggagattgagcaacatccccaattcaatagaggctgctctgggctatcagacatgggcactggtgacccatgcttgctctgagcccggccctgtgccgctcagcgctgtccagagtggagtgggtgcttccctctggacacccccacccccattttaaagatgaggagactgaagcaagaggtggtataggtaacttcccaaggtcacatagctaggataggacacagccgaggcacaaagtcaggtgtctgatcagaggcggcttttcgtgtggggtcagggctgcgtgtgggggtggctctccaggctcctctggggatagcaggctggagagagcgccagccacagggcaccggggcaggtcccttctgactcctagcctcagcccccgttggtacagtggggaccggatggaagaggtgagctgaagactctgcaaggcaccttgccgcactcgttcctgggtggggaatggggtaaaactgcagcatggaggctctagggcagaccataggaagaccctcgacttgggcttttctcctgaagtccgggggcaggggctgtgtcccggctacttagggaggaatgaggccttttcagccgtgggttcagaaggagaccagcagctggggctcctgcagctgcagagctgcacccacaagctcttggggctcatcttttcaggaggcctggagtccctcctccaccagg

SEQ ID NO: 15674 - DNA, 952 bp, Artificial sequence
  DNA replication origin
gggctgcgtgtgggggtggctctccaggctcctctggggatagcaggctggagagagcgccagccacagggcaccggggcaggtcccttctgactcctagcctcagcccccgttggtacagtggggaccggatggaagaggtgagctgaagactctgcaaggcaccttgccgcactcgttcctgggtggggaatggggtaaaactgcagcatggaggctctagggcagaccataggaagaccctcgacttgggcttttctcctgaagtccgggggcaggggctgtgtcccggctacttagggaggaatgaggccttttcagccgtgggttcagaaggagaccagcagctggggctcctgcagctgcagagctgcacccacaagctcttggggctcatcttttcaggaggcctggagtccctcctccaccaggcaggcccaggaccttgggtggggctggggactcagcctcagagagggcctcctgggcagtttctgcaagccaagccccagcaggcaggaaggcaggcccggctccagggccaggtctgtgaaggagggacacggtggcttccggacaggagggctgccttgaagggtgggggaattcggctccaaagcaggaggaggaggaagaggaggcggaggaggaagaggaggaggtggaggaggaagaacaggaggaggaggttgggggtggagaggaggaggaggggtttgcagagcaggtcagtccctggtgcaccaagtaacaagtcctgtgcttaaatgcgtgctcagatgaaaagcggggcagtcgcggcccgtagacagcgggcggctgggtcagaccgcagagggaagtttccagcggcaagcctccccgcggggaaggctgtgtctgtcccaggagatgagccgcaggcaccaggggtgatgaggcccgggggaggtggatgtgggggatggagcgg

SEQ ID NO: 15675 - DNA, 908 bp, Artificial sequence
  DNA replication origin
ggcggcggcgggcggacgggcgcgcggctgcgggcgcaggtgcggggcggcgggccggggccggggccggggcgcggagccgccgctcgggggccggggcgcccgcgtccccgccgccgctgacgctccgcctgtctccctcccgtgtcccgcccgcccccagaccctcctcctccgcccccccgcagctcgggccctggtcgtggcgcggctgccgcacggtgcccctcgacgccctccggacgcgctgcctctgtgaccggctctccaccttcgccatcttagcccagctcagcgccgacgcggtgagaccccggccgggccggcgggaggggcgccgggcaggggcgcgggcgggggctgccggcgggcctgcgggtggggagggcccgcacccgtcctgtcccggaggggtcgctgtggcccgcagccgccgtggcctggcccggccggcggggtccatgcgcctctggagagggtgggtgggcgccgagcgggtggcagtgtggagttggagacgggcctgggaggagtcgggacccccggaaagtggctgatgggtgggtcccatctcccctggccttggaggcccgggatctccgagggagcctgggcctggggagaggctgggtcctgagccgggggctgggaggcgtcgcctgtggaggggctaccctttcccttggtcctctccgcctgccagggagagggaggaggaggagctgccgccttggcagagcccttcgacccaccccaagtagagcctggtccgtggaggaggaggtggcggtggccccaggcaggggccctggcccagatccaccgccccccaggcctcagcacctcggggcttcctttttgttcctgtgattcctgtgggggctgccggtttctatggagacggcatc

SEQ ID NO: 15676 - DNA, 3008 bp, Artificial sequence
  DNA replication origin
ttggagacgggcctgggaggagtcgggacccccggaaagtggctgatgggtgggtcccatctcccctggccttggaggcccgggatctccgagggagcctgggcctggggagaggctgggtcctgagccgggggctgggaggcgtcgcctgtggaggggctaccctttcccttggtcctctccgcctgccagggagagggaggaggaggagctgccgccttggcagagcccttcgacccaccccaagtagagcctggtccgtggaggaggaggtggcggtggccccaggcaggggccctggcccagatccaccgccccccaggcctcagcacctcggggcttcctttttgttcctgtgattcctgtgggggctgccggtttctatggagacggcatctggggtcagccgctggcaggggccctgggtgctgggcgcagctccctggggcgggtgggctctcttgctttgggccggccaagctgcaccccctggcctgaggtgggccacagccctctactggggcccaggccgaggcccaggacagcccacagagcaggaaagggccttgggcgtgtgctcaccaagtaacctccgcccagacctcgtgtggaagcctgggaggcagcaggggtggaggatgcacttggaggggacctgtccttcctgggtgttggaggtggcattgctggcccttggggaaccccgggttcgatgtagaaggtagcgcctagcctctcggacactccagcctcctggctgtgttctctggaaaagtggggggcaggtgatgttggcagctggggtctcccacagtgccagagccggatgggaccctccaggccattgccagtaaaatcctctgttgacaggcagggagactgaggcccagagagagggccttgctcaaggtcttgggtgagtctgggctggacaggggtctgtgtccctgaccatagtgcacccctgcttgggctgtcccctcaggtgagactgttgatgctgctggttctgcagacagagcctggcaggcagcagtctgaagggccatctcggaggctccctggaagaggtggccttctgtgtaggaggacatagacattatggctttcactgggcagcctttctgggccccttcgaagctggaccaggcaaggcagggcccagcctccagtctccgggtgctgctcttcctgtgggtgttcgaggaggacctgggcaggagagaacctgctatggtgtgtgccccatctgccccttctcccagcccggtgtcaggcctgcagcaggtcagtgttggagtctggaaacacaggcttgtctctgacgaactgtgaccctggactggctctgccttaagtccctctgagcctcagtttcctcacctgtaaaagggaggggacctggactacccaggactggctgtgaggagggaaacagatgactcggagagagtcccaggaacggggcagtccccaggcggtggcataccagccagtcaccaggctgacctccagagtgggcctggcttagggaacttgttcagagaggggcaggtacatgggctgaagggggtgcccctgaaattccagcagcaggggccttgatgctgaggggcctttccaggaggagacccactatgtgccccagtgcacgagggggaggaagcggctgctctgtgggacagcagcggggggcgggggtggaggcagccagatacacagtcctgggccttctttggcaggcggttcgtggctgctgtcggggggcgcttctagtgttagcccagcccacgcacactggtgttcacagggcaggatgccagcaggcatgttgggtgccctgtcccccatcccagacaggacatttgaggccggggcacaggggctggcagtgtctgcagagccacgggaccgagggcgggctgcctggaccctgggagcctcagtgtcctcatctgtgagatgggagggcggttggctctgccgcaagggcagaccatgtgtggctcagtttgggctctgggcaccagcaggggtgtgagctgacagtcagagtgccaggaagaagccagggtggttacagcctctggcaggtgctccctggcaccagagccccttggggccttcctgtcctttccacaccacctcttcctcctcagcaagggctggcccccttgatgctgggcagggagaggccaagagtgaaagggagactgctctctgggtgcagcctgcccctggcaggttcctttgtccaccgtgccgatccctctgagggctgtgggctggggtgccagggctgatgcgggaggcagatgtgtgcacacagaggtctgcagccgcccaggtggaaaggaggaaggctgcgggtgggctctgggtgcatggccacagccttctcccctcctgagtgtggtgtggggagaagtgcacggggctgaggcttgaagtggggtcctgaggggtgtgcaggagtttaccagccgagcattgtggggtgagtagcagccattgcagagtgaggaaggcatgaagctgcggggaagtgggcacaggcgtgggctcagcaggcaggagaggcagagagactggtggcccgcaaggcctggggggctgcggggagcccgagcttactccaggggcgtgaggagccggctacagaatggactggtgggaggctgggaggtaagaggagagcagtcaggcctgggtacccaggggtcccagcaggagtgaggagcgtgagcccagctggcagttggggaggcggccagaagtgagcctggctgggcagggagagagaggggtgctgcctagcttagcctggctggggttggatggacacgttgggtgtggggactctggtctgagtgggcagaggctgtggcttcgggggttcagagtggcctacaggggctgctgaccaggacaggggcctgagatggtggtagaggcgggtacgtgggcaccccgggagccagggtgggatgagatccgggcagggtggt

SEQ ID NO: 15677 - DNA, 1104 bp, Artificial sequence
  DNA replication origin
aggcggccagaagtgagcctggctgggcagggagagagaggggtgctgcctagcttagcctggctggggttggatggacacgttgggtgtggggactctggtctgagtgggcagaggctgtggcttcgggggttcagagtggcctacaggggctgctgaccaggacaggggcctgagatggtggtagaggcgggtacgtgggcaccccgggagccagggtgggatgagatccgggcagggtggtagagcgaggggaggtgagacccacgagtcctcctctagagctggcctggagccagggtgtcggcgcagatgcgggctgcgcagatgccggctctgcggctgcagcaggcctacgacggccggaaggttgagtaaccgctctgagtcacacctgtgaggcggatgatgccacctgtctcagagtggtggggactgaactaggtgatatatttatggcacttgacatagtctggcgtgtagtaaacagtctgaaaaggacagttgttgttggcatgacttctgtgatgtgcctcagactgtattggaaggttgtgaccagggtcacagttcatttgcaaccaggtttggggctcagtgtatgaccagggttaggttcaggggtgtgatcatggtcagggttcagcacgtgaccagaatcagggcccagtgtgtgcccaagatcaagactcacagcctgactgggatcaaggctcagaatatacttgggtcagggtttagtgtgtggctggattcaggggacagggtgtgatgggaattggggctcggggtataatctgggtcaggggtcagagtatgatgggggttcagggcttagtctatgactagagacagaaattagttttgtgggcatttgggagccatagacggtgttggggcagtggcaggacgaaggtggtactgtgggtagaaatgagtccttagggggcaaagggtggatatagggttcaggagaagattgggagtgggagttcatgtggtggaaactggcagagactcggtcaccagccaggagaagccattggtgggagggggccggctggttcagacctagtatgcagggagggcctccgagaattggtg

SEQ ID NO: 15678 - DNA, 3138 bp, Artificial sequence
  DNA replication origin
cgtgcagggcagggggcctggcatgtgcaagggcctgggccgcgctgtgcctggcttgagccagtctccggcaggggcccggcctggctctgcctcccctcggcgtgagttgaggccggtcttggtctacccctcctagtgaggcctgcccaggccaccgcccatcccttcttcatcgcctggaacctgctgagcaacggccgtcgggagtgactgatgagccaggcggggaggagagggatcaggtggaccagtgggagagctggcgggtttgcggctgccaggcctaacgagggcaggcggaagcagatggccacagaggcctgggcctgagccagcctcagagcaggcgcgagacgcttactcggccgcctgtgacctttgtggccagccggcctcaggccagcccagtgtcttggaaacatttactggggtcaccctgtctcccacctgtccctgtccagctggtttcctagccctggacctcagctctgcgctggtaaagttaccggtgactgatgagccaggctgggagggatcggggggccggtgggagagctggcaggtgagttttgatgggagaagtaccggatgatgggacttcaattccagaggaccaccagtttgaggcctgagctccaggctgtggcatgcaggagtggtgctgagcagagtttcctgccgggcacggcatcactgttcccatcttgccctcccagagcgtagtttggacaacagaggtgagcagcgctacctggggtagttcgaggggcctgtgtggaggcagtggcttttgaaagcctggtgggttggcagtgcttctgcacacgaagagaaggcgactcttgttccagggaggcacagctggagccgtggcacctggtacacttgggcagcacagcttggccctggaggcgagtgccaggtgtggggggcgtcagtcgtgtgtgcgggccccaggtgtgcgtgtgtgggagccccaggtgcgtgcgtgtgtgggggccccaggtgcatgcgtgtgtgcgggccccaggtgtgtgtgtgcgtgtgcgggccccaggtgcgtgcgtctgtgcgggccccagttgcgtgtgtgtgggccccaggtgcatgcgtgtgtgcgggccccaggtgcatgcgtgtgtgcgggccccaggtgcgtgcgtgtgtgcgggccccaggtgcgtgcgtctgtgtgggccccagttgcgtgtgtgtgggccccaggtgtgcgtgtgtgcgggccccaggtgcgtgtgtctgtgcgggccccagatgtgtgtgtgtgcgcgcgcgtgtgtgcgggccccaggtgcgtgcgtgtgcgggtcccaggtgcgtgcatctgtgtgggccccaggtgcatgtgtgtgtgtgtgggccccaggggcatgcgtgtgtgtgcaggccacaggtgtgtgtgtgtgtgtgcatgtgtgcgggtcccaggtgtgtgtgtgtgtgtgtgtgggtcccaggtgcatgcctgtgtgcgggccccaggtgcgtgcatgtgtgcgggccccaggtgtgtgtctgtgtgtgggtcccaggtgcgtgtgtctgtgcatgtcaggcgtgtggcctgcaccaccccgaggacaagtcaggcatggcggttcagcctggcttatgactcaggtgatgggttgggaagttgctcggggtgaactcatccatgtagaagcgatgtcagcctgagtcccctccccagctttgcacgcccttcagccacctgacttccctgtctgtcttcaggcctggcatgctggggctgtgcagggccatggggtcgggaatggcagggtctgtggccggcccaggcccttttgaggagaggatgagctgagtgcagtggccagaggcacagtcatgcgaagaggggaagggtcttctgggggcaccgctggggaagagccctgaggggaaccagggggcctggggggctcgggacattcttgtcaggaaagggaggctggccaggggcagggccagggccagcccagtggcctttgcagagccgggtgggacatttggacaacgcccagggcaggagagtcagggaggagtggtggccctccctaggaaggggcagtcacctaaactaagtaccccgcaggtggtgaggaggaagggcccactttattcaggtcaccccggcacccggatgacaccccagctcccacactctcctgcctctgagcagggcagaggtgccctccagtgcgctgatcacctcccccatgccgctgtggcgggagaggagctcacagggggcagggctagaggtggggatgcctggggccagggctggcggctaggcctagaagctgcaggggactgaggggctgtggaggtgacacagagtcacctgccgaacagagagcgaggggtgggagggggagggctttggtgcaaggaagctggtcgggatgtgtccgggctgtggagggacaggtgggtgtggggtgtcagggcctggctggatggcatcttggatgggggtgggccggagtcaaagcggctgctgcccccggatttctcgaagcctgggcccaagaggactgtgcgtgtgggtgggcctggacctggcacctccctggccccgtctgcagtgtggggctggcgcctgcctggaattgacggggttccgagacatgatggcagcaaagacttatctggcatcgggcttggcatatgactgtggggcacaggcaaagggcccaacctcacagagcacagccccgaaagggagttctggagggcctgggctggtagaggaaacccctcgtctgcagggggcgggtggggaggtggaggaggggctgggccaaacgctgggggtgtgacccggggctgcgggctctcgggtctcagtcttcgggtctgccgagtgggcgagtggggtgcctcactccctgcggtctcttcccggtccccacagaacatggagaaggcgactctgccgtcggtgacgctcatcgtgggctgtggcgtgtcctctctcaccctgctcatgctggtcatcatctacgtgtccgtgtggaggtgggtgccgcccaggtgctgggcatgcatgtctgtggctcctgcatcacacgcctcttcccttgaaggtcacgggcggggtcgtgggtg

SEQ ID NO: 15679 - DNA, 1939 bp, Artificial sequence
  DNA replication origin
tcgggaggtcaatgtggctggtgggggagggtggccgagctttcccggagacagtgactgggttgtgggtagtggcaggggctctccactgtcctgcctgaggggacagcatccactgggctctagggggaccatggtgtttcctcttcccgggacctgccttcccctagggcctggattccacaaaacatctggggaatggggttcaggggctctgaactcagctctgatgtcctgagttctgaggaagttttctgccgacagttttcaaagcatctcccttggtgagctctcctggccatccctgtgccctatgagctgccggcagggactgttctgtggtccccatgaggaagtggggacccagagagagaacgtgacctgcccaaggtcatgcagcacatcagggtcatgtcagagcccctgaggctcagccctgtgccctctgctctccagctgggtggacctcagtcctcaagggctgctggtgatggtggtgatggtggtcctggtggtggtgtttgtggtgatgatggtggtaatggtgatggtgggggtggtgctgctgctggtgattgtggtgatagtgatggtggtggtggtggtgattgtggtggtgatggtagtgatggtggtggtgatggtggtggtggtgctggtgctggtgattatggtgatgatgatggtagtggtggtgatggtggtagtggtggttgtgatggtgttggtggtgctggtgctggtgattgtggtgatggtggtagtgatggtggtaatggtcgtggtgatggtagtgatggtgatggtggtagtggtggttgtgatggtgttggtgctggtgctggtgattgtgatggtggtagtgatggtaatggtcgtggtgatggtggtgctggtgattgtggtggtggttgtgttggtgttggtggtgctggtgattgtggtggtggtggtgatggtgatggcgtgatggtggtggtggtggtagtggttgtgatggtattggtgctggtgctagtgattatggtgatggtggtgatggtggtggtggtgatggtggtagtgattgtgatggtggtgatagtggtgctgatggtggtgatggctgtgttggttatggtgatagtggtaatgattgtatgatgatgatggtggtgatggtgatggtgtgatggtggtggtagtggtagtggttgtgatggtgttggtgctggtgctagtgattatggtgatggtggtggtggtgatggagtgatgatggtgatggtggtggtgatgatggtgatggtgatggtggtagtgattgtgatgatgatagtggtgctgatggtggtgatggctgtgttggtaatggtgatagtggtaatgattgtatgatgatggtggtgatggtggtggtggtgatggtagtgattgtgatgttggtaatggtgatagtggtaatgattgtatgatgatggtggtgatggtgatggtggtggtggtggtggtgatggttgtgtgataatggtgatggtgatgatggtgatgtagtggtggtggtgatggtggtagtgattgtgtgatgatggtgatgatggtgatggtgtggtggtggtgatggtggtactgattgtgatggtggtgatggttgtgttggtgatggtggtgatgattgtgtgatgatgatgatggtgtaatggtggtgatggtggcggtgatgatggtcatggtggtggtgctgttggtgacaatgcctgcaggaagtggggtggggctctggtcttggtgccacaggaccacagcccctgtgcagatggggttctgttgggtgctgaccttgggcccctgcactctccacaggtacattcgctcagagcgttctgtcatcctcatcaacttctgcctgtccatcatctcctccaatgccctcatcctcatcgggcagacccagacccgc

SEQ ID NO: 15680 - DNA, 1136 bp, Artificial sequence
  DNA replication origin
tctccagggctccctgcactggttgtggccatttctgtgggattcaccaaggccaaagggtacagcaccatgaactagtgagtcggggcattgggggtgtggtggatggccacatggccccccagagacttccaccgccctggagggtgagggctggccatgccctccccccgtgtgaccctgatcatctcacagaggctcagggagggtggggccccaggggctggaggctgagccccttgggcatcccctccctgttggccagccagcttctccctggcagcgagcagtgggcagcagtattgaaagaaaccgggccatcagggcctccccctctgtcagttggtccattagtcactctgagcctcagtttccccatctgttcggtggggagcccccctctgtacggtgctggtgagagggagggctgtttgagacatgagctctgggcacagtgggcacaccccccacagcaggcctgtggcaggcagggcaggggtcggaggcttatttcacagatgatgtcactgagaccctgaagggtcagctggaccaggtccttggggccttaaatggcaagccaggaagcttggggtcatcctagaggcagtatggttcaccgggtagggagaaagggtctggggctcaggatgggcagaagaactggggtggggaaggggaaccgaggcttgaagggagggcctggctgcagggaggggagcagtggggagcgcgaggcaggaggaagtgactgatgctggctgagtgggagggcggagcaggcctggctcactgtggagcccctggggacaggatgtggcacccccttggagcactgccctgtctaggtggcagtagggggtagacatagctgagggcccagggggtgagtgctgagagggaaatccaaacactgtccccagagatgagagaagcaaatacctggcctgccgaagtcaggggtggatcaggaggggatggggacattgaagtggggttctgaaggatgaagaggagtttgtttgacagatgacatgaggtaggctgctcagggtagagggaacggtccttattgggtttcaggtttccatgggcaccacaggtggtgtccagagatctggagaatgtggggctgc

SEQ ID NO: 15681 - DNA, 1146 bp, Artificial sequence
  DNA replication origin
acacccacatcacagccttggccagcctgatgggtggtggcctctttcctgggcagcctacttttctgatgtggccggagcagagaagagaggatggacaccagtgacggaccactgcctgcagcaggctctgcccagcctgccccacgtggccccaaggacaggaggggctgctggggctcgggtcccacagccgccagggtcagcctgccttcctgacacatcctggggaggggtgtacagggtgggactcctgtctctgtcccctttcccacaacctccatccccaggtgcctggggtaccgccaggtaccccacgcctctcctgcctcccgcctggaggaaggaataaagaaggtaggatcccacagccagggctgtggggaggggtctggggctgcccaaggatggcgccccactgcccctccaacccccagtaggctccccaactgcccctacagggctagctccccatcacccctcatgcacgtttctctgctaggcccagcctgtgcctgagtccccactaggatggggtgtggccctgcagagacaccgctcatggcagcaggaattactggaagtggatggcctctcctggggcgagaggggaggggatgtgagggtgggtgtgaaccctggtgctctgccagagtagagaggtgggggctggctgagtgggctcagagctggacccagtagaggccagtgaccccaggcgggtcccccaggctgccgcagctcatctgtgaccccaggacggtgaccctgcgtgccacctgccacagtcttgccttcctccacactaaggtgggaggagagcgggaaggaaagcccaaggacccacacagggaaggtcctcaccggggcccccgaaggggcaagcagccgcggtcaccagcctcacatctggcgctctggggccagacacccacaacccaggtccagcctgcagctccccgctgctcgcatcatccgtccatccccagcttcctcccatgccactcactcaccacacccgcggggatctcctggcaggtacacagctggcacccaataatcaggcaagccgagactcacaggtgtgaagggtcactaccctggcccagcccctgcactgcatgccaagggcaggtcagagtgggg

SEQ ID NO: 15682 - DNA, 1270 bp, Artificial sequence
  DNA replication origin
cacccctggtgctgctggcacggagcccaggatggctgatgcctgggcaggggtctgcacccatgacacccccgcagttctgtggtggggcgaggagactggccctggcctgcctgatgggaagcctccctccctgtgagtgcacatgagcacacatgtgagagcatggctaggtgtgtgcatgtgtgtgagtgtgcatgcatgccactgggggtgtgtgggtatgcatgtcaccaggtatgtgtgtatgagtgtgcatatgtgagtgtacatgagtgtgcattcgtgtgagagcatgaccaggtgtgtgcagatgtgtttgtgtgtgtgtgtgtgcccatgtgagagtacttgcttttgtttcaggcttttaatttcgcttgtagccaaccgcccccatacccccttgggtgtgctctcaagtgtactgagtgtggagttctctgccgccagtgccacctctgatgccacaagtgtgcaagtgtatgtgtacatgtgtaagagtgtgccttgatgtgtgcaagcatgcatctatgtgtgtgagtgcaacccactgtgcatgtgtgagcgtgcatgtatgtgtgtgagtgcaacccagtgtgcatacgtgtgagcatgcatctgtatatgcgtgtgtgagtgtgcatctgtgtgtacctgtgagcgtgcatcggtgtacctgtgagcgtgcatctatgtgtgtgagtgcaacccagtgtgcatatgtgtgagtgtgcatctatgtgtgtggacgtgtgaggatgcatctgtgtacctgtgagtgtgcatctgtgtgagtgcaacccggtgtgtgtatgtgtgagtgtgcatctgtgtgggtgcaacctggtgtgtatacatgtgaacgtgcatctgtgtggatgtgtgagcatgcatctgtgtgtgtacctgtgagcgtgcatctgtgtgagtgcaacccagtgtgcatacgtgcaaacgtgcatctgtgtgtgtgagcgcaacctgctgtgcgtatgtgtgagcgtgcatctctgtgtgtgagtgcaacctggtgtatatacatgtgagtgtgcatctgtgtgtgagtgcaacttgatattttgcgttagtgtgtgtgtataagtgtgagtgtgtatataattgggcatgtgcctgtgtgtgcgtgtgtgtgtatgagcgtgtgagcattgtgtatgtgggaatgtgtttataggtgagtgtgtgaatgcgtgtgtgtgtgtgtacgcatgtgtgcctgagagcaggaggcagccagggccaagggaac

SEQ ID NO: 15683 - DNA, 853 bp, Artificial sequence
  DNA replication origin
gaggggtcctgctctgtgtcagtgagtgtttccttggctctgtgaatattgatggagggcctcctcatcacaggccctgtgccaagtgcagggacacagcagtgagtgacagccagggccctgtccgctgctgcagcctggagggagcagcacggtcatgggcaagggaggcctctccggacgcctgagttcccaggcgtggggtgcacagggagcaggggcaggctctccagggccaggggaagggccaaggaggttggtggcctctagtacactccaaagttgtacagggaagaaggagtcccatgaggctattagagcccatcctatgtccaagagcaggaggggcgggtgcgtggccagggccacggtaccctgagacccgggaggcactggccatgcaggaccaggccctctgtcctggtgttgctctgggctctgggcctgcacgtgtcctagccatgggtatgtggtcatgcctgaggctggggccagacagatccctgccggacagcatcactgaagaaaagcagaccaaggcctggggtagagggccggatggaggagaggaggaagagagtccaggaggcaggcatggctggctgtgcctgctgagaggtcctgagagatgacgacacagatatcccttgggggctgggccctgcacaggtgttctgcactaggggtgggagcagcattggtggccaagccacactagagagggctgaggagcagagcgtgtggttttggaggcccttgtcctggcagactccaggtcattccagcatctctcctgccagccctggtgtgccagctcctgcctggcattctgaccgcacacctgggcccccta

SEQ ID NO: 15684 - DNA, 1300 bp, Artificial sequence
  DNA replication origin
tagagagggctgaggagcagagcgtgtggttttggaggcccttgtcctggcagactccaggtcattccagcatctctcctgccagccctggtgtgccagctcctgcctggcattctgaccgcacacctgggccccctactccctattcagtcctcctgccccagctccccctgtgtaggaggaggggaggagggaagctggcgccagcacccattccgggtggtgatgacagtcctgcgggctgtggggcctcctgcgggcaggcacagggccacctcccgagcactcaccgcagccggggtcctgctggcctctgtctgtgttccacagccccgggaagcaggttggtgtccccactgtgagcaggagagcacaggctcagaggccacgcgcggaacccagtgggtggatgtggggaggggcccaggccttcactgctcccagcgaggctgggctgcaggggcgagggctgctgtgaggctcctggaggacctcctgggagggggtggcactgagcggcagaggcagcaggaagggtctacaggcaggtggccgctggggctcaggaggcatgggcggagctggcccacgaagaggaggaggcgcctgtcagtctgtctgttgccgtctgtctctgtctctcctctgctcctcccctgctggccttggccgtctgtctgtcctcatctcattccctctaagcttctctctctccaggtctctgagttctgggctccaccctcccctccccaccatggccatcttgctctgcccttcagggcctggacccctcgcctggggcctgtgggctctctgagggtcctggaccaggggatcctccttggcgcaccccacaccagacagcccatccctctccagcctgtctcccttcccctgtcacctcctagactgtcaggaacctggatcttcccaaagagcccttcccccttgcccagcttctcaggacctccctcctgagtccttgggtccactcagagaccttgggcttggggagggggtgctgggacctcagtgttgacggtgggctcctccccagcctggggcaagggcttgagaggggaggggcagagtgtgggacaggattgggggagtcctggggaggagagagggtgcagacgcagcctgggcagtggtggacccctagggagactcaccccagagaggaagggctgcttggcccaggcccccagagacagagacggggacttagggctgggtccccaccgaggcctggagatgcagggttcagggcagggtgtccctgggggcaggggcgggg

SEQ ID NO: 15685 - DNA, 1335 bp, Artificial sequence
  DNA replication origin
ggggttgggttggatggagacaacaaaatcttccccctgggatcagaggtcaggccaggagaaacgctgggggagggggaagctgtgtcccaaaatgacaagctagccactggtggatacctgctccctggctgatggagacactgaggcatggagccatgaggggcctgcctggacgtcacccaagagccgaagtggccgtctctcactgaaggacctcaccctcacccggggctggacatgccatctgctgaggccctgcctgtgagcttcacaaccactgtgaggtggctgggcaccccgggacccagggagcacctcccgcgcaccagccgtgcagagttcaccaggggcgtggcctgagcccagaaaggtggcaccatggggcaagagtcaaggagggctccctggaggaggggacccacgggagtgcgcagggtggccaacacctggggtggaagcttgtgtgaaggacacaggggcaggagcaagaccagcacagctgcgggttctgcacaggaccaggccagggcgtggatgctgtcctgaggcctagagggtggagaagggggcctggctccaccctgtgtgctagcctctgggtgcagaagcaggaggtctagtgacgggtgtgggtgggagcagacttggtgactaggagcccactacggtcctggctgagccccaggggcacaaggctgcaggaggaagatgctgaggtcgaggtgtggaagagttgaggctccacagggggctgttgggggcccttacgtaggaaccgccacttgggccgccctcccaggacctgtgcgtgtcgtgggaacgctgtgctgtaaagaggacaggcgcaggcacaggcaggggcggggggtgcagaacacaccgctgaggacaccaggatgggcagggggagggcagagagcccagagagggtgaaggcaggatggccaggggccacaagggagagtcaccctgcaggggctgaggactgggcagcacccagggagcgccagggaggcagcaggtgggaatatgcggggtagggggaggggatgggcaggctaggctggacccctaggtggcagctgagcaggactttcctgggtggggatggagggcactgagggtgggcctgggaggtgtaaggatggggaccttgagttgagggctgggatgctcagagggtggtgtccagccagacgggcactgctgccagcgggggtgagtgtggggtggatgccagcctccgctgagacctccaaactcatcagctcaggccttcccagctggaaaccccggaccaggggttccacttggcgagcctcagtttcccca

SEQ ID NO: 15686 - DNA, 1177 bp, Artificial sequence
  DNA replication origin
tacccaagagtgacccgtcatcctccccgtcagacccacatgccccacccagacagccacagcactctcgggacgcacgtccccaaggccgccccaccccgcacagaccctggggctcccgacctcccacacacctcacactttgctccccacaaggcagaacgagcgcctggcacgtgaggggtctatgtgcctccctcgcatgtacccaccttggggcacaataaaagccaagctccccccaggcccaggcccctcgctggcaccccgcccaccctcccgctctgaggaagctcccaggcgctcagcaccagctgctcatggcgcatccaccagctgcatgtggatccaccaggcgctgtagccagcgcatgaatgagagggaatcaggggctcagagaggcccacatacacccaagccacctgaggccccaagtcctagggtcacccctctgagaggctgtgggactggttcacaggagaccccaagggggcagaaggtgctttttgtccagctcccattcagcccagccccgaagtcacttcctccaggaagccctcctggggcccaactggcaccagcacacactccccacctggggctgtcccagctcctctgccagggctgtctctagagaaggtgctcttcaaatatctaaatgaccagagggagcatggtccattggcctctccacagctcagaaagccactgcctgtcactgcctcaggacctggttcacagaacagtggtggggacagaaacagaccctcgcagtctgatgcttggggatgggcggcggagcttcctttattgggcagtcgttcgttttttgcacttggttccaggaagctcagcaccggccgggggctccatggtgggtccttctccccgccttcctcttgctccccgttgtccccctagcctgaaagccccactcacttctgcccctgctgggactggcaatgaggaaatgaaggtggcacagaacacaggtgctagagggcggtgggcaggaggcagggggggggagcggcactagggtgaggctgtgctcctcgctggggccacgacagaggaagagatgtcaggtgggcaggggacgcagccaggcgctccacaggcacctgctcagcaggagtgccagggcagtgttctggaagcttctgatcatgcccc

SEQ ID NO: 15687 - DNA, 1324 bp, Artificial sequence
  DNA replication origin
cccaccactgttctgtgaaccaggtcctgaggcagtgacaggcagtggctttctgagctgtggagaggccaatggaccatgctccctctggtcatttagatatttgaagagcaccttctctagagacagccctggcagaggagctgggacagccccaggtggggagtgtgtgctggtgccagttgggccccaggagggcttcctggaggaagtgacttcggggctgggctgaatgggagctggacaaaaagcaccttctgcccccttggggtctcctgtgaaccagtcccacagcctctcagaggggtgaccctaggacttggggcctcaggtggcttgggtgtatgtgggcctctctgagcccctgattccctctcattcatgcgctggctacagcgcctggtggatccacatgcagctggtggatgcgccatgagcagctggtgctgagcgcctgggagcttcctcagagcgggagggtgggcggggtgccagcgaggggcctgggcctggggggagcttggcttttattgtgccccaaggtgggtacatgcgagggaggcacatagacccctcacgtgccaggcgctcgttctgccttgtggggagcaaagtgtgaggtgtgtgggaggtcgggagccccagggtctgtgcggggtggggcggccttggggacgtgcgtcccgagagtgctgtggctgtctgggtggggcatgtgggtctgacggggaggatgacgggtcactcttgggtagggacgagggaaggggcggggctgaaaatgggcacagggtgttgctgtccagagggtggaggagaggaccaggccgggagcatggcctgctgagctctgagggggacggggaagcctgtgttcgggagagagagtgacccctggctaggcagcttggggggcattggtgaccctggggcccgtgtgcctggcaaggtggctgaagggagcagctggtgaacacaggcacccagggctggcttggcgtggtgggtaaccatctgccagcctgcatggggcaggacacagggggcaggccaggcttcccaggaagggccctggggtctggatctttggagactggggcttggagaaaggaggggtgtggagggtgggcacccctctgtcaggggcaggcggctgggtcagagtcagcttggggttctccgccagccagtaggggctagattcattggcaggaagtcgggggcaaactggagccccactcagaggtcaaggcggctgggccccttgcaactgaccagagacagaatcagaggtgtctgggtatggagacctctctccagggac

SEQ ID NO: 15688 - DNA, 1306 bp, Artificial sequence
  DNA replication origin
ccagactgtgggtccctgagcccctttgaaacggggtgagaccaccctgccaagcctagggtggggaccacacgtcagacatacacagcacacccagcagggccaggggtggggggtgtagctaggaggcagagccagcccgccccgctgacggcgtgggggtcccacccagcaggggtgacccagctgctgcagccctgccctcgctggctggggtgtggcccacccctgcccccctcacctccagggagctcacagacaaggtggcgacattctcgttcttggtgctgggccccgtgctgggtcccggatgggcggcaggctccccgggatcccccaggctggggggtgccggctccagattgggcggtgggggcaggggctgctggggaggtggtggcggtgggggcggaggcggtgggggctgggcagggggtgcctcggggggcccgccgctggggggctggcgggagggcgggctgcgggcggggaggctggcctcgggggccgtgctgaggtggatgaggcgggtctgcggcatctggtcaatgtggatgctgtacttgggctcctccttgggcttgggccgcagcgtggccgtggccgtgggcaggatcacgtagctcgtgtccagagccttctcctgggcccggctcagctccgagtccagcttcttgaagatgtccccgtcaccgacgaaggaggacttgggcgccttgtccctcttgagggtcagtgagtggttggggaagtcgggcaggggcccgccgggatagcggggtgagccgtgcaggtgcagcttggacacgttggccggcaggctgttgaaattggtgggcggccccttggcatgggccagcttcagcttctcctcctcgggcagagacggccgcttcagtgtgcccgtgatggtggcagtgcggcaggccgcgatgtccttgttcagcactgcaggggccgcgggggagacagcggggacaggtgtgggggtgaggatggcgtaggacagtccccagcaggagaggggcccagtctgccctgcgaggccgccacctcctgggagaccctggccaggtcctgctgggtaccgatcggagggccaactgcaggtaccaccctacccaagcctggcgctacggcccctagggttcctgtgtcctcagatgaggctgccacacagggtggccctctccactggccccaagaagacaaatggctgtcacccacacactgccctccccagcgctgagaagagcaggcgagggcggccttgactcccggaagcacagggacacaggcagaacgg

SEQ ID NO: 15689 - DNA, 1561 bp, Artificial sequence
  DNA replication origin
gctggctgcttcccgagggatgggggtgtttaaaaaacggtgccaggccggccgggccaagcaggcagctcctccgcagcaggagctcaggcgggtaccctgggacgctggccgcgctgggcctgtccacggtccacagccgtccgcccatctgcccgctgggcctcggcccgaggagggcggagtctgaggcaccttcggcctctggtgccctgtgcccgctggccgggccgcctcctgtcctgcatctggctctggtcccagcactgcgggccctgtgcctggccgccgtctgagcgccctgaggccggggtgcgggcctggcccgctgcccgcgagcgtgtctgtgcccgtctgcggcaggagcgggcggagcagcatccctcctccgtggcccagtgcgtggccgccgcccacccgctcagacctcggtctggaggtcgatgatgtcctggcccaccagcgggatcgtggcgcccgacctctcccactccacgctgcgaagctccagcggcgacggctgcagcggctccagctccttcttcacccacgtgggcgtcccgtgggctttccggaggctctcccagggcctcttgttgggcgtctgctgcttttccggctgctgggtggcccgtggtgcaggaggggtggggcccggagggagagccatgagcccgaggagtaggggggaggaggcagacacgaatcagtgaggaagggacgggaggtgggggacaggggacaggggacaggatgaggctttcaggacaagagcccagaacagagctgggcagcggcaggcacagatcctctccccagccttggcagaggttgcgaaccccacggtcgggtcaggctgtggggaccctgccctggattggctccaccccaatccagacccctggccccaggagcaggctcgtgaccgctcagctcccagtatggccatggcctccagagtctggcatggcagggtcaggccagccctcagggatgggcgaatgaatgaatgaatgaacgaatggatggatggatggatggatggatgaagtgcacaaatccagggaagaagggagacggtggcctgacctaagggctctccccaccccgcccctccctgccctccagaccttgctgtccggccccagcacctccttgtccttctccgctgcgtgctgcagcttccggttcaggtcctggaacatgtcttggtgccgcttccgggtgtgcatgatcttctgcaggcggggtctgggcagtgagtcctgggccaggaggagggcatggcccatcctgcctgccccgcccgtcccctggctgccggggagctgcctggccgtgtgggagcccagagcacatctggccctaagtgtctggtggggggggacaccagaactcacctcaaagtccagttctgcataccgcgacttccgccgctgcagggagaaggggtttgcgaacattcgccaagggtccctgacaagtccacgcctctccctgcctcagactgagggcatcagggactcactcgccccatgcctgccttcagggaccaggccag

SEQ ID NO: 15690 - DNA, 1017 bp, Artificial sequence
  DNA replication origin
gggctactgcagacacaccaccccgttcccggtcatctgctcaacgtccacccactcaatgcagtcagtcatggccacacgtgaccatctgtgatcacccatggtcactgtggtcactgcaccctccaagcaccttccccgtcccgccctgtctgctggtgaggactctggggtcaggagtgacagggcacagttgaggttgtaggggtgagggggtgctaggctgtagccgcctctgcagcttggcgcgcattgctctccaggcccaggctctgtgcagcattttctcccggtcctggggccctgcagggtgcagcacacagtcggaggggggcccctccttccccgctattgtccctgccagccttgtggcttcccccaactaggctcccttcgggggttcaggctgccccctgctggagacacagagggaagcaggacgtgcatctcaaagctcctggggtgggaggagggtgtggaaggagggtcctccttctgggctggtgggggatggcctaggggtgttcacataggctccccatgcctccccggacaaacggggccgaggcctggagacaggaagtgccccagcaatgaagaggggacccagaactgtgcctgccccagggcagaggcaggagcagaggagggcagagccccaggtgggcgggaaggaggtgggagcgctgagagggaggcttcctccctgccttggagtccctgcccccacacgcatttccactgtgtcagactgttttaaagaattggtgtgttcatgctgtccctcctgaaaatgactcaaggaacaaggggagtgaaatgtgtccccaccaaggggcctaagagctgtgtgaagctcacgtactaagggtcgggggtagccaagggcaccagcacttggggttccctgaatgttcccagagccccagggagaggggacgccttgggagccacgtgaccactggcctgggagtccaaggcccagacgtccaggcccagggcaaagcaggagctgca

SEQ ID NO: 15691 - DNA, 1289 bp, Artificial sequence
  DNA replication origin
aacaggcgcctcttcccaaacttctgctgctttccctctgcttcatccagctgctcggagtgatgggcccttgacactgagcaaggcagggaccacgattctgtctgtaggtgaggacacgcagactccgggtggctggtgtcccacaggcattgagagcgaggctgtacccacaacccagctcccccaccttgaattccctgaccctccccacaatgggttgctttcctgtggacaccagtgtcatgtccatctgccactgcctccacccgaagctacttctttcctgtggagtccagggctgaacagtttgccagaaagatcttcaggggccttgtgtttactctattgtcttggcttccttgtataagtgccactctcctcagcaacttgtcactggtgaagctgagaccacctcctctgacaccctccatctgtcaccatcagcggcacctgccctagggagaactgcagggctgagaatggtggaggcactgtgattggcaggagcactgtgggggccaaaggtggtggtgacagtttcgtggacagatctggggctgcagatattggtggttgtgatgatggtgatgataatgatggtgacagtagtgctgatggtgataatggtggtgatggttgcgacggtgatagtggtaatgatggtgatgatggtgatgatggtggtgataatgatgatgatggtggtgatggtgatggtgctggagagtgattttgggtgctggtgatgcccaagacagcagccaccacaatatctgttgtaatgatggtgcttataggcttggagattattatcttgccagcttactctgttcctcactcataaactgggagcgtctggaggatggatgggtggatagatggaaggatggatgggtggaaggatggatgggtggatagatggaaggatggatgggtggaagggtggatgggtggatagatggatagatggatggatgaatggatggatgaatgggggatggatggatagtgatgaatggatggatagatggacatgtggatggatgaatgggtagatgaatggatgggtggatgagtgggtggatggatgggggatggatggatggtggatggatgaatggtggatggatggatggtggatggatgggggatggatgggggatggatgggtagatggaagaaaggatacataaggacaatgactacagtctctgagtcacctggaggtggagcagacaggagtggcagccacccaggcgctgtgcgtctcgtcagcacccacactc

SEQ ID NO: 15692 - DNA, 1015 bp, Artificial sequence
  DNA replication origin
agagcagggctgtggtggaagcccactggcccctcccacttatgcactcccaggtctgggcctccagggaggtgctcggccctccccaggacaatgcctcagagccaagaagcttgtggggctctagcagggctggggagacggcgccggtcagaagaggctgcctggtccctcctgatcctgctcacctcccaggcggtgagcagctggaggggtgcgggcagtgcctgggtgagataccagctgctctgtcacctcagggcacttcagaaccccctgccaggggccctccaggccctgcactccagacacaggcccaggcctctccaggccctgcactccccctccaggccctgccctccccctccaggccctgcactcccgctccaggccgaggcctctccaggccctgcacccccacgcagatgcctcccctgcttccagtctcaggacagatcacagggagctgggggtcagggcagcagggctgaaaagggaactcctggctaatggaaggttttggaataaattctggagtaggacgcacactatgcaattgctcctctggagttgagccctctgggaagcagggcctggggaggtgggtgggcccagcgggagggtcaggccttcatgccgaatgagaccaagagaggttagaggatggccccactaaatggtcatgatgcagcccagacagtggtggtggtcggtggtgggggtggtcagtcaggatggagaaggggaagagggagaaccgaagagcagagtctgctgaggggaacaggggccctcacgttgcagcctaaggcatgcaggttcgactcacggaaggacttcctgacagcaagctctattactgctggattggggccagggaagtggggtgagagaggtggttgtgaagggccttgccagaaagagcctctggcctgcctagagacaaagccacttggtgcagggggtgggggaaccttcttaggcttccttccccttctggcattgtttgtgtcgg

SEQ ID NO: 15693 - DNA, 1207 bp, Artificial sequence
  DNA replication origin
ccctgggaatcagaagagccctgtggccggcagccagggagccgccccattaggggaagcttggggaagtttcctgcacagagcagctgggcaggggtcccacgtgtagggccaggtctccccgcaggtggtcttgctccaggtccagctgatggggctgctggacagcttcctgaagactgagcccgaggacctcacaggcctgatggagatcctgggtgacattcttcaccgcctgggcacccagggcctcggtgccatcagcgtcatgatggcccagcacctgctgcccttggtcgaggacgtgagcaggcctgccatgggcaggggtggtgggtgggccccaggggacctcaggccctctgacccctggctgtcccggctgagggggacccctgccagcagggtgcttaaatggcctcacccaagcccacccctggaagaagccagagctgcccacgggctggtggagctgccgggcgaggaccatgggagggaagggggtttctgcccgcggggctcatgcactcccactgtagaggaacgctgggggccaagggataggtcctccagctgggagggcgagtgggctggggtttagaaagacccctgggtcgaccaggtgagaatggatggggactttgaatcacttaggggaggtgaggagtgcagggtggagggctgacccagggcagggcagctgcatgagggtgtcgtgagcccacagccgccagggactgactggaccctggggagttggagggccgggagcggccccaggtggggtctgagagccgggagtggccccaggtagggtcccaggtgggagatagttgctgccttccggagctggatcccgtgtggggcagggagctgctgcctttcgcagaggtgtctgggggctgtcggatacagactgaggaggatgtaaccaaatgggaaagtgagggatgcagccatatgttcagaaggaagagaaggctgaggtcaccaggatacttgttgggggaggctgacccctatccagacctcagaagctgcagttaaaaagttacctggaggccgaggtccactgcattctctgagcagatgggcaagggcaggaaggtgaggctgaggcctagcgggggagcagaaagtcccccttgttctgttgatatccatggatttgtcaagcacctgctgtgagtggggccctcattgtggg

SEQ ID NO: 15694 - DNA, 1175 bp, Artificial sequence
  DNA replication origin
ccctgcccagtgcaagctgcggcccccagggagggctgggagtgtcttcactgtctcttgaggaccagcccaaagcacccccgggtccccagtccgcagggcattgcgattgctgtgggatggacgtccacctcgcatctggaggaggtgtgggccctgctggaggttggccctcccgtcctcagacagccaggtagagaggccctgagcatgaggctgatgccaaacagggcgacgtggcagggagggcgcaggccttggcccctgggcctggggaacgtcacctgtgtctctgagcctcggtctgctcattgatgacacaagggatttctggccccgctgtcctccctgaagggctggtgtgggggacccaggctggatcatggcgaaagcatctctgtacttgccttggccacagaggcgagtcttgggaccccaaagttcggtctggagctgcacttgggctgaggaccagggccatggggcctgccctggccccaggtggtgtgtgtggctgggcctcagtgtcctcagctgcgcacctgagccgggaggacatgtggagcaacttcattgtcttggccgtccctaccctggggcctcgctgggagagaacaagagacactggaaggaggaggtgctgcccgggcatgcacggggttccccgagggcccacaaatagaggggcttcctggaggaggggactggcacgagtcccgggaacatggtccgacgcagggtgtggacacggctggcatttgtcctgaccctgtgcgcagggcttgaagctttctccaccgtggaaggggtgggagctgtgttggtgtcaggggcgagccgagagcagagtcccccgaaggcccagctcccactgcccgtcccccacagccaggccttgatctgcacaggagatgggtcagcagcaccaccctgctgtgctatggacagatggccctgcatgccaaggagaagatcctgccctgggtggacaacgttgcctccaggatggtgtactacttctcatccagcccccacgtgagtcccccgcacagcagggaccgaaaggcagagaaaggcagcggaggccgggggccgcacactcagggagcagcttaggagacaggccccttgcagtcacctcacccaatccagcactgactcccgaggcagcgctt

SEQ ID NO: 15695 - DNA, 914 bp, Artificial sequence
  DNA replication origin
gctgagtctctgggccactgtgtggctgggcagcaaggaacgggggtcttggagggtctcgggtagagggccctctggggtggagccccttggctcatcagcctggggctagggggccagggtgggcaccaggcctcctccatctgggctcaggggccacctggaagcttgcatgaaacgcaggttctggcccagatcagacatgctgaaccccagggtgcattttaacaagatccccagatgaccccctaatgtctccaagctgggtctaagggtggcagtccagggaggggctcagggtcgaggagaggaaggtgccaggccctgcagacctccaagggagagggcagattgggggggtggtagagaggccctcagaggcaggtgcagcccggctggcttctcagacgtgcggccgtccgcccagcccgggaggctctggcctggctctgctgtcccaaggctgcctgagctgcagctgagctcccagtactgggaaggaggcaggactacgtaccaatgcagcactgcccctgctgtgcggactgagaccctgagctgggtgggaggctgggtggacaggcatgggacccaggggatccccaggggcctctgaggagtcccagcaagtggggctcaaaggctaggcccagtgtggcagcctcctcctccctccttcccaggtcccacagagagccctcccatgctgcagtgaccagcggtgtttagggccctggtacaggtgggggcgacctaccgtggcgaggagaccgggtgaggactggggtgactgggggtccctcggagtcgagctctggccccggcaggcgtgagtgacacgtccctctgttccctgcacaggacctgtctccccaggactcgggactcctcatggtggcagcgcccggcaatgg

SEQ ID NO: 15696 - DNA, 1311 bp, Artificial sequence
  DNA replication origin
cccctcggcttcttctccggctggccctccctaacccaaagggagtatttgctggtttgtcctttccttgccttaaaaaaaaaaacatcagttttggctttaaataagtattttcttctctgagaagggtaaatccatgctcattgcagactcgttggacaattttgaaaaggattcagaaaaaaaaaaaatcacccggaatcccggcacccagagataattcaattttcaatgagaatcatgagactttttcgttccacttggatcctgagccgtcccagtcattaaatagtcttcagaaacgtgcccattcttgctctatttttgaacatgtgtggctattttaaacctggaaagaagccttaagtagtgaattttttaggcatttctaatttttcctatagattcactccctggaggtgggattcacagccaaaccctacatgccatggtcagagggcctgagggtgcctggccacccttgggagtcctccctgggcaggtgtgacgtgtcctgcgcttgcgcctgggagctggctgcaatccttcctaacctttaaaccttacatgtagctaacagacctttcttcgcaggtgcttcttcggttagcctgtgtgtcaggagggcagggcagaagcgagcatgtttaaccatgaggggggagggctgcatgatcccaggcaagaggacgggaagtttgtgccgaggttccatggcgtgggggtggtgggggcgggtgtcctaggtgccttcttttaaagaactgaaaagatggccttatggcctggcagtggtgggagtgggctgggctggccacagggcaaggggagtcggcagtagacggggctgtagggtctgggggaccttccctcgacagcagtggggcagggtaggtgctggggctgagtctctgggccactgtgtggctgggcagcaaggaacgggggtcttggagggtctcgggtagagggccctctggggtggagccccttggctcatcagcctggggctagggggccagggtgggcaccaggcctcctccatctgggctcaggggccacctggaagcttgcatgaaacgcaggttctggcccagatcagacatgctgaaccccagggtgcattttaacaagatccccagatgaccccctaatgtctccaagctgggtctaagggtggcagtccagggaggggctcagggtcgaggagaggaaggtgccaggccctgcagacctccaagggagagggcagattgggggggtggtagagaggccctcagaggcaggtgcagcccggctggcttctcagac

SEQ ID NO: 15697 - DNA, 1483 bp, Artificial sequence
  DNA replication origin
aggacaccaggccctctcctctctcagcctggggcaaacttgctgagttttctgggaggaagctccagagcgtggctgtcccaaccgaggggaatttaaactaggctgggcccagccatgggatggagctggaggtgccaagaggctggcccctgagctcacagtcatcctgggtctccccgcttgtcccagaagctttgctagggagactgatcagccccggccgtgagtgactgccccgtctgcccgtccacccgcaaacagcagaagctttgctagggagactgatcagccccagccgtgggtgaccgccccgtctgcccgtccgtgagtgaccgccccgtctgcccgtccgtgggtgaccgccccgtctgcccgtccgtgggtgaccgccccgtctgcccatccaccccaaaacagaaattgcttgctaggctcctagacgtcatccgaccaaggagaagggaccaggcggcaggcaggggagcgcctcgaccgcgttactctcccttgatggcagcagaaagggaggcattctcagggtgcgtgtgtaccactgagcccccagaggcctcttctgcacagcggctgctgcggaggtgttgggaagggattcccgaggtgaggtttggttctcagctgcaggggacagacttccaggtgccctgagggatcttagaactggaccaggctacccagcagcccccacaggtgagcccagcaactgccaccgtgcagggttgggggtgataccttcccacaggtatccaccccagacccagcgagccactgtctgcagagtcagcaagattgcttcccgagaaagcctgtccagcagccaagggcttacaagggaccagttctcaacagtctggaggttgaggggaacttcacccaaaggattctggcctcaactgactctgcaggcagctgagggaattcctgagcacacgtggccctgaggctgagaaggaggaagctctggaaacaggaagccgcagtaccctgacccaggcaggggccctgagacagtggagcccacagttggcctgaggaagggtcccctaggaggggccactgaccagggctctggggaggggcttcccttcctagaaaccctcaccagcccctaaccatccccaggaagaggctggagggctccaagaacaccacggatggggtggtcgccttagctcatgctatgggtttgggctcactgtcatttgggatcgtgcgtgtcctccctcgagtccatgagtcagccccactgcctgagattgcggtccaggattgacctgaagaatggaaccagtccagaggcgggggatgcggctgccctcgggctcatgactgacggcccaggcatcttcagaggggctttcctgggattacaagcccccagcagagacagctagggcgtggctaaacccactgccatgtcaggaaacttagcagtaaagccttctcccactccccacaatgg

SEQ ID NO: 15698 - DNA, 1358 bp, Artificial sequence
  DNA replication origin
tgtgaggctgggggacagaagggagtggagacgcggctccaggctccaggtggctgtggaggggtgtgtagagggtgtggtccccagggtttctccccccatgccaacagctgcccctggagagataggcccagggctctgaagagaactgggggcctgggacctgggccactgggctgaggccttggtctgggaccccgtctccagccgtggaaagtggttttggcacagagctggaggggtggtggccaggcctagagacaaggctcctgtgtgtggctcgctgggcggccaggggggatgaccacaggtggcctccttcagcaacttgggccccaagcaccctccctgctggacagcctggctttggggactgtagggagacccaggagcaggcctgctgccccctgctccctgacaggacccctgggctcactccttccccagacctccggagggaatttggggtgagggtgggatgaggcagaagtgggggagggacagagaccctgacccaggcccccgggctccctagggaaacatgagtttcctagtccccacaaaccctgcagacagcaggggaccctctagaagagaggctggaattggcccagggggacccagggacagaggtgacagggccaggcttaggcgggcagccattggtctaaccagggtttacagggccattcttagagaagcagagctcagcggcacacagcttctcagggacctgggtgcagccggccaggcacagggaccaaggggtctgccagaggtggggcagagcatgggtgagagtcaggttctctccgggaaatacttcgagaggggcagggaggagtagctgggggtgccatgggcgtggagtgggggtggcgtcattgacaggagccacggccaaggcctaggggaggttttgtggagaaacgggagctgggagcagcaaagtcaggactctggggcggtgggcgggaggagctgctgccctggggaccccgaggccttacggggtgagcacctcaggaaaagcaggctgggggtcgggggcaagctccgctttggccgggctgaggtcaaggcacctgtgagtgagttggagtgaggggaggagcggcagggccctggagtagagtccaggggaggtcccaagcccagggataagctctgtcatggggtgagagacagggcagagacagactggaggctgggaggccaggagaagggctggagtcagggacaggggtctatacccaccctccccccgccaccccactggtgtctgagaaaggactcccacagggtccccagaacttggtctgagttcctcagtgtgcactggtcactactagcatgga

SEQ ID NO: 15699 - DNA, 935 bp, Artificial sequence
  DNA replication origin
aaactccaggtccttcccttgcatttctcaggtttctgcaaggggcacgtgggggcacgtcctaaaaacccactgcgcctcccgtccctgcccacccaggccgcggctgctcctgtgtctatctctgactccctggaagttctcctccaaccccaccccacacaccacctgctgtctccctcccacctcctttcttcctggttctgggtccccaaatgccccggagctgcgtgggataggagcctcgctggggggaggcgggggctgggtggtgaggatcggggaagctgagctctcaggactgggggcccctcctgcacccgtctccacagcagcaccttcccgagcccgaggtggccaagccttgcgtgtgactgtgaaccagtgcctgccgcaggccccgccctcaacctcgtcctccatcgcgtgctgtggggcctggggagatgactgaatggctaggtgcctcagtttccccacctgtaaaccagtgtcggctgcacgtggttgtgatgaagactgagtgtcgatatgaaaagcacttggacaagtccggtcacaggaaaatgcggtgctgcgggaggggccacacttggaggagctggagtgctggggtgaggcagggagggaacgggctggaggtggtcatggggccctgcccttagatgagctaactggggaaatggcttctgagagggggacgtccgtgtggaaatgggaagaagctggccgggtgcaggttgcggggcaggcatgaggggaggcaattcaggcagcaaaagcagcagggtcaaaggtcagaggacgtgggcccgtagcctcggaggaaccggaggagcagagcagaggccagagggccagagtgggtggcagggaggctggcaagggaggttgtggccattgtcccaggaccaggggagccatcgtgagctctg

SEQ ID NO: 15700 - DNA, 1170 bp, Artificial sequence
  DNA replication origin
aggctagccaggacctaccaaccaaaagccccaccgggaaggaccccactggggctcaggagctggatgccaggtcacccggcaggccccaagctcaccagccctctgaactcaggcatcttggtcaggtggggactgtagcagtggagacgactgagtgaggtgtcctgtggggcacctgtgtggctacacacagcaggtgctgggcaggccttagcagctctcactagggcaggactactcctggggtcagccaaggaggagcagcgtgtagaaggcctccaggaccccttccagctctggacaacctccctaaggggcagaaaggagccacagaaagggaaggaaggggatggaatgcccccgggggaggaaagcctggcgggaagagcggtaagttcaggagtctgggaagagaggcagaaggttccacccagccctgcccttggggctgctgagcctggacaaccctgccacgtgagtggcctcctcacctgcagagcgggatggagtggggggctgcagagcgggagggagttggggggctgcagagtgggatggagttggggggctgtggagcgggagggagtggggggctgtggagcgggagggagtggggggctgcagaacgggagggagttgggggctatagagcgggagggagtcgggaggctgtggagtgggagggagtggggactgcagggtgggagggagtggggggctgtggagtgggagggagtggggactgcagggtgggagggagtgggggtctgcggagcgggaaggagttgggggctactcaggccctcctctccgaacctgtctccacccctgctgtcttcttcagggcgcctcagaccccttctgctgagccagcaccccccaccctcgcccacaggcaggaaaagatgggactcctgtgttcccgctgcagcagagctgactggggtctgggtgctggctcagccaatgtctgtccaatgatggttgctgtgtgtggggtgcacccgacaggctaggccgtggggtttccagaacaagggatgacacaggaccaaaaggaggaaactgggctcaagagctccacctctttgacgtcttccccagctcagggcagcagttccctggggttgcttctttgcccagagcccgggctcataccccactatc

SEQ ID NO: 15701 - DNA, 926 bp, Artificial sequence
  DNA replication origin
gcgacgggcggtgtgggggctgaggagggaggagtgctgcagcctcggaagcccagccagagactctcctcgccacccacacggctcactgggactccgggcatggagctcccgggtaggggtggacaggaggccggtggcaggcgggggctgctgtcagtgcgaggatgcactgctccaggctgccgctgtggcttagtgccaactccactcggcccctgcccccatcctctctcccctttgcttacctgcaggtggctttggtgacttgacaatggcccaagtgctgccattgcagagatggggaaactgaggtaagaggaggcgaagccgagggccctgcagggacctgcatccagcatctgtggggagccagtccccggtgtcaccgtgtgaatctgaccacgtcatgggcagtagctccgaccaccccgtttcactgtggggaggcggaggcctggcatggggaggctgtgtggccagctccctcccgcagaggtcaaaggggaggtcaaaggggaggcagcggggacacagcccaggccatcgtgatggaggcaacccagccaaagataacaggagctgaggcccacagcagtgacagcagagggtggtagtgacagggctgtgccctgagtggggacgctggatgcagggcagggatgggtgtctgacagctctccctcctctggaccctgtgattccaactgcaagaccgcaaggacccttcccaagcacccccctctcccggccaacaaacctgcgcccctgcccaggcctgaaacccgtagatcaaggttgctgcaaggacctcagcccagttcccatagcaacgcctggatggtgggggaggggagaagaatggaaatggagagacaccaaataaaaaacaacaacctcacaaaatgagcagtcagggaaagagc

SEQ ID NO: 15702 - DNA, 1024 bp, Artificial sequence
  DNA replication origin
ggctcagacagcacgcctttctcgtctcacggttctgtgggtcaggagcccagccctggggctcactaggctgaaatcgaggtgtccacagcctgcgtttccctgggaggtttgaggggagcgtcttcttgcagctgcggcaggtccagcggcggtcgcctggcagcacctgccctgcttcacgtccacaccctctctgacgcacctccctctccacgaatcctgcagtcaccctgggccacacagatgatccaggacaacctccacatgtcaaggtccgctgaggagtagctcgagttccccgtgcctgggagcctaatgtgaggatgctgacattttggaggggcatactgcctaccacagggcagataagggagcttcgccaggtggagggcgaagggctctgccacagaggagacaggcacagcaggagaccgagtctgtcctggggtggctgggggtgggtgtgggcatgtcggggtggggcctcagcctcctcctgtgtctgcagtctcggggagaccgaggatacacgcccagctgtgaagcaagtgacgtgtccagggctgacttccttggggctcacctggatgggagcaagcatcagtggggcttcctggaggaagcagctcaggctctacctgcagagggtggaggattgggctgtagggggagacactggtcagaggaagctgtgctgagaaaagccgctggggagcctgtcagggtcccttcttggggcctcaggtgctggaggaagagtgattccaggctgccacggtggagggaggggccgttggtgatggaccttgaaggccaagccaaggggagccaaaggaggcctggaagaaggggggtccccaggtaccggacggctccccaggcagacttgagcggggaagcaggggagtccctgggtaccagacagcatcccaggcagacttcaggggggcatatggtttggcggccccagaatcctgagcaggtcccggcctctgctctgccagctgccgctgctgggcaa

SEQ ID NO: 15703 - DNA, 1202 bp, Artificial sequence
  DNA replication origin
cttttcccttttagtaaaaagttactccctgtaattgtggaacaggccatcagaactcttcagttaactggaggtgcagctgtgtcactctgttcccaaggaaagaggccggaggctggaggggtgggtggtcgggggcagaggggcccagaccctgtgcagctgtctctcagcctgaagaacaggtcccagaacagggtgttccctgccatcggcccctctccacccctcactgctcctgcccatctagttatcacagaccactcagtctcaccccttcactgtagcgtggagaaactgaggcacagagacggtccttgcttgcctcagtttggggaaaagaattgagtctgggggtaggaacacccaggaagcccctagaggttcttcccgcagacccagtttggtgggaggcctctgagccagggagcccgggtcagatccccataggggcaagcgcctttccataaaatcccgccggtctcacggagctggtgtatgggggagagggcagacacctgggcccctctgttgccttcaaggctcaaccgagtttaagtctctcagtcccagcagggtcactgttgagggctggtggtgccactgggggttgcagggaaagtgatgggcttgggagagtgtatgagtcactataaagcaaggttgatataacagaggccctgcaaatgtggggggcagtctcctgtcagggaagcatgcagctggcggctgggtgcacctgttcattccagaccttctggatttcttgacactccaggctgctacccagaaggggcaagagacggccaggggcatgccacgattgtaaagctgagcccaggaacaccacggccccatgttgcctctgcccctgcccagtgccaaaagcctggacgcatatgggaaggaggaaggaaggatctaggtaggcagccagtgaacagaagccgcaatgcgtttgggaaggagggaggaaggatctagatgggcaaccagtggacagaagccacactggaaattgtttagggtggtgtgtgtgcagagtgtgacctcggccaaagatggcctggcctctcccctgggctcctgggaggtcaccactaggccctgaacgtccgacctggtgagaatgtcctagtccacctgcggcctcaggccacacctatggtcctatgtgacttcagtggaggctttgggctatg

SEQ ID NO: 15704 - DNA, 1212 bp, Artificial sequence
  DNA replication origin
gtcagagtggtctgcagggctggtcccccagtggacaaggcagaacgatgaaccctgagccagcacctgcttaggctgcagacgctagtggcccaccagcaccagggttctggtgtcggggcagggcagaatgcctggaagcgccccaggagccatggcttctgggatgtccttcctgcagctgagctcagggctgctgggcaggggtaggagctgtggccccagccttggggctcatgaaagcctctggcagagaggatggcctggcagcgggcggggtttccctgctgggagggaggcagggcccgactcctgctgcagtggctctggggacgggcagctggcggccagcggggcgggcttagtggcaggccctggtcctcgcgctggcgctcagggctaagctggggctcctgccctctgctgcagccgactcctctctgtagcccccctctgggctgtcctgggacttcgcctcccacgcaggcagcctgcaaggtgaggggtgggtggtgcccagcacagcagcaaagactttgtgggaaccttgagacctgaaagaacaggagagtgggcagtgaaggaccacgcaggacagtagccagggctccatggggaggggctggggccggtggatggcgctggtcttccaaggcagaggccccccgaccccgtcagagcctcccagcgagcccgaacactggggagtggcctgggccgcagggtgtctggggtctggggaggagctcatttggccgggacagctgatggtggggtctgggtggaagggtggtgctccgttacctgttgtcactctcctggctctgatggtgccagctgctgcctcagccggatttgaggactcagcccctctgggaccctccgcctgccatgggtgagtcatgagctgagctctgattcttctccaggcgggcgtgaatcactggagctgggggagagaaagcgcgggtccatgtgagagctggctcagcaaactgcccctgcctcccacccggcccactctccccaatgcccccttccatgatgccagccccaccccatccctttggctaacttgctgggggcccaagcctcagtgggctctcctagaaaacagcctccggatcccgccagctctcagatgccccacagccggtactgccttggggcaggggctcacctgaggggccaggaagcaccgggacatcaggt

SEQ ID NO: 15705 - DNA, 1406 bp, Artificial sequence
  DNA replication origin
aggactcagcccctctgggaccctccgcctgccatgggtgagtcatgagctgagctctgattcttctccaggcgggcgtgaatcactggagctgggggagagaaagcgcgggtccatgtgagagctggctcagcaaactgcccctgcctcccacccggcccactctccccaatgcccccttccatgatgccagccccaccccatccctttggctaacttgctgggggcccaagcctcagtgggctctcctagaaaacagcctccggatcccgccagctctcagatgccccacagccggtactgccttggggcaggggctcacctgaggggccaggaagcaccgggacatcaggtctgctctgctgcgtgtgcgacttctactctcccctgggaggagggggccgcgctgcccgaggctggccagctgccctgggaggcagggagggcgtcagctggctctgcggatgccgggagagggcggcggcgccggaagtcgaggctccctcagcattggctctgccctagcttctgctctgggtgtcccatgagcttggtggccgctggcccctgccatccggacacttggttttctggatgtccagagggcctgggtgttgtagcagaatgaggaagctggggtgttctgtgatggcctgagagtgtggagggtggggtccaggccggaaagacagacggagggagggtgatgggtggagccctgcaggggggagggctctttgccgctgggtgcggtgctcacatctggatgacacgagtgtgtgcgagtccgcccggagctcgagggggcacccagctggaccagggcttcccctgcaggagtcagccccagctcaaaagtcctggtgggcaaagccacaggctggatgtagtgggcaggctgggggctccgggatgccctctactcgggctgggtccggtcactggccacggactcgctgttgggggcgggcgtgagggtctccgcctcatcctccaccgggaggtgggggccggccggctcggccgcctgctccaggtcatcctgcacctccatgcccctctggatgagctgctccagggtcttgggcagggggtggcgcaggaaacgcttgagcttgggctgcagggtgcccaccacgtactggatgatctcctcctcgtccgcgtccacgtagagcgtctggtacaggtcccgcttgcgccacaggaactggtccagcggctcgccctgcttctgcggcaggtccagctcgcgctggatggcctctcgggacagcgtgccctcgctgtactgcaggaactccttcttgaactccacccagttcttcacggagccctgcttgaactcccaccacttcttggccggcccgttcatgtgattctggatctgggacagccagtactcc

SEQ ID NO: 15706 - DNA, 1112 bp, Artificial sequence
  DNA replication origin
cggggcggacagagggtggtccggcgctggggtccggcggcctgggtcccgtgcggagctgcggggagcgcctgtctgtcgctgcgggccggcggcggggccggcggagcacgcccggggaggcaggtccggctcggctgctgcggagggaggacgccgcgcccgagctctgcgctgagtcctggccgccggctctttatgcagccagcgaggcccgtgggcggccggctcgccgagcccggtttctcattggcccagccgcaggctccccgccagcgccccgcccgcgcccctgcaggccccgccctgcgcccactcggctcccgggcggcaagggacgggaggtcccaccccctgcacacatggcggggccaggatgactaatccctccgctccgtacctcccaccccggacggcggggctcattcagcctgcggggaccgagggactgagccgggcactgggcgcccctcccacgccccctcccgggcgctgggcgggctgtcatctgctgcctcccagggtcccaaggtggccttcctcctctccactcgcctctctctttgcggggctggagggggctggcgctggccactgctctcctgggtcctcactgcccctgaccccgcccacccagctctgcaggatgtgcagctgagcccgggaaggaccctcaccatcagcctctgtgcccaggggctcagcaagtctccatgtgagctcccagatgtggctttgagctcccactcactcctgcccgggtcctgagtccaggtcttgggctctgtgtgagggacgcacagccaggcagaggctcgctctgcctggccctggcgttggtgtgcatgggtgacaggggcccacgtggcagtgactggacagggctgccccatgcccccatacgcaggtctctggtgaggcccaatacttttctgtgtttccagggaaatctggcagctgctacctggggggctggggtttggaggacatggaggggacatttagcccccagtgaagggaattgggccctgaagaccctggctatatcaagaacctggccagaggctccaagacttctaaggggatggaagaggggaggagagagggagaca

SEQ ID NO: 15707 - DNA, 957 bp, Artificial sequence
  DNA replication origin
gccacacgggcttgtaaaccctggcggggctggcccctggtcattgaagtgctggctctcacaatggacacacatgcacggtcagtgcccagcacccagacaacacctacaggctcaggctggccccaacccggacatgtggccctcggtgaccgctggctgcactcacccaaggctgctggcgtctgcccgtcccgcatgtgcccacccagctcctctccctgggattccgcagtggagaagcgggaaggtccctgtgctggagacttctctgcctggctccccctcccagctccgcggtgcccctccgccctcccttctctgtccgcccacttacctttaattagaaatgccaggagagccatttttggggagtttttttgccagaaagacattcccccccaggggcggaaggaaggaggagacagactggctctgaggctgggagagggctccccgggagagccggttgggggggggctcagagggttggcagggaggggggattccagcaagtgggcacctgtgtgcccttgagtgcctgaataagacaggggatgctggggggagctgagggctgtgagtggggggtatgagtgtgtatgtgggagctatgagtggggggtatgagtgtgtatgtgggagctatgagtggggggtatgagtgtgtgtgggggctgtgagtgagggcatgagtgtgtggggtggggttagagtgggggctatgagtgtgtatgtgggggtgtgagtgtgcagcatgtgtgtgtctgagagagggaaagggcagctggcagcaggaacaagatgtcttgattgtcagcgatgatgtcctcatggccctctggctgtggggaatggtgtgtgtcacccctgcctgggtaacatcagaggacctgagacccatgcctatccagccagcactggagtaactcaggaagggcgtccctacccccgcca

SEQ ID NO: 15708 - DNA, 1083 bp, Artificial sequence
  DNA replication origin
agacctgcgcagcagcagaccaggttggctttgagagtggggatcccccaggtgctcccaatctccttgtgcaggtctagcccccacccccttcccctgttccttcccccacctgcatccccaagccatgctgctccagtggctgtcagggacgggcacggggtgggggtgggctggagagaggagcagggcaggcccctgtcaggagaggcccccgccccaggtggatgggagtcagcctggcctcctttcccgaggctgcagtgcgggggtttggtgagggcttctggggcgataattgggcagcgattaagcgttcctggcagctgcggctgttgcctgtcaccggtcagctcaggcctgcattcacagcctctgcagaccctgctggagggggttggggaggggaagacggggctccgcgtggcacccccgacgctgcctgccctcgtgccatccagggcaggcactgtgctctcccaccggtctcggcttggccacttctggcttgctgtttagcaggtgacaggggtggtgatgggccacggggcattgagcagaggacgccaggattcctcaccaagggcctggctcctgcccagccctgccttgctcaccgggccaccttgggcactcacccttctccaggcctggctccctccacacaggtgagggaactgaggcagcggcaccacctatgaccttggctcacgtgtccccagtcctgcctccttgtcagcttgctgatgccttgggtgggggtggcagctggaggccactgctggccagaggcctaagagctgtgccctggcggggacgtcagaggccacacgggcttgtaaaccctggcggggctggcccctggtcattgaagtgctggctctcacaatggacacacatgcacggtcagtgcccagcacccagacaacacctacaggctcaggctggccccaacccggacatgtggccctcggtgaccgctggctgcactcacccaaggctgctggcgtctgcccgtcccgcatgtgcccacccagctcctctccctgggattccgcagtggagaagcgggaaggtccctgt

SEQ ID NO: 15709 - DNA, 988 bp, Artificial sequence
  DNA replication origin
ccagaccaggtggcacgaggccagggatgaggctcctggagccccggagctcccggccacccctcgaggccttggcattgccacccactttacggatggaaagctgaggctcaggtgagcaactgtccaatgtttcctgactagaaaggaatggaacaggaaccattccagccctcagacccctcgccagtgtctgctctggaccaggccctgcttacactcaggtgttcacctatgggcaccacctgtagggtggtgcagggactcagccaggccaggcagctgggacagccttgccctgtgcctgcgaggaagaggcaacaggaaaagaggatacctggggtgggagtccagcctgggagcccagcgaggtcagaggtcagcagctcctgcagcctgtggagccctgggctggacagcaagggacacccggtgggagcaggtggctgagaggctggcctccaggtctggccatgcagcctgggcaagcaatgggcaccctgagggcatagggcagcctggttcttctcttccagccccaccgggcagtagatggtgacagatgaggccacaaggctggggagtggtcacatgtggggggcgggtgcccgaaccaacccctgggactgcctcattccttctctgctgccggctcctcactccacgcagcccacacagaagggcagcaggagccccggaatgtgtgcaaagggtggggtgggcaggtgtgtgtggccagcagtgggcaggtgaggaagggcctttatgaagacagtgatgtggggggccaaggcagagttgggggccctctgggttgtttccaaagaggacagagcctggaggcaggggagatgggggaggtgtgtgcctctgcgtgtgcccatgtgtttgcgcatgtgtgtgagtgggggtgggtgtgagctctggcctgaaggggcctgtggttgcctctccctgctgagcagcgctaactgccggcacccgagat

SEQ ID NO: 15710 - DNA, 1883 bp, Artificial sequence
  DNA replication origin
ctggtagccccagaaagagaaacttctctctttagtgacagcttgtttgaagaaatgggctagaagcaagtctcctccaaggccaagcttgaaaagccttcagtgtggcggggtcttccacacccagctctgggtgcaggagctgctcaccagctggggtttcatctgatctttgaaacgaagtggaatcttccagaggcttggtgacagagcatcatcattctgattgctggctcaactaagccatcccatgagccatgcactctgggagaccctccacatggctgggtgaggagatggggctgcagggactcacagcctaatccattgcctctggaaagctaggcagccaatatgattttcagggattccctattacaggaaacaaggtctgaattgggatatcctgtcctttctgtgccttaggaaagtggattgaaaaacttgcccacagacacttagccaataatgactatgaccggaatctgaacccaataccttacactcaaagccttaccctcatcagtaaaatccattgtcagccagaaagcaacctggagttggggtgctcacataatgaaggtggtggtagtgagggggaagtggcaagcactgtggtgtggtgatggtgactgagatgttgatgatgggaataacaatgagtagtggtaacagtgggaggtcatggttatgaagcgctgacagtggaaggtcacagttatgaaggtggtgacagtgggaggtcatggttatgggggtggtgacagtgggaggtcatggttatgaaggtggtgacagtgggaggtcatggttatggtgtggtgataatgggaggtcacagttataggggtggtgactgtgggaggtcatggttatggggtgttgacagtgggaggtcatggttatggggtggtgacagtgggaggtcatggttatgaaggtggtgacagtgggaggtcatggttttgaaggtggtgacagtgggaggtcatggttatggggtggtgacagtgggaggtcatggttatgaaggtggtgacagtgggaggtcatggttttgaaggtggtgacagtgggaggtcatggttatggggaggtgacagtgggaggtcatggctatggctgtggggtggtgactgtgggaggtcacgtttgtggtgtggtgacagtgggaggtcacgattatgggttgatggcagtggacacagtgatgatggaaatctttggtggtgctggctatgacagttgcattgattaatagttgaagtggtggttttgctggtggtggtaggactgcctggggtagtgggggagaaaatgaggttggtagaggtggagatgatgataggaagtttaccagtaagatggtgggtgtggtggggatgtaacggagttcctggatggaaatgttggtgaagaatgaacgtggggtgctgctcgtggtttggtgtagtgtggagagtgtggttatgatgctgtggtggaaggggctgcggtggggtggtggtgatgggaggccatggtgatgatggtagatgggtggtgatggtgctgatggcaattaagatgataatggtggcggtggtggtgatcacaatggtggtgatagtgcgaggaggccatgctgttgatggcagttgagggggtgatggtggtggtagtggtgatagttgtggtggtgggagagttggtggttttgatggtggtgatggaggtgatgactgacagtggggttggaggaagtggttgtgacaataattatggcaattcatgtgggaacattcagcattcaggtcagagcctgagccccttgtgggagagcagtagaccttggtgagcacgcctctgggtgagaatggcatctagaatctggcccacccctc

SEQ ID NO: 15711 - DNA, 698 bp, Artificial sequence
  DNA replication origin
gggcccaccccaccaggcgtttctggacagtctgagggccagacccctctcccctggtggccccaggacaaatgcccctgagaaccacgagcgaaaggggagtgcagggagggcggggagacgcagccacctcgctctggggtaagggtcgcctccgccccttgctcactcaggctcctcacggaaaatggggaggatgggggggcctcccctcagaggcttgtcggggggcctcccctcagaggcttgtcggggggcactgcagggatgtggtacagtgggggccacctctctctggtggtcaacccacccccaccccttgccaggttcatccggtgaagcccaggatccctcttctctgagtgtgatgaaggaggccccacccacactcatagccagtgaggcagtggccactctctggggccatggccctgcaggcgaggctgtggtactggtgaggcagaattgtgatgccagaggaggtagcaccatggtgccggagtcaggggacagcatcgtagagggcactggaaggagaaggctgctgctgtggttgcggggagaggggccaccccatccagcaccatggccccgcctcatccagcatcatggccccgccccctccaacaccaggactctgccccatccaggaccatggcccagctccagtaaccccggagagggaagatctatgcctc

SEQ ID NO: 15712 - DNA, 1106 bp, Artificial sequence
  DNA replication origin
ggtgccggagtcaggggacagcatcgtagagggcactggaaggagaaggctgctgctgtggttgcggggagaggggccaccccatccagcaccatggccccgcctcatccagcatcatggccccgccccctccaacaccaggactctgccccatccaggaccatggcccagctccagtaaccccggagagggaagatctatgcctcttctctgcaaggtcccagtccctgggctcagccagtgtctccacagggccccttgatgcaggggctgtctgaatgggtacagggcaaggcagaaatttgcttcccctgagggccaccgccagcagggcgttctggggccatcccaccctgggacctctcaacaccctgccagtccttcttgccatgtctcaggacagcctcctgacccctgcagtagaggccactggcactagctggtgactgagaaagaccaaagtccaggaacccatggcctctgagggtggagcctggagtaaaggggtctttgttctggtgcccaggggacctccccactgctgggaagttgtagccctgggtgctctcccaggagctacctggacaggctgggggtccaaactccggggacttcagctgtgacacctctcctcccactacaatgagtcagctccccggtccacccccaggactgctgcctgtcacccagaggacctgcaccctcagtcagtgtggagctgtggtgggggcgagaggagaggagtgtgaccagggactgcactgagtcaccgtgggggaggaggcaagaagacagctcttgacttctctgggttaggagcaaagctcacacctgcagacacccatcccatggtctcaccctccatacggtccacaggggacggggccagggctcagtgcgtgcctggggttggagtaggtttggggccaggaccgggtctggtcctcctgtccaagctgccagaaagaagcatccgttattaggctggagttctggtctttgggcctctgttggcccatacatgtccacattccacacttgctgccggcactcaggtgtgccctcccagcatccgtccctgcagccatggcctccattcatcctgc

SEQ ID NO: 15713 - DNA, 962 bp, Artificial sequence
  DNA replication origin
agcctctcagctggaggcaggggctgtgctgccgggtgtggaccgtgccgatgggtgggtggcacagacccccttccacacagacctgggcttcctgtgttttctctcggggagcaaacagtgccctctgctggactctttagggattgcaggtgccccgacccagaaagcaggttcctccgggatcagcccagaagcagggcagccaggggccgggcaggcgtggatctgggcagtgaaggtgtgtgtgagccacaggcactgtgtgacctgtgggatggcagcggggccagggccagaggatccaagagggcctctggaaggctgggtgcagtggccctgcaggaaggtgagatgcaaatttcggaggaaaggaggggagtggaggaagcaaggaagcccctggcaggggctggggtggggcctggggcctctgtggcaggggctagggtggggcctggggcagcaaggggccagcagggctgggggagccgcatttccttggggctcccaaaggccccagtctcactggagcaggggcctgggtccaaatcctggggaggtgggttcttggggagagcccaggatatgcagggaagggcaggcattagaggttgcgccacaggacgggctgggtggacaggggcccggcgctgggcaggggctcactgaggcctcacgggggacagggaggagggcctgtgcagcctgctttcttcctcttcgcctttctgtccttgttcccagggacagctcagaaaagctcgcctctccttccatacctccgatggcccccctcccataccttctgctgtcccctcccatggccaccccaggtccctgtcatctcccagaacactccaccttcaaatcttcccttctccctctggctcctcgccgcccccagggagacctcagtgcccaagcacggacccctcggtgtcaacaggaaagttgttcct

SEQ ID NO: 15714 - DNA, 1261 bp, Artificial sequence
  DNA replication origin
cctggagcagcccttgctggggaaggagaactggcactactaggacccatctcaagggggcatgcaaaggcagagagggatccagcctgggggtggtcacctgagggcagcccccatggttccagctgtggctcaagaagcccttgaagccgccataggaggctgagcaggggaggcctcctcaaagccaccttggggcaggcagagcctcagaagggaccccgaggctggcagggcaaggagcttccgcagctgacctccagaagtgcagctctctgctgagagaggcacttagttgggaggcctaggtcttctgcttgctcttggcctcatcttcactgaggagggcctggggcagctcaaggctcttggctgcagcaaatcagcacccaggaggctgtgccccttgacccttgagctggggagtggctgggggcttgggcagggcgcctgggcaggacagcattaagcaggtggcacctgcactggctgtgcctgactctggggtggggaggactccagatgcccagtgagagctgagccagccagggaggtcaggtgggctctgccagctgaggagggctggtgggagtctgtgctcctgagccctgggtacagccctcttctttgaattgcctgttctggggtagccctgggggtagggtgacaggatcccaccaagacacagggaccacattggcctccagcctgggagcctcacaaacattccttgctcagcagaatcaggctggacccttagcaaggagtggctggagtctggctgcagagggaagacatcagcagggagggagccagggcctgtcacatctttcctctggccattgtcctggtctttgtaagcccagaatctccccttccctgaagggaggccagcaccccaggagggcagcaggtgtgctgtgagggttggagtagtgtgagaggtcagggtacactagaatggccatggacaccatgtgggggtgctctgggctgggccacagaacagtgtccttcctgctgctcctcccctgcagcttcccccgaccttgtggtttatttggtttgataccaatcagcagaccctgcagggtggaggctcccaggcctctcagtcccaccactctcatgtgccagtcagccctactgtaactgcccaatgagtacttcttgcccactgccaagatagagccagtttaccaagacaggggaattgcagtagagaaagagttgaatatacatagagccagctaaatgggag

SEQ ID NO: 15715 - DNA, 1545 bp, Artificial sequence
  DNA replication origin
gccctgccgtggttgtggagccaggtgggcgggcagcactagagcctggggtttcagagaccagcggctcagtgtggctgcctggggcagggtaccctgagctgagcttgaggggtcccctctggaagaggcctggaatggtcacagctgtctgtctgctgcggctccttgtagacgcatctgagtgtgtggcagtcagggaggtcagagggtgattgagaaactggcagcacctcctagcccttggaggagcttgaggcctgctgttctagagaaacttctaatgccttgttttctagaggcagtttggcgctctgtgtcggagagaggagtttagagacctgctccagatggggtttgtaagatctttggcggggagggtagtgaggagttcctcctccctgcatccctccacccctgcctctgctcctcagggaggaataagggatttgagaagctcaggtagcccagcgagcagttacagcaagaagcttaggctgggcgggtgggaggtttgttcttgggtccgcccagcatcggacttcctggcttcctctgatggcttctgcctgagcgcttccccaggaaaggccgggctgctcctatgagagccacgtctcgtttccagccctagcgaatggcttcagtttgcttggtgggagttgggcagagtccacctgagcagcacgtgcaggggctgggcaggctgggctgctcccggggccaccctctccccacagtgcatgccagcacttgcatgggtcctctcaacagcccttgagtttcagctggagtgtcccggtgaggagagtcgtgaggacgccatgtgtgtcctgggcgcgccccatcactttcctctctgttccctctgctttccagcccctgaagtgctgtgcctggagataccattgtggaccctggagaggcacctgctgcttatgcggtaaaacctctaccaccccaaacctggtcagtttgaggggagccgctgccatagtatccacagagaaggccggagttccagccgtgtggagcagcagaggggagtctgacagggtcacctcctccacagagagaattggcagctgactgcactgccaggagccaaggcctaggtgtgtggagcctggaagaccagggatacctgaggcaggaggtgcagcgtgtggagtgagaaacccgagagggactggggcctgtgctcaggatcagcagagcaggcaggcagagtggagagggagagacggagccccagaaggggagcaggaggagagggaagtagtggcagcagcccaggccaggcgtgtgtcctgcaagtgctaggaccagccacccctccccatggcctccaagccggctgccgggaagagcagaggggagaagcggaagagggtggtgctgacactgaaggagaagattgacatctgcacgcgcctggagaagggcgagagccggaaggcactgatgcaggagtacaatgtgggcatgtccaccctctacgacatcagggcccacaaggcgcagctgctccggttcttcgccagc

SEQ ID NO: 15716 - DNA, 1619 bp, Artificial sequence
  DNA replication origin
aaatgacatagaaatgtcacagctctaaccaaacacatctttctgttggagttttgaactaacttctcacccttctcctatataaagacaatgcgggtcattctcatcccttctaggtggacaatttcaccctctcataacaactctgcgaaacaccccacaaccctccctacacccgagccgactggcagggcacagagggcgcacccctgtgaggccagggcagcctatggagtcagggcctgcaatgcacttcacccagttaagacactgctgagggtggtgagggctgaaaagctgtttgcccaaacaccgggcagctcagctggccgcctcagtgtggcgtgcgtgctatgggcaggggtctccctgccctcactcctccgcaggccagcagtacttgaggatggactcctggagttcccacctccctcccgcgtccttaccatagctgcttctgccaactccatgcagagcgtgtggccaaaggcctacttacatgtggagcgcagaaacgcagccctttgaggccagagctcaagggaaaggaggagtgcaatcaaatgcagcaaaagctccaaagaaaaattataggcttgttggctgccacctctgggtgagtactgtcctcttccggagtcagtttcctggtctgcaaaatgtgggctggtcccttaaggatcctgcattgttcgctgagggtgacggtgtgacgtgtgtgcggtctggcacagcacagtgagctatgtgcatctcaccatggggaacaggagggaaggcaaggccacaaaccaccctccagatttttaatatgaacccgctgtagaaaaactgggggagacacggaatcccacagtagcttatgagggactaactggggactgggatgcagagaaaagcttcctggaggagactcaacaccagacacagctcctcgcggacacgtctccatgcctgacatgcaggtgtagcaggatgacacaaagtggctgaacttgtttcataaggaatatctgaattttatttttaaaggaagtttttggtcttgcaagtgggacaacagtgtgttctgccagtttgtgtcatcctgccacacctgcacgtcaggcatggagacgtgtccacaaggagcccgtgtctggtgctgagtctcctccaggacgcttttcccggcatcccagtccccagtcagcccctcacaagctactgtgggattccctgtctccccgaaattagggtggtttcttgccttgcgactggagaggaagcactgatccccaaggccacgtgaacacgggatgaaacgtgcaattctcctgtgcccaaggcacagacaagaaacgggaggcctgaggggccagcgctggggctgactccgtcctgtgtgaggctaagaggccctgagaaacgcggggggaaagcgggaaacaaccttcgcaggggcatagtgtgtgtgtgtgtgtgtgtgtgtgtgtgtgtgtgtgcgtgtgtgtgttggggggtatggaggatatgaaggagaaatactcaaaaaacaagtcgcattctggagctgggggaagaggtgagctgggggtcagaaggagagtatgggacagagaaggaggggacagaaagcc

SEQ ID NO: 15717 - DNA, 959 bp, Artificial sequence
  DNA replication origin
ggagagcgcccgcacccatccggcccggcccggccgcccagcgcctcaggccaggaccctactcaccctgctcacccggagcagccgccgccggccggaagtgccggccactcggttctcctccagtccgcgcctcgtcgccttcccccagctacttccgggacgctctagacaggctggaggactcagcactcggtggtgtctgggagccagacgcaggctttcaaagagctgggtggccgcggagggcgtgggaggagaggaggcctggaggagaggagtgggggggtcccagggtggggggaggcgtgggaggggagaaggcgcgggcagggaggggagaggggaaacggggcgaaggcggggcgcgcggcctgggccccgggctccgccctgctctctccatctgtagaatgggcgcagggcgtcacattcctttcatgacagtgaaccctgcgctgaaggcgttggggctcctgcagttctggggcagccacaggcgcccagggtttcgtgccgatcagcccaggacggtcttcccggtgcagtttctgatgcggggagggcagtgctgccttccggtcaccaggaccagtgctcagcccgcctgcttgacccccttacttagctggggtccaatccatacccaatttagatgattcagacgatgggatttgaaacttttgaactgggtgcgacttaagtgagtatggacctgagttggtgctgtaatgagttgaggctgtggaggaccttgagatgggtgcgtggattttgcccatgggacctatgcaaattttggaaactggagggtggactgtggtgggcagaataatggccctccaaggatgtccacatcctaacttccaggtcttgtgaatacattacttacatggcaaaagggactgcaaatgcaatgaagttaagattctttaggtggagagattcttatgtttatc

SEQ ID NO: 15718 - DNA, 762 bp, Artificial sequence
  DNA replication origin
cacagaggcctggggcaccacacccagtgtgggctgcagcggggccccccagagcctagagctggccgggtccccagagcagcaggccgagtgcagggagcagcgcaaggatggcagcagccggctgcagggcatgggccccgctggcgttgcacaagtcggtgtcacagcacgtgatgttcttcttgcccacgtagtagtcctgtgagtcatccacgcagttcaagctgcagcctttgctgatgacggtcaggaggccaactgcgcctggggagcagcgggatccggggatggggctgccctgtgtgctcacctgcctgacctgccccaggcctcctcctgtcccaccctgcctaatgctctagagtccccctgggctggcctcaggattgcaagcagtgcgagggcctggtctcggccctggtctcagccctatccagatgtccgaggcagatggaccacccgctgagcgtcagaaatggggtgagtgagtaagtgagctcagggatggggagggacagatgggtggaggagtggaagatggaggatggggagggacagatgagtggaggagtggcagatggaggaggatggctggagggacagatgctgggtgattgttgggggtgcaggtgcgggacgggtcggggacaggtggaaggaaaacagcacacagatgcggacagatggccagaaagattaatagttcagtggcagagacctaggcctggcggctgtcgtccccccactcacggatgcgcg

SEQ ID NO: 15719 - DNA, 1399 bp, Artificial sequence
  DNA replication origin
ggtgtggacagacgccaacctgactgcgagacaacgagatccagaggactcccagcgaacgggtgagcctggctcgccctccacagccacgggccgagaggacagggccgggcggcgtctgcctggcaccgcgtggccaccgccccgaccaggccgtgagaacggagcgttcaggcggcccgtggcgcctggaagcctctggggagcctcgcctcgtgcggcttccaccagggcggcggggcagcctgagcccggcccttccccagcccttgccccgctccggccgcgcttccccgggagccctcaggctgcaggctcccgccggcctggcctccgggggcttcacgggctgagaaccgttcaagctgcgggaggagggccggctcctcctgcagagctaggccaggcccaacccagacccaagggagaactcctttgagggagtcggggggcaggacctgggaggtgggtggacctgggaggtgggcgggagggcacgtgggagcagacccaagccccagggtcacttccacagccgtcggccgggagatgccagggcccgtgggtgccgcgtggccgacctggggtcagggtgctgcggccgagtgggggtgcgctgtgcgctcatgttgtgtgcttggatgtgggaggacgggggagcccccaggagagaagaaaaatcactcagaatgtaaagaagtccgggggctgggcaatttataaagaagagaggtggaattggctcacagttccacaggctgtccaggaagcgtggtgctggcttctggggaggcctcagggcacttacaatcatgggggaaggcgaaggggaagcgggcagctcttacgtggccggagacccctcctgctttctccccatgcggctcactcgagtcatgtggccccagccactgctcagggggagaaggatggggacccgccgagtttgtgctggtcggatgccggctgtgttcatcagataggcacggagaactggaacattctgctttcttttttattcctcctttcagacgagggtgacaatagagtgtggtgtcatgtttgtgagagagaaaacactttcgagtgccagaacccaaggaggtgcaaatggacagagccatactgcgttatagcggccgtgagtgagtatcttcgctcttgttggggacccaaaggcaggtgaacagagggctttcaggaatcagggctgtctagttttcctcaatggggaataactaatagaaagtagcctttttttttttttattttctgagacggagtcaggctggagtgcagtggtgtgatctcggctcactgcaacctcgccttccgggttcaagcgattctcctgcctcagcctccagagtagctggtattatggatgcgcgccaccaca

SEQ ID NO: 15720 - DNA, 1451 bp, Artificial sequence
  DNA replication origin
cctggccgttcggcccttcgtctgagcgcaaaggctccagcacctccgcggccgaagccgcgggacttttcgtggaaaatgggacccagcccgatcgccagcggcgctgcagcggactctgcgggaacctagcttctgctccaggacctccagggccaccccagctcgcagggcgttcgcagcggctcagggcgaatcacgctcatggtccccgtgcgcattttcagccccagccggtacctccttactcgccctcacgacattcattccaccccctaaaggtcctgccaaccccaggctcttcccgagcattcccgcccttcctcccttttgaaaccggagcaaatcacggccgggcggaagcgggggagcccgggtgagagtcagtgactcagctgcggactccaagtgtcgccggaggccctggggcgcaggcccagcgggctgtcgcacagctcggctgtcctgtgccccttcctgacgaggctggggaggaaaggcggcccagagaaggccggaccagctctccccgtcagccccaggctctcgaatgacagcggatgccagcgaccggggatggggtcccggaattgctgggttaaacaagctccggattcaggcctgggcctgggctggggttccagggttctggaccgccctcaaagaaggagctccctggggcggcacctggctctgcttgatagccccagggacagggagctcactacctatcagggcagctcccccagtgccgagaccagctcggtcctggagaccctaacccagcggtgctagaggaattaaagatacacacagaaatatagaggtgtggagtgggaaatcaggcgtctcacagccttcagagctgagagcctccaacagagatttacccacgtgtttattcacagcaagccagtgataagcacagtttctacagattatagattaaaagtaccccttagggaaacaaagggatgggccaaaataaaggggtgggtttggctagttatctgcagcaggggcatgtccttaagtcacagatggctcatgctattgtttgtggtttaagaacgcctttaagcggttttctgccctgggtgggccaggtgttccttgcccttattccggtaaacccacaacctcccagcgtgggcatcatggccatcatgaacatgttacagtgctgcagagattttgtttatggccagattttgggggcctattcccaacaccctagcattgctcacacttgtccctgaagtgtcaccttgtcgtagctgggctctgagccctctgccccagggaggggtggccttttgggctgaagggactgaggacatagccgttgagcctgttggccattgctcaaagaatgcagcctcctggtcacccatgttgtccccttgccaacaaaaagagtgaaacactgtgcaatgtttgaagagatttat

SEQ ID NO: 15721 - DNA, 850 bp, Artificial sequence
  DNA replication origin
cacgtgggtaaatctctgttggaggctctcagctctgaaggctgtgagacgcctgatttcccactccacacctctatatttctgtgtgtatctttaattcctctagcaccgctgggttagggtctccaggaccgagctggtctcggcactgggggagctgccctgataggtagtgagctccctgtccctggggctatcaagcagagccaggtgccgccccagggagctccttctttgagggcggtccagaaccctggaaccccagcccaggcccaggcctgaatccggagcttgtttaacccagcaattccgggaccccatccccggtcgctggcatccgctgtcattcgagagcctggggctgacggggagagctggtccggccttctctgggccgcctttcctccccagcctcgtcaggaaggggcacaggacagccgagctgtgcgacagcccgctgggcctgcgccccagggcctccggcgacacttggagtccgcagctgagtcactgactctcacccgggctcccccgcttccgcccggccgtgatttgctccggtttcaaaagggaggaagggcgggaatgctcgggaagagcctggggttggcaggacctttagggggtggaatgaatgtcgtgagggcgagtaaggaggtaccggctggggctgaaaatgcgcacggggaccatgagcgtgattcgccctgagccgctgcgaacgccctgcgagctggggtggccctggaggtcctggagcagaagctaggttcccgcagagtccgctgcagcgccgctggcgatcgggctgggtcccattttccacgaaaagtcccgcggcttcggccgc

SEQ ID NO: 15722 - DNA, 1069 bp, Artificial sequence
  DNA replication origin
ctcgctgtctttgcgctgctggacgtctggtacctggtgcgccttccgtgcgccgtgctgcgcgcgcgcctgctgcagccgcgcgtccgtgacctgctagctgagcagcgcttcccgggccgcgtgctgccctcggacttggacctgctgctgcacatgaacaacgcgcgctacctgcgcgaggccgactttgcgcgcgtcgcgcacctgacccgctgcggggtgctcggggcgctgagggagttgcgggcgcacacggtgctggcggcctcgtgcgcgcgccaccgccgctcgctgcgcctgctggagcccttcgaggtgcgcacccgcctgctgggctgggacgaccgcgcgttctacctggaggcgcgctttgtcagcctgcgggacggcttcgtgtgcgcgctgctgcgcttccggcagcacctgctgggcacctcacccgagcgcgtcgtgcagcacctgtgccagcgcagggtgagcggcccccgcccctggccccggagcacggcctttgtgggacctccgggggctcctcctagtccctggccccctcccctagggaaggcccgctgcctgcacctctttcggatactgctggagtcctgcctcttaccgctcccgcccctccctctctaccgggggcattcctcactgatgcctttgttcgtgggggttcctagggtccccgaatcaactcttcatagtcgggcttagcgtgcttccctcctgccatttcttaacctggcccctcacggtttcgtgttcacccctctcctctctcctggtactctgttctgtggctggagtgttgacctctctggtccttggtcctgaatataggttggagaggtgatcagttagaagaggttcctaggagttcccgaggacctgagcccccctttcacacagcttagagctgaagggctgggttctggtcacctgggtttggggttgaggtattgagccgagtagctgaaagccttctggcctttctgcagttggagagaggagggccatgcacctcccagggctcgctcctcccagcagggcagaaccgcccctgcag

SEQ ID NO: 15723 - DNA, 1469 bp, Artificial sequence
  DNA replication origin
ctgtgttgttaatgctggagggcataacaggcctgtcccacaccctcttctatcatggcctgggctagtctttctggttaaatgtggagggccctggcctattggaggaagttcattcagatggttgggggtaccttccgatgttatttttggtttacagtcaggaaccccctaaaaggcctagatctctctctgtccccaggtgctggactctatgtctttcatgcatctagagtccagaggcaaaggccaccaaggctgagagccgggcacggaggccgaggagatggggagccagggttgcttttctgggaaagagggagtgataaaatcaggcatgggctggttggtgaggtccctgtgggaggtgaaggctgggacccagaacagcagagactctgtcgatgatgtggaaagaccgcggctgcagtttgggcaggctgagccagggttgggtcttgcatgttgagaggctggcctgcggtgatgtggccaaagaggaagagctgggctggggtgagtgttggtcacatggttgaaactaggtggggaggggagtggtccaggggagagtccaggcccagctctgctgggacttgccatgggggtcacgactcatctgcagggaaggtctgggctttatctctgagcacctctgtgtgctgctcaccctgaagtgggggtgggcctgtgcctggcctgtcccctcatcctgggagctcccaatgcccatctgcaaggctgtggacccctcaggagtggcctggagcctggctcccattgccacatggtggctgtgtgtgtggagagggttgatagtggagtggtcaggcccaggctgccctgggggatgaagtgccatcctctgggtgccctggagaaagaagagaactcagtgagccctgtctggtactttcctggaggagggctcccatgctggccctccacccctctgtcccctgtcaccctgaggcctctggatttcctctctgcccttcccaacctgccaacttcacgggtttctggctgggttctggggatggcccctaggggagacgggccaggcacaagcggggctgtgtcaaggtgggtatgcaggggtagcacaagtgtgcagagcctggggaggcatgggcaaagcatggcaggcggcggggcaggggatcttggaaggtcacgggctggggagcagtgtgggcagcggcccagaggtgggaaggccgtagcttagctgggtgtcccctttctgtcctctgcaggtggagccccctgagctgcccgctgatctgcagcactggatctcctacaacgaggccagcagccagctgctccgcatggagagtgggctcagtgatgtcaccaaggaccagtgaccgccaccttcacaccgtctgccctggccaccatcctgggcctgggggctgcccacagatgggcagtctcagccatactctgttccagctggagta

SEQ ID NO: 15724 - DNA, 1359 bp, Artificial sequence
  DNA replication origin
cggccctgccttgcgctagcagagcctctcctggcagcttctcaggtctccctaatggagacaccaggctactaggacactggctggggccaccccctcctgcctaatgcctcaccttacagctggggaaactgaggcctggaatggcccagagtcaccaaggcaaagttggggctggtcccagcctgaggctccagctgatgccctcagctcccagagagggggtgccccatctagctgggtgcaggggtcactgcttgtcagctcagggccctgtgcccgcttgcctgttcccctacatctgtgcctgcacatccagaactgcctccttgccgctgcctccaggaagcccaccttgagccagagtcaagggctgcagcactgcccgatagaacacgcccgccctcactgctgttcttgccttacagccaccatgggaaagctgcaacctttctgttttatttaaagaaagcccaacattaaagggttttcattgcaagcgtgctggggagggccttgtttctgagctaccaccaccaccatccatgcaggggcggaggtgggaccagggaagctggggcacattcccaagatgggtgtctggcatggggggctatccaggtttgttgggctcccgtgaacttagggatcaggctggcagggcagggcttgtcctcatcccatggggcataggactgaggccaagaaggtgctgtccaaagccccctggggagccagcccttcctgctccggccctcctggttcccagctctcgaggcttgcagccccatctacagatgccagcgccaggttcccggtttccctccttcagggattaccctggcggtcatgcctcagactctgggtctggccctccaggctcccagagcctcgggcagggtgctggtagccattgggggcagaggtcaatggactggtgggtggacaggaggcagagagagcatgggggctgttctgcaggcccttcaaaaggggtggggagaagtgggaccctccgggacataaagttgagtgaggcggggtgtggccacgtccatgctgtgaccaccttcctgggagggtccagaaggctctgagggccagggaaggagtgggcagttggaaacagctatgaaaccggcatttagtgatggggcagtagggctggggaggggaagcaaacttgctcagcaaatctggggtctgtagccagactggttggccagaagcctctgtgctttctctggggtccttgggggaggtggctcgtggggtcgccacaggtgtgtgagctgagtgttgccagacaagcttcccagtggggctgcagatgaagctgtagggatgccgtccagctga

SEQ ID NO: 15725 - DNA, 1829 bp, Artificial sequence
  DNA replication origin
tgcaggcccttcaaaaggggtggggagaagtgggaccctccgggacataaagttgagtgaggcggggtgtggccacgtccatgctgtgaccaccttcctgggagggtccagaaggctctgagggccagggaaggagtgggcagttggaaacagctatgaaaccggcatttagtgatggggcagtagggctggggaggggaagcaaacttgctcagcaaatctggggtctgtagccagactggttggccagaagcctctgtgctttctctggggtccttgggggaggtggctcgtggggtcgccacaggtgtgtgagctgagtgttgccagacaagcttcccagtggggctgcagatgaagctgtagggatgccgtccagctgatggtcctgaccatctgcctgagccctggagcagggcgggggccacaggacagggtgcctgggccttgggagggcaccatgtgatgatgccactgcggtccctggctcagcagctacctctgggtcgtggaaggcacattggcctggatagggagtagggctcagtgactggactaggaatgagtgtatccagtgcgcatatggatgtgcgtgcctgtgtgcatttgtgtgtgtgtgtgtgtgtgtgcgcacgtgcacgcaggcaacgggcaagcttcaaggtggttgaatgggcagcacccgcaagcctctggggcttctctctccatgcagaagctgaacaccctgggctgtcataggctggctcagaggaaggtttgagccagcagggccctctcttggtcttgtttttggaggacgggctgacgacaggactggcccgggtcagggaatgggtggctgggattggaagtgaaccagtgccttgtcctggcggagccactggagcccactctgctcctgtgagcctgccactcggagaagttagagggcagcaactgcttcggcccgcgtccttcccccaaggccaacagctgcagaatttctgccccagccgcccccacccccggaggtgtctgcacagtgtccaggtgtcgggcccaggaagcccttggtggatgctggtgaagaagggacaggtacagggtatgggagtgtgtccggaggtcctggggtggtggctgtgcatgggtccgtcgtcctgggggaggaggcactgtgccctctgatggccaggtggacagagtcacgactgctttggtgggtgtccccggggctcaccctaggtcagttgcctgctcagtctcagcatccagccaccgcctctgggctcagtcagctgactggccactgttgtgtcccctcagggcccagggacacagatccccacatctgaggccttgctgagtggagttctactgtgcctggtgtccggaattctgggacagcaggaccatcgcccacctcatggatagggaaacagactagggcagggaattcccagtatggccgccaggggctcaacgaggcaggccaaaggggctgattcgtcccaggcccaggccgccgctccccgcatgacttcccctctggacacctgcgagttgggggcacccttggggaggtggagggtcttgctcctgagggcggggagggacgccctgcggtctgcacacccctctcctttagagatttcttaaagctgcggaagactagcgctggctggtctgacctctccgcggtagtggggttcagaagggcctctgcttcccctccgcgcagtagggcctagcggcacgggtgggcgcccttctccctcccctccaccgccacctcttggcggctggctgcttccccgccagctttacccacgtcctgcgacggtcac

SEQ ID NO: 15726 - DNA, 2106 bp, Artificial sequence
  DNA replication origin
tccaggccggccgagagggccagggctctctgaactctgtgctgcggacccctacggtccaggcggcccagctgcgcgcgcagtgcaggttccgggcagagcgcacagggtcgccgcgtgctcgcggtgcgcgctctgggacgagtcttcctggcgcgggttccgggactcgggcgcgcgccctctgctggccgtgcgggctcagcatcgggggcccctcgcaggtgccctcccagggataggggcacctgctgagccttcaccactgcgctcccaaagagcctggaggcctcatccccattgtgccgctggggacgctgccagagatgcggcgacttcttgctccgtccccctggtgaggccaaggccctgcccccttggctccaatcgaggcccgggtgaggcccttggaggtccggccatgacccaggggacgggccctaaccggaagccacgccgccggcccggtgctggccaacggggaggcccggggtagcccttcaagggggcctctctggcagctttctctggtcggggctgctccccagggacagcatttaattcctggtatttctgggagggcgtagaggtagggggtgggttctgacatctgggcccttcatagacagaggtgggctctcacaggggtcctaggcgacccccgccactgccctggttactcccgcatgctcctcgggtatgcccagctggtctgaccacagcctgctgcataccgctcccaccccagcaggcacaggtgcccacaagaccccacgggcgtgacccagctgatgtgtggggccttagaacccaagacctagctgggcagcgcttagatggtgtgcagcccaggagacaccaggggactggggcctggagaggggcagtgtccaggggtggctcaggcccacagcagcccgtgctccccgttggctctgcccacctgccgacaggggtgacagtggcacagagcactgtgactgtgatgggacagccagggccaggaagagggggaagcgagcctggaagtcaggtctcctgggtcctgagaacccggggctcctccgctaatctcagctgtcccaaggggacagtgggcagttgtcagaggaggtgactgaaaccgtggagctgtgtggtaccagcaggcccaggtgcacacacccaggaagaccccttgggctgggcaggcagagccagatgtatccacccttggaggaaagtggatgccaactctgagcttccttccctctctagggtgggagcgatgtctccagggtttacaggggagattcttagcgggagatgttccctgggctagggtacaggtcctggtctgagatgccaggctagtttgcatcaggaaaggggcccaggaggcatttcttcccctaagtctctgttttcctatctgtgaaatgggtcacagaggctctgggtgagagggaggagcaggtgcctagaatgtgctgtccttcagcctggctctcctgaaggccagttctgtagggtgtcagtgcccaggaaggacaaaagtcatgtccactcttggcttagttatgttttataagcgtggggtatggaaggcagagggcgcccctggtgtgcttctctcccctcagaccccatgagtgagctgtgccacagcagcaggaagcagggggaggtgatcacaggtggagccaggccccgtcagagaggaggtgcctgaggagcaccttccgccctgccgccctgggttcagagttccgagttgcagaggtctcggaagcagcagaagatcaggtgggcggccccgatgctgtcggggtcggtggccacacaggagctggagcaggagcgggtcaccacggggctctggttgaaggggtactctgcagggtgggccagtgtcagaaccctcactcccctgcagcgcctgcctgctgctgcactgctcccagccgccgtcgcctgacctcaccctccctgtgatccctgttcccaatagtccacatctgtgaagccacccagggcccagccctcctctgactgtgacctgttcatgaattattaggccttgtcagacctctgaagtgcctgcgctgagatgggagcccgagccca

SEQ ID NO: 15727 - DNA, 1179 bp, Artificial sequence
  DNA replication origin
tgggggatgagtggaggatgagtgtgggatggataggtggctggatgggtagatggatagatggatggatgggtggatggatggatgggtggatggatgggtagatggataagtggaggatgaatatgggatggatgggggatggatggggaatgggtggaggatgtatgggtggacgggtgggggatgagtggaggatgggtgggggatggatagatggatggatgggtggatggatggatgggtggatggatgggtagatggatgagtgagggatgaatatgggatggatgggggatggatggggaatgggtggaggatatatgggtggatgggtgggggatggatagatggatgggtgggggatggatagatggatgggtgggggatgaatggaggatgggtgggggatggatagatggatggatgggtggatggatgggtagatggataagtgggggatggatgggtggatgggtgggggatggatggggaatgggtggaggatggatgggtggatgcgtgggggatgaggggaggatgagtggatggatggggacggatgggtggatgggcagaggatgggtgggtggatgcatggatggatgttggatagatgtgtggatggatggatttcagaaggatggatggatggaggatgggtggataggtgggtggaggatggatggatgaatgggggcaagatgggtggatggattattaaatgaatgacatttgagagagttgatgtgtgaaaaaatgaatgaatggatgggagaattcagggatggagggatgggtggctataaaagtggcggcagacaaatgtgtagtgaatgggcccttccgaggcagaattcgatgctggaaggagctctgggctggcaccaggagtcctgggttctggtcttggcctactgctctctccatttgtggccttggtgtggcccctttttccttccagtctttggttttctgtttgtagttgtgaaagctgaagtgacctggccttgtgggctgaggtgagttgtgtgaggctgtgggatggttgcaagaaagccaagggagggcgtagttactgcaaatcaaacaaaggggctgacatgggttggtgcacagatggcaaccaagagcagcctctccccagggcttggtccacagacacacccaggtgtttcg

SEQ ID NO: 15728 - DNA, 1072 bp, Artificial sequence
  DNA replication origin
cagaggcctggccctttctccttggctacactctccaccctccactcagagagaccagctaaaatgcaaactggcttatggcactgctcttcccagaaacgctccctggctctccactgccttcagcatgcagtcaaaaagccccaccaccactgttggtgtttgatgcttgccctgtctgggctggcctgagggactactggactgtcatctcctcaagtagaacatgtttccattcctctaagaatccttctcccacagcctgggtctgaccatgctgactgttgagcagcatttgctggaggatggatggatggatggatgggtggatagatagatgggggatggatggaggatggatggatggatggatggggagatggaagggggatagatggatgaatgggtaggtgcatgggtggatggatgggggatggatggatgaatgggtgggtgcatgcatggatggatgggtgagtggatggatgggtgggtggatggatgggggacagaagagggatagatgcaggggtgggtggatgggtcgatggatgggggatgaatggatgagtgaatgaatggagactggacagaagacggatggatgggtggatggatgagtggatggatggatggtggatggatgagtgaatggatggatggatagataaatggataggggatgggtggatggatggagagagtgatggatgggtgggtgggcatatgggtagaaggatggataggtgaataatgtatggctaaaaggggagatggatggatgagtgggtgggtggaggagggatggatggatggatggatggatggatggatgaatggatggatggatgagtagttaaagacaggcttaatgttgtttcttccaaggtgacccaggatgggtatttgtgggcattcaggttgacttctccccagggtacaaatgctcttgcagcctctctgacaaaacttagcacaggtttggacacccctgggaatgggaatcttactccttctcagggcagtacctgccccactgggacagacctgtttcaggccttcttccatggga

SEQ ID NO: 15729 - DNA, 1165 bp, Artificial sequence
  DNA replication origin
tggagagagtgatggatgggtgggtgggcatatgggtagaaggatggataggtgaataatgtatggctaaaaggggagatggatggatgagtgggtgggtggaggagggatggatggatggatggatggatggatggatgaatggatggatggatgagtagttaaagacaggcttaatgttgtttcttccaaggtgacccaggatgggtatttgtgggcattcaggttgacttctccccagggtacaaatgctcttgcagcctctctgacaaaacttagcacaggtttggacacccctgggaatgggaatcttactccttctcagggcagtacctgccccactgggacagacctgtttcaggccttcttccatgggagctcagacttgccagtctgacacccgcagccttggttctgaccctgtatccaggctgcagagccaattacatctcacaggcgagtctgatagctagtcaagttccttggaggattgaggttttttgcatagacaggcactgagtgagctctcaggtttggctgctgatttaacagtgggctagggtagagagggggaggcaaggagctggaggtggctgtgatagctacccagggacattggctggtggcttagatggcatgatgacagtgggcacagggctgaggccgaggaagatgtcctggcagtggggtggggggattgctaatgctgagttatgggaggtggtggctgaggtcctgagggtgctttgtcctcttgaaggttagtgctgggctccagccttgtcctgactgtattgtctgcatttgagatccagacatccctgccctggggtgggctgggccctgctccctgaggaagtgtggcaggtgttcatcctgttctggaaggtcgcagcagatggccttggggaagtcaggagtagaagagaaaaagaggacggctggcaaggtggtctcatcattcctctgatttcagggccagatgtaatggggccagggcagagggtgctagagctggcagttcctagagaggagcagagcccactccatcagcccgccaggggtgggagtggcctgcaccaccagacactgagttcaactgctcccctcgcctgcctgctcctggctcctcttctaaccaaaatctggaaccactggctcttcc

SEQ ID NO: 15730 - DNA, 914 bp, Artificial sequence
  DNA replication origin
cccccacccaagcatgagggcctctgaggctgggcagggcgttctacccattcctcagtgctccctcccctgcacttaatgaggcccaggagaggcttgcagaatgaatgaataaatgaatgaatgaatgaatgaatgaatgaatgaattccgggggtggttgcaggttgggttatcaagagaaataataattctgtcccttatcagagggtttttgattttcagcaatgagatcctgagggaagcagataaaatgttagctccaaaccggaaaggctgctcgatggtgactgtgaggacacagggacagtgttcagactggcgcctgacacacgggagggaggggagatcagggggagaagaggagagaggaagggagggaggaggagaggaaggaaggaagggaaggagggaggaggaatagagaggaggagggaggtggggtgggggggagggggcaggaataatggagggacaaacaggatggtgggatgggctctgggtgtagctgcatggctgggggcaggtctctcccactggggacccccgtgctggctctgaagcaggctggcccctcggggagattgtgctgtccatgtatggcagagagcagacaccaagcaatgacaggggatgcaggtgcccctgagagaggctcgccagtcctccaaccggaagagcagtgaggcagcttggggcttgttcctcgaggggcaggtgggatttcagcagaaggaagggctccaggagccctggtgcagggaagggcctctgggtcagaggggagtccgtgggcaccgggcacccaggcagaggctcctgtgatgtgccatccctggcctggatggccacctgactgcctgtccagtcctgatggttacaaaggccttctccaggttaagtcgagtccccag

SEQ ID NO: 15731 - DNA, 1209 bp, Artificial sequence
  DNA replication origin
cgtgggcaccgggcacccaggcagaggctcctgtgatgtgccatccctggcctggatggccacctgactgcctgtccagtcctgatggttacaaaggccttctccaggttaagtcgagtccccaggcccctgtgtgtctcggaccttcagcacagagctggtctgccctcatgaccctggggcagtcctcagggtcagcggctcagcctctcataggccaggagggtgcccctggggatggagactggagggatgtaagagacacctgagccagcgccagggactcaccgacgctccaccccctgctcattcagggcctgggaggcaggggctgcccaggtcgttcaacccacagccagggacgcagaggcttggcccctggggggctgggctgcttgggcttggaggtgcaggccaccggcagatcaaggggccagctggttttgttgaggcctcagggtgggggtggagatgccctgccaagagaagacgttcaggctctgctgggggatgccaaggccaggtgtgcacagctgtgcttgaggggtcatccccttggagccctcaggaaggccctgggccaagggatctgaagctggggggacagggccagccgtagcagacgtgggcactgcgggggtcgagggttgggggatggggagggggtaaaatcacccaggaaagcggggagcagaggagaggacccgggagcaggaactggggatgggagagcagagggacttggttttcccaggcaagagggaagagggagtcccgggagggtggccccaggagacaaaccagctgggaggccaggcccaagagggctggaggggggcacattcagagtgtgtgtgtgcacgtgcacgaaggtgcgtgtgtgaggggtgtcgcggtggactggagaggtctgggggctgggcagaggaagaggggggtttgagccaagggctgtgcatcctgagaagtgtgggggccagtgtcgggggctggggctgagctggatggacctgcaggatcgcaggaggctttcggaggaaagctgcacctggtagatggtggggggacaggaatgggttctcccgaggtgggcagtcacagcccagggctggagggacggtggttgggctagagtgatgggggccttgagcaggaggtggccccagcccctggactcacccagctgcaggctcaggacggcggccagca

SEQ ID NO: 15732 - DNA, 1113 bp, Artificial sequence
  DNA replication origin
gtgcccagcttcagtctcctgagaacatgaggatgggagggggcagagtcttgctgagggcacacccagttcccgctggaggaggacagtgccagtcttctgcaaagggaccttgggtgggaacgggcccggagcgggaggaacgtgactccccagagggaagatgggcatcatactgggcccagagctgggaaggagttgctgccagcacagggtgggcctggactcccctcgcccctacccccagtggttgtggctgtagccctaagcctggagagcaggaccggcccggggtgtctgggaggctgccaggtgcctcccagagctcccaagggcccccacctgcaagtgccagcctcagggcagtgcccaaatgaggccctctcagctgcagccagcgatgccttgggatgcttaccgggagggaggcggctttgggctcctaagtccttgggagaggctgggagcagtcactgcgcggcttgcgcaagcccattgtcgggttgggtggcttcctcagccagggctgggagggactccaggatcaggtcctccctgtctcgagtctcagtggggtgatggggaggagacctggccacccatggctcaggggcagctgagaacaaggacctgctggagctggaagtgctgtggtgttgaggggtggggtgggcagcttctcacacctgcctcctgcctccttctgtccacctttccaccaccctgacctgtcccagccccacacatggttctgcctggctggcctgcccttggcacctggcgtagagcacacagaaggcactcagctaatgctgggcaggcccactcatggggagtgcgtggctgtgcagcaccagggaaccggcacagcagcgccggcagaaatcacagcagtaaacttgtccgggttgtatgcatcaaggtggcgatggacgtgggtccccccactgcactgtggccctgagcactgtatagcagcccggcaatgggagccattatcttgcccctttgacagaggaggacacagaggcacagggaggtgaagtagctgccccacactagtgcctcctcgctcactcaccaccccctgcaccacagtgcagccgcttctcc

SEQ ID NO: 15733 - DNA, 1293 bp, Artificial sequence
  DNA replication origin
tgctaggaagtctgccaggcccgagttggagccaccccctgcaggggagggggcggctctgcctcagcaggccccagggcccccgaagtcacagaagctttttcgggtccagcaaggggtgtgtgtcctctcagtcaaaccccttgacgtttcccaccccctcacggggagggcaccaggcctgaagctggcaggagctagggccatgctatatttggtgggtcctggacgctgacccggccagcgctattctgggcagggagggaaaggggcagagcaggtggtcccccgagtcctggtccccaaccacagcaggacccagccgagcaaggcaaaagacgcaggactgggggatgcgcgcacaggctgggggttgggagcagcctggggccggcgcgggcctgggcgtgggaaggcggagcatgccaccctctcgtggccgtgcgggggcgggagtggggagggtggggtggggagggcggagacccagcccctcccccgcagcgggatgcgcacagtgagtgggtccctccatcaccttccacctggggatgcacccactgggagggcagggtggaagccccagctgggtgtgtggactcccagggaccccaccccaggcctgggaagcaggggtcagcccaacacgcaccaatccatccccgatgcaggtagcccagggagcacctgcccctgctgtgaatggggcattcgggggcgtgagaccttttggtgccagcggtcacgctgcacctgaggcccccacctgaccagtgctcccagctctggtgtcctgagaaacccttcaagccatcccgcatgggcaggatggtgacatatccatgtggtaggattgtcccggccccaaagtatggccctggtcaggggagcccctgctggaaattgcatctccagagctttgatgcaggacccctgggggatcagggaatgagggtctccaccccaggggtctccttgcagtgagtctatatgcaggcctgcgttctgctcctggggctggttctgagtgcccagcttcagtctcctgagaacatgaggatgggagggggcagagtcttgctgagggcacacccagttcccgctggaggaggacagtgccagtcttctgcaaagggaccttgggtgggaacgggcccggagcgggaggaacgtgactccccagagggaagatgggcatcatactgggcccagagctgggaaggagttgctgccagcacagggtgggcctggactcccctcgcccctacccccagtggttgtggctgtagccct

SEQ ID NO: 15734 - DNA, 3105 bp, Artificial sequence
  DNA replication origin
tggcctcggggtcccagcgcttgcccggcgagccggcggtccggggacgggtccgggccgaggcctgcggtgaactcggctcggcgggtgcccaggaggcgggtccggggcggggcctgcggtgaactcggctcggcgggtgcccaggaggcgggtccggggcggggcctgcggtgaactcggctcggcgggtgcccaggaggcgggtccggggcggggcctgcggtgaactcggctcggcgggtgcccaggaggcggggcaggggcggggcctgcagtgagcgcggcttggtgagtagcccaggaggcgggtccggggcggggcctgcggtgagctcggctcggggggttgctcaggaggtggggccggggcaggcctggggcggggcctgcggtgagctcgcgctgggcgggctgttccgggggcgggactgggctgggcctgcggtgagcatcaggcgatgcggcacgggtgctgcgggacacacagacacgcctacgattagactcaggcaggcacctaccggcgagcggccgcgggtgactcccaggcgcggcggtacctcacggtggtgaaggtcacaggtgaggtcaccctgatagtcccgctcgcgccgagagccctcccctcgacctgggaccgcagtgtttggggcggggctctccgtgagggggttgggaagctcgaagccgcaggcctgactctggcctttggcatcctggggttggcctgggcaaatgtgtcgtgagagacggatttgttgttctcgggaaggcgtaagtttaatttagtcctccaggacggagaccgagggccgagtatcccggcaggggtaggagagccgtaatccaacccccacctccccactgtaaacctctttccagagagggcattcccgttccaaacaccagacccagccggggaaatgcttcttcttgtctggcccaagtgccctcctgggaggggctcaaaatgcattccccccaagctgggcacagctcatccctgctggggagcttctgcagtggccgaggactcagacaaccctaaccagggctctggaggtcttctggaagaaggaaccccaagtagggacaccccaggagcagagaggaggggaacagcgagaagagacccagcttttgggcccagtcctgccatggccagccatccggcccccagggccctgcttgggatggggctgcagaccacctcccatgggacctctgcaccaaccatcccctgggtaaaatccttgtttaggcctggtatttaaggcccctctgcccatccctactccttctctagcactgcccctcatcctccccccatctctcctccatccagcgctacaggctgttttgagcttttgcaggtgctggtctctgattgaaatgtcctgatctcttctcccttcttgtcccatcccaagtgtctcctcctccaggaaaccttccctgacacccactgagttaggtggcccctctgcccaccatcatccctgcccaggcccccatgggtccttcaggcccagtactgaccacctgtctttgccacctgctgtgcagggttgcagcactcccagtagaccaggagctccgggaggcagggccggccccacgtcctctgcgcaccaccctgagttggatcctctgtgcgccacccctgagttggatccagggctagctgctgttgacctccccactcccacgctgccctcctgcctgcagccatgacgcccctgctcaccctgatcctggtggtcctcatgggcttacctctgggtaagatggacaaaggacagagggatgggcagacccactttgagggcagatgggctgacagtagggaaggaggctagaattcccagcgacaacccctccttctagccccctgccccggggaaggtgacgggctgggggcctgatgggctggaggaggggcctctcatgttctgtgacccccgttcccttcccgcccatctgccaaccccagcccaggccttggactgccacgtgtgtgcctacaacggagacaactgcttcaaccccatgcgctgcccggctatggttgcctactgcatgaccacgcgcacctgtgagtctgggggccctgcgtggccctgcctggggagcacgaaggggaggttctgccctgcccctgagcatgcgggggtcctgaggaaggaggctctcctgttcccggatcctgtctgggagctccaggctgaggggccctgccctgatggctgtggatgctggggtggggccagctgggtctcctgcccctcttagcggagctggctcaccgccccgcccctctgcagactacacccccaccaggatgaaggtcagtaagtcctgcgtgccccgctgcttcgagactgtgtatgatggctactccaagcacgcgtccaccacctcctgctgccagtacgacctctgcaacggcaccggccttgccaccccggccaccctggccctggcccccatcctcctggccaccctctggggtctcctctaaagcccccgaggcagacccactcaagaacaaagctctcgagacacactgctacaccctcgcacccagctcaccctgcctcaccctccacactccctgcgacctcctcagccatgcccagggtcaggactgtgggcaagaagacacccgacctcccccaaccaccacacgacctcacttcgaggccttgacctttcgatgctgtgtgggatcccaaaagtgtccggctttgatgggctgatcagcccctcgcctgtccagggctatttatggggaggggcccagtcaggcagggagcactgagcagatgggagctgtggccaagcccaccttctgggaagccctaggagaggcccctgcctcagtctgcccctggtgtgctggggcagggggaagacaaggaatgcccgcaggtggggtggtggggagactcttaggaggaaaggctcctccaggcctagtcacgcttcctactgaggccaggagctgccaggaccggtacgggatcagggctgtgggaggagggcctttggcaccggcccctgtgctaggaagtctgccaggcccgagttggagccaccccc

SEQ ID NO: 15735 - DNA, 1513 bp, Artificial sequence
  DNA replication origin
tctgtggtctgcccggccagctctcgcttctgcaagaccacgaacacaggtgggtagcatctgtccaggtgtccctggggctgggggacatccctggctgttgtgggtgttggctggaaggttgtggggaggtggggggcagaggtggctgcctggcctgaccacactcacctgtgcccagtggagcctctgagggggaatctggtgaagaaggactgtgcggagtcgtgcacacccagctacaccctgcaaggccaggtcagcagcggcaccagctccacccagtgctgccaggaggacctgtgcaatgagaagctgcacaacgctgcacccacccgcaccgccctcgcccacagtgccctcagcctggggctggccctgagcctcctggccgtcatcttagcccccagcctgtgaccttccccccagggaaggcccctcatgcctttccttccctttctctggggattccacacctctcttccccagccgcaacgggggtgccaggagccccaggctgagggcttccccgaaagtctgggaccaggtccaggtgggcatggaatgctgatgacttggagcaggccccacagaccccacagaggatgaagccaccccacagaggatgcagcccccagctgcatggaaggtggaggacagaagccctgtggatccccggatttcacactccttctgttttgttgccgtttatttttgtactcaaatctctacatggagataaatgatttaaaccagtgtggctgtggctgtgctattctgggacggaggagctgaggggcggatatcaggccacataggtaccctgagcctccagcacatgtcccctggggccagtcgtggggtgatgcctgaggtggcaccgtccgtccccaccctggaaggggcaggctgctcagatgcctcccaccgccccagaggtggagggcactcctggggtgaggcctgagtaggagcacagggtaagagggctcgcaggcccctcccacacatagcacctaggggagaaggaacccctcagcctttcaccccgggtcatgtctctgagaccggggttcaggagcctccagagaggccggcttgggacaccccaggcccaaccccagctttggagccaagtaggcactgactacctacagccatcgccaaggcaagtccagctgcccagggaaagttcagccaccatccaggaaagtcccatggaccctatctatgggaacccagcagccccttggccagacctcaccagggtgaagctagactgggcggggagtatgacgcagggaatatgggccagatgaggtcgcccagaggcagggagggttccgcacccactgcgtgggttctggtatttcggggatgaggttgggacgtgcagtgagatgaggcccccggcagatgccccagcaaggggcccttccacttctggagagggccagaggctcctgcaggctgaccacatgtccccggcatgggaagtctcaggcctcaccag

SEQ ID NO: 15736 - DNA, 1083 bp, Artificial sequence
  DNA replication origin
gcatctgagcagcctgccccttccagggtggggacggacggtgccacctcaggcatcaccccacgactggccccaggggacatgtgctggaggctcagggtacctatgtggcctgatatccgcccctcagctcctccgtcccagaatagcacagccacagccacactggtttaaatcatttatctccatgtagagatttgagtacaaaaataaacggcaacaaaacagaaggagtgtgaaatccggggatccacagggcttctgtcctccaccttccatgcagctgggggctgcatcctctgtggggtggcttcatcctctgtggggtctgtggggcctgctccaagtcatcagcattccatgcccacctggacctggtcccagactttcggggaagccctcagcctggggctcctggcacccccgttgcggctggggaagagaggtgtggaatccccagagaaagggaaggaaaggcatgaggggccttccctggggggaaggtcacaggctgggggctaagatgacggccaggaggctcagggccagccccaggctgagggcactgtgggcgagggcggtgcgggtgggtgcagcgttgtgcagcttctcattgcacaggtcctcctggcagcactgggtggagctggtgccgctgctgacctggccttgcagggtgtagctgggtgtgcacgactccgcacagtccttcttcaccagattccccctcagaggctccactgggcacaggtgagtgtggtcaggccaggcagccacctctgccccccacctccccacaaccttccagccaacacccacaacagccagggatgtcccccagccccagggacacctggacagatgctacccacctgtgttcgtggtcttgcagaagcgagagctggccgggcagaccacagaatgcttgcagttgctggagctggtgcacacgtggcagcgcagggtaagggctggcggggagggagtccggctcagcgggcccaacagaggcctcctggtgactcagcagggcctgctcccccacctgcagagacccctcctggacagaggccctgctgccct

SEQ ID NO: 15737 - DNA, 1155 bp, Artificial sequence
  DNA replication origin
ccttcctacctcccctgccctggacacccacgggcacccacagggcaccgggcacaggctgcaactctattgagggaactatggggggaatgcagggacaaagacacaggatggtgatggatggtggggggtggggggcggggggtagcgggtggcaggtcagagacaaagtgacccaggaacggacggcagcgagagaacaagacccacagagacagagaagtgaaagtgggagagatggaggcacagcagcaggaacagcagggccaggaggccactgggccccgttgcggagggcagacctctgcctggcggggggcagcaggggcagcgcccagcgacagccaggctggtgggcgtgggccaggcagggtggggcaggtgcccgtcctgggctgacgcttgcacagagccctgcagaatgccgctggctggcggactgcccacccccgcccagcccgtgcctataaggccttggcaatgcaggggcccgcactgctcccagacgacatcagagatgaggacagcattgctgctccttgcagccctggctgtggctacagggccaggtgaggggctgggccaaggggacgggcgggtgggcggctgtggcctgtgtggtcaccaaatactaggagcctggagctgacgacatctaggcacagagaaccccgacactgtgggtgctagactcttcaaatttaaaacaacatggagcccgaatcttaacgagtgtcagatttacaatgtttcagaatctgaggatcttagaactgactcctggagtcacggaccctgagagagtggagcagggggttgtcttgagatgcttctcactgggagagcggccatctagtccctgccaccagcccctcccggtccccaggtctcccccagcacagcccaggacagcccaaaggccaccaagcccttcctgtcataggctcagagcagccaagctggctgcccccggggccttagctccgtcaggccctcagaaacatagccatctcctccagggacatcccctggggtggggacaagagccagtgtcctcttggcagtcgcagagctccctgagaccttggaggaaaggcttgcaacacaccctagacaggggcagggcaggacacctcttccaagccggcccaggct

SEQ ID NO: 15738 - DNA, 1245 bp, Artificial sequence
  DNA replication origin
caagcccaggcctgactggccccagtacccacggtgctcccaaaagcctcagcccagcccaggaccaccctcctcggaaccggccctgccctgccctgggcctgttgttgtctgttcatcagccacgtggcagcggcggcaggaggctgggcccagggctgacctccatctgtgccccggctcccactcaccttcagcctagccagggcaggggcaaagcaagtctgtgggcccctccacaccactcaggtgggtgctgcccagcacaggcgagcggcagagcgtgctgggctgagcaggtggatgggggccccaagaggtgggctcctgcgcgaggcggtgggtgctcagagaccccgtctccagggaaagaaagtccctcctgtgagtataaagagggtgaaggcggggactggcctccactcaacgggcagcagaccaagaacctgctttgaggccctgggtgctggggcccagccccaaagagttcacgattttggggagactggagccgggacacctagagcaatagttacaaagtggccgggatggcgctgcccccaacgtagcaggaggggcctggagagtgggggaaggaatcccacggggagggcttctggggccctggagggcgggaggcagggctggtggagaccaggagggctcagtctctccctgcacaacgcagggtggagttgctgcctccacagcccgggccttctgcccacagggctccccaggcaacttcgagggccgggtcctcacagtcctcactctgtccagtgctcacctcactgctgccccagctgccctccctgcctcggagtggcctctgcctctgcctctgcctcacacaccccatcagcccacagccaccccgagcccttgcagctcaaggaccttctgcatccccggcagcaaccctgagcccagagccaggagagtaggaccagcacctgcccttcctacctcccctgccctggacacccacgggcacccacagggcaccgggcacaggctgcaactctattgagggaactatggggggaatgcagggacaaagacacaggatggtgatggatggtggggggtggggggcggggggtagcgggtggcaggtcagagacaaagtgacccaggaacggacggcagcgagagaacaagacccacagagacagagaagtgaaagtgggagagatggaggcacagcagcaggaacagcagggccaggaggccactgggccc

SEQ ID NO: 15739 - DNA, 1466 bp, Artificial sequence
  DNA replication origin
ctcctgccgccgctgccacgtggctgatgaacagacaacaacaggcccagggcagggcagggccggttccgaggagggtggtcctgggctgggctgaggcttttgggagcaccgtgggtactggggccagtcaggcctgggcttgagacagaccctctggcccttcctcccggcatctctcccttgctgagccccacgtctcagatgccggggatcccagcaaatgtctcctgagaatgctcctggccgggctctccctgacacagtgccggggcctggaggatccacctacaggaggggttgcctggtggtgcctttagaaaccagggtgcaggcgggagccccctggggcagccccacatttgcatctggtgcctggccctggctggagcttggtggggacgtgtgtagtctcacttgccaaggcaggtgacccaaaggtccatgcccccacccagagagaggaggtttcctccagctccaaggccctgtgtccatgggtcacagtgagaggcatgggcagcttgggggaaggtgcttccaggggccttgggaggcagagctcagggcttggtggcggggtgatgactcggtgggcatggcaggtggggagggtgactcactgtggccaggggcatgagagctgctggaaaaacaggtttggaattcctgctgggtctggtggagctggagggtccgggatgtcaggtggcctgagagtgggttctgagtgtggggccatgggggagtgtgctccccacacctggggctggaggagggccctgcacacctggctcacccccgtgggacacctcaggcatcactgtggctgcgtccctgccaggcatgggagccggagcggggttccagttttgtgggatgagggcctctgacctggcagggctgcccacgaggatgagctgcccatcccaggtggtcctagcaaaagcatgaacagcagccctacacagttcactttcaggagaaagcgggtgcttctgatgccaggagcccttggacagctgagcttctggggacagtgcagtcagggagggtttcttgtaggcagtgacctgactagagcctcagagccagggattggaatgtggagaggagacactgtggcccctcatgtcagtccctgcccagtgcttgttcactggtgaggaagtgagggccagagagctccaggcacgttctggggcagaacctggtggggtctcaagcacttctcactatcaccgccagcctttcccccctcctccctcctctgttctctagggcctgggccctcccccactccacccctcccactcagcccctggagctggggccctgggcctggttggtaccatcagggtattggcagcagaaatgacacctgggagaggcgacgaaggggcctggggcagggaaaaccaccgccccaccccgttagccttgccccctgctccctgaaccaggaa

SEQ ID NO: 15740 - DNA, 1217 bp, Artificial sequence
  DNA replication origin
gatagatgagtagatggatggatggaagatggagaacggatggatgaagtgtagatggaaggaggatggatggatggaaggtgaacggatgagtggatggatggatggatgacggatgggtagatgagtggatggatggatgggtggacaaatggtagatttttttattattattatactttaagttttagggtacatgtgcacaacgtgcaggtttgttacatacgtatacatgtgccatgttggtgtgctgcacccattaacttgtcatttagcattaggtatatctcctaatgctatccctcccccctctccccaccccacaatagtccccggtgtgtgatgttccccttcctgtgtccatgtgttctcattgttccattcccacctatgagtgagaatatgtggtgtttggttttttgtccttgcgatagtttgctgagaatgatgtttccagcttcatccatgtccctgcaaaggacaggaactcatcattttttatggctgcatagtattccatggtgtatatgtcaaatggtagattgattgatggatgactggatggatggaggatggatgatgagtggatggagaatggatggatgagtagatagatggatggatggatgatgaatggatggaggacagatgggtgagtgggtggatggatggaggatggatgatcagtgaatggaagatgaatggatgagaagatggatggatggaggctggatggatggaagatggaggatggatggatggaggatggatggatgaaggctggatggatggaaggtgggcagatgagtggatggatggatggatgggtggacaaatggtagattgattgatggatgactggatggatggaggatggatgatgagtggatggagaatggatggatgagtcgatggatggataagtgaatgaatggatgggtagacagatggtagattgattgctggatgagggatgaatagatggatggagaatagacagatgagtggatggatagatgggtgggtggatgagtggagaatgagtgggcagatggtagatggatggatgcatggatggatggaggatagaggatggatgagcaggtatgtattgggagcaaatgaaggcaggggagtgggggaggaaagtgaggtgggccctgtgctcaccagccttgaacctacctcatggagctaagggttggcagccacaagtt

SEQ ID NO: 15741 - DNA, 1280 bp, Artificial sequence
  DNA replication origin
cacccagcagcccacagcctctgcctgcaggagcctctgtgtccagaagccaggcatggcaaggaggctgtttccacacaaagctgaccacagcccctcgccacaggggaagagctggggcacagggagccccactcctgggttggtgagtgctcagctgcacccctgggccctccggcttccacatcactaagtcagcagctctggagggcatctcctgcacaccaggcatcatggctctcagatgccacagtgacagactgtccctgccctcgagtgggcaggtaagagtgggcacagcaggcaaagtgacaagctcatgtgggctgcagcgcctggccaaggtgtgagggaggcaggagggtaggagggacaggcctcgggggccgtggctggggccctctggaaggcaccagtgtctctgacaatgaggtcaatgtgcaaaggcccggaggtaggacagggcttgatggcctgagaggagacccgggcaccgagacagaagggggtacccagccccccgagatggacagagcacacagaccgcccagtcagggcccagaggcaggacagggaggctgagagtgtgggagagcactgagggggtccaggggagggactgcatccaacccaagtgcagggtaaggagtgaggactgcagggcggggcggtgcaggcagaggcaggcacagcccccagccaggaggaggcagggccagactggggccaagggagaggcagagggagggtggagatgtaggcctctgggggcccttgcatggcctctgcgggtttgaggaggagcagtttgggggagaggtggggctgaatgggttggaatgagttacccctgaaatgcccgagggaggtctgggtccagggaggagaggccaccaggctcagcagggctcaggctgagatgtgcgggacagtggaacccagagccagcattgtggttagaccctgctgtcagcagtgccagctctgaaatgaaggtgggtggggctttctcaggtcccttcagtgccgacctggctccttgtgacctgggctgcccgtcagagttgctcctctgtcccgggcacagctgcatgggctcaggggctcctgggcctccatgctccttccattcggcatctcctgctccccaaggacccacccgattcccttcttatgtaacaccctcttgatcccttaagcccctggggtcctggtgagttccctggcagggcccagcatgggcctctcttccctcccctggaagcctggcctggcccggt

SEQ ID NO: 15742 - DNA, 716 bp, Artificial sequence
  DNA replication origin
agagggggagaaatccccggctccagtccctcaacccctagcctctgaaatagtgatagagggtgctggagagaagtggggggctcttcccactcgcagctggcaaagggtcccaggaccccagcaaagggtcctgcaggtattgatcttgaagcaggcgtcccctctgaagcatcccatcagcaattccctggggtgggggtagagctccctcaccagggcaggagcccaagggggtggggtccttcctctctctccagggcccggggtggggtgctgggtgtggcctgggcaaaggagggaggggggcgtggcagctgagactaggaccctgctgccccgggtggggtgtgtgggagctggtcaggctgaggggacccacgctgagcgctccaggcgcagggcctcagcgggctgcctgcagcagggcccacagctggctggctgcgatgctggcccacagggtcccggggctgcccaccaggcctgcggctgcactgcggttgcactggctaccctggcagcaggacacagagagggcgcggctgtcggaggacacagtgctgttggggcacgtcggggagcaggacttcatgaccaggatgccaccggggctggctgtggagagaggaggaggctctgtgggtaccctatgttgtgtgccaagctgcccggccccgggaaggcccgaagcctgggacccatcgatcggcacc

SEQ ID NO: 15743 - DNA, 1017 bp, Artificial sequence
  DNA replication origin
gctgcccggccccgggaaggcccgaagcctgggacccatcgatcggcaccacgggcacagcctgtgtgtgctgggagaccctggggaggcccctgcctgcggggcttggggtggcggcttggaggagtgggtttcagagagaccttctgctgcgggccaggtccttcctctggcataaggggacctgtctctcctcagaccaggctcctccatgacatctggggccaggagcaactgagtggctccttcctccccagtctcactgcagagtttcagggagcagaggaaaagcccaggtcccacgctcgaccaagtcgggaaatggcgggggatgaggacggggcaggctgtcagctgcagaagctcatgtcccgtagggaaagggaggcagggtcggccaggggccccggggagcaggtgagaaggagcgggctcgcggcctcaggcagcactgctgtctgtgtgagactccgccagcttctgcacccgcgctgtgggggccgctcagagcccggcagccttgggtaaaggggagctgcttccctgaacctgcactgctcagaacattctggaagctgtgaccctgacccaagggtcctcttgttgaaagctgggtgtggggatgggggcttctgtctcaagatgctcgctaggtctatgcctctgtttcctcatcgccactgttttcggtgaaaggaatgaattcctgacgagtgttcagggcagcggcgctgcacggctgaggccaaacgcacagcagtcatagctgcgtgtagctaggagcagggtttagtgccacgttctgtccagccctttcccggccctggcaaagcagagagacagagctgctgccaggtctggatgaaagcaagctgctcctggatcgaagagagcatcgcggagggaccccttacctcttgcccagtgtgcagttctttgcataagtcccatggttagtgaacctacactccgttcttaagtaaggagctgcgtttttatgggtaaaatggagtagag

SEQ ID NO: 15744 - DNA, 1077 bp, Artificial sequence
  DNA replication origin
accccaggacaccactgccctcccaaaaggaacctgcagcatccacaccctgcaggctgtcagtggcagtggctaatgcacctacgttcatcatcgcatctttctgcgagtgttagaggaagccccgcagctccccagcagtattgccaaaatagggccaagaaggggctttacagtttaaaccaaagggtgcccgtttaaaatagcaggagagagcaggtggcgtgtatgtggaagcctggaaaacgcagccctcctgggaggtgcccgcatgtccctctccgccagcctctgccctgggtgtctctagctgagcctggagctctgccctcctgacgacacaccctttctttcctctggcctcctgtggacccttcttcatttaggtctggttcttctgagctgcaggctgagcggggtcccagagctcacatgtagggcagtggcagtgacaggcagggtcggcattcaaaggctggaggagcctgggggtcatatctgaatcctgaggacctgaggagggtgggagggaggaggctctctgcagaggcagtggagaccctgagagtgtgaagcctgagaaagggcagtggggctggagacaggggggaccctgatctgaggaaggtcctgcccctgagaaggaaagaggccggggatatggttggagggggcagactgatgggctcacacccaggacggccacatatgccctgtgagaccctggagtcagagtcacccccgagcctcagtgtccatgtctgggaaggggatgagggatctctcctggtgggtctctgtcaccactgggatcatgtctgtgggggcctctagcccccataaatcacagcagttgtggttctcgcgcagctctcccggactccctgttctgtgcaggggcaggggtgttagggcagcctccctgtgtggtcctgaggacccatcctctgggccggttttctacaaatcccaatgaccacaaagtcccctccagcttggactcagagccaccccattttacggggagacagcgtccctcccagcatgccaaggtgcctggccctgcccagagacacc

SEQ ID NO: 15745 - DNA, 2172 bp, Artificial sequence
  DNA replication origin
ctttgcccctctgagccacctcctccgccttccctccaggggagcctctgggtccctggggatgggccaaagggctagggacttcgtggtggtgaccactccctctgtcccttcttgtcctgtgtgtgtgaatgtcaggctgtcagcatgagggagggatatgtgtggggcaggtgtaggctgccccaggtctcacgaagggtcttcccagccacttttcttcccacggcttccctagcacctgtaaactcatgcacacatctgcctccctgccctctgaaactgccactgggtagaggactggggatgctagagaatgtagtggagccacatcagctaaatcaggagaaagatggatggatgaaggggtggttgttaggtgggtggatgggtgggtgggtgggtaggtgaacgagtggaaaggtggatgggtgggtggatggatggaagggtgaacgggtgggtggtgggtgggtgagtggataaaagggtgggtgggtggatggatggatggatgggtggtcggaagcatgggtgggtggataagtggaagagtggatagtgggtggatgaatggaagggtgaatgggtgggtgagtgggtggaagggtggatgggtgagtgagtggatggaaaggtggatgggtgaaagggtggatggatgggcaggtgaatgggtgaaagggtgggtggatggatgggtgggtgtaagagtgaatgggtgggtggatgggtgggtgcgtggatggatgaaagagcaaatggatggatggaagggtggatgggtgggtggatggctgagtgggtggatgggcaggtggacgagtagaagggaggaggggtgggtggatggatggatgggtgaatggatgggtggatgggagggtagatgggtgggtggatggtggatgaatgggtgggtggatggatggaagggtgaatgggtgggtgggtggatgggtgagtgggtggatggatagaaggatggatgggtgggtgcgtggatggttggatggatggatggaagggtggttgggtgggtgggtggatgggcaagtgggtggatggaaggatgcatgggtagagtggcaaatggtggagagaagggatggggcagcatgacgcatacaaggaggggtaacttcaaggtgacctgtgttatacttcttactgtccccatcttctgtctgaatcaaagtttcctcacctaccaaatgggagtaataacagcccatgctgtggtcttttgggaggatgaaatgatgaaatgcacaaaacattggcccctgccccacccttctttactggaaaaggattgcaggaagctccaggcagggaagccagaggcagctgggttgcctttcctagggcaggtgtggctctggggacttcacatacagaaggtgcttaagggctgttgagagggctatctgcctgaagcctgctggtgatgcccataccccagccatgtagggatctgcagccaggccctggtccaggctgcaagtgggaggaacatgggtgggctgtgttcctggctggcacctgtgtgctgtgtggttgcccccagcttccaacgacattgaggactgggtccacgggctccatggacaaggctgagatgtacagtcatggggacctatggaagaagggcaaggtacaatggatgccctggggagacacttggccaagagggaacacagttttgatagagggcagggagatctgggaaggcttcctggagtgggtggccctgtagggacatgggtggtggatttctatttgtagttggaggagagacatttggacagaaggtgcagcaaggaagagggaaggccagattgttcagggtgtgaggccccaggagctgtgacagggcgtgacagtgggtggagaagccagaaacaccacatcctggtgtggaggctgtgctgcctggaaaggcatctttgagccttttgtaccaggacttgggggtggaggtagtgagaaaggtgccctatagggggtatcctgtaggtggtgtcctgtaggggtgtcctgtaggtggtgtcctgtacgagtgtcctgtaggggatgtcttgtagggagtgtcctgtaggggtgtcctgtaagggtgtcctgtagggggtgtcttgtagggagtgtcctgtaagggtgtcctgtaggggg

SEQ ID NO: 15746 - DNA, 1252 bp, Artificial sequence
  DNA replication origin
cttggtcccaggactctgccagacacacacatgcccctttaattctggggacaacttagggctggagggatcatgattcccacttcatggaaaaagaatgttaaggagaggaaggagatggccatgcagcccacactgcaaaacctggtctgccagagcccagagccaggcacctcagcacacagtgtggtcgtggcaggggagccacaggtcctaccctcctcctgcctggtccaccgaatctgactccccgaagccgctgggcctccctggccctgctcttgatgagaggcagcggagcagctaagctctggaatggccctcatctcccctccggaggcaggacagcttcctccctccctcctacaccagcctcggtcagtcgcgggggaagcgccggggggctggaccaagcctggtgcactctggggttggtgtgtgagtgcagtccaaacagtgtgcaggtgtgtgcacaagtgtatgtgtgcttacaggtgtgttcacatgcaaatgtgagtgtgaatgtgactgtatgtgagtaaatgtaaatgtgtgtgtgagtaaatgtaaatgtgtgtgtgtgcaaatgtttgagagtgaatgtcagtgcatgtgtgaaagaggatgtgttatgtgtgagtgcacatgtgagccagtgtgtgtcactgatgtgagtgtgcttgtgtgtgtacgtgtgtgagtagatgtacgtatgaatatgcttgtgtgagtgcttgtccgagtgtgagtgtactgtatgaatgcactgtgtgagtgtgcgtgtgcgggaatgtacctgtgtgcatgtgtatgtctgtattgtgaatgtgtgtgaatgtgcatgtgagtgcagtctgtgtgtgtgttgtgtgtgagtgcgtgtgtgtgtctgtgtattgtgtgtgagtgcacatcagtaagtgtgcatatgtgtgcacatgtatgcatatgcttgtgagtgcatgtctgtgtgtgagtgtgcatgtgtgggagtgtgtgtacatgtgtgcatgtgcttgtgtaagtaacgtctatgtgtgtgaatgtgtgtctgtgtgtattttgtgtgaatgtgtgcgtgtgtacatgtgtgggtatgtgtgtacgtgtgtccctgtgcttgtgtgtgagtacacgtctgtgtgtcttgtgtatgtgagtgattttgtgtgtgtgagtgtattttgtgtgtgtgtgagtgtgtgtgtatcgtatatgtgtgtgagacaggaagaggtgcagggctgaggcc

SEQ ID NO: 15747 - DNA, 889 bp, Artificial sequence
  DNA replication origin
cttttcatgcttagaacgtccttgcccaaaatagaagcaaattcgcatgaagctgagtaattttccactgaactctttgatccctctgggtcctgataacattcagttgccacaggcttcaagggaggcgggggaagcctggctgggggggcgttggcctctgcctcacgcttcctcccctcagtcccagcctatcacgtccacaaggtccagcaaggaccaagcctggacagggcacggggacatgcgtctctctccaggacagcgctgcccgactgtgcctgtccagggcctgtgcttgctcttccatgggccgaatggtggggtgtaaggtggaggagcacagtcgggtggaggagcacgctggtccggatggtggggtgtggggtggaggagcacagtggtccggatggtgggatgtggggtggaggagcacaggtgggtggaggagcacgctggtccggatggtgggatgtggggtggaggagcacaggtgggtggaggagcacgctggtccggatggtgggatgtggggtggaggagcacaggtgggtggaggagcacagtggtccggatggtgggatgtgggatggaggagcacagtcgggtggaggagcacgctggtcctgtcccgcccactgcgcttatagcctcctgcgtgagctcaccgtccagccaaaggtgtttgcgtgaaatgaaggcggaaggatgtgcccctggggtgaaaggcctcagaagcatccagggtgggcgaagggaaacgctgaaagccacgtgtgctcaggataggcctcacctgcctgggggctgtcactgtggcaaactgggtccttctggtgactcatccttgttttcctgggtggaacttgactgccagccccacccgtgg

SEQ ID NO: 15748 - DNA, 983 bp, Artificial sequence
  DNA replication origin
gaagaccctcaccagtgctgacaccttgatattggacttcccagttctagaactttgagaaatacatttccttctttctttttcttgttacaaatttcccagtctttagtattctgttttagcaacacaaaatgaacaacaaggatggcgggactgtcggtggggatggcgataatagtaatggtggtgatggtaacggtgataatgatggtgatggtggtggtggtggtgatgattgtggtggtggtggtgatagtgatggtagtgatggtgttgatgatggtggtgatggtggtggtggtggtagttatgatggtggtggtggtggctatgatgacagtgatattgtggtggtggtgatagtggtggtagtgatggtgttgatggtgatggtgttcttggtggtggtggtggttatgatgatggtgatattgtggtggtagtgatggtggtggtgatggtgttgatggtgttcttggtggtggtggtggttatgatgggggtgatggtggtggtggtggtggtggtggtgatgatggtggtggtggtggctatgatgacggtgatattgtgatggtgatagtggtggtagtgatggtgttgatggtgttcttggtggtggtggtggttatgatgcgggtgatggtggaggtggtggtggtggtggcggtggtggctatgatgatggtgatattgtgatggtggtgatagtggtggtggtgatggtgttgatggtgttcttggtggtggtggttatgatgagggagatggtggtggtggtggtgatgatggtggtggtgatggaaggggtaatgatggtgctggtgatggtgttattggtggggataagagtggtggccgtggttttgctagcagtattggtggcaaaggaagtggaggagagtgtgttgcagtttttcctgccatgagtcagtaacaagttgtgattaaaggcccaaccttcagaatcctacacacttggg

SEQ ID NO: 15749 - DNA, 858 bp, Artificial sequence
  DNA replication origin
ggttttcatctctagtcacagagcaaagggatgatgacctcaaagcatgcagtgtgactagagtttgaccttctttagtgggaaatggagcaccagggaaggctttgagccaagagtggcatgagcgagtgtggcttggagggtcagcgtctgcagcaggggaaatggtggtgcagtgcaatggaagtagctggcatcactggctggggcaaagcctgcattgagatgaggcagcaggaacagagcatacaggggtgattctgggtgggcagaacttgagagaccaactggatgtagagagaaggagataaggaatcaaaggggtgcagggatgtttggctaatttgggtgttcttcttaatacatgatgtggggatgcaggttttggtaaggaaagcctcagggcaaagagagcagctaagcggccaagtctttgggacatacagggggcataagtagtcttcaaaaagagtcggggaaaggtgaacattacggatggaacctgtctgacactacccacttcgtggagtcacagccaaagagcaggcgatgctctgcaaactacagtggtgtctccagggaaagacatacaagaggaaaaggggtgcaggttgctgggaagagtgtcctgagttgaggcagaagggcaaaagaaagagtataaaggcggcaaacaggtgggttatgacaggtcacggagctagaacaggacagaaatagtgaaagtctggagacatcaaacagccagcagggatgcaagtatgggatggggttgggagactcgtgattctgggtaagtcattcatgtcattcccgggctcagcacattgtggtggttatcaaaccccgcattcccct

SEQ ID NO: 15750 - DNA, 1278 bp, Artificial sequence
  DNA replication origin
tacttgcctgaacttgggtctctctctctcttgtcctttctctcggctgaccttacatattcgtgtgcaagaattaagggaactacacacttgaggtaagggcgttgcaggcaccatctgctcaggtgttatgcttcacttttaagtggcgaaaaacacaaactggggcagcaaaaacaacgcattcaaaacatgcataaagacagagagaagccgggtcctcgagggccccggatgtgtgactgaagacaacggcatctggtgctcatgactgatgggaagggcctttgcagctgagcatggcagccaagtggccagaggtgccctgcagcctgggatgggaggggagtgggtggggtaggcaaggagaccagggtagactgggacctggtccgaacagagatggaggggcctgagcctgggcagaggcagcaggggtggggaggggacaggtgggtcatgaggtggattcagggccggcacatcccctgtagcctgtggggctgtggcaccagagggtcttggctgacagtcgggtccatggcgaggtgccgagggcatgcggcttggagcaggagaaaattatagctgctttggttgaaggtggttgggcaacaccctggagggaatgatcctgggacacatcttgggagggagagttggaggccaagatggcggagggaagcgacaagggactgggggtgacaggaaggggaggggcttagcaggggatgcagggagagtgagaagcgagggaaggagaggtgaggagagaagagacagagcaggcaggcagggaagaaaaagagaggaacgtctataggaggacttagggtacaatcatatcatagtaattaacacgtctctagcactgactgagccaggctttgttctaagggctttataaatatctcgttgttcctcacaacgagcatcaaaatagagacgctgtcattttgcagatgaggaaacagaggcagagaaagcacatagacagcgagtgcctgtgccggggctggagcactggctggtgccccatcattctgcttttcagcctctgcatgcccttccacttctaggcaatgggaccggactgtggagaagatggttagagctctaggaagctcaggggtgtctggatgggcgactgggagtagaggggaacctgggggatggtggctcccaggggagagacagagaagagcttcctaactgtgcaggagaagctgaggcatggggtgtgctgccgcggcttcagggcccttgggcagtcgtctc

SEQ ID NO: 15751 - DNA, 1531 bp, Artificial sequence
  DNA replication origin
tgaaagctccatatttagggaagggggacagttggggtagtcaccccagggtgcttcctctggcctagcaaaaagagccatctgggagcacagggtctggctgtgcccctcccctcgctgtgctgcctccacaggtgcctgcctctctgggccccaaggctgctggggatgcctgggagcctgaggcctgcacaggctgatttggatgtcagaggcaccacccccaaaggcttccagaacaaaggctctgaaagctgggggtggttggtggaaactgaagaaggaaggagcccctgctaggccaagggaatgcatgagagaagtggagagtccctggggaggagtggcatctggagacttcagcatcctctgcccttctcccttcgcaggctcctgggtgcaccggcttgcaggccactcgcctccccgccccccgccccccgcacagaccagagcttggggctgcacaagatgtgaggaggcataggcagggggcgggggccagaggcgggagcaagtgcaggcaggtggcggcaagtgcaggcaggtggggcacagagaatggaaaaagcatggggtgagaagcagacagagacagatggagagctgggagcgcgcaggccgggagagcgcaggctgggagagcgcaagggagggagagcgcaggctgggagagcgcaggccgggagagcgcaggccgggagagtgcaggggagagagagtgcaggctgggagagcgcaggggagagagagtgcaggctgggagagcgcaggcggggagagagagcgcaggccgggagagcgcaggccgggagagcgcaggccgggagagtgcaggggagagagagtgcaggctgggagagcgcaggggagagagagtgcaggctgggagagcgcaggggagagagagtgcaggctgggagagcgcaggcggggagagagagcgcaggctgggagagcgcagggaagagagagcacaggctgggagggcgcaggctgagagagagtgcaggctggaagagcgcaggctgggagagagagtgcaggctgggagagcactggctgggagagcgcaggggagagagagtgcaggccaggagagagagcgcaggcggggagagagagcacaggctgggagagcgcaggggagagagagtgcaggctgggagggtgcaggggagagagagtgcaggctgggagggtgcaggctgggagagagcaggggagagacagtgcaagctgggagggcacaggggagacagagcccaggctgggagagcgcaggctgagagagagcaggggagagagagtgcaggctgggagagcgcaggggagagagagcgcaggctgggagagcgcaggcagggaagagagatctgtcatcctagttgtgatcctcatgtctcagaatggagtcactcatgtcaaaatgcatgaagccggactggcacagtggcttacgcctgtaatcccaacactttgggaggccgagacggttggatcacttgaggtcaggagttcgagaccagcc

SEQ ID NO: 15752 - DNA, 1332 bp, Artificial sequence
  DNA replication origin
actgtgctgaagttggaaactctttctatgcaacatccttcttgggtcctagcaggccatgggccaagaaaacagacagcaaggccgggcgcggtggttcacggctgtaatcccagcactttcagaggctgaggtgggcggatcacctgaggtcaggagttcaagaccagcctggccaacgtggtgaaaccccatctctattaaaaattcaaaaattagccaggcgtggtggcaagcacctataattccagatactcgggaggctgaggcaggagaatcgcttgaaccagggaggcggaggttgcagtgagtggagatcgtgccattgcactccagcctggggcacaagagcgagccttcatctcaaaaaaaaggggagggggaggaaagggaagggagaaagcagacagcaagtgggattttgagaccagccagccatggcctgcctggcaagggagggccacctggagtggaaggtgggacctggatggtccctggctcaaggcaggggctggtcacggagggttcactggcggtggcctgagcaagcaccccgggaaggactatgctttagcccatgtgatggttaagcggcctggagggtcttgggggcaaatgcctatagggacagccatgcgctagccgtcatcaagtcacactaaccctacaggggataatgagaacaccaggaggtgcataagcgtcaggacaagtgtgaaggcatgggcccctgcagaggatgggcaaagctgtggggcagtcagaacacaacagagtgcgagcccaggaagctctaatgctcagccaaggcaggtctgtgcaccaaggctgggtccctggaggtgagacccagagatccaaggggtggatatcgggaagtgcctgcagacaccctgaccccacaggcagcaggtgcatctgtgccggggccagtcgcctccattctgggacacaccctgccctcctggccttggtggggtgatcttgggttttattattactgatgtgctgtcttgacccagttttgaggccctagaggccggtcagttccctccttgagcagccagttaagtccacacccaaccacctcctcattggcccctcacactccaggccactgcacatttgtccaaatctgccccagggccaagggccagactatcagggacagccctgtgacccagagctcaaaatcacccaaattagccaatccacagggagccccagaaacccagccaccccacctgctgtccacacaccagccacccggcagccccagctgtctgctaccctgtccccgggtgcctcatgcagccctgcctggacgccttc

SEQ ID NO: 15753 - DNA, 801 bp, Artificial sequence
  DNA replication origin
gggaaggtccgcttggaatccagcttgtcggtgtgcattctaacagactagctttggggaccgggtgttgcaggctaaagttgcagttgaggtgttcttttcttgtttatggaaagataaacatcttggaaggttgggccagcaaagagtgctatgaatgtggaggctatggtcggcctggggccctgcccctctcctcagctcctgggggctgtcagaacacccggtgcttccagttgctcagggagcgcccagggtcactgctttgttcttggaggccttagctgctccctgccttgggcctgctcaggggccccaggcctgcccagcaagtctccccaactggagtcttggggttcctttcctctagaaggcaaatctgctctttggagtttcctggggttgggaagaatgcccgcctgtgctcacctgctgctgtgggtggaggctgtgggtggaggctagggaggctgtgggtggtgggtggaggctgtgggtggtgggtggaggctgtgggtggtgggtggaggctgtgggtggaggctgtgggtggtgggtggaggctgtgggtggagactgggtggaggctgggtggaggctatgggtggtgggtggaggctgtgggtggagactgggtggtgggtggaggctgttggtggtgggtagagcctgtgggtggttagaggccatgggtggagactgtgggtggtggatagaggctgtgggtggtgggtggaggctgtggttggaggctgtgggcggtgggtggaagctgtgagtggtggggtggatgctggggag

SEQ ID NO: 15754 - DNA, 887 bp, Artificial sequence
  DNA replication origin
tgtgtgaggaggagggagtgctgtgtgaggaggagggagtcctgtgtgaggaggagggagtcctgtgtgagggggagggagtgccgtgtgagggggagggagtcccgtgtgaggaggagggagtgccgtgtgaggaggagggagtcccatgtgaggaggagggagtcctgtgtgaggaggagggagtgccgtgtgaggaggagggagtgccgtgtgagggggagggagtcccgtgtgaggaggagggagtcccgtgtgaggaggagggagtgctgtgtgaggaggaggagggagtcctgtgtgaggaggagggagtgccgtgtgaggaggagggagtcccgtgtgaggaggagggagtcctgtgtgaggaggagggagtcccgtgtgaggaggagggagtcccgtgtgaggaggagggagtcctgtgtgaggaggagggagtcccgtgtgaggaggaggagggagtcctgtgtgaggaggaaggagtcccatgtgaggaggaggagggagtcctgtgtgaggaggagggagtgctgtgtgaggaggagggagtcctgtgtgaggaggaaggagtcccatgtgaggaggaggagggagtcctgtgtgaggaggagggagtgccgtgtgaggaggaggagggagtcctgtgtgagggggagggagtcctgtgtgaggggggagggagtcctgtgtgaggaggaggagggagtgctgtgtgagaaggagtgctgctacgtaagaaggaggtagatgtgtggggggagagttggcattcggcccggtcaggactccatggcccttgttacagttgtgggtagaaatggaatctctgtgacatctcctgctcccctttcacctgccccaaggcaggtctccagtactccctc

SEQ ID NO: 15755 - DNA, 1790 bp, Artificial sequence
  DNA replication origin
ccccggcccccgcagggcgccttccgccgcgcgtggctgagccggggccgcgtgcaccgcagccgaggccgccgggtctgagcgcgtgcgcgcaggtggcgggggcgtcccggccgggggcccgcggactcaccgccgggcggacgcaggtaccagcagcctggccgagctccccgaacctcgcgcgctctggaccgcggctggcccggagcctcccaggcagccgcgcggccccggggcgggggcaggggcgggacgcgggaggggcctccggcgggcggagtcggcgagcccgcggtgggggtccccgcgccgcccaggcctaccccggctccttgggatagatggggaagctgaggcccagaagggggctgagaccacctcccagtttccccagtgaggtggcgcctgagccacggccaggcccggcctccttccacccggccctgctgtgcgcgcggcgggtgctgacctggcgaggccggacaggggaccaggtcggggtgaccgtcactgacacctggacagtcctcgttgtgttcggggtgggaagcccacgggtgagcagacgtgtttgggtgtgagcacggaggaggggtgcctcggagagtgtcggggagcagtgttgggggtctcgcctgcggagtggagctcgggaggggaggacgcaggcacccccgcagcctgggattcctgaggtcatcttgtccctgcttcccgctccaggctgggctgttccttggccatccctcaggcgggggtggggagaccggcaagggttgggaggtgggaggttgtgggtgctggcttctgcgagggcactgaggctctgccatcggtgggtgcctctcctcccgccaggccctctccgaggggctgtgggcgctggggctctgccaccggcctgttctccagttgacagtgcgtttcctttctgggtgacagggcgagcaccagggaggggtcttctgaaccccacacgggagtagggggagggtgtgcggaaatgtgagggtgggcaggtggccatgtggtcaggagggggctggggctgacagacacctgtaacacccctgtctcaaatctaggggtgcagtcaatgtggctgtgtgtgtgttttgcatgagtgagtgtgtgtggtgcgtgtgtgtgtgtgtatggaggctgaggctggggctgtgtgtgtcacgagatgtcctggccgtggtatgatggcatcgtgggtggggcttccacagctttgggggcgatggcccagctgtctctggggacaggagcctccagtaggctgtggcccgggggagtccctgcctctgggtcttacgtggggcacaggcagggcatcttcccctctggaatgttggcggtgagggcagggggttctgtctctgcagccggcacctggggccatccctgccatggcaggggctcagtaagaactgtgggacgaaagcacgggtgggtttgcccccttcaagacaggaccctctgattcagaaaacaagctgcattaggaggagggctgtttggaaaaaactctcaaaccatttatcctgtctctcactcaacacagaagacatcaacacaggagactcccaagactgctggggccaaatgtggcaggtggacgtctccccgccaccgagcaagccatcagttctgcagcggacaccagccgagtgtcctccaacaccattccggtacctgcagatagcgtcagatccagacacctacacacacacacacacacacacacacacacacatatgcacacacatgagctgcgaggg

SEQ ID NO: 15756 - DNA, 1163 bp, Artificial sequence
  DNA replication origin
aggcagagtgagtggcctctgccagtggtcctggggtgggggaatggggaatggggaatggtgatcagtcataatattagctagtctggggctgggtacaggggctcacgcctgtaatctccatgctatgtgaggccaaggcaggaggatcatatgaggccaggggtttgagaccaccctgggcaacacagtgagacctcctgtttctacaaaaaatacaaaaattagccgggcgtggtacgtgcctgtggtcagctacttgggaggctgaggtgggaggatctcttgagccagggagttcaagactgaagtgaactatgatcatgccactgcactgcagcctgggcaacagagtgagaccctgtctcaaaaaaaagagaaatctatatacacatctatatgtgtatctgtcagtgtatattagctaatctgtatctagaattttccttgggatggctcagtgttttgagcccaggcagctcccctcacatggagacctggggccaggtggggcatggctgagggggaaagcactccccattcctgatgttactcagttccgaggaaagcaccccactcagtatctgctactccccattctgtggctgggaaatgggctccgagagacaaggctgcgtgccactggtcccaccagcaggaaagggccagatgggtcgctgtactgctcctcggcctctgcacaggaccctctgcactgctggagaaagaatctggaacacacccagctggggtcgtgattctctgttttgtgagtgcatggtgttggagggggaggctgctgccttctgtcagggacagccgtgggcagaggagtgggagggacatcccgggcctggggagctagtgctgggcactgggggtaaggaggatgcctcagagaacagatctggagaggggcccgcagaggccctaaggggagagcagcaggccaggacagtgagacctgggctgacatcctggggttgggagtgggagccccaggtggccaaaaacagtgccaagtccggctggggcctatccccgcctccagggagtagcccgaggaggaaggatctccaattccttttccccccacccccctaaagtgaggttctggtgtgggggggtccctgagctgtctctgaggaagtcctagcatacag

SEQ ID NO: 15757 - DNA, 1914 bp, Artificial sequence
  DNA replication origin
gctctcacgtgcactgcacacccacgtacacagccaggcacacatccctactgacacggtctccctggggaccctgtcagcatgtccatgggacttggtcctgatgttggaccgtaagactccagggaaccctcgtcccttccgcggtcccccaaggaaggtcacatcatccaccccagaagtgagggcagctggccccacttggggcagaggcaggggctggggcaggtggaggtgcagggggtgggcctgacctgggaccaagggcacagatcaggcacgtgaggagtcaggggctcccatacactgtgggatccagaaagggctgggctttccttcctgagctgggggatcgggggacagggtctgggcggtcaggggccaaaccgcagcagggccggcagcaggctcagcagcagcccggcacccagcagggtgacgcttgcccgcagcccgccatcggccgcactgaaattgcacagaaagctctggcagcagctgatgcccatggaagccacaccaacattgacgccttctgggatggggcaggccggggaacaggtcttgctcaggctgtggccaaatgtcacgagattccctgcatgggaaatgaggctgtcaggggagagacagacggctgcagacagacagcaatggcctctgctgagccccggcccgggctagggagatggccaggggaggaaggcacggtctgaggcctggcactcaccaatgccggcactagcagacacagtcacgcagtagttgtcctggtcggagcagatggtcggcttcaggcagtacagattgctcttctggttcaagcaggagaagcacatcagcgagctggctgcggaaggaggacacacctgtctcagggaagcctccagtgtccctcccaggcctgaccccagtggacatttactgagaaattactgtataccaggccctgggctgaaggcagagcaaagacagtgacaccccaccctggccgtcgagcaggtcaagcgacactcaaacacacagtgagacagtgtggccaggccgggtgagccctctgctgggagcggcctggaaggacccctggggcgtctgctcaggggagaggggtggagagggagtggagcagggcacagctggacaaaggtctggggtccccaagggcacctcacctcgctccacacccagaagggcagccagcagcactggcaagaagatcttcattctggagaggatggccgtcctgcctggaggtcacaaaccaaagcagcctgtcctgctctggagagacacactggttagggggccgggtggtgcctcactcctccccaagaccatgcacccccactttgcagatgaggacacagacagcagaggggaagggacctgccagcacacaaggacttccctgcttctctcctgacccactcctcactcagtgcagacatgctctaggctatctccctcctgaaacctggcaggagggggctgcacaggcaagaggaggaaactcagcagccttctcagaaccacagaaaagaaggcagagtgagtggcctctgccagtggtcctggggtgggggaatggggaatggggaatggtgatcagtcataatattagctagtctggggctgggtacaggggctcacgcctgtaatctccatgctatgtgaggccaaggcaggaggatcatatgaggccaggggtttgagaccaccctgggcaacacagtgagacctcctgtttctacaaaaaatacaaaaattagccgggcgtggtacgtgcctgtggtcagctacttgggaggctgaggtgggaggatctcttgagccagggagttcaagactgaagtgaactatgatcatgccactgcactgcagcctgggcaacagagtgagaccctgtctcaaaaa

SEQ ID NO: 15758 - DNA, 2570 bp, Artificial sequence
  DNA replication origin
tcgctgatgtgcttctcctgcttgaaccagaagagcaatctgtactgcctgaagccgaccatctgctccgaccaggacaactactgcgtgactgtgtctgctagtgccggcattggtgagtgccaggcctcagaccgtgccttcctcccctggccatctccctagcccgggccggggctcagcagaggccattgctgtctgtctgcagccgtctgtctctcccctgacagcctcatttcccatgcagggaatctcgtgacatttggccacagcctgagcaagacctgttccccggcctgccccatcccagaaggcgtcaatgttggtgtggcttccatgggcatcagctgctgccagagctttctgtgcaatttcagtgcggccgatggcgggctgcgggcaagcgtcaccctgctgggtgccgggctgctgctgagcctgctgccggccctgctgcggtttggcccctgaccgcccagaccctgtcccccgatcccccagctcaggaaggaaagcccagccctttctggatcccacagtgtatgggagcccctgactcctcacgtgcctgatctgtgcccttggtcccaggtcaggcccaccccctgcacctccacctgccccagcccctgcctctgccccaagtggggccagctgccctcacttctggggtggatgatgtgaccttccttgggggaccgcggaagggacgagggttccctggagtcttacggtccaacatcaggaccaagtcccatggacatgctgacagggtccccagggagaccgtgtcagtagggatgtgtgcctggctgtgtacgtgggtgtgcagtgcacgtgagagcacgtggcggcttctgggggccatgtttggggagggaggtgtgccagcagcctggagagcctcagtccctgtagccccctgccctggcacagctgcatgcacttcaagggcagcctttgggggttggggtttctgccacttccgggtctaggccctgccccaaatccagccagtcctgccccagcccacccccacattggagccctcctgctgctttggtgcctcaaataaatacagatgtcccccagcttcctgctctgagtgtggctgccccttgcggggagaggcagagcaccccaggtttggagggtcctggggtcttctgtggtatggcccaggggggtggtgggggaggaggagtcgtcccctgagccacagccagctgcttgcctgacctcagagggagcccctccccagtgctctgccctttcttctgccccaggttcagcaggtcaagtgagttcctcctcccacagcggaaggaggtgttggggggcatggaggaaagaaagcgggtgcaagaaggagcacgctcaggctggggcagcacccagggccgtaggacttgggaatggagggtgtctgtctggacccgctggtgcagagggtacaaaagctgggctggggcaggacagacgggccggagtgtagtgagtggcctgtgggaggggcagggggctcccacgcagaagctctgggcagcagccctgacccatccgtgcctggactgcagtgctgcccgcttccccctggcaaacaggtggcagcctcctgacagaggaagccggcccaggccgccgtgtctgcagttgggtgctgtgcgctgcccagagggctctttgggctggagagagaaaacaagaacagacacccagtggaggtgtgtttgttcatttctccgggacagtgggagggagccggccagggtctcagccacttagggcccgaccctgaattttcccggctggccagaaactgtggtgtgtgtgtgtcaggatcccaggggcaccgtccagcaggaggggccggtggtcaacgtggaggcccgagattcccacccctggcagctgatgtgaatagccgggtcctcccaggtccctgaggtcaaggcaggtcaaagacctgtgtcctcctcctgggtccctgagctagtgattcctgtctgaaacacatgaatcattactgccacccatgaggggcccattgtaaccgagcgagagggcctggaagaggtcagcgggaggaggggcctgatcggtggatcagctatccctgtgcaaggacccggagcccatcagagcagcctgcagagactgagcttgagattccgtcgggagtttggattcgctgagtgggtcgctctagcattgagaaatgcaagcagagaacagagggtggaaaccagatggtccaggagcctgggcactgtagccaggaggacagagatcccggtgttcgggccccggtgtgcagtgcgttcactgcattgttcactcggaatcgcaggtggctttgctggagggacagacagttgatcatagtggagctggtgagaggaagctgcacccaaaagccatggccgggaacctggatctgactgcagggaaacagaagcgtggtgggcgctgggcgatgatggaatttctaacaaatgctttgtttctgctaaagctaacttgcgcttccatctctggcatctcctccacttcccaggtgagctgactgg

SEQ ID NO: 15759 - DNA, 1387 bp, Artificial sequence
  DNA replication origin
agcactgactctccactgcagcaggcctggggtttctggccatggctcgcctttggctcacctctccagaaggtctctggaagcttcttccccacagggtcctcccttccactgtaaccttccctggttctgggaaacaaacttgagaggcccaggcgcaccccacctcttctctttaggtctccacagcttttcctctgcctcgtccccaaggggatcactctggcctttcccctctccagtgaccctctccacaccctcccggcttcccccttcctctgagcaccccagatgccaaaggacaaggtgagggagcctttggagaaatgttgcctgacgtcactggtcccccacgctcgggggacccacacggcccgccctgcaggcagccccctccccgcaggcagccccctccccgcaggccgccccctccccacctcacctcacagctgcaggggtcggggctcggaagtgctgggggcagttcaggttgaaggctgggcagcgtgcacttctcccccagcctcctggggcccgggcatcaccggaagcggagtttgttcccactttgtatcagtcgcaaagaaagagcacccaattggacaaaaggcaagcaggctgcgttcctggcccggagtggagaagagtgagcccctgccctgtcagggaagctgaggctgggggttgtgaggagtcccgtgccgggaggaggctgcaggagcgcctcaatgcacctcttgataccacgcatgcttagcaaggcctggggactgtcctctcgggcaggacttccgccttgtaatgacatgtcgctgatttaaagggaactgggggtcaccagctctggtttgtgcaagtctggtgcgttcttatctcccttgtatttggcaggggatcctaaacctctcctggtatgttgagacatctggagctcattaagcctcggcgcctgtagataaagagattaaaggaaaaaagaaaagaaatcccgccctggggcagctggggtaggattagcctggaggccacgcctctgcagggtctcccataggctgggccagcctctgccctccctgcttccagaaccccggacgctgatggcctgtggcggccactctccgcccaccccggagcccagcctagcggggagaaggccgccggcccgttcgaatgtccctctgcttccagggtcagcctgcacgccactctcacagaggccagacgggcggtggggcggggactcagttcatcctctgcctgaggagcaggtctcgggtgcgactgagcttttcaccctttgagaggagtcagggacacgcagcgtctccagcaagctggtggcagaaactgatggagcatcctaatcacaaaataggaagagagtttg

SEQ ID NO: 15760 - DNA, 754 bp, Artificial sequence
  DNA replication origin
gtgttggagggttgcaggccaccagttgcaggctgccagttgcaggcaggtgtgtggggctattgcaaaggtccaggtggcaggttgggacaagggtggtggtgagagtgggtgcccttgtgggcatgggactctcaccagggcattggtgtatgtcctggcatgtgctgcagtcacccaccttgccctctctcccagctcagggtctgcgctgctacagatgcttggcggtcttggaaggggcctcctgcagcgtggtctcgtgccccttcctggatggggtctgtgtctcccagaaagtgagcgtctttggcagtgagtccctggggtgccagggcagagggcaggttctggggagggaggggcacttcttagatagctgcatgatggaccaaggtccccctacaagccctcagcactttgggggccggtctgtggctcctgaggtggggggtggggtggggtgggcatggcgggcaggacctgtgcagggaagggtggaagagcggcagggctgaggagcctgggccaccaaactgagcctaagggttgtgggtctgcagggacaggggatgttccgggttctagagcagggggcgcccacagggccctcattactgtggaaaccatcccagcccctcccagtgcccagcagcagggcccacaccaacttcccagtagcctcccaacgccagctgctgtagctactctggggaccccagtgacctctgccccttgtccccacttcatgccg

SEQ ID NO: 15761 - DNA, 1293 bp, Artificial sequence
  DNA replication origin
aggatcacttgaggtcaggagttcgagaccagcctggccaacatggtgaaaccccatctctactaatatacaaaaattaactgggtgtggtggtgggcacctgtagtcacagctactcgggaggctgaggcaggagaattgcttgaacctgggaagcagaggttgcagtgagccaagactgtgccactgtactccagcttgggtaacagtgagactccagctcaaaagaaaaaaaaaaatgagtaaattggcctggagtcacctattgctccagtagcaagttcctgtgaaatggaaattcaggaacccacccttgttctgggccagtcaggaagagcctgaggggaggagccgctgagggcagggcctctccctgccccaccttcctctctctggcaagcctgcagggcaagtggctgagaatcagccagagggaggaaagtgaggaggggtggaccaggcctgggagggtcctgggtgggggcgctaaggagaggaggtgcagtacagccatggggctctgggtgagaattgcagggaaggatgggagggaggaatggggactggggtgggggcgtgaggcagacagttctcctttgggtgactgtgctgaggacagggtgggagatggagagccggatgttctggctttgctgctgtgcaggactcattcgatccccaggagggtgaggagtccgagggctgctctgattcgctgaagtttgtctgtgcactagcaccctggaatgagcagtctccaggccatgaagaccttgtccctggtcctgctggtggccctgctgagcatggagagaggtgagaagcagaggggcctttagaggactttgttccagcgcactcctgctgccccgtgtgtgctggaactagttgcaggtgggtgtgctcggaaggcgtgcctgctgggggtggcgggcttcggtgttccggtggcagaggtgactggtgtgtttggtgcctgctctgtgcttgttaccgcgcgtgctggctgtgctcacttccgaggactcactgagtcctgggcacgtgtatgcctttggcattgggcagtggctgctggtgcctctggacaaagaggtggtgttggagggttgcaggccaccagttgcaggctgccagttgcaggcaggtgtgtggggctattgcaaaggtccaggtggcaggttgggacaagggtggtggtgagagtgggtgcccttgtgggcatgggactctcaccagggcattggtgtatgtcctggcatgtgctgcagtcacccaccttgccctctctcc

SEQ ID NO: 15762 - DNA, 872 bp, Artificial sequence
  DNA replication origin
ccagcctcctgcgctcctggactgggcttcaccgagggcaacccccacccccaggctcctgctcccgacgctcgctctcctcccttccccgcattccctctccctgggccctctgcctttggtcccccttccaatctctctttctaaaccctcggagcccgttctcgcccgaccctcatcccagcccccggcccacagtccggacccctctcccagcaccttctctcctgccgggctgcagggatctgcgtcctggaggaggagtcagccctgggaccgagggggcgggaccggccagcccctcctcggggctcttgtactggggcggctccggggtccccgagggcctcagcgtctgcctgcagcggcctcctgcggaaaatagcccgaggccggggaggagggggtcaaccccaatcacggatcccagcctccgcgccttggggaacgtggggccagatttggttcctgactcagggacccacggaggctgaaggagacccagagggccctgagcacctcaaagggcgcggagggcgggacgaccctttccctggggtggggcaggagtggtctggatttggaagcagacgggggagggaagaggcttcaaagcggaggaggagggagagggaggaggcggagtagggaccctggggcgcaggtgaggtttggacaacctgagatggaacaggagccggccaggcagatccaggaaggagcatagttaagggcaaatgaggttggcggggatggttaggccacaggcacataatcttcgttctttctagagtgcttggagcgctttcccctggcaggggtggcctgggaggaggggagaagggaggagaagggcaggcgcctccaggggc

SEQ ID NO: 15763 - DNA, 901 bp, Artificial sequence
  DNA replication origin
ttccatctcaggttgtccaaacctcacctgcgccccagggtccctactccgcctcctccctctccctcctcctccgctttgaagcctcttccctcccccgtctgcttccaaatccagaccactcctgccccaccccagggaaagggtcgtcccgccctccgcgccctttgaggtgctcagggccctctgggtctccttcagcctccgtgggtccctgagtcaggaaccaaatctggccccacgttccccaaggcgcggaggctgggatccgtgattggggttgaccccctcctccccggcctcgggctattttccgcaggaggccgctgcaggcagacgctgaggccctcggggaccccggagccgccccagtacaagagccccgaggaggggctggccggtcccgccccctcggtcccagggctgactcctcctccaggacgcagatccctgcagcccggcaggagagaaggtgctgggagaggggtccggactgtgggccgggggctgggatgagggtcgggcgagaacgggctccgagggtttagaaagagagattggaagggggaccaaaggcagagggcccagggagagggaatgcggggaagggaggagagcgagcgtcgggagcaggagcctgggggtgggggttgccctcggtgaagcccagtccaggagcgcaggaggctggaggtgggggacgtcctgggtgaagccgcgtccgggagcgcaggaggctagtgtgggatggggggtgcgccctgagtaaagccccgtccgggagcaggaagctggggagggggctctctgggtgaagcctcccgcaacacccacctcaccccactcaggctgagccttctggcgtcatggagaggctcgtcctaaccctgtgcaccctccc

SEQ ID NO: 15764 - DNA, 1171 bp, Artificial sequence
  DNA replication origin
gtacatttatcagggtgtgtgtgagggtgtatgtacatgtgtgagggtgtgtatgtgtgtacatgagtgtgtgggcatgtgtatgcatgtgtgccgatgtgtgtgtgtacatgtttgagggtgtgtcctcgtgcatatatgagggcatgcgtgtgcatgtacatttgtgagggtgtgcatgtgtatgaggatgtgtgtacatgtttgagggtgtgtacatgtgtgagggctgtgtacatgtgagggtgcgtgtgtatacatgtgtgaggatgtgtgtacatttgagggtgtgtgtgtacatgtgagggcatgtgtatgtgtgcatgtacatatgtgagggtgtgtgtacgtgtgggtatgcatatgtatacagtgtgagggtctgtgtgtacatgtgaaggtgtgtgcacatgtatgtgaatgtacgtgtgggtgtgtgcatacatgtgtgaggggtgtgtacctgtatgtgtacgtgggggggtggggggtacatgtgggagtgcatgtgtgcacgtgtgagggtgtgtacatgtgtgagggtgtgtgtgtgaggatgcatgtgtacgtgtgacgtgttacatgtgagggtgtgttacatgtgtgggtgcatgtacatgtgtgaggctgtacatgtgagggtgcatgtgtgtacgtgtgagggtgtgtacatgtgtgagggtgtgtgtacatgtgtgtgagggtgtgtacatatgtgggtgtgtgtacgtgtgtgagtgtgtgtgtgggggtgtgtgtacgagtgtgcatgtgtacatgtttgatggtgtgtgcatgtacatgtgagggcatgtgtgtgcgtgtatgtgtgcatgtttgagggggtgtgcgtacgtgtgagggtgtgcatatgtatacatgtgcgagggtgtgtgtacatgtgtgaggatgtgtgtacgtttgagtgtgtaaatgtgagggtgtgtgtacgtgtgagggtttgtgtgcgtacatgtgtgaggatgtattagggtgtgcctgtacatgcgagggcatgcatgtgtgcatgtgtgtgcatgtacatgtgtgagggtgtgtacgtttgagggggtgtgcgtacgtatacatgtgtgagggtgtgtacatgtgtgagggtgtgtgtacatgtgtgagggtgtgtgtacatgtgtgaggatctgtacgtttgagg

SEQ ID NO: 15765 - DNA, 1606 bp, Artificial sequence
  DNA replication origin
ttccaaagctgttgggaagttacaagtgcaggtgaccctaggctggctttacggtgaacaaggggacgcctaatttaatgccattgacaccaatgttgccactaaacagaagcccctaagactgaaactgtataggtttttgcaaaattacattcctcatccagaaatcctgtgattctagtcacagtgtcactgggggaaagacctcgatgtgaaagggccctgcccagaaacaagctgggacatggcccaggcagcccacggggccactcaggtgctactgggagggcccaggtcttggtcagaaaagattggcttttggcagaaatgcaaatcacgtttggggcccaggggctacctgatgcatttctttcatgttgcctgggagaccaccgtgagctggcagccgtgctgggaagatgcccgtgctggggccctcgctgcactacgagccaccacaaccccacagtgtgggtcagtgcctgttgactgcctggcagctccagaggggtaggagtgcgagggctcggctgggcggggtctcacagactgcagttgaggtgtgacagctgggctcctgggtggaggcccagggctgttcggatggatggcagactcttttcccggctgtagagctgcattctccgtctccttgctggcggtcagcaggacctggtctccaccgttcaggctgccatctcgcacggccccacagcactcttccctggcctctgactcttcttctgcttttaaagggctggcgtgattcgaccaggcccacctgcatccacggaccctaaggtcggctgacctgggacacacggcacatctgcaacgccccttcccggcagcacccacgggtattggaggagtggtaggggatgggggaaggaagcttgggtgggtgggtcattggaactcttgtgcatggaagagcgttagatgatcccgacaccagaaaagttggccacgtcccaggtggcgtgaagaagcactggagaaagaggggcaacccatgaaagccccttggcgggtttaatgtccagcggcaacagtgaggggcccagcggggcatgggtgacagggaccaggttaccaagggtctgggcggggaatggcagggcatgtgaggggtatggtggggaatggcggggaatggcggggcatgggaggggcatgggagggacataggagggacataggaggggcatggcggggcatggtagggcatggcagagaatggcggggaatgagaggggaatggtggggaatggcgaaaaatggcgggggaatgggaggggcatggaagggaatgggagggaatgggagaggcatggcggggaatggcggggcatgggagggacataggaggggcatgggagggacataggaggggcatggcggggaatggcagggaacgagaggggaatggtgaggaatggcggcaaatggcgggggaatgggaggggcatggcggggaatggcagggcatgggagggacataggaggggcatggtggggaatggcagggagtgggctgcacagagaccagcttgctttgctgcccagagggctgtaaagcagcccccgcggacctcctggcctg

SEQ ID NO: 15766 - DNA, 888 bp, Artificial sequence
  DNA replication origin
gaatggcagggcatgggagggacataggaggggcatggtggggaatggcagggagtgggctgcacagagaccagcttgctttgctgcccagagggctgtaaagcagcccccgcggacctcctggcctggcccctgcatcaggcggtcccccagccggcagagcaggctgcctggcccggactcttcccatgccgggggcccttctgctgtttgtaaatcagcttccccacgccacacaggtggaggcaggacaggcaacctccctaatgcgggagctgaaaaggagtgaaaaaggagtcaggcccctgctctgggggcgtttagggatttgccaactcgggctggacaacggccccgcaggatgccaggcaaatgcaccccagagaactggacaattggaaaatccccagggtgccctcaggaatgggaattcctgccaaaaactcctgttgccagctcagaaggggttgaatggtagcgccttggtcagatcccagaatgcgcccagcaggttagggaaggagccagcaggagggagcatggggtccccttgtgcccagcgcaacaactagcatgagaagaaaccacatccaccgctgaccagaaagcatttgcaaatagctttgggtggcacccccgaaggacaaggcctggccacagcaggcaagggggaccctgggtgcctatggcctatcaggaggcccggaaccaagggagcactcaggacacaccaagcaatacaggacacaccaaggagctcttcccatcccaacacagccacaggcactcttgcaccagatgtgggcagggccttgtttcctgcacaccaagcagtgctgcaggacactgtctgagcatcctacggtttaagtcatttcccaccgcatc

SEQ ID NO: 15767 - DNA, 1244 bp, Artificial sequence
  DNA replication origin
catgcttggtgatggccccgcaaatgcctctggtgtgttcagtccctaaatattccttctctcacaagagtgtttggccatctgggttaaacaccaagctccctgaaggcccagtgtctgaaggcaccaggtctccgttgccagaaacacactgaggcacagaggctggcagctgacagcctgcagggaagctgtccccaacatcctcgaactctgggatgcctcacaaggaggcccctccccccaggagtgagggaaggaacccacaggcagagccgggccagcagctgggacagggtgtaagcctggcccccacacacacagctcggagggccacccagagaaaggtgcctgcccaggagaggcaggcaatggcggcccctctagcctgagccctggaccacagttctggagacatggtgggggttgaggggctgaggatgcaccccggccccgtgaaacctgcacgaccccccacctccagcaagccgagatggaggcccagctagagcagcgagcggcccctccagagggctctggaagacacaggggacttgaagccgtggtaaccatggcgactactgtgggaacatcagggacatttaacaaaggacgacttggttttctgattttagctctgcttcccagccgtaccctccgatgcacagcccaccccttctgagacctcccccagatcaaggtcacttgtcctgtggtcctggggggcccagtgcagaggttccaatgcccccagtggccacatgtgctcaacccctcaggtagcagacaaggcccagcacccaggagggattggagcagggaccccaggtagacttgggggagatgggtgtttggagagaagggggatgaatgtgtttggagagaagggggatgcatgagtttggagagaagggggatggatgagtttggagagaaggaggatggatgtgtttggagagaagggggatggatgagtttggagagaagggggatggatgtgtttggagagaagggggatggataggagctgctgacacagggaggggggtccagccagggagaggggttcttccgccatcaccatccaccgctcacggaccacccaccgggcacgtgccccctgctatccagtcccgctcatcaaacacatgaattcatgatttatggcagattcaatgatcattctttatccctcaccatttctttttactttattcattcatttaacaaaattaccgatcatc

SEQ ID NO: 15768 - DNA, 1044 bp, Artificial sequence
  DNA replication origin
tgtgccccgctggaccaagggcttcacgcggacggtgaagttcagcccttcaaagacaacctgtcaggtggggaccacacttaaactccttcagagatggggaaacccactcagccagtgccagcggcagcttgggagctggccggcttcctgcctgtctggccctggcagcccctcagggtgggaggtgatggagaggtgagggcgtgcccttctgattgtatatgatttttcaagaaggtgggagaatttcactcctttttgtgtctttaaatacctctttcagataataaattcagcatacaaagatttatatgacaattggctcaagcctcaccccggtgggatggcctgtccacggcctccctagctggccaaggcttccctcgggggttccatcgctccagggcttcctgcctcctgggaattctcagcttctctgcagtaccccagcccccaaaacaggaggcacaagcaagagcagcacactttactgaagggtggggtgggggcgggggctgcatcacagagcaggtggccttcaatggaaaagccccttggctgtgtccagcagggaatgggcaccaatgcccaggaccgcaggcctcctctctcttcctggctcaccagccctggacccaattcctcgccatccctcatgcaaggccagcctttacaggaaccactgctttccctaaggagcccaggacccagcagtggccatgagattgggtcagccacaggtggcatgatgcagcagtggccagagaccaggcctcggagaaaccctggggtgcctgccaagcggtgtggtgagcctgggccgtgagacgagccgctggtggagcatctagcgtggtggccggtgggtgtgggaggctgggctggatgcgggggtgcagggctgaaactggagcaggaaggatcaagacatcactccaacattccccaggccaagtcttccctgccccctcaccccacggcacccagtccctccgggccagcccacagagaggtgtgggcttcctcaacccctggccacag

SEQ ID NO: 15769 - DNA, 918 bp, Artificial sequence
  DNA replication origin
atctgatggggtttattaactctgggatcttaaaggtcgacgtggactgctgcgagaaggatttgtgcaatggggcggcaggggcagggcacagcccctgggccctggccggggggctcctgctcagcctggggcctgccctcctctgggctgggccctgatgtctcctccttcccacggggcttctgagcttgctcccctgagcctgtggctgccctctccccagcctggcgtggctggggctgggggcagccttggcccagctccgtggctgtggcctgtggctctcactcctcccccgacgtgaagcctccctgtctctccgccagctctgagtcccaggcagctggacatctccaggaaaccaggccatctgggcaggaggcctggggatgagggtggggggggacccccaggtcccggaggggaagtgaagcaacagcccagctggaagggcgtcttctgcggagaaataaagtcacttttgagtcctgagacccgggtctgagcctgggtgtcgggggcgggaaagggttcctggcagagagctgggaatgaggtgctgagggagcggaggggctgggggcagggcgggcgctcagccaggatcttgggctcttgggctcagggcactggggtgctgggtggttgtgctggggctgcttggtcctggtgaggtttaggagcacttggggtgatggggtgagagctgagatgagcaagatcacagggtgggcttggggggaggtaccggaatcctgtgagcacaccacagacaccagacacgcccacaaacagtggtgcccacgcagccagcatgtgcacacacactcatgcccagacaagcatacaaacggtgcccacgcagccagcatgtgcacacacacccgtgcccgccctgctccttcacacacacac

SEQ ID NO: 15770 - DNA, 1330 bp, Artificial sequence
  DNA replication origin
cctgccgctcattcctgtccggacgcacctgcagctccccggggagaagaggacgccccccatccgctcccccacacaggtgccggcgcggggcggaggcgtctcgagctgtcacctcgccccagaggccagacgtctcccggcggggatgctgtgacggcggacgctctggagaaggggctgggggtggggctctgcgagctccgggcggaccccggccttggattccggggagaaggttgcatcctgaggctgggaaaggagagggtctttggggtctcctgaccgatgcttctcccctccaggcttgcgccccagaggacccgcgccccaagcccccgcgccgcccccaggcccacccggagcatgctgcctgcagccatgaagggcctcggcctggcgctgctggccgtcctgctgtgctcggcgcccggtgagtagggggcccgcgggctgggtcaggtgcctgggagagcccgaggcgccgcgggagagccgggtgtggggctgccaccctctgacggttcccaccgcacttcgcatagagcccacgccccctccgggacccctgcgaccccagcccggccctcggcccctctgccccggcactgggctctctccagcgctcttcctccagggcctggaactggtgggcggctggccccgcacggaagcccttggtcatccgtcacctctgagagcctcccgggcctcctttcaaatccagtttggtccttcacagcttggaacccacggacctctgggggggatatgtgaggcggggcgggagtgtgaggggggcactgtcggtgtggggtctgtatagcccgtgtgtgtgtttgtgtgtgtgtgtgcacgcacgtgcatgggggccagggaggggccataggggctcccctcaaactgccaggatggggcacagttgtcccagggcctctgctccccctccaggggtcatgggggcctgctccctcccgtggggtcgggctctcccaggagtgcctgcagcagggggatgggtggggggcgcagggggctgcctggtttggaccccagtgcctctggtcaccctcctccccatgccctgcccagctcatggcctgtggtgccaggactgcaccctgaccaccaactccagccattgcaccccaaagcagtgccagccgtccgacacggtgtgtgccagtgtccgaatcaccgatcccagcagcagtaagttgggacttagggtggtggggaatgtgctaaaagccaggctcttgagagaggtcagaggtgtcctcggagcccctctggcctgggacgagagtgagagcgtggggcggcaggc

SEQ ID NO: 15771 - DNA, 706 bp, Artificial sequence
  DNA replication origin
acacacacacacaaacacacacacgggctatacagaccccacaccgacagtgcccccctcacactcccgccccgcctcacatatcccccccagaggtccgtgggttccaagctgtgaaggaccaaactggatttgaaaggaggcccgggaggctctcagaggtgacggatgaccaagggcttccgtgcggggccagccgcccaccagttccaggccctggaggaagagcgctggagagagcccagtgccggggcagaggggccgagggccgggctggggtcgcaggggtcccggagggggcgtgggctctatgcgaagtgcggtgggaaccgtcagagggtggcagccccacacccggctctcccgcggcgcctcgggctctcccaggcacctgacccagcccgcgggccccctactcaccgggcgccgagcacagcaggacggccagcagcgccaggccgaggcccttcatggctgcaggcagcatgctccgggtgggcctgggggcggcgcgggggcttggggcgcgggtcctctggggcgcaagcctggaggggagaagcatcggtcaggagaccccaaagaccctctcctttcccagcctcaggatgcaaccttctccccggaatccaaggccggggtccgcccggagctcgcagagccccacccccagccccttctccagagcgtccgccgtcacagcatc

SEQ ID NO: 15772 - DNA, 1159 bp, Artificial sequence
  DNA replication origin
tccaaccaaagggcttgctctggaatccctgcctcaggctctgcttccgggacctcagaccccgtgggggtccaggtctgcccaggaccactgtgagtttcacatctgcctcctgctcagtgggcagactttgggagtccattattctatttacttctttctttatggactcagatttcttttactttcttgcgagctctgtatgttttgaaaagaattgtgtttgaaccttgatctagctcttgccctctgcaccttatgaatctcaactcctcattcagttctcggctaaagtatcaggtcctgggagaagctctccctgaccctgaggcaaagcacgctcctgtggtggtctcttgtccatctcgtccttgcctccacccctctggagccacaatggagcggaggtgtgcagtccctgtagcccaagctgcttgggttcccacttcagctgggtcacctgtcacctgcgtcactgtgtgaccccgagcagggagcgccgcctttccgtgtgagtctcctcatctgtgagatggaaatgatactatctgcacagcagggctgtggtgagactataaggagataataaatatgaagtgtctagaacaggtggaatccatagtacatgctcaataaatgttagctctgtcacatcctgcaaagatatgctgcagtaggcatcaccatttgtccaaggggagagtcaggagggcagaaaccaggtctctctcctcatgccctttcccagggctcagggcagggctagggcagcagggagcatgcagtaaacattttcaggtcaaatgaaagggagcaggaccaaaggcacgatggcagatcggggcttccccagtgccccggggaggcggatttcaggcacagggacacgtgcaaaggcacagcttttagggagctggagggcagggcgggaaggccaaggaagccgagaaacgggtccaaggctcggatgctctggccaggatttgtacctttacctccgagtgtgggagtatttggcgacagaagcccctggggctgcggcttctggtgggggtcttcatggatgctcaggggaggagaacggcctggagccactggaaacggggaaacggggaaacgggtatgaggttggggaggggcggggaggagggggagggcg

SEQ ID NO: 15773 - DNA, 747 bp, Artificial sequence
  DNA replication origin
ggggaggacgttgcagagggaggaactgcatgagccagggttgagagggaggaaggtgtggggtagggggtggtggagatacaggaggaagtggcaggtgtgggagcaggtgtgagactgtggctggtcctggtaaaacttcctcttcaggcctcttcctttatggccttgaccctggacccagggagggtaagcagtaggatgatgggcaggaatggaaccgggagaggcgtcagtgcagccaggggctctgcgtcgggacctgccccggctgccggtgacagcaacgtccacaagatacccacctgtaaggagccgacggtccctggtgggacaagatccacatggaggggctgcacccctgtggcctcccagagccccggtgtcccctcatgctcctgtgctccccagagcccctgtgccctccacacacctgatctgggggtcagagggaacacttaggccgagaggagaagctgagaaggagttagaggggtgcagggtgaggtggggttgggggagggaagagggagtgctttggaagcaggaggctcagtgggattttgctggaggatacctgtgggccctgcctgggaagaggtggctctgggacccttgggagtggcttggctaaaggggagggaggtggcttggcaggaacaagaggagtggagatgggaagggcccagagtgtgaacccttgctgggattccagccaacctatgtggatgacggagagcaccctag

SEQ ID NO: 15774 - DNA, 1474 bp, Artificial sequence
  DNA replication origin
aggcaggtgtgggcgcagagcaggctctccacggagtgcaggaggtggcgccggcgaggtcgccaggcgtgtccggagcggagaagtccccgggtgtaagcggccctttcagccctggcagaggaggcacgcccgggacgctggaccagccgtgtggcagggaggagagggtcttccgacagagaagcgagccctggcgcgggccggaggagggaagaccgggcaggagccgcggggagccgggccgcgcggggaggtgcgggcgcagagctgcgctccagggaggcctcccgacgcccaggccggagccggggaagaagcctcggagaagaccggcgagcagggaccaaggggaggcggcctcctgaccggtcaatcctggtccccgcgcgctggagaggaggtgtcccccgaggcaggggttcaagcaggtgaaaagaggccgcccctctgcccgcagtggggagcgcgcccccagggcctccgccgtaatttcccttcccggggcgcctgggagaggcgggcgggttttgcacagggctggatacgcaggttcatcaggacaaagaaaacccaggcagcaaagtctgaggcttgggaccgaggagggaaggaggcaggagggagtggacaggggagggcaggggtctcctgagcaccgagtgggcgctgggtgggcctcctctctgttctgaaacttccggcgtccggccaggtccgtgctccagaatcgccctcatctcctgactcactgagagcacaagaatcgctcagggctcctgggccaactccggctcagccccgagggacaggcttggaggcagagatgtggggcatgggaggactggcaggtggaggaaaagggcctggaggggagaggtcaacaaccagagggagatgttggctgggtccacacccaccgtggggcgtccacacgcgctgtgggttaggctgtctacactggtgggagcaggtggaacagatgcccctgtcctcagtgtgaggggagtgggcaggatgacggggcacaaggatgagcaaggagaggtgctggcccagcagacgcaggaggcgggaggacacgggattttgagcaatgggagggaggtgataggaattatttgaagggggcatcatggagcccagacaggcagaaagggtctaaagatttaaaccccactccagcagcagctacatcatatataaaaggatgaataaagccaagggtatacagcttacaagaaacatacctatcacatcacccagagagaggacagttaagcacccaatgccaaccagaaagctgatgtggctgcatttccagcaggcaaagcactttggaggtaaatgtaattactggagatgaagaagggaatttcacagtaagtccaattcagcaggaagatgctggccttaaatgcatgcactggaggagaaggctgaaaattaattggctatgcatccgtctcagaaa

SEQ ID NO: 15775 - DNA, 797 bp, Artificial sequence
  DNA replication origin
tgcctgtgatcagtcccgggaatccgagaccacttccctgtggacagtatggccaggcacatgcctcctgcatcagagccggaaaagctgaaccctgagaggaacgacagtcaagggcaccctgcagagaactggactcccagacagatgacggtgccacccagctagaccccagccagggctgacactgtaacacacacacacacacacacacacgcacaaacatacattcacacccaagcagcttaggattttgtggtttcacatctgtgctatgtgaagctccttgcgaggggatgactagtgggcagtgggagggcacagaccagctgggacccctgggtgggcccttcagtgcccactgcgccctttagcctctgtgctcaggctcaggggccaggctcccttgccagtggctgcaggtgctagggttagggttaggcttggggttaaggttagggtagaaatccctttttactgctctcaattggttcccagtcctctgttccagggtagagacgctgaggtagggaagggtggggtgagatttggggtggagtgggtgggacctgctggtcagttgcataagagggggcgcagggatgattcgctccccctcctgggacacctgggcaggggggaagacgggacagggcaaggaagggcagggtttggaggaggaccaggtgttggggcgggacaggcaggtgtgggcgcagagcaggctctccacggagtgcaggaggtggcgccggcgaggtcgccaggcgtgtccggagcggagaagtccccgggtg

SEQ ID NO: 15776 - DNA, 726 bp, Artificial sequence
  DNA replication origin
ggaggtggcacctgacctgggtcttcaataatggcacctcagccccaccccacccttcgttcagtaaggacacctcagccccaccccacccttcgcccagctgcagtgctggccaagaggagaccctcggaagctgttcacggagtgaatgggagatggaggatgcagggccagtgggcactgggttggctgggaagcgagccctttggggagaggggctgcctgcagtgagggaaggtgggagaggaagcagctttgagggtggtgtgaggtggagggtggctctgagatgagaggtgtggtctctggtagagggtggaggagagggggcaggctgggtcatgggggggatggatagatgagactcccccagttcaaccccagggccaggaccccgagcccccagccctcaagaggcccagcttgctgaagtccacgtcccctgtcctgcgggggatcttgctgttccaagtctcaggaggactctgggcccactgggcttctgctgggcaccaggaagtggttcggggagggggtcctggacgcccctctgtgtgggagaccttgtgactgtgctgatgtgacagaaccattgggggcagcgagcggagggtcagtatacataacccagtgccgtcggtgtaaatgttcaaacatgggtttaaatgtttagcaaccccccaaaattatgaaccccaggacatcccccacacccatgctcaggca

SEQ ID NO: 15777 - DNA, 736 bp, Artificial sequence
  DNA replication origin
ctgtggggcctgagatgcctggagaccctcagcagacaccctgacaaacacccggggccaaacatgggggcacccagcagagactgggagaggtggcatctgtggggagagcccacgggggtggggggtggggggtgggagtggggagagcccacgggggtgggggtgggggtggggggtgggagtggggagagcccatgggatgggggtgggggtggggggtgggagtggggagagcccacgggggtgggggtgggggtgggagtagggagagcccacgggggtggggggttggaggggtccacgggggtgggagtggggggagcccacgggggtggggggttggaggggtccacaggggtgggggtggggggagcccacgggggtgggggcggggaggagtccacagctgaggttgtggggagagcccacaggggtggggagagcccagaggggtggggatggcctgagggtcatatcttagcccatttgggttctataacaaagccctcctagaccgggtaatttatagacagcagatatttagtattcacggttctggagggaacagaaaatccaagatcaaggcactggaagtccaagagcaaaaggcccagcagctgcagtgtctggcgagggccggcctgttcctgattgactgatgtcctgatcccattgtgggacagaaccttcccggctaaccacctcctgaaggcccactcttgatactttcaca

SEQ ID NO: 15778 - DNA, 1483 bp, Artificial sequence
  DNA replication origin
tgtgtccaggacacagggatgcggaagccccatcccgctctgtgatttgacaggaagtgtgtccaggacacaggggtgcggaagccccatcccgctctgtgatttgacagtaagtgtgtccaggacactggggtgtggaagccccatcccgctgtgtgatttgacaggaagtgtgtccagtacacaggggtgcggaagccgcatccttctctttgatttgacaggaagtgtgtccaggacactggggtgtggaagccccaccccgctctgtgatttgacaggaagtgtgtccaggacacaggggtgcggaagccccatccggctctgtgatttgacaggaagtgtgtccaggacacaggggtggggaagccccatccttctctgtgatttgtcaggaagtgtgtccaggacacaggggtgcggaagccccatcccgctctgtgatttgacaggaagtgtgttcgggacactggggtgcagaagccccatcccgctctgtgatttgacaggaagtgtgtccgggacactggggtacggaagccccatcccgctctgtgtgatttgcctcccggcacctctccctgtgaggtcccaccccacactgctgtgtgagctcaagaggggcttacagcctgggcttctgcagccagagactctggctgggacatgagggctgcgtcctggggctaaacacagagcttcataagtcaggctggagaagaggagcgggtctgggcaggtggggagaggaggctcaggctgagccccacgcagtggggacgaacgggagactgctggtggccactgccattcctggagggctgggtgaggctgggggctagggctctccatccaccctccacccaagcccactcacaaacaggagctcaggtggccctgccacccctgctgggccctcacctctgctccttacttccccctccgggggcccatgctaaagtgcgcaggacagtgcagtatacaggagcttttgatcctcaagtggagcagccctggctttgactcccagacccctgtttcctccgggtcgttgtgagccagaatagaacaggcatcagatgagggctgtgggcagtcagaaggggtgtcctgtggcacaggggcagcatctcacccaggctgggggtacaaggggctgatgtgcacactcctgtcctgggcccccaggctggctctggagtgcggctgccggggatcgcaggctggctctggagtgcggctgcccaggaccaactgtgtctccctggagtgtggctgcctgggaccaactgtgtctccctggagtgtggctgcccgggacccactgtgtctccctggaaggctgaggctctgaggttgggtaccatttccagcaggtggctggatatcatcagggtatcccaccctggggctcactgcatcctggccctcgagcttggggcctctcctcacccacctcacaccccaaatccagttggatcca

SEQ ID NO: 15779 - DNA, 2399 bp, Artificial sequence
  DNA replication origin
tacctgtctctaatgtcccagccaccgagtcaaccatccttccttaattcacctgaacctgtcattctttccactctaccggcacccacccagcatctagcccttccccagccaaggctgcaaggtcacttgccaagccagggtctcccatagtggtgcccacgccacagccggacacgccccgccagccccaaactcttcatacctgatgcctgtcccccccagccccgtcccgccccgccccgccccgcccttccctgcccctccgcgcgtggccccacccccacccgcctccctgcgccctctcgccctcggcccgcctcccccacgccccgcctcccccactgccccgcctcccccactgccccgcctcccccactgccccgcctccccccacgccccgcctcccccactgccccgcctcccccactgccccgcctccccccacgccccgcctcccccactgccccgcctctctcacgccccgcctccccccacgccccgcttccctggtgccccgcctcccccacacctgtctaccccatgccccgcctcccccactgcccctacttcccgtcgccccgcctccccatcgccccgcccccattcgccccttctccccagcgtcccacctccctgtcgacccgcctctcctgtgccccgcctcccccgtgcaccgcctcccgtcatcttcacccctcctcccccacgccccgcctccctgtcgcccctcttccctggtgccccgctttcctgctgccctacctcccccgcgccccgccccggctaccgctacaggcccttgaatctagtgctgcaggagctgctcctaggaagggcgctactgggattctcaaggggcctccacctgccgcctcccctccacaggggcccaggcccttgcacgttgcctccctctgggcccagctcctcttcagcccaggtgcaaactgcccagcccaggcaagtgcttattgcgagaatcacctagggacaatcagagcacatttgattcgcagattgaattaaatttagtgctcgccactgagaggctgttccctctgtcccgccccggaaaggctagtgggtctggtccagcccctacagaaggtgccacctgggatggtgcgcaggtgtgaaaggggacccgcagtggcagacacctggttccccagcactgcctacagccggcaggtaggcgtggtgggctctgtatgtggagcccaccccctcatcccacccaggcaccacgcagcctccctcaagcccccagggcaaggtcatgacctctcagacactccagggtgaagatatgatgcctaagaccttcagggcagggctgtggtcccccagggccagggctaaggtctggtggtcctgatggcagctgcatgggtcattttcgagcctgcacctgcgcccctgggctcaaccgcctttccaggcccaggcttcctccctgagccatgcgcacaccccagggcaccgttgaagggcagcccggccacccccgctccctgcccacagacctctgtgccttggggcctggacttgcctgctctgctggctcgtggggctggcccttctgacacagcggttctctgggcctcctctcacggtggggcctgcatgactcacgtggctctttttggcagcggcagccttgggctcagagcttggtgctggttgtggacaggggatgcctggccatccacactccatcctgcctaggtgacatgtgggggcggggctcggcaggcagggtccatgctggcatcatgcccaggtggggccatgggctctgctgtcctggggggctgtgtggccctgtcctgggcctgcgcgtcctactctgtacgccctcccccgtgttgacaccagctcgagtcagatccagacctgtgcactgccatctctgggaggcagcctgccgtgagattgggtttggaatgagggaggcgttgggaggagggcaccttggggctgggcctgaggggtgagcagagtttttctataaggaagggtgggcaagtgtttctgactgaggggcaagtgtagggtgtccataccgggagagtagggccttttggggcagatgcagactgcagatgtgctggcccttgcaacactttccctgctctgagctccttcctgccctctctgcagccaaccttctcttgtctcactgaacctgagtctggcagagggaggggcttgtttttagagcagagtccagactctcctcccctggggttactctccgcttatttttatttatttatttcttttgttgagacagagtctcactctgtcgcccaggctggagtgcaatggcaggatcttggctcactgtaatgttcgcctccggggttccagcgattctcctgcttcagcttcct

SEQ ID NO: 15780 - DNA, 955 bp, Artificial sequence
  DNA replication origin
tgacgggaggcggtgcacgggggaggcggggcacaggagaggcgggtcgacagggaggtgggacgctggggagaaggggcgaatgggggcggggcgatggggaggcggggcgacgggaagtaggggcagtgggggaggcggggcatggggtagacaggtgtgggggaggcggggcaccagggaagcggggcgtggggggaggcggggcgtgagagaggcggggcagtgggggaggcggggcgtggggggaggcggggcagtgggggaggcggggcagtgggggaggcggggcgtggggggaggcggggcagtgggggaggcggggcagtgggggaggcggggcagtgggggaggcggggcgtgggggaggcgggccgagggcgagagggcgcagggaggcgggtgggggtggggccacgcgcggaggggcagggaagggcggggcggggcggggcgggacggggctgggggggacaggcatcaggtatgaagagtttggggctggcggggcgtgtccggctgtggcgtgggcaccactatgggagaccctggcttggcaagtgaccttgcagccttggctggggaagggctagatgctgggtgggtgccggtagagtggaaagaatgacaggttcaggtgaattaaggaaggatggttgactcggtggctgggacattagagacaggtattcccagcctcaggcgctgtcctaagcccagcaggtactgacccttgatggtcacctcaccctatgagggagctgaggcctggggaacccaaggggctagtccagaacccacagccgggggaaggaggaaccgggtcttaaacccaggtagctcactccagaaccaactcaacctctgttacaggtggccggccagaaaatgccccaccccacccattgacagtcggggaaactgaggcctcagtaggtgaagtgcctggcccaag

SEQ ID NO: 15781 - DNA, 1032 bp, Artificial sequence
  DNA replication origin
gcgctgtcctaagcccagcaggtactgacccttgatggtcacctcaccctatgagggagctgaggcctggggaacccaaggggctagtccagaacccacagccgggggaaggaggaaccgggtcttaaacccaggtagctcactccagaaccaactcaacctctgttacaggtggccggccagaaaatgccccaccccacccattgacagtcggggaaactgaggcctcagtaggtgaagtgcctggcccaagcaccaaggcacacagagacgctcaggcttgaccctggctccggacgtccagcccctgccgctgccccacccctctgctgcccttgggagaggggcagctcagagcctcgactctgcactctgcatcagcaccccccaagggcttgggtggggtcttgagaggagggggtggcctcagggagcgacctgggctttccaagcctctcccagagcagcccgtctctcacacaaggccagaaggcaggtgggtgctgatggctttcccagcaagagaccgagggggcgggcccccaagagctccagaaagctctccaccggacaccagcaggaacagcactgcagatggagcagcaggggcaaagacccgaggtgatagtgaggggcagccgggaggccttgggcctagcagtgcattgctgagtgtgggtgaggaggaggtgagcacgcagccttagcttgagggcattgactgtgtttttacttaaatgctcttaaaggggcctgggtgtgatgctgactctaggatgacgatgcttggccagtgaccagcaaatagagggtctgtgaccccaaggtcctgtgactatggagcccagacatggggttgaggggtgtcaggcatggcccattccggggcgaggctccctgccctgcactgcagggctgaggcactgagcggcaagccaggcgagggccagcaccaccttccacctgccgtggcacgggtgcacaggacgttccaaggccaaccacaatgacttctccttcccctctggcccc

SEQ ID NO: 15782 - DNA, 1328 bp, Artificial sequence
  DNA replication origin
tgcgtcaggttgcagcgctcgtccctgggcagggacttgcaggtgtagcaccgcagcagcactggggacaaggcgggctcaggccgaggccgggccccccagggtctcctcccacgtccctgtccacctccccgttctcagctgtgctcccaaagcctagcctggtgagcctccagcacccactgctcagatgggcgggcgacccctgacttggtcctgtaagctgtgctgtgtgcgtgagcctgtgtgtttagggggcaagggattgcgggtcaggcagggcgaacttcccatcatcactcacgtcctgcgacaatgctgcccaggctcctgccgtggtcacagaaacctggaggtgggtctgactcagtcctgcctccaggagcaccaggcctggcagaggagggcctcacaggggacacctcgtgggtgtgtggggcagggctcgtgctgagggcaggcttggggctcctgggaggggggtgggctgtgtgtggtggggcatgctgggggccctggctagggaggggctgtgtgtggtggggcacgctgtggtccctggctagggaggggccggccctcgggttggatgcggcgatttgctctgcttttctcgggatgggagagagcagagggtggcccacgtgtaggggtgtgtcaggtgggcagtgagggtgggctcttcttagccctactctgctctgctctaagcggttccctggctccccagcccgcagcagccaatccagccctcccctgtacaggaccggcccaccctgctgctctctctgccccacaaaactgaaccctaccctggggcctctgtgcttgtgtctccaccctaggcccccactgagcccttctctgcctggtgaactcctatttaacctctacatcctggcaccactgaccctcccagctggtggcttcttcccctgttccctactctggaaggcaactgagtgtcatggtgagcagcagtgaggggtgtactgagtgtcccccactctgctggaggcaagctcacagcaggactgtggcctgctggcttccatcacacagccccgcccagaatgctccaggcagatcaggcagcagggctctggggttggggcggccatacctctgctcctgccaccagggagcctgttggtctcctcctcttccacctcatcctcatcttcctcgtcgtagtcatctggcccgtggtcctcgtcctcttcctcttcctcctgctgtgtctgccctctccctggccgtgcagggatgcttgtaagcctcagctacccgggtatggaggacacctgctctgggcaagcatcgtgccc

SEQ ID NO: 15783 - DNA, 740 bp, Artificial sequence
  DNA replication origin
gaggaattcccatggcagaagttaagggtgaggactgggtgtgggggcccccaggtgtgtggtgggtatcatctctgcctggctgtgctgatggggatccccagcccccatgagggctgcaggtcctggggcgtggcagccgaggtctggacccagcgcccacgtgcggcagtcttgctgctcacaggtggtggagaaaggacaccaaggacacagccgggaactgaggaagcaaccgggccggggggcctgcgctggctggatcgcccaagacactccaaatccattctccaaagctggtgcaggggcaggaggggaaggtaccagacagagtgctggcagggccgggggtgagccgggtgggggtggggaggggccgtgggtcagggtctcctggcccccattgctccaaggccggcaaggaggttgagcaggagggctgcgcccacagtttcggagctgccccgggggccgcctgcccccttgcctgttgggtcctggactcgggagctttgccagggtgggacattgcacaggctggactggcagcaggtcatggtcacctgggtcccctccaccgtcttggtgatgggctggcagctgtctgtgcaccacgtggagtgggtggtcaggaggcctgactctgggaaggggagtggggaacaagtgctgaggatgggcggggtctctgaggtggctctgcagggctctgttccgggcccctggctttcccgccgcct

SEQ ID NO: 15784 - DNA, 931 bp, Artificial sequence
  DNA replication origin
atggatttggagtgtcttgggcgatccagccagcgcaggccccccggcccggttgcttcctcagttcccggctgtgtccttggtgtcctttctccaccacctgtgagcagcaagactgccgcacgtgggcgctgggtccagacctcggctgccacgccccaggacctgcagccctcatgggggctggggatccccatcagcacagccaggcagagatgatacccaccacacacctgggggcccccacacccagtcctcacccttaacttctgccatgggaattcctccatctgcagcggtcacacgggcccaccctgcccttccccaggtcggcctctccgctgtctggagggaaggggatttggagggaggctgtcgtcgcccccaggaaagacgggcctgggggaggcgggacagtgggagaggcgcgctgaggatgagagggcacagggaggtgggttggggtgaggccacatgcggaggggcggggcgggggggggctggggggacaggcaccaagtatgaagaggatggggccagcggggcctgtctggctatggcgtgagcaccgctatgggagaccctggcttggaaagtgaacttgcagccttggatggggaagggccagatgctgggtgggtgcctgtcaccttgaggtgaccatctagggtcagtacctgctgggcttaggacagcgcctgaggctgggaatacctgtctctgctctagcagaggctaaagcaggctagagcagtggaggggtggagttgatgaaaggagaggagtagatgagatggaatttttccagcctcatcctggcctgccctctagactccagtccccaagccctcagcctagtgggtgtcatggatggatctgggggtgtcagacaggctaccctgtgccagggagggggcagaatgggcctgca

SEQ ID NO: 15785 - DNA, 789 bp, Artificial sequence
  DNA replication origin
agggttggggagaggccgggggcaggggacagaggctgggtgcggaggtcggcagctcctcgggtcgccctcggctggggaggaccggctgttggtggcccttggtggctccagggcagggccggtggagggggcgggaccctagcaccaggcctaacccctgccccaggtggctccgggtctggtctggttgtgacccgcgctccccagacggcaggcggcgcggtgaccgggctggaggccgtgttctggaggcatctctgcatcccctcctcctacccagtctcctgcgggctgaccaggttcccttggaagctaccggaagctcctgggccagcttcccctttacagaagaggacgaggcctggaggggcaggagcaggtctccaggcccgggaccacctggacaggacccctccgcccacgcaggcctggccgcacccccggccctccccaggggcatcgggggagtctaacgcactggccgcctcccccggtgccccgtacccatccgagctgtggcctgcggtgagtggtctgatggcggagacccccgggcccttttgccagaagcagactctggttgatggtgcaattctagggccaccacggatgaacatgaagggcagtgctccctgactccctgcggcttaagcagggtctccccgacagcatggccaggccctgctcactcatccctggctcgttcaggggttccccgcagtcacctgcctccacagttctctttacgggagcaaaatgaaacttctattttaaagttgcaatgac

SEQ ID NO: 15786 - DNA, 1101 bp, Artificial sequence
  DNA replication origin
gggcaagttccagggaaaactgactccaaggatcctgaaggagcgaggatgccagcaccagccctggggtgcgcccccagagcctcaaggaaaggaagggcctgaccactggggctcctgggtcccagggttcccaggttgtaggttggtttgccagttaccttagttaccagaaaggggtcccaatctagaccctaagagagggttcttggatcttgtgcaagaaataattcaggttgaatccacagaaagcaagtttattgagaaagtaaaggaataaaacaatggctactctgtagacagagcagggagttcctgaaagcaagaggaggaaggggcccacctcaggtgtagtgggagtttctatgtgagacaagaaagccaaaaaatcacgggggaggttgctccgctgccggggctcctgacaaaggattgtttatctttgtgtaactactgtctagcaagaatctatgttactatgttcaaagcgaaactcattcttaagctaagaatgcttttgttcctaagagatcggacatcaggacattatttcctgggtctttttggtaaacattattcacttgttcccttaactgtaatatctggtgactgaacgcccaaggtcctggaacccagctggtctcagcctcatttcactcagcccctattcaggatggagtcgctctgttggaagggccgtgacaccttcatgccgccaggaacaccaggggcttgctgagtagatggtgacgtgtgcacagagcacggcggagagctgcagggccttctcacccgggacctggaaggcgtggctgccactcggagctgccaaagtgctcaggcgatggtccctggggaacccacatggacgctgcacagagaacaggacagagtccccctggggacacaggccaggggcaggggacagaggctgaaggggggcacagaggcacggggttggggggaagaggtccagggtgggggtcagtggctggggacggtggaaacagaggcccaggagaggggcctggagtagggtgcagagcccagggttggggagaggccgggggcaggggacagaggctgggtgcggaggtcggc

SEQ ID NO: 15787 - DNA, 1341 bp, Artificial sequence
  DNA replication origin
gcttcctgcagagctgacccatcccggtgaccattagcttctgcagacctcagtggtctcaggaaagcgtccctagggtctgcctgggaccgaaggcagaggttccttccttaggaatttcctgctttggggacactgcctccttctccagcgagttcccacagactagaacaaggagccggaggcccagcagtggatgcccgcttcctgtcctgggggacaggaaatccccaggaagatatcagattaaagcagatccccacattctgtcaccttcctctgggtgagtggagaaggagcaggtgaccccggggaatgggcgcgggcttgggacatacttggtctgagcaggtgacccgggaaatggtgcgtgggcacgggacgcactcggtctggacacgcgacccaggggacggggcgtgggcacgggacgcactcggtctggacaggcgacccgggggacggggcgtgggcacgggacgcactcggtctggacaggcgacccgggggacggggcgtgggcacgggacgcactcggtctggacaggcgacccgggggacggggcgtgggcacgggacgcactcggtctggaggctgccatgctggagaggaggagccctcagggtctgtgtggaagagggaggcaggccctcccagacccatctaacagactcgagcagggtcagcatgctgggcaggtccccctcctctatccctggagccaggcccaagtgcccctcactccagctgcaggtcacggccgccctgagccaggaggaaacagggtgttctcactgcacttgctcctgggtcaggggcggttcagggtcacaggggccggtgcagggtcacaggggccagatggtggccccagggctgggttctgggtgggtggtgagccagctgggggtggggctcggtccccgtgggtttgctggtccctccctattaagggtgcgtaggtgtggcaggggtgtgtgtgagaagccgggcctcgggcagaccccatgccggaggagggtccgaaacactgtggggggtggggacaagcaaggaaccagaacccggcttgggaaacagactgcaatgaggcagggcaggggtcgcccagcacatgccagggtgtggcggccgaaggtcagaaaatctccacaccagtcccgtgagatgggcttggtttttcccagtgtcgtggacgagagacccgaacacagagcggctaaatggccagcctgagacggcacagctggcaggcagcaggtccacactccggtcccagtgggatctcactccaggccacacaggtccctttctcacctcggggcccacacagaggcgtt

SEQ ID NO: 15788 - DNA, 810 bp, Artificial sequence
  DNA replication origin
gcctgaaactcctcaaaatcaataaaaatgaacatagcaacaacgaagcagcattttcaaaaatctcaagaaaagggagaaaacaacgaactgtgcagccattcaagctttccttcaaggaattacagcttcaagagagcagttttaaacttgccagagctcaggggtcctgcaactataggcccatcaggaggaacctcctagatgggcttcctccaaccacaagctgcttacgggtcagccgtaagacccacgggggtgatacattgaatggtagacccaacatagaaagagaagtgcagtcgagaggggaagaaccatatgtgctgtgtgtgttctgacaaagttgaaatggcatgacttcaaaaaaaacaccaggaagaggaggaggagtgggaggaggagaagggggggaggaggagggggagggggagggggatgagggggaggggaggagggggagggggaggaagaaaagggaaaagctcccgggtggttgtgcaggcagtagggaaaagtgaaagggcaccattcaatccaacaggccagacagtaaaccactcaggaggaaagcagttctctgtccctctctaagctaagagaccgaagtgtttgtctcctgtcctcagtcctcttctctggtggctgtcccctgcagagcagactgggaccccactcactagcaataggactcccacatcggaacataggactgtgacccagaggtgcccaggcagccatgagaggcagcccgccacccagaacaagaggcctgggcttccgggcagctccagcctttgcagcacgcag

SEQ ID NO: 15789 - DNA, 2647 bp, Artificial sequence
  DNA replication origin
aatggcatgacttcaaaaaaaacaccaggaagaggaggaggagtgggaggaggagaagggggggaggaggagggggagggggagggggatgagggggaggggaggagggggagggggaggaagaaaagggaaaagctcccgggtggttgtgcaggcagtagggaaaagtgaaagggcaccattcaatccaacaggccagacagtaaaccactcaggaggaaagcagttctctgtccctctctaagctaagagaccgaagtgtttgtctcctgtcctcagtcctcttctctggtggctgtcccctgcagagcagactgggaccccactcactagcaataggactcccacatcggaacataggactgtgacccagaggtgcccaggcagccatgagaggcagcccgccacccagaacaagaggcctgggcttccgggcagctccagcctttgcagcacgcaggcagggcacaaaacagggatgtgcgagagaaatgaggagcagagacatggcagagcctggggcccccagcccctcttcagagaggctgcctctgtgggaagctctgcaggaaaggggtcctcagcccttggagcttctttccatatttacagggtagctggagcgggggggtctggtgacaatgggagattccgggccagggaaacagcctctgcccacatatcacataccaatggtgttggcaccaaatggagtctctggtgggccggcccagccaccaccacgcctgaagggactggaggggccacctggctcatttagaaggcaaggggctgtctcttttgagataggggaaggacacctttctccttcttctgcttttgttttttgtttgtttgcttttgtttttttttttgagatggagtctcgctttgtcacccaagctgaagtgcagtggcatgatttcagcatcactgcaacctctgcctcccaggtttaagcaattcttttgcctcagcctcccaggtagccagaactacaggcacgtaccaccacacccggctaatttttgtatttttagtagagacaggttttcaccatgttggccaggctggtctcgaagtcctgacctcaagcaatccacccaccttgacctcccaaagtgctggggttacaggcatgagccactgcgcccaccctgccattcttattctcagtcttattctctctgtcccagccccatcagtcatcaattgctcaataaatatggattaggcacctgctatgggctatgtgttggcccccgataatacaaagatgaaaaagacaagccctgaccgagggtcatgtgcagcatgtaacctgtatggacagctacccacgcagccttggcctaaggctggcaggggcgaggccggggctggcacagaggagctcgaacaggtggagtcttaaaaagcaggaaagggtctgtcaggcggaggcggagcgggggtgttcaaggcccagggttgaggcatgcagccgatgctgtgtggcagggcaagcacttgctgctgagtctcctggaaggggaaagggtggtgagaggggcggcctgcaagtctgtgcaggcccctttgcagctgctaagggggcccagacctcatcctgcaggacaggcgtgaagctgggagggccactgtgggtttgcccggtaagtcagtccctccagctgctgtaggaggggtggacaggggagcccaaatgaaggcagggagaccccagggcagggcacagaagtaatgctggtgagaggagatggggttgcagccgggacagaggaagcaggctggacaagagtgggtggtttaaaacattgggaggtaaaagcaacaggatgggagaggggggtgggacgaggagggagcagaactgcctggttttcaacaccttgctaagtccaggaggcagttggagagagggctgggtgggggcaggcagttcctagggtgccacgacaccagcagcacctaagatctccactcatgctcactcagtccacacgacacgagggcccagcacacatcaggcacccagaacaagaacaggtggctgccctccaagagctgatttgcatgggagtgtgggagcgggggataattaataataaatataataaggaaatcatatagaaagtggaaatgggaagtgttgggggggcagaatgctgcagatatcctaaggagatgtgccagagccagcccaatgcccatccttcccttggctacaggcggcacttgtgacttgaatctgagtagaactgggccgagggggtggcatgtcacccacaattaggttctgttccacaggactccatctgggggtggggctctcccacggaccctggggaagcggccaccctgtgaaccgcccaccctcccacagtagggactggcaggcagcccccgggagctgagagcagctcctgccggccctcagtcctacaggcaccaggacatgacttctgccagcaatcgcatgaggtgggaagtgatccttccccagtccagcccccagatgagaacacagcggctgaccagagctgaggacccagctaagcctggccttctggcccacagaagccttgagataataggcggatgtcgttttaggacacccaatttgcggtacgtagggaactaacac

SEQ ID NO: 15790 - DNA, 1189 bp, Artificial sequence
  DNA replication origin
cacgcggggctctggcgggcctggcggctcagtgcgatctgggcaggcaggaagtggagtgagcacagccagcggctgggagcacatcccggaggggctgcctgcggcgggaggagcggcaggggccacgtggtgggggacggctcgccagggcgcgcacgcggtggcggcggcggtggaggcgttgcccgcctagctaggggcccgcggcctggagaggcgtcggttctccttccgcgctgaaggcggagacagcgacttcccgtggaggcaagccgtgggcgccgcggaggcgggggctgggggtcggcggaggcgggagctgggggtcggcgggggctgggggttggcggggagcgtcctcagggacaagtctcccagcacgcggccgcgacctccccgttgggggtctggagccaggagcccacgcgcgtcggatccggagagtctggtgggcgcagcctacgtgacagggtcggctcgggaccgagctgctggggactgggccttgcggggcggggccgctgggggcggggcatgagggtgccggttcggggcggggctttttgggggcgggacatggggcggagcctgggggcggagcatgtggggaggtggctggggaggaactttcgggggcgggacacgagggcggagcctgagggggcggggcatgaggggaagccggctcgggaaggagctttcggaggcggggcccgctcggggagggacctgatttcgggggagccttcgggagggcgcctgccatagacgactgtaaaggggcggggtcagctcggggaggaccctgcgggcgtggcggcagttatgggtgaagcctgagggggcggggcctgatcggggcggggtcttcgggggcggagtcggctggggatggagccgctcgggccgagccctccaccgcccaccatcaccgagtccggcccaggctcctagcgcggccgccggaaggggcgggtcagcgggcgggcatttcctgccggtgcctagggccgacggggacgctggcactggtggggagctgttggggggtcccgcatctagggctctcctttcctgcctccggcccccgcgaggggcgcgcgcctctccccgccctccagcagtcctggtagggcccgggcgcgtccgcgctctgcagcgggaggtcctcgtcgcctctcgtctc

SEQ ID NO: 15791 - DNA, 998 bp, Artificial sequence
  DNA replication origin
gggagctgttggggggtcccgcatctagggctctcctttcctgcctccggcccccgcgaggggcgcgcgcctctccccgccctccagcagtcctggtagggcccgggcgcgtccgcgctctgcagcgggaggtcctcgtcgcctctcgtctccagccaggtactcactgggctcctgcctgccgcctccggcccaggacgcgcagcgtcggtatgggccccgccgcctccccgcaccccggcgctccagggatgtggcaagacccggctttgagcacctcccgggcgccggccccgaggccgacctagctctgcacgtgggccgcggggctctgccgttgaaaggagagcctctaactaggagcacgcacgggaccctggcgggcccctccgcctggctcagatgcctggcatctcaggccttggcacagctagcaggcccctggcaggccgtggacccagcaggctgttttagtgcagattgcccctgaatctcaagcccactaatgttccagtctctccatgagacccagatccctgaaagtagtggagggaggcgccagggtgagtgaggttttctaggcagcccttaccgcccacggatacccagagcttcatattacaagtgaagggtcctccgcccagagaggcgacggagctacgctggagttgcacgacagaaccagaaccccagtctttaggggtgtggcaagcgtgggttgcgctgtttgtaactagctaatcactcctgtctacaggcctgtgaggtgaggccaagaaaatcgctatggtccaatccgtttttgttttttgcgtgtggggttttttgttttggtttggtttggtttttttgtttgagacggagtcttgttctgtcgccaggcaggagtgcactggcgcgacctttgctcactgcaacttctatctcctgggttcaggcaattcccctccctcagcctcctgagtagctaggactacaggcacgtgccaccacgccca

SEQ ID NO: 15792 - DNA, 1022 bp, Artificial sequence
  DNA replication origin
tagctgggactacaggtgggagccaccatgcccagtcatattctaagaaataatattccgtaccctttgtattagttcttggtcaaccaggctggagtttgaggccagggttgaccctaggtagaaagtggagctgatatgcatgtcgtaagtgacacaactcaacacataaatactttgaattctctttgttgagaggaggttggtggccttccctcctctccctcatgagtgcaggtaacacataaactcactacagatttcctatctcaacaaggagggtctggtcttttctacaggaaaatgtttagatgaatgtgactcagtttcaggccaacatcactttctagggctctatctagaggtggcgtgtgggaggaggcagatcaggtgggcgccagaactgaagatgaaggccacgtgtgctgagggaggatgcaggcataaagcagcatctctgctggggtgggcagggggtgggccctggtgcccaggatagaggatcacagcccaagctggctggagtttgaggccggggtccagctctggtaggaaacaaaggtgagaaccaagaaccagcacagaagaccagtcgaccagctgtttgcctcatgggcagggcggagctggagaaacggcagctctccagggcatggcgggaacctatctggctctctgcagactccactccacggcggggcggggggtggtttgtgaacccactgagcctaacggctgctgcccgaggcctgtgtgggggtcctccatgctgtacagcactgttccttcttccagacacttgtcactgcacgtgtggctggtcactgacatggcagtctccttatgcgacagggtctcctgaaggcgaggatcgtatcttttttatctccaaatcctagtcacatactgtggtcagggaacattctccataacggctctgtcgactcaacttaggctggcaggtgctaaccggcagagactggaatgactcacttctctacacgctgcccaccctgagaaat

SEQ ID NO: 15793 - DNA, 1647 bp, Artificial sequence
  DNA replication origin
ctgatctgcctcctcccacacgccacctctagatagagccctagaaagtgatgttggcctgaaactgagtcacattcatctaaacattttcctgtagaaaagaccagaccctccttgttgagataggaaatctgtagtgagtttatgtgttacctgcactcatgagggagaggagggaaggccaccaacctcctctcaacaaagagaattcaaagtatttatgtgttgagttgtgtcacttacgacatgcatatcagctccactttctacctagggtcaaccctggcctcaaactccagcctggttgaccaagaactaatacaaagggtacggaatattatttcttagaatatgactgggcatggtggctcccacctgtagtcccagctactcaggaagctgaggtgggaaggatgtgacatgaggggttctgctggctgctgtggtccatggcaggggggcagccctggtttcatgaactcagaacccagcctctgggggatggaagcactctccactgggcacgtgtggtccctgcagcctgtagcttcaaagcacggtgactggttccaagcccagtatggtggagaaggagactacggcaggaaccagggggattcgggggtggaggagggaagccgcagggcagttggtgggtacatcagatcctgtggacatggtgtgcagacccggaaccccggcagaggagcaaggattccttggtgagcaactgatcccttcatcgagacaaggaaaggccgggagagagtcaggtggggctccggggagatcagcaatgccgtttgagacactcttgggggaacacatgggaagggaggggccgcacctgaatcccacatcccctgaaaggcaaacctttaatctgaggttcatgttcttgcttctccccagcaccaagaggatggtggcccttggcctcctggtgcagagcatcagtcccacgctgggagtgtggagaggtgcgtgggaagcaagccattgaggaagtggggccaacagagaggtcagcagccccttagccctcacgcttccaaggaacagaatgatggagaagcctgcaggcagaaaaaagaagacgccgaccccaagggaggaggcagacgtgcagaagagtgcgctcagagaggagaaggtgtccggggacagaaagccacctgagaggcccactgtgcccaggaagccccgcacagagccctgcctgagtcctgaagacgaagagcacgtctttgatgccttcgacgcttcatttaaagatgactttgagggggttcccgtgttcattccttttcagaggaagaaaccctatgagtgcagtgagtgtgggcggatctttaagcacaagacagaccacattcgccatcagagggtccacactggagagaagcccttcaagtgtgcgcagtgcgggaaggccttccggcacagctctgacgtcaccaaacaccagaggactcacacgggagagaagcccttcaaatgcggggagtgcgggaaagcctttaactgcggctccaatctcctgaaacatcagaagacgcacaccggggagaagccctacgaatgcacgcactgtgggaaagcctttgcctacagctcctgtctcatccgccatcagaaacgccaccc

SEQ ID NO: 15794 - DNA, 1137 bp, Artificial sequence
  DNA replication origin
agtgttcagacatgccaggcatccagcctcaccaggaaacaggcacacggggacacaggcacaaacactaaaaaccctcgctgaatccatttggctgagcggtggccacgggagcacggggctgccctcctcacagacctgcacctgggccccagggcaagacgggcgtgggaggtgcaggggtgcgggtgtgggcaggggctgccggagaggggcgtgggaggtgcagaggtgcgggcgcgggcaggggctgccggagacagccgtgaggggtgcgggtgcaggcaggggctgccggagacgggcgtggcaggtgcaggggtgcgggtgcgggcaggggctgccggagacgggcgtggcaggtgctgccggagacgggcgtggcaggtgctgccggagacgggcgtggcaggtgctgccggagacgggcgtggcaggtgcaggggtgcgggtgcgggcaggggctgccggagacaggcgtggcaggtgcaggggtgcgggtgggggcaggggctgctggagacgggcgtggaaggtgcacgggtgcgggtaggggctgccggctcagaggcgtgtccaggaacccccgtcaggccagagccctgccctgagcggcctgcaggggtgactgcgagacagcagcgttaggcccggtctcggctgtgaagtcgcccccaccgccacgcacgaccctggggattctgtcaaggtgggggccgtctgctaggcccgggctccctgaccacgtggctaggtttgcggaggaagccaggagagtgccaacaccaggctctgtaagcgtgaggctccctgccggccccatcccggagttcaccccatccttcctgcgtccctggacctcagctgttcctcattgacctcagagacaccctgccctgccccggcttctcaggagccctgcccaccaccgcctcagctctggggacacggcctttctcccggtgcagaggcgcagctcgctgcccccagggcccatcttcctccccagcatgtttttacctcagctcattctcaggaaagaaacgatcacatctcagcgccccaaatggggaccaataggagaggtcactgggaatgaaacccaggtacaccccagggtccgtgggctccccagaa

SEQ ID NO: 15795 - DNA, 1158 bp, Artificial sequence
  DNA replication origin
gctgtgaccgccaacacggtcccggacattgccgagtgggccccaggggcagaagtacccctggttgagagcaactgccctgacgaaggaggtgcgagccggggaacagaggaccagacaaaagtgagtgctgtttggaactcagagggcctggagaagggctgaagacagggcctgaagaaggcgttcaggaaccccggggcctcctctggggcatcctgagtgcaggcactaggccacctaatgaacccttagcttcccaggtatccggggccagaaaggctgagagcatttccgcactgcaaagggttgctcccattgtgagttagtgaacaactttctcatttatgtgtcagtctcctgtgagtctggctaatggggagtggtcttgtggagacccatcacaggcagcgaccagccagggtcctgtggtcctgggaagcagcacctgcactgttccctgggaggaagccggtagccttcgtggggtcgctgactgcatccccagagtgcagagagctcaatgaagacagcactcgagtcagaaatcaatgtttactgcagagaacacagaagccagcaagcagtaggcaagggaggcgtcgcagtgagtgtgtcgggcaggctgggaaccagcgcaacggcccacgtggaccgaggactcacgcagagcaagtcacagaaagcgcagctgaaaacaaacggatgcttatcccagatgcacaggacacttaccaaggactgatggtctatcagagtaatgctcagcagctttggctggcaggacagttaaacttttggacaacagaaagtaactgggaaatgggacatctgccaccaacacgagaggccaagaccacagctgttacaggaggggtcagcgccacagtacatgggtggcggcggcggctgcacatgcatgcctggggaatgtgagtgttcagacatgccaggcatccagcctcaccaggaaacaggcacacggggacacaggcacaaacactaaaaaccctcgctgaatccatttggctgagcggtggccacgggagcacggggctgccctcctcacagacctgcacctgggccccagggcaagacgggcgtgggaggtgcaggggtgcgggtgtgggcaggggctgccggagaggggcgtgggag

SEQ ID NO: 15796 - DNA, 1531 bp, Artificial sequence
  DNA replication origin
cactccccaggccctttggacaaatcctcagcctggccagctcacaggagtgaagggagatgggaacgggtgtaatcagagtggaagaatccccttcccccaccagggaggtgtgaaggtgacgggcagggctttggagggagtgcaaaggttgctgatttaatgagctcggagccagcagccagtctggtctgttggagcagcaggtccccgctcctcacctcgagcagggttttgttgggtattcactgtaaataatgagctagtgtttgttatgctgggaggaggggttccagcccaaacagccccagagcccctggtcctaagacgtgggagtcggcccacagccagcccccccagcctgttgtcttgatttgtcctcttggactgtggattagaaaaggcctccatgggcttcttttgttgagatcggggaatccagtgcctgttcagatacccacacaggcatggcctgctccagccagtgctgctggggttggggtgagggtgccatctggacgggcagtgcccttgtctctaggggtccctgtgggaaccttcaaagcttccctggcaggagggctggtcagagaccccgagccactggagtagagaggctgagagcacttcctagaccacacctggagatgaggggcttagaggagtggccaggcttaaggtccaagaaggcttctctaaggggcagcatcagagagagataggggttggagcaggaaggagggaggggaggcagcagaagggaagggccagcccatcacagagaggcaggaggggcgcaggggcagaggtctgatgcctgaaggagttgcctggggttcgagtttggaagaccaggcaggggagtgtggtgagcaaggggaggacagaacgggatggggacagaccgaacagccttgacacctccactgggggctcagacgtcattctcagggcactgcggggcacaggggtctgcagggagggagggaggagagctgacatgcactgaagatctgcctggggctgtggggtagagaagagcaggacagaagggagagggggtcagtggctgcagtcccctgcacgtgacacagctggcagaagtccgcctaagtcccaggccgggatgcggatgatgaggaagctttaggcctgggctggtggggcaaagacggggccactctgggtgttgtcctcaagagtggagaaaggcagtcaagcacacttgcctctcgccagcgccagccaccgtgtcgccttgctggcttggttgcaggggagggagagctgggagggttctggttaagtgtgtgaaggcatgaccagtctccatccccacatctccagccaccgcagaggcttgttcccgcaccgctccatgcctttccagcttctggaaccccaggcgtctctgggcggttccctggggccttgagagccacctttcccgtccttttctttgtcgtcacagggtctaaatctgtatctctcacctgcagcacctctggcatctgggcaggacccccgcctc

SEQ ID NO: 15797 - DNA, 1117 bp, Artificial sequence
  DNA replication origin
gggccgggcttcgggagatgacggcgccgtccccacgctgcccgcggcccctccgtgcactccaggcctccgggggtcctcggctggagttgcttccacgttcagctcgcgagtcccccccgccgccctcttgggttccctcctcgggatgtgtccgcagcgatggtcaccggcggccgggaaccgctgcgagacgcgcgacctcccgctcccctcgcgggggccccagcgccctcgattctgcctgctttccaggggcgtccccgggagcctgaggaggatgttacaggttccccaaagccccttcatggactccttcctcattttcctcttgttcagccacagtttctccctcagttctgtgcttacgacctgaaaagagaaaattgtcactttctgggaaaaataaacggccggggagggttctttgaccgttttgagcaggggtgcagagagccgaggcgaggggacccctgagctggaggggcacgcggagcagagggcgggggggcctgcagacgggcaacagctgccagggtggacgctcagggctgtgtgggtggaggagcccccaggctgataatatgtaaaaatctctaaactctaccgcaagaaaacaaacattccagttagaaaattggcaagagccgcaacagacgtttgaccgaagagggcacagggatggcaataggctcgggaagggatggctgtcagggaagggccggccagcatcgcggtgggtgccactgcacacttgccaggtggctcaggtaaaaactgctaacaagtgccaagcatcactgaggtcgcggagcagcttgggacatcgccagtggtaaggcaaagtggtgctgccattctagaaattggcttggtagtttcttaaaaagttataagtagcgccgggcgcagtggctcacgcctgtaatcccagcactttgggacactgaagtgggtggatcaccagaggtggggagtttgagaccagcctgaccaacagggagaaaccccatctctactaaaaatataaaaaagctacccggacacggtggcgggcacctgtaatcccagctacttgggaggctgaggcaggagaatcacttgaaccgggaggcgg

SEQ ID NO: 15798 - DNA, 1042 bp, Artificial sequence
  DNA replication origin
ggtcctcccggggcccagagcgtcccggaagtgcgcgccggccgggcggagtggggcggggccggacacttccgtccggcgcgcggcgtcctcctcccgctcggaaggtgagtgggcgcgggcggcggcggcggctccgggtgcctgggaccagcccagtccgagctcgtgcgccgtactccgcggtgcagccctgcccagccgggccgtgcggcccttgcagccgccgctcgccgtgaccttggccttgggccaagcccggggagcggggtgggctcctgggggtcgcggagcagcagcggaccgccccgcccagcggccctggcgatagcgggtgtccgttcgcagggcgcctttcccaggcacccagtgacggcagctgtcgtcatcgccactctgcagatgggaaactgaggcccggaggtcccgccgctccggagcgaggagccgccggaccccagcgccgcaccgccgggcggacgcgctctgtgccgagctcccggcgattgggtccgctcccacggggctgggaacagaggggcagaggatgcttcccccgagccgctggcaggagtgcccttcccccttcagtctggagctcagagtttgtgcgtccctgggggtgaaggggcgtccacgctgtgatggtcgcctctgctcagtcctgggggccaagccagggtcggggtgatcgagcaggcccttttaccaggtgtccccagtaagttaactaagtaacttgagatgtgacttcagggtggaggacctgcacccagtggccacctacctggtgacctgacccttcccatcattaggggatggaggctggcccagaagccgggcactggggtggcggccgtgtgggagctgcctctcccacttcctcgaagcaggcactgtctgctgttcttagatctgagtatccgttaacttttgtcctcttttcccgttcctttcttcactccctgccccagattaggagttcctactctatcacagtatgaaagaaaagtcacttttcacattggactcaagccgtttt

SEQ ID NO: 15799 - DNA, 1336 bp, Artificial sequence
  DNA replication origin
gccgaggccaggcctcctgtggaacacccagcagagatgtagcctcaggatccctgacctctgagagggagtagagccaggggcactatggggctgggactcccccacacctcaactcccagagcctgccatgtgaccatgaggccacaacatcaggggtggagcaaggctggcgctctgtccctgcgagtcccgggggatcacacccaaaccagcttggcaaggactctggctgctccacttcctgaatgacaacacacactcagaggggcgatgccttgctcctggtcacgctggatccagattttgaggccactttccctcctatacctcaactcaggaaagaaacaatgcggggagctgtccctagggagcgagagctcaggcttggccccagcctcaaccaccgctgccccaacccaacccgcgccgagcccctggcctgagggtgtgggaaccccagctgctgaaggagctgcatacaggtgtctggaggcgcctctcaagtcagccagcgtggcaggtcaggaggagacagggcaggggacgtgagggcaggggatgcagggtggagggcgcacagcgggctgggtgagtaccatgttgatgcccatggaggtgaagctgaggctcgtggtgctgggttccaggtgtccccggtgatgagagactgacaggggacgggacagaaggggactcctgaatgtcccctagggctgccatcttccctgagacctgctgaaggtgtcacacctgggacctggggaaaatgaaaaccatggcagatgaggggattgggaggaatgtcggggggatggtgcaggaggaggcaacatgccagctctccaaggggagatggaggtttatccactccaggaggagcaaggatggaggatgaacccacagagacacataggcctggggtgaggcagttgggggacctggcacatttattcagtaaggaataacgctttgagtggctggggacggtggctcatgcctgtaatcccagcactttgtgaggccgaggtgggtagatcatgaggtcaggagtttgagaccagcctgtctaatatggtgaaaccccatctctactaaaaatataaaaattagctgggcgcagtggcgggcacctgtaatcccagctacttgggaagctgaggcaggagaacagcttgaaatcaggaggtggaggttgcagtgagccgagatggcgcccctgcactccagcctgggagacacagcaagactcaaacaacagcagcagcagcagcagcagcaaaggagtaacgccttggaaggcgcgcttaggaagcagccaccgcctgggcggcac

SEQ ID NO: 15800 - DNA, 2239 bp, Artificial sequence
  DNA replication origin
agtgcgagctgtggctgaaggcgcggccgcactggccgcactcgtagggcttctcgcccgtgtggatgcggtggtgctggatgaagcccgaccagccgcggaagcgcttgccgcactcgtggcaggcgtagggcttctcgcccgtgtggatgcgctggtgcttcaggagcagcgagttatacttgaaactcttgccgcaggcctcgcacctgtgcggcttggccccccgcgcgctgccctgccggctccgaccgaagttgactcccagctcggcagcccgctcgggcgcaccctcgggcccggccgctgcttgctgcacgagcgtcacgcgccaggcgccccgcggctgggcgcaagggacggccccaggcggctggcccgccggccgctccgcgctggattcaggcccgaagccggcgctgcaccgggccctgcggggaaggctcctcaggaggctgcgcagcgccccgcccgccccctcgtcaggggcctgagagccaggagagcgtggagcctgctccggcttgggctcggagtctgaaatgagaaacggcagaggcggatagtacccgcatgcccccaccgtggcacggagggacggggacggggagtgagagcagagctggacgggggggcttagaggggacaaggaggggccaggcacccagtggatgggagacaagcggacaggggctcggagtgccgtgcccaggagagctgacatagacacaggggtggggggcgttgcagggtgacccagagctgctgggaccatccacagtcaccacggcggccgtgccggtgcacggagccacagtggcaagacagaccatggggtcacccttagccaggaggaagcactaagtgttggtgaggacccggagcctgggggacgccagagctccagagggcgcctcaaagcccttgccgaggatgtggtccatatgggcacagctcctcatggggctgccccaggcctcggtggcaagtgtgctgccgcccagctcccatgcccaccccaggagcttcccacgcaaatctctggcccagggtctctttccagggacctgacctcagacacctgctccccaccccagggccgcccagatgtgggcgagggctcagcactgttaaatccagccatatcactaacatcgcccagagggaaccctgggagcttctcaagggggaggtgcaggggacctggacacagctccaaccaggctgaggggaggccatctaggggatgcaggaggaggaggggacacaggataactcgtggatctggggggacagtggtgccctgagccagaagccccagcccaaggcaggtggaggggagggaggagttcctgattcactgtgtccagctggggccggcaggagtccacgtggggccactggcgcaggtggctgtgggctgcagtcaccgcctcgggaagcatcagtaactggactggcattagagtgggggaggggccacggggcagaggtgagctgatgccagggaagaaaaggggccccaggaagggggtggtgccagcattgggggtgccacagaggtgggcattgtgaggagcctggcacgcgcagagctctggtcccccagtaacccgattctgctcactcaccgggccagaaggtgtctctgccgatctccacttcctctacgtcttggagatccaggtcggacggctgggagagcaccttagggctggagccaggggagcctgggggtcagggaggctggggctcacctccaccctctggaccactgcctccgctcctctctgaccgccacgtgctcccgggctgtggccctgacacaggacacctcctggccctcccaatcccaacagcaggcccgctgcttgggcttctctagccacgaatgccctttaccttccttcccagctcggttcaagagcctcctcctccaggggccagcattgggagctcattccccttcagcccagtaagcagagccaaaacctgggggagctttgaagcggccctcctgccgttgaaggcggctttgtcaccttggtgggctgtggcccaccctcctccatgccccagcatcctgcagtgctgctctggaccggcctctcaaagtgctggccctgcaggctcccacacccgtacctcacaaagccttcctgccttggccccagacctttctgtccctccggggctctctgctgtccttgacgagcgcccagaaacagcagaggcagct

SEQ ID NO: 15801 - DNA, 1664 bp, Artificial sequence
  DNA replication origin
ccccgctttttggcggtgtctgcgggggcctgcgcagcgcgcatctgatgtcatcagcccccagcaagcccgttttccagagaagaacccggaggctccgaggtgactcgtggcttgctcgaggtcacacgatcagtgacggcaccagatgaatcccctagtagagccagcacctcggcctggctgcccacgcgtgttactgaacaaggagaatgcaggcgtcctcacccttacctttcaggcagacagtctgaaccccaggcccaccgcacaccagcaaggacgcctcaagtaggcgcctgcctcccagctgacttcggacagacacactgacctccagcccgcacccctaaactcgttctcacctggcagagtggggcgtccagagcgctggtggccatagggcccccagagcatggtctggagagggtggcgggggctggcagagcctggggccgtcttccccaaggggctgcacagggccctgtgccgcaggctcccaagccgggcagccgcgttccgggggcttctgagttggaaacgaggtcccgctgtctcagcaggggcctgggtggatggctggtcagggagctcagggattcatctggtgccgtcactgatcgtgtgatctcgagcaagccacacgtcacctcggagcctccgggttctcttctggaaaacgggcttgctgggggctgatgacatcagatgcgcgctgcgcaggccctcgcagacactgccagaaagcggggacggtagccttcgtcttcaccaggacagtgacctcagaggcccgccacaggcacatctgggggccaggcccggggttctggatgagtcacagtaggaggggaggtgagacctggagagggacagcctcggaggagccaggctggggtccggggtctgccagctgtcccggagggcacaggcagggcagggagaaggcactggcagaatcactggcactcagcacttggagccacccccagctgagctctcccagagcttcgtggcccagactcccctgcccagaagcagtgttccggcagctctgaagagggcccggcaggcccagccgtaccagcccacacctgtcaagacctgaacaccctgggcccccacaccccagggcaaggggctggtgcagaggaagcccgggccactgctgcccagcaggccccccactgaatggaggcagcagagctgacagggcacgtggggaagcctgctgcatttacagaagcagaggcctcccaaatacataagggaaccgagttgccagagacccctcacccaggtggcagacaggcagcctggccaggcctgtgagcacttctagactggccccgtcctcgacccctgctctgggcgcgccccccccgcctcccgtgttgatggtggggtatcagctttgggcaagtcaggacacctccaggcctcagatcctcccctacgacactcgggccgcccgccagaccccagggaccccgtggccctgtatggcaggtcttggtggagcagccccatcacccccatcccgcagcgggtcctcggggacaggaagctgccccaaggtctcacccaggcaggtgccggctcccacttccaacaatcaaaaagaatttattccggacacgtggcatgcggtgctgggcagtgcc

SEQ ID NO: 15802 - DNA, 905 bp, Artificial sequence
  DNA replication origin
gtgccctccgggacagctggcagaccccggaccccagcctggctcctccgaggctgtccctctccaggtctcacctcccctcctactgtgactcatccagaaccccgggcctggcccccagatgtgcctgtggcgggcctctgaggtcactgtcctggtgaagacgaaggctaccgtccccgctttctggcagtgtctgcgagggcctgcgcagcgcgcatctgatgtcatcagcccccagcaagcccgttttccagaagagaacccggaggctccgaggtgacgtgtggcttgctcgagatcacacgatcagtgacggcaccagatgaatccctgagctccctgaccagccatccacccaggcccctgctgagacagcgggacctcgtttccaactcagaagcccccggaacgcggctgcccggcttgggagcctgcggcacagggccctgtgcagccccttggggaagacggccccaggctctgccagcccccgccaccctctccagaccatgctctgggggccctatggccaccagcgctctggacgccccactctgccaggtgagaacgagtttaggggtgcgggctggaggtcagtgtgtctgtccgaagtcagctgggaggcaggcgcctacttgaggcgtccttgctggtgtgcggtgggcctggggttcagactgtctgcctgaaaggtaagggtgaggacgcctgcattctccttgttcagtaacacgcgtgggcagccaggccgaggtgctggctctactaggggattcatctggtgccgtcactgatcgtgtgacctcgagcaagccacgagtcacctcggagcctccgggttcttctctggaaaacgggcttgctgggggctgatgacatcagatgcgcgctgcgcaggcccc

SEQ ID NO: 15803 - DNA, 1550 bp, Artificial sequence
  DNA replication origin
tctttctcttgtcctcccccaccccacatcattggttctgtttctctggagaaccataatacatcatttactaatcaggaaatagattcagagacattaataactcatccaacctcacagttaactgtagagttgggcttgaaattccaaggtcgattttcttagccaatacaccatgctacatatatgtatgtaaaaataaaaacgcttgtgaactgaaaagggtccaaacttaagctcattttggtccttaattgctaatccataggcatgttttggtccttaattgctaatccataagcatgtttcggtccttatttgctaatccataggcctgcacacctgcccccaaggccatggttaggtcagcacttggccctccccttgtctggggctgccagaagctgcctcagaagacctctccctgcagctccagtgctttagggttcagcgcccctccagggcctttatttccttctgggctcaaaagcagatactgtgccagatacagatgatcactttctgggttccagaactcacatgcaccccttttcctggtctctcacatttgctgtgaccaacccaagcctcaggtggtcctctgctgagactgtccactcacgctgttgacagagcccttccaggagctctttttgtggggatttgctatgtacctggcactgtgcaaagaaccccacccatgccgtccttgcagccgccatgtgcggtgcggagcgggctgcgctaaccaccattgtcagaggcagaaacaggctccgtgaggaaggataagtgtgggttatggaatcagggctggcagatcccaaaccttggctcccagataccatgggatctttaggaagatccctggtcacttcggggaggagagagagggcgaaggctgagaatcggggtcctgggtcggaggagggagaggggtggtggtgtgggcttggaggtggtgtgggttggagattggccgttgagctggagatgctccaggtggtctgcgtccaggttcctctggtggcgggggatggggcagagccggcaggggtgggacggggctccgagccagccccgggggcggccacccggacaagcggccctcgtgtgacgcaaatcgaaggaggatggggagaggcgtgaccaagaggccgagcacagctcagggtcgcaggcgtcccgggagggctcaggaatatcacgtccggttcaactgcacgctgataaacccggcagccaccacaaggtagaaaaatgcccttaaaagtccacgcctgggtcctgccgggccgctctggggttcccgagaaatgttgagtggatcagatggcacgttcgagaatcagccccgtgcccgcgggcttggagaaggcactgaggacactgggaaagacgtaaatgccatttcagcgcatctcgcgggccctgcccaacgagggaggacacagagaccttgcagagagtttaggacccggcgcggaggaacagccctgcctggcccaggacccgccgcaccccacttccttctccgggaagcctcccgt

SEQ ID NO: 15804 - DNA, 961 bp, Artificial sequence
  DNA replication origin
cctgaggaaaaaaccggaagcaaaccggaaagagtgtgcccctctctcctccgcagcctcgcgcgctttctctggcgcccctagtgggaaagcctagcatggcaccagctggccaagcagaaaaaggtttgcggagaccgggccagccgcagaggtggagctgagggtcaaaacctcctccctggagcaggagggcagagaggccttccttgtacgttcgagcggattcataagataaatggtgaaggactcagatggctgagatgagattttgtagaaaaacctcgccgagtgccaagtgcagctagggcttcaggagtccagcctggtttgtaagcctcgaggagcccacgcgtggccgcaggtgcaaatggtctcagagcagccatgcacgggagaattcctcccagggagaaacgccgtgaatgtgacttctagggacacgcacagccggtggaaaccgtatgcatgtagtgtgcataggtgagatgtaatggaacactggagaagcaccttgtgaacgtgggaagggtttcgcgcatgctcaggctccgttcgggatcagaacattcccgcaggagagaagccaatgagcagcactggacgtggccacaccttcgtggaagcgctggtcctcaggcatcagagtggacatagagaggccctgcaaatgtaatgactgtgggaacgcccgcctcctgagttcatgctgccgtgagggagcggactgtgggtgcgggcatgcggaaaggtctcagataatccccactggagaggaacactgtggatgtcatccacgcagcagaatcggataaattgcaccaagggaccccacccccaccccctgtgcagtgaccaccgcaaaacctttaagcaaagatctcatgccccgaaatgccagggccgtcaccagggatgcagcagggagtgaaacacccatctcttttctcacaccaaaccg

SEQ ID NO: 15805 - DNA, 1230 bp, Artificial sequence
  DNA replication origin
cttgaggcactgcctaggcccagtgagccaagcccagcccgagtcggcagcgcggccccgcccccgcaagccccgccccatgccgagggcatttccgggcgctctaggcagctcggaggacccgttcggaagactggcgggggaccccaggcgaacccaagggtggcgggccagggccgggcgagtgcctggcgttgctcgcgcggctgggggccatggctgtggggcctctctgggaggggtcgcgaggctgtgaactagcacggggctacgttgtagagagagagatggggcgtcacggaggcagggggtgccaggcagggcgcggctgccagaggcccagaggccgagctgggccctgcaggtctgaggtgcaggacccgattctggcccaagcaggggcgtcccacggctcgagctgcccgtccaggtggtgtctgaggagagcctgggcagcggccttgcagagggcaggccagcagctcctgctttgagggcttggaggagaacagattcccgaaccaggcccatgatcaatgtatttgggtatttgaactaaatccagatttcctggcttcccctgaggcctgctgaatcccttggggtggggcctgggaatctgcgttttccagtgggcctctcaggtagttgggtggtccctgagtgggttcccatgaccccatgaaacaagaccctagaaaacgcaaggcaaagcggcctggtgagtggccaatggtctacaggaactggatgtgatcagagcgagacctgcatcaactgggcaggggaggcgtggagccatacctgaggaagagacccagccggaacccagggaagagcaggctgtgaaaactgggcagaaacttgcggcgactcggaagacactgccaggaaaccctccccgggcctcctgtggggcttgtagcagccgcaggggttggctctcaccttctagtcccagccaggttgtcttggagtcagctaatgggcaaggcccctacctctcttaggatctgaggatgggaggggctgcgtttttccagaggatctgcacgtgtgcaggctgagtgttgagacttgattggtgtcaactggcactgcctgcccatgatgcacaaaagctactgtaagaaacagggtccatgtctccagggagcaggaccccgttctgaggccacaaccccgagggcagtctccgcctgcagagtcctccctctcgcaccggctcac

SEQ ID NO: 15806 - DNA, 1084 bp, Artificial sequence
  DNA replication origin
gcaactgcccagaggttctctgtctcaccctacaccgtgaggacccccttagcaaacagaattccagggcgcgggctcttcgcaggatctgagctattcgcgggcgtcctgagttgcttggattcactcccccacccccatgtccctggagtcctgccttgtgttttcgattctgtttctcaggggccccagcgtgtggcctcccattgtgggagagcaggagggaagcggtgaggggtgatttcggaggaggcagagccccgggtgtccgtgggaagctccaaagccgggccgcgggacggctaccctgggctgtgacgcagtccaggatcttcgccaaggcacctgctggaggcccctcctgggtcccacgaccccgactgcgcctgccggctgccagcgaggaggcggggccaaggcgagggcggggccgaggcaggaggggcggggtcggcctgatgggcggggcttccgtgtgggcggggctgctggccctgcggtctgagccagcggggagaggcccgggcggaggaggctgcggactcctagaggttcagtgccggaagttgggcctggaaagggggcaccgccttcccggttctggtggcggggagtgaggggacgggcgaaagcggcacagggaacagcatgacacgggcctgaggcagggcacatttggaaaggggcgaggagagggcagtggcttctggcacggcagcagtgggcatacagaggcagtcgggacccgtctggaagagcctccgcccggggtaaggagccgggactgtgtctaggaggcagtggggagctccggagagcgaagcgcctcctgcgcagactcgcgtgcttggagtaccggagcctgcagggcaagagagggtcttcagaagacccacgacgttccactgggatgcagagggaaacggttacttgtacttctacatcatctcttttagatgtgtgtgtgtgtggtgtgtgttgttgttgttgtttttgttttgcgacagaatctctgtcacccaggctggagtgcagtgccaatctcggctcactgcagcctccgcctcccgagctcaagtggtcc

SEQ ID NO: 15807 - DNA, 1177 bp, Artificial sequence
  DNA replication origin
gtctccacccctggcccgccccctcggcacttccggcgacgctctgggcagcgggaggacagcgcgctcggcggcgggagagcgggacggcccagccgcggcgccttcagctcatcggttgcccgcaggcgccggccgagtccttcctgccgggcaggaagccctgcctcgtggggggcaaggtcgagccgttggcgcgccgggatccggctcgagccaactgaggaccgggcacccgcaggacgtgtcaggaggtgtcgaaggcccgctgtggggcggccacgcgcgttcccgtccgttccccgcggcgtcccgcgcttgtcccgggtcccgctcggctcacgggaccctccaggcccccggggctgtggcagcacgcgggtcccgagcgtgggcttccttggggccgagagcttggagcgccccaggcgctgccccccgcctccctgcaggacgccgccctcgcgtctccgctgcagagaagcccttgctgcccgcctctcgcgggctctgggctctttctcaccagggaccgagctctcattcgttcagccttccccgggcaagatgcacctcctgtccaagtctctcgcccttccgcctgccgcagaccgaaggtcacgcatctccagctggaatgctgcaaaagtgacgcttttcatcatgggtgcaaagtgtacagctgcaatgtggacttgttccctcttacaacgagtagacagaccctctctggggagaaaagaaaggctgaagaaccgattcccatgagagaaccctaagaagacagcaacagagggccagacgcgcccctggaactggaccctggactggggcgggagggccacagccttgggagcccaggtccctgcccgcgcctccgacagtcccgcgccgccgccacccggcatctgcctctgggcctccacatctcgtgcctggaaccgcgttcattgcgcactgcaccagtaaacacctgaacactcccaccacatgctgcacgtttatttgtaacaaattagaagctgttgtaaaagataaaaattaaaacacttagactgggtgggcgagaggctcatgaatgtaatcccagcactttgggaggccaaggcaggaggattgtttgagtccaggagtttcagaccagcctgagcaacatagttagaaccgtgtcgactaa

SEQ ID NO: 15808 - DNA, 1622 bp, Artificial sequence
  DNA replication origin
cggaggaggttgaagctctggccgaaggccttgccgcactcggcgcacgcgtagggcctctccccgctgtgcgcccgctggtgccggaccacgtgcgagctgtggatgaaggccttcccgcagtcgctgcactcgtacggtttctcccccgagtggatgctccggtgctttgccgcgtccgaggagcacttgaagctgcggccacaggcgccgcacgggaaaggccgccccttccagctgcccccgccctctgcgccggggcctgcgttcggagggacgtctgactcgaggccactctgtcctccagttttctcagaagtgaccgggcctcgaggggaacctccgggcctctctctggcttcctggttttcacaaaggccaagagaccccaacgcccggggaggcccccctctgtggccctctccctcgggagcgcctgcctctgcggcaggctccgtgctctgagctgcctgcacctcggctgaccggctgccactcggggcctgcgccaggaaagcagccttcacagctgaaaaagaggccagacaggaacgattttagatgtaagagaacgtgagtcgagggtggctctggcaatcgtggtgacgacagagtgacagtgatggtgacgtcagtgtgccacagacacctttgattttgcccattcagttcccgcctcgttttttttagtttttttctcctccccaccttcttaacccccatggttatgaggtagacgagaatcctgcactgccactccagaaacggggctgtggggccggatgtggtgactcacacctgtatctccgcactttcagaggctgaggcaggaggaccacttgagacttggagttcaagaccagcctggccaacatagtgagatcctgtctcttaaaaaaatagaattttaaaaatatacaaacagaaacgaggctaaacggggctagaaacagggctaaacctctagcctcggcccacccagtcctgggaggggaggggacagaaacgcaggctctgggcactgccttactctgcgggacagctgggaaagcaaaggaggctggagacagctggcagcaagccaggacgggagcgaggcagatgtagcaggaggcccggggacagtggcacccaacagagcccacggcccagctctgccttctgtctgtccttccttcctttcttgtgagccagggtcttgctctatcacccaggctggagtgcagtggtaccatcatggctcactgcagcctcagggctcaagtgatcctccctccgcctcccaagtaggtggcgcacctccaggtgagcaccaccacaccaggctattttaaaaattttttgtagagacagtgtgtcaatgtgttgcccaggctggtcttgaactcctgggctcaaccctcctcccacctgagcctcctaaagtgctgggattacaggtgtgagccaccacacccagccatggccccagctcattccttttaccttggactccctgagacaacgcagactccttaacaactgcccccaaacaccaaactctaagggcttctgttatgtgcaaacaggagcgtcctcactcagacagaaatccggaccaagaggccagtcgcggtggctca

SEQ ID NO: 15809 - DNA, 1763 bp, Artificial sequence
  DNA replication origin
tcgaacgtggtccggcaccggcggacccaccacggggagaacccgtacgagtgccgggagtgcggccaggccttcagccagagctccaacctcctccagcaccagcgcgtgcacacgggggagcggcccttcgcctgccaggactgcggccgcgccttcagccgcagctccttcctccgcgagcaccgccgcatccacaccggggagaagccccaccagtgcggccactgcgggcgcgcgttccgggcgctgtcgggcttcttccggcaccagcgactccacacgggcgagaagccgttccgctgcaccgagtgcggccgcgccttccgcctgagcttccacctcatccagcaccggcgggtgcatggcgccgagtgagccggggctgcggcggaagagatgccggcggcctggtgggcgcgaggccgaggccgggggaggctcctgtccgccccgtgcgcggtgaggaagtaacagccggctgcgcgcctggttctcgggttgcgaaagcctcgccaggcctgcatccgccttggcttgggagcaatcaggagagacagggctcggggaaggcgagcgctgcccgcgggaggcgattcccagaggcggggaggtctcaggggtctgtcccgggccggccgcccgcctctgagactccccgcctcccacggtcagctgctgcggggcagtggccggtgattgaatcggtcattcctccgcaaccaggcctccatcaaaaccctgcatgagatgagggcctcgggcttcgggttggtgaaggcggggtgggggggcagttaggaagggggcgcccagacagggcatggaagcctcgcgtcctcccccgtaccttgcgggtcggtggttcatccatgtatttcaacgccttttcacagccggttcatatggtcccgacttctgtgtgcttagaaaattatggaacttggccgggtgcggtggctcccgcctgtaatcctagcactttgggaggccgaggcgggcggatcacacggtcaagagatcaagaccatcctggccaacatggcaaaacccccatctcgactaaaaatacaaaaaattaattgggcgtggtggcgtgcgcctgtaatctcagctacttgggagcctggggcaggagaatcacttgaacctgggaggcggaggttgcagtgagcggagatctgggcactgtactttagcctgggcgacagagagacccatctcaaaaaaaaaattggaacctgagaagggggtcgtggggtccccggggcccaccgtctgcacttggcatctgaagtcggggtggtcttgtgggactgaccccttaccctgtgggttctgcactagctccgggcaattggtgacagaatcgagttaaattgtaggacatcgcgttggtgtctgagagggagttggagagctggttggtgtggagggaaaggcttacacacatgtgatttcagaagcgttctgtgggtagaggaatcgttttctctttgagactgttatgagtatgtacaaatgttatttcctgtaaaatattttcattttttaaaatgttattttctagatagaaaagtagaagtgtctctttggggagcgtttttgggggcgtatagtaaagctctgtcatcatgaattaagcgaggtgggctttgagtttcttgggatgacagggaaatgtgagccgcctactggccgtgagcccctggggtgcggttgcaggattcgcccatcctggtctgggtgtggcttgtgaccac

SEQ ID NO: 15810 - DNA, 2481 bp, Artificial sequence
  DNA replication origin
ctgtgtcctgagctgtggcttgggagatgtttctggactgggaccagaccccgcaacctagagagccagctctaggctgggaattcctgggcttaatgtccaggcatgaagtcagctccttgtgtgtcctcatctgtacagagagggaaaggcccatcaccgtctccgcgaggacagactccgaggtgatgtgggtcgggcctgcaccctcagtggtttcccttctggagtctgggcctgctcggccagtgccctcattttctgtggagctgttccatgtctgggcacagaagcacctctctgggagcaggtggggacgtgagagccccctgctggaactgttctgtcacaggccccgggaggagctggacctgctgccggagccccttggggcagcgggtgagccgcggtgtgagagactcgggcctggagcaccaagggccccacagcaggagggatgggggtgcagcctccagggcgctggggtcctcttggctgaccaggagccttacacaggggctgcctcatggggttggcgggagccccggtgtgagggagacagccacagaggcagccccgaaagcaaagcgcggagcagatggcagaggatcccacgtggcagaggagagggcagcagaggatcccacgtagcagaggagagggcggcagagggtcccgtgtggcagagggcagcagagggtcccacgtggcagagaagagggcggcagagggtcccgcgtggcagaggatcccacgtggcagagaagagggcagcagaggatcccacgtggcagaggagagggcggcagagggtcccgtgtggcagagagggcggcagagggccctgcgtagcagaggaaagggcagcagagggtcccacgtggcagagaagagggtggcagagaagagggcagcagagggtcctgcgtggcagagagggcggcagagggtcccgcgtggcagaagagagggcagcagagggtcccgcatagcagagggcggcagagggtcccgcgtggcagaggagagggcggcagagggtcccgcgtggcagagagggcagcagagggtcccgcgtggcagaggagagggcagcagagggtcccgtgtggcagagaagagggcggcagagggtcctgcgtggcagagagggtggcagagggtcccgcgtggcagaggagagggcggcagagggtcccgcgtggcagaggagagggcggcagagggtcccgcgcggcagagaagagggcggcagaggagagggcagcagagggtcccgcgtggcagagaagagggcggcagagggtcctgcgtggcagagagggcggcagagggtcccgcgtggcagaggagagggcggcagagggtcccgcgtggcagaggagagggcggcagagggtcccgcgtggcagaggagagggcggcagaggttcccgcgtggcagaggagagggcggcagagggtcccgcgtggcagagaagagggcggcagaggagagggcggcagaggagagggcggcagagggtcccgcatggcagaggatcccacgtggcagagaagagggcagcagaggatcccacgtggcagaggagagggcggcagagggtcccgtgtggcagagagggcggcagagggtcccacgtggcagagaagagggcagcagagggtcccacgtggcagagaagagggcggcagagggtcccgcatagcagagaagagggcagcagagggtcccgcgtggcagaggagggcagcagagggtcccgtgtggcagagaagagggcggcagagggtcctgcgtggcagagagggtggcagagggtcccgcgtggcagagaagagggcagcagagggtcctgcgtggcagagaagagggcggcagagggtcccgcgtggcagagaagagggcggcagagggtcccgcgtggcagagagggcggcagaggatcccgcgtggcagagggcagccgacaggcagctctgagaggatacagggttgggaagctcaggcagaaggccatcgtaagagctaagagctacgtatggagagtgtggaggtgatgagaactgaacgggggccgctgggcttagtgaccaggcagcaactgtgcccttgctgaattccaggcgctaaagaacttggtgaagagtccgggccccgctgagagggtggcgcgtgcgcaaatgtggaatcctcacccaaagtcctcagcctcagagcacacgaaggtgtttctcctcccctgtcgagcgggaaccgggggtccaggctgggacgctgattggatgtgacagcccagcagactccatgctcggggtggaggcttcaaaggacacggcaggcgtcagggacttttctttctctttgagatggggtcttgctctgttgcccaggctggagtgcaggggcgcaatcacagctcattgcagcctcaatgtctgctcaagcaatcctccagcctcaggcctctaacatgccaa

SEQ ID NO: 15811 - DNA, 1305 bp, Artificial sequence
  DNA replication origin
ggtgcaagtaatgtggaaagggcatctctgtgctgaaatttgctttccctaaggaggcaggaaggagggcttagcggcttcccggaggttaaaggacatttgtgtttgctttctcgggcctggtctcgctgccctcatcctgtttgggccggcctcagtctgttgtgtcgagcatctcaccctcctgcgagtcaggtcctgacgggctgctcaccctccgcccacggccctcctctgtatctgacttggcagctggggtggggctgagcttccacctttgatcccggctggtcttttgctgtgatggatgactgatgacaatgacagggacagggctgcactgggagggaaggcggcagggccagagaagtgcaggtctcctcaggtggcgctagtccagcgcggggcctcgcggcctcctcttctcttgccagtgtcctggagaagaagaggcggctcctggagaagctgcaggagcagctggcgcagctgagtgtgcaggccacggacaaggaggagaacaagcaggtggccctgggcacgtccaagctcaactacctggaccccaggatcagcattgcctggtgcgtgtgcctggggtctcagttcccacctgtggcctatggggggcctgggttttccaggaggcctctgttcagtcccagcattgcccttgtcccgtgtcccctggggtcagcacaggccctccctgtgacagggacccatgatgctgagtcctgtgtcatcagctctccctgccctgaacgttcggatggacagggtgaagtgggggtgctgacagtggcctgggactcggaggcatcaggagggcctgtggagctcagcctgcccacagggagtgggaggtggctgagcgccctgctcggtggacacctaggccacagcaggttgtctttgacacctcgctgatgctccagggtggcggcatgcgtggggtggggttggcctagaggagcaggtcccagctacaccaggcggctctggtgtctctgctgcatggaggacgctcgcccttgccgagcaccctgacctggccttcaaggtgggtgagttgcctgcttgcctgggctgatgctgcctcccgcaggtgcaagcggttcagggtgccagtggagaagatctacagcaaaacacagcgggagaggttcgcctgggctctcgccatggcaggagaagactttgaattctaacgacgagccgtgttgaaacttcttttgtatgtgtgtgtgtttttttcactattaaagcagtactggggaattttgtacaataaaatgtgtgcaa

SEQ ID NO: 15812 - DNA, 1906 bp, Artificial sequence
  DNA replication origin
gagccctactcaggccccatggcctggtggtgttcctcagctcctcctcagggttctttcttgaaggcccaggaggcctctgcactttccagtggttctgtccctcccaccctcagctgtctgagcaccccgacctctgggcctctgtccacggccctgtctcagcttcagggccctctgctctttgtcccctgccatcaacctggggatgctgtctaagcttggcgagggcctctcctccctctgtccctggcgctgcccctgctccgtgatgtccgggctgctctgtgatgtccgggcagattggacgcacagactgtccagagggtgcctcccaccccggcgcccaccgcactccccaagcagggcttcctggaggaggcgccgaggctgggtgctcaggggcgctgacgctcggcatgtgtttcgcgtgcacccgtgggcctcagaggccggtgctgtgctgccctggggacaaccttggagctggggcagcactggggctgtgggatgcggaggagctagctggcatccaggtgagagccccaggagaggagacgccccctccactgagggaggcagaagattctgggtgagggcataggggccgaggccgggcctgggagaggaaatgaaggtgctgggcccactgtggacgtgcttccagagctgggtgggccatgcaggatgggcgtgaaggagtggccgctccagtaggtgccttggggccagtgcttacgttctctgaacctcattcttgactggaaaatggagacaacgtggtaccttgaggggatgtcgccaggggaagccgggtgctggggacttgtgacaggcagggacccacagactcgccaggggaagccaggtgctggggacttgtgacaggcagggacccacagactcgccaggggaagccgggtgctggggacttgtgacaggcagggacccacagactcgccaggggaagccgggtgctggggacttgtgacaggcagggacccacagactcgccaggggaagccgggtgctggggacttgtgacaggcagactcgcccgtccaggcggctgggcctcctccttgccatggggcctgggaaggcccgggtggtgctacctgtgctgtggccccacgtgaagccttgttgctgtggttaaagacgctgggccctgctctcgaggccaccttggagggtcactgacccttggccctcactctccccatcccagtgggtgcctgtgtgagtggaaggggctgcgctgtgtggcgcgttaaggccggctcagggcagacagggagggtggccggccccgtgggtgctgcctctgacagcccgtgcctctcagccgaggacagcatagcagctaagatcttatcctacaaccgagccaaccgagtcgtggccattctctgcaaccatcagcgagcaacccccagtacgttcgagaagtcgatgcagaatctccagacgaaggtagcagctcccaggagagcccccagcccagccctcaagggacccctccccctccccagagcctcggcacaggcctgggagccagctgcggtgggcacgtagggtgtggaagggtgtgggcacaggggctggtgcgggatggggaggggcagccctgtctggacccttttcctgcagatccaggcaaagaaggagcaggtggctgaggccagggcagagctgaggagggcgagggctgagcacaaagcccaaggggatggcaagtccaggaggtgagtacccgtgccctcagacgccttctcccggggccctgtcccaacccgtagggtccagccccacagggtcggtgggagacgacccttgttgtctccttgtgcggagacgagagattgtagaaataaagacacaagacaaagagataaaagaaagg

SEQ ID NO: 15813 - DNA, 956 bp, Artificial sequence
  DNA replication origin
cgacatcccctcaaggtaccacgttgtctccattttccagtcaagaatgaggttcagagaacgtaagcactggccccaaggcacctactggagcggccactccttcacgcccatcctgcatggcccacccagctctggaagcacgtccacagtgggcccagcaccttcatttcctctcccaggcccggcctcggcccctatgccctcacccagaatcttctgcctccctcagtggagggggcgtctcctctcctggggctctcacctggatgccagctagctcctccgcatcccacagccccagtgctgccccagctccaaggttgtccccagggcagcacagcaccggcctctgaggcccacgggtgcacgcgaaacacatgccgagcgtcagcgcccctgagcacccagcctcggcgcctcctccaggaagccctgcttggggagtgcggtgggcgccggggtgggaggcaccctctggacagtctgtgcgtccaatctgcccggacatcacagagcagcccggacatcacggagcaggggcagcgccagggacagagggaggagaggccctcgccaagcttagacagcatccccaggttgatggcaggggacaaagagcagagggccctgaagctgagacagggccgtggacagaggcccagaggtcggggtgctcagacagctgagggtgggagggacagaaccactggaaagtgcagaggcctcctgggccttcaagaaagaaccctgaggaggagctgaggaacaccaccaggccatggggcctgagtagggctcagcagtaggggccgccccgcagggagaacgtggctgggatgcctggggtcccgagagccagaacctccctcctcctccccaggactctggccacctaggctgccaagcagccagcccacaacctcagcccatttcccaaagaagcggccccaccc

SEQ ID NO: 15814 - DNA, 1655 bp, Artificial sequence
  DNA replication origin
cgccagggacagagggaggagaggccctcgccaagcttagacagcatccccaggttgatggcaggggacaaagagcagagggccctgaagctgagacagggccgtggacagaggcccagaggtcggggtgctcagacagctgagggtgggagggacagaaccactggaaagtgcagaggcctcctgggccttcaagaaagaaccctgaggaggagctgaggaacaccaccaggccatggggcctgagtagggctcagcagtaggggccgccccgcagggagaacgtggctgggatgcctggggtcccgagagccagaacctccctcctcctccccaggactctggccacctaggctgccaagcagccagcccacaacctcagcccatttcccaaagaagcggccccaccccgaggctcactcaacaagggccagccggggagcccggtctggggcaggggccgtgctccccccgcgctgagtgtgggtgtggggcaggctcaccgcgcgtcagggcccgcagctgctcctgcagagtgatggaggcgttgtaggtccggaacaccttggccgtcagcccgtccatcagctcctggaggtgcttgttcaggctggtcgtctggggaggaaaatggtctctataattacgtggttttgcggggccgtcccagcctcccgcgggaaggaaaggacatgtcagccgttgggtcaggacaaaaccctgggccagactcagcgcccacgccctctcactgggtcctgccgccgcccactgctgaggaaacacgagccggcttacggtcagcctgtcgaagaggtcgtcccgggggtccttgttctccataaagagctgtaagttcttgtacacctgaaggagaaagaaggaatttcagaggacagaaaaaacccgaatccagtgaggacctgaagggcgtctacgcagagcctgggagcccacgggaggcttccctgaggaaggtggcccgagcagcatcaccgtcacctgtcggcatcctcccgtgacacggcccccaccctccagtgtggcagtcaccgctaccacacgcacaggcagcgtgctcaggaggtgggcgtgactcctgccctgcaaaccccctgggtgaccgcggcaggtggcccagagtccccggctccttcttccatcaatgccggatttccaccaggtgagcccacacccttgtaatgtgagacactcatctgacatcacaggacctcagggccttcggggttcctgtgtccaacctccctccaccagtccctttggggagaggacattaattcccttctggaaagaccaaccctgctccgaggaaacgccagcctgcacctgcacccatgcctgccctcccctcagtttcacctgctggtcctcctacaagtggcaggcaccctccctgagcgctgggcatcggctccagggcggaggttgctgtggcctctgtgttgctctctccagcaccagcatggcagccctccctcaccagacacgggcaggaggccccgcacccccaactggccccctcatcagcctggcaccatggctgatgaaccccattctacaaacccacaggcaccgggacatggcgggaagccccagcccacagctcccgacttctggcttcttccctcatcttc

SEQ ID NO: 15815 - DNA, 4080 bp, Artificial sequence
  DNA replication origin
tgttctgctgcagggactcgaagatccccgagccgccggcggggcaccagtggaaggaggtgcgctccgataacaccgtcacgtggctggcagcttggaccgagagcgttcagaactccatcaagtacatcatgctgaacccttgctcgaagctgaaggtgagcgcagggcttggcagggtgtttcctccccaggaggtccccctgaggacgccggcagggaggtgtgtaagccgggcaccggcagaggcttctgagatgggctgggagtcggccagcccgtgctgaggtcatgctgtgccagcaggcacaagccccaaagccaggagtgggcatgggtgctcactgccggcatcacccagctagatttgctgccccagcccctgaccacggcaccactgagtggagaagcacgaggtttgggggagggagagttgacagcctcctccgttatttaacaggaatgtgaatgttttctttcctgttattttcttcgtttagggggagacagcttggcagaagtttgaaacagctcgacgcctgcggggatttgtggacgagatccgctcccagtaccgggctgactggaagtctcgggaaatgaagacgagacagcgggcggtggccctgtatttcatcgataaggtatgcggccttctcgcttcctggcggctcttcatcctggttctcctggcgaggactcccagttggatggtgcagtgtggcgacgtgggcctgtgtgtggggtggaacctcattctgatggggggggtgtgtgcatgtgcacacgtgtgtgggtgtgaacatgtgtgtagggtgtgcatgtgcattgtgtggtgtgtgtgcacttgtgcgtgtggtgtgcctgtgtgtggcatgtctgtgtggggcgtgcatgtgtgtggcgtgcatgtgtgtgtggcgtgcatgtgtgtggtgtgcctgtgtgtgtggcgtgcatgtgtgtggcgtgcgtgtgtggtgagcatgtgtgtggcgtgcgtgtggcgtgcgtgtgtggcgtgcctgtgtgtgtggcgtgcgtgtgtgtgtggcgtgcctgtgtgtgtggcgtgcatgtgtgtggcgtgcgtgtgtggtgagcatgtgtgtggcgtgcatgtgtgtgtggcgtgcctgtgtggcgtgcatgtgtgtggcgtgcgtgtgtggtgagcatgtgtgtggcgtgcgtgtggcgtgcgtgtgtggcgtgcctgtgtgtgtggcgtgcgtgtgtggcgtgcctgtgtgtgtggcatgcatctgtgtggcgtgcctgtgggtgtggcgtgcatgtgtgtggcgtgcatgtgtgtggcgtgcgtgtggtgagcatgtgtgtggcgtgcgtgtgtggcgtgcgtgtgtggcgtgcatgtgtgtggcgtgcctgtgtgtgtggcgtgcctgtgtgtggcgtgcctgtgtggcgtgcctgtgtgtggcatgcgtgtgtggcgtgcctgtgtgtgtggcgtgcctgtgtggcgtgcctgtgtgtggtgtgcctgtgtgtgtggcgtgcatgtgtggcgtgcgtgtttggcatgcctgtgtgtggcgtgcgtgtgtggtgtgcctgtgtgtggcgtgcctgtgtggcgtgcatgtgtgtgtgtgcatgtgtgtggcgtgcctgtgtgtggcgtgcgtgtgtggcgtgcgtgcgtgtgtggcgtgcgtgtgtggcgtgtgtggcgtgcctgtgtgtggcgtgcgtgtgtggcgtgcgtgtgtggcgtgcgtgtggcgtgcgtgtgttgcgtgcgtgtggcgtgcgtgtgtgttgcgtgcgtgtgtggtgtgcgtgtgtggcgtgcctgtgtgtggcatgcatgtgtgtgtgcatgtgtgtggcgtgcctgtgtgtggcgtgcgtgtgtggcgtgcgtgcgtgtgtggcgtgtgtggcgtgcctgtgtgtggcgtgcgtgtggcgtgcgtgtggcgtgcgtgtgtggcgtgcgtgtgtggcgtgcgtgtgtggtgtgcgtgtggcgtgtgtgtgtgacgtgcctgtgtggcatgcatgtgtgtggcctgcatgtgtgtggcgtgcatgtgtgtggcgtgtctgtgtgtggcgtgcgtgtgtgtggcgtgcatctttggcgtgcctgttgtgtggcgtgcctgtgtgtgtggcgtgcgtgtggcgtgcctgtgtggcgtgcctgtgtggcatgcctgtgtgtggcgtgcgtgtggtgtgcatgtgtgtggcgtgcgtgtgtggtgagcatgtgtgtggcgtgcgtgtgtggcgtgcctgtgtgtgtggcgtgcgtgtgtggcgtgcctgtgtgtgtggcatgcatctgtatggcgtgcctgtgggtgtggcgtgcatgtgtgtggcgtgcatgtgtgtggcgtgtgtgtgtggcgtgcgtgtgtggcatgcatgtgtgtggcgtgcctgtgtgtggcgtgcctgtgtgtgtggcgtgcctgtgtggcgtgcgtgtggcatgcgtgtgtggcgtgcgtgtggcgtgcctgtgtggcgtgcctgtgtgtgtggcgtgcatgtgtggcgtgcgtgtttggcatgcctgtgtgtggcgtgcgtgtgtggcgtgcctgtgtgtgtggcatgcatctgtatggcgtgcctgtgggtgtggcgtgcatgtgtgtggcgtgcatgtgtgtggcgtgcgtgtggtgagcatgtgtgtggcgtgcgtgtgtggcgtgcgtgtgtggcgtgcatgtgtgtggcgtgcctgtgtgtgtggcgtgcctgtgtgtggcgtgcgtgtggtgtgcgtgtggcatgcgtgtgtggcgtgcgtgtggcgtgtgtgtgtagcgtgcgtgtgtgtgtagcgtgcgtgtgtggcgtgcgtgtgtggcgtgcgtgtgtgtggcgtgcctgtgtttgtggcgtgcgtgtgtggcgtacctgtgtgtggcgtgcgtgtgtggcatgtgtgcgtggcgtgcgtgcgtggcgtgcgtgtgtggcgtgcgtgtgtgtggcgtgcctgtgtgtggcgtgcctgtgtgtggcgtgcgtgtggcgtgcgtgcgtgtggcgtgcgtgcgtgtggcgtgcctgtgtggcgtgcgtgtgtgtggcgtgcgtgtgtggcgtgcgtgtgtgtggcgtgcgtgtgtggagtgcgtgtgtgtggcgtgcgtgtgtggcgtgcgtgtggcgtgcgtgtgtggcgtgcgtgtgtgtggcgtgcgtgtgtgtggcgtgcgtgtgcacgcaccacccactttgaccattccccaccaactagctggcactgagagcaggaaatgagaaggaggacggtgaggcggccgacaccgtgggctgctgttccctccgcgtggagcacgtccagctgcacccggaggccgatggctgccaacacgtggtggaatttgacttcctggggaaggactgcatccgctactacaacagagtgccggtggagaagccggtgagtgccctcgcgccagctgcccccgctatgtgacacgtatttgctctggatgtctgggggcgtgccggagctgccgtggggtctgtggcccgtttgccacgtcctgcctgctgggtgaggcctgctgtgccggggctgatcggggtaaaggtgaaggagaggctgtgcaccatggtagacccaagggttcacaagggagctggtcgggggctgaaaagggcacgtgtgtcacgccagcttcgtctcctgccccccggccggagcatctcccagggctgctggaggaaggcactgcagacccagtggtttaacagacgtttattgtcgctcagccctgggggccagagtctgagtcaaggtgctggcagagccacatcccgcccacactcggggaggatcctcctgccttcccagcatctggtggggccacggatcctgcgtgtccttggcctgaggctgcctcatcccagtctctgcctccgttgtcacatggccatcttctccctgcatctctgcctctgcgtgttctcacaaggacgctgtcgtattggagttagggcccagcccactctttctatgacttcatcttatcagtctctaaagaccctgtttttaaataaggtcacgttctggcc

SEQ ID NO: 15816 - DNA, 1154 bp, Artificial sequence
  DNA replication origin
gacttgctcttcccgcagccctgctgaccgagcctgcccactgcctgccagccacgccccatctcgctcctcttctcccaggcccatctcagaatctaggttcagttgagcccttcgtatgggttttggtgatctgcatccgcaggacccagcgcagtgctggttcagggcaggcttgggcttgcctcaatggatagatgatgactggcctggagagttaggatgggctgtagccgccacgctggctgtgtccccccaccccctccaacacccccccaatctccagagctgggcttgccagaagggggcgccctggggagggggaccttggcagggagccctgtggagcctcactgtgttagtgccttacaaaaggagcccttccctgaaaacccctgaggcttctggcttcagggcctcccctccctgccccgcctcctccaccccgccctgcctcttccacccttccaccctgcccgatcctctgtgggcggcggtcctgcgccctgctgtggtgcctctccactggctgcactgctggacccccttccacccagctcctcggaggcagggctctctcataagcagccaggtcctttatttagcaaatgaaatggtcccatggagaggttcccgaagattctagaccggctctgaagggacccatctggggagaggccctagagcctgggagaggcacgttgcctttcccacttagctgggcttgccctttcccgcttagctgggcttggtgggatccgtgactcagcagcacacgggcctctgcaggtggggggcatgggcgggtacacgggcatggggtctgaggtcaggtagggttgcctccctctgcaggccttgttttcctcccccgtgaggtggaggccacactgctcacctgctaggagccacagggaggagccactgtgggagcggggaagaggctcatgcagggcctggcccaggagagtgacacgtcctgtctccgtctttaggtgggagaaggagaagcacgaagacggggtgaagtggagacagctggagcacaagggcccgtacttcgcacccccatacgagccccttcccgacggagtgcgtttcttctatgaaggtaaggatgcagggagcggctcctccccagcctgcgcttggtt

SEQ ID NO: 15817 - DNA, 1357 bp, Artificial sequence
  DNA replication origin
ctgagtcacggatcccaccaagcccagctaagcgggaaagggcaagcccagctaagtgggaaaggcaacgtgcctctcccaggctctagggcctctccccagatgggtcccttcagagccggtctagaatcttcgggaacctctccatgggaccatttcatttgctaaataaaggacctggctgcttatgagagagccctgcctccgaggagctgggtggaagggggtccagcagtgcagccagtggagaggcaccacagcagggcgcaggaccgccgcccacagaggatcgggcagggtggaagggtggaagaggcagggcggggtggaggaggcggggcagggaggggaggccctgaagccagaagcctcaggggttttcagggaagggctccttttgtaaggcactaacacagtgaggctccacagggctccctgccaaggtccccctccccagggcgcccccttctggcaagcccagctctggagattgggggggtgttggagggggtggggggacacagccagcgtggcggctacagcccatcctaactctccaggccagtcatcatctatccattgaggcaagcccaagcctgccctgaaccagcactgcgctgggtcctgcggatgcagatcaccaaaacccatacgaagggctcaactgaacctagattctgagatgggcctgggagaagaggagcgagatggggcgtggctggcaggcagtgggcaggctcggtcagcagggctgcgggaagagcaagtccagcacccaggatggccagtgcaaaggcctcagtgggagaggctttggcgagagggtgggagcaccatcaggatgggggagagtgagatgggcacaccttctgagcctcccccagacgcacaaggacagaaggttccagatcacacccccacctgccagagccaggagacctgcacgtgaccccagccaggtagtgctgttgggggcctggtgggcctggtcggctgggatgagtgtcctcagagcaacaggaagtctctgaagggtctgagaggggaaagcatgtgcaacagacatttctgaaagggcctttctggctgtttctgcagaggagggaatgggcaaggttagaagacgtagagacggagctgataaagtagggagaagttaacgggctcaagaaccttccagggtggagccgggcgtggtggctcacgcctgtgatcccagcactttgggaggctgaggcaggctcaggagctcaaggccagcctggccaacatggcgaaagtacaaaaaaactagctggcagatgctgcaggcagctggagtctggagggagactcggggagaggggggttctgctga

SEQ ID NO: 15818 - DNA, 1691 bp, Artificial sequence
  DNA replication origin
cttaggaaggacctgctaggtgcccctgccctcagaggctctgggagagagctgtgtgcaagccctgggcaggagttcactggcctggtcgtgtgacctgtggggcatcctgacagccagccctgtgctgcagaggtcagtgggactgggtttggatctgggtccccgcccagcgtgaaggggcgctggaccacgaaggcagggaaaccagggggaggccggcaggacagtcagtggtcctgctgccgcagccccgtgcaggcttagaccgcccagccttgggatgagcgccgctgggggcggaggccgcgctcgggggcggggctggccgctgggggcggggcggggctggccgctggggcggggcccagcttgtcgctctttcccggaggctggcagatgcgcgtggtgcggctgctgcggctccgggcggctctgacgctgctcggggaggtcccccgccgcccggcctcccggggtgtcccgggctcgcgcaggacgcagaagggcagtggagccaggtaaggtgtcccagtgagcaggcggcgagggccctgagcaccgggcttgggtaggtccagaaaggggagtggcaggcctcgtgggacggccttgccctgcttccggttttcccaaaagtcgggccaggagagcatgcgtgccgcggtgtgaccggcccgcctcctgcccggggtgtacaggcccccccatgacgtcgcccttgcttccccaggcaccaccccaccaaccctatttggggaaatctcccctctttttttccgcttgtggtttcatcatttgtgtagctgtgcctgggcctcaacactgtagggtttggttaggtactttataaaaagcttatgttgctgtgcatggtcttctgagacccgctctttcctggagtcggttcccgggttgtctccaggaccgattctgcatggcggcgggcgctcactgtcatatctacatcaccaggcacaagccgcatggatccagtggccctggtggccgttggtggtcccaggcgctttcctggaggacatgtgagaagccctgccggcgcatactgggcctggggtagccgcatggggatgggtctctgcgcatgaaatgctggagtttccgaagagctggagagttgacagcctcactggtgcgtgggagatcctgcaggagttcccgccaggtctcgcggtttatcatcattcacttagtgcttccagcgtggcatgtctctgtgacctggtggtgcgctatcagcatacccattcacagctgagggcctgcacagctgcctaaggccatgctgcagaaatgtcctgtctgcctgcaggagcttgggacccaaagagagccccagatggggcagggtgtcttgggaggagggagttctggcctgcgcttggagctggggctggctgtgggccctgcattgaggcacatctctccgagggtgcacaggcaggtaggtgctttccaaaaagtgctgctgagctgcagtcgcccaggtggacaggtgggtttggagcaaggtctctggctttgaaagccagcttgtgtctgatggtggtgcttggtgccctggtctctgcaggggtgaaagaatgtcactacaatgtgcagccctcagttgggcttgagcgcacacccagtggtgcagccctgcctggccgctggccggcaggttgttt

SEQ ID NO: 15819 - DNA, 1219 bp, Artificial sequence
  DNA replication origin
caaggtacttgagcccaggagttcgagaccagccggggcaacatagggagaccccatctctacaaaaagtaaaaaacaaaaaatcaaaaacccttagaaacctgaactggaaaacacattgacctcaggattccgttgaaggaatggtgggcctgggccaaggccctcttctggtttgtagaaagggttacctgaaaaaatatgcatcactgttccgcagcccctgggaggaggtggcccacctggagagtcagctgctgtgtcctggtgtgtgtgtaccttcagctgctgagctgctcattctgaaatgatgggacacctaccaggtctgcctgggccctaagagcgagcaattgcagccctcggcctctgcccatggcttccagcagctagatgacatggacactgagtcagttggtggcaggggagggtcgctgagggcgtgcggtggcagcccggactcctttcctgcctgtgtccactgcattccccccaacggtcacagtgaaagtgcggaatgcatgtgaattcatctgcttcccacggtcctggtgtcagggttttaccggggaagaccaaggctgcggtgctgccagaggtgagcggtgtggcctgttgtggctcagggcctaccgccaagtgctgatctagaggttttgccccttggccatgctccccagtgaagacactggggttaaaccctggtcagggtcagcagtcacgctggggactgagcgcaggaaggaggctccagctgtgcctggtctctggtctccttgggagtgagaggctggttggcagggatgatttcgcaggacttcctgtgacctttgtccagaggcaccacctctgaggggctgctgtgggctggacagcaggtgcttctgccggtttctgcgtcctggaagtgctgctgtttgtaggggatgaggtagggggccatctgagcctgtgtggtcccttctccagagcagcagagcgtgtacttaggaaggacctgctaggtgcccctgccctcagaggctctgggagagagctgtgtgcaagccctgggcaggagttcactggcctggtcgtgtgacctgtggggcatcctgacagccagccctgtgctgcagaggtcagtgggactgggtttggatctgggtccccgcccagcgtgaaggggcgctggaccacgaaggcagggaaaccagggggaggccggcaggacagtcag

SEQ ID NO: 15820 - DNA, 2126 bp, Artificial sequence
  DNA replication origin
aagcatctgttaggcccatggagggcagccattgctggggtggggaaggtgaaccttccctcctcctctggggtctccgggtgggtatgtttgtggccctgtggcccctctcatggtgtgtgctctctgttctgggcaaggtcccaaggccacacggaggttcctgcagacaagatgaagatggcccttggtggatgtgcccggggtcctgacacccaagagaagagatagaagggcatggccctgcaggcggtgcccagccggaagggggctctggaagaggacctggactgtgagctcacagacactggccggggcaagggctgtgtggaagagaggcacaaactgagaaaaaaaaaagaatatccgaagagaaaggggagaaagggcttcaggacaaacgtgtggggagatgcactggggcggcagcacgagaagagggtggcggggacgctaggggcaagcctgagaccctcagctgtggggagcggaagagtgcaggggccgccgtgggagctggggaggagcgcgctctgggcagtgggatagacagagcagttcccacagaagaggtgcgaagcgtggccaggagcaggtgcacagtgagggcatggtgcccaccccagcacggaggacgagccagggccacactgagcagaaaggagagttacgggccaggagacaagcacagaacgaggacgaggatgtaaaagaagtgtgggtgggaaaaaccaagaaagaagaaagtgacaaattaggtagtggcacaaaagtgggacaggaggccttggtttccagaaaagaaaagaagagggagacagacaaagctggggaagaggggactcgaaaaccaaagaaatgaaaagctcaggacctggaggaagacagagaagtgcagtgtgggagtgagctggacggggcaccacagccagcggcgtggcctcgccattgccctggggcaaagggtgactgggaggtggggggcctggtgaagaagccccaagaagagaaagctcagggcagccggaagccagccagaagcagagagaagtggaaggagggggagccagttgatgctggggtgtccagagggagagaagaaagatggccaggaggcagctaagccacaggaggagagccagaaagggtgggagaaggccgaaggcagcaggtggaaatggtgtgtaccctaccccaccccttctctccctccatgtcctgacggggtggtgggaatgctgtgtagaccagtgctgggagggggggaatgctgtgcagaccggtgctgggaggggggaatgctgtgtagaccagtgctgggagtgtgggaatgctgtgtagaccagtgctgggagggggggaatgctgtgtagaccagtgctgggagtgggggaatgctgtgtagaccagtgctgggagtgggggaatgctgtgtagaccagtgctgggagtgggggaatgctgtgtagaccagtgctgggagtgggggaatgctgtgtagaccagtgctgggacgggggaatgctgtgtagaccagtgctgggacgggggaatgctgtgtagaccagtgctgggagtgggggaatgctgtgtagaccagtgctgggacgggggaatgctgtgtagaccagtgctgggagtggggtaatgctgtgtagaccagtgctgggacggggggaatgctgtgtagaccagtgctgggagtgggggaatgctgtgtagaccagtgctgggacggggggaatgctgtgtagaccagtgctggcaggggtggaatgctgtgtagatcagcgctgggagcaggggaatgcagtttagaccagcacaggcccacttcccctccctgtccctggtgggggaggcggggagtgctgtgtagaccagtgctgggaatgtgggaatgctacagtgctggcctttgcctgcccactgtaggttgccagggagcctgggtgccccccagagtgccctcttgcatcggcagctttgagctgtgggttgtagggtactgggagcagccagcagtaagtgagtgtttgctgtgtgtctggcattgcttttggtcagtcctctatgaagtaggtactgctatgtccatttttcagatgaggaaactgaggtacaaa

SEQ ID NO: 15821 - DNA, 1228 bp, Artificial sequence
  DNA replication origin
aaaacacacacatctccagggccctggggtgagcagcaggaccgttccacagaggtgagcctggacccaggcagcagggacactgctgcacctgcggctggagtgacaccgaaaacacagcagcagctgagagggcaggagaggcaaccggccacgagcctctgttggctccaaccaccaaaggatggtgcttattcctgaccccattactacgcaaccaggctcactagaaagtttccattagccggtctggagcatattcctgggtgtgatatgccatcatgttcatgttttttaaatcactattaagtaaagcgttttttttgttttctgttttttggttttttttttagagacagggtctcactatgttgcccaggctggtctcaaaccctgagctcaaacgatcctcctgcctcagtctcccaaagcgctgggattataggtgtgagccaccgcaccggcccttaagtagactattttgaatgctgcatagagactcccctgaaaatagcctgttcttgggttttagctgggagcttatggctttagatgcgccagaccaaaagaaaaaaaaacagctgcaaacctgaggtgttacaaggtggctgccagcaaagcgatccaggagaagggaggcaggtcaccacgccaggagaagagaagggcagggaaaaggccaactccgggaagaaaggccctggggcaaagcgcatccaaagccgtcactctggggcagaagacagagcggaatcccatcagcgacggccgtttccagacccttttcctaggcagccagaccggcaccgctggccaggtgcagggcccaagcagaaagtcaggagccaagggagcgatgaggaggggtggggcagccaggggagaggacaccgagcgggaggggtaagcgaagggggaagagaacaagggggcctggaggggggacacaaaaggagggcccatggagatggaggaaacactgaggggtgaagcacacggaggggggacacagaggaggaggggacacgttggtggcgtcgtgcgcggagggggaggtacacggaggagtcgcggagaggcgagggatgtgggaggtcgtcaccaacagcgcgacctgggtcacccacaggaagagggccactgagggccccgcctgacccctccctcctggtggccctgcgccctcaggccgagtcccacctcctctgcagctcttccaggacccacg

SEQ ID NO: 15822 - DNA, 1907 bp, Artificial sequence
  DNA replication origin
cgttggtggcgtcgtgcgcggagggggaggtacacggaggagtcgcggagaggcgagggatgtgggaggtcgtcaccaacagcgcgacctgggtcacccacaggaagagggccactgagggccccgcctgacccctccctcctggtggccctgcgccctcaggccgagtcccacctcctctgcagctcttccaggacccacgcggtcccaccgcaccacggctcccccggaccccgcttccccgaggcctgcgcggagacgccgggaaggcccgagcccgcgcatgcgcagccgccgccacgtgcctgccttgacgccgccggtgctgccgggaagggggcgggctgcgcaggcgcgggagaggcccacgcggtggccacgcggggcgtccggtggctgcgctcggttgggcccctgggctcgcgcgctccgtgggccgcggtgctgacgggcacccaggaggtggggtgggaggcggccggccggggtggaggggcgttcctgggccgacgtgctgttggcttccgcgacgtggtggagtctcgccagtccctgcagcgcttctgcgactctgaagataaagaggatcgtattttgagaaaagctcatggagcaaggagctcaaggagcaaggcctgaggtgcaagctgtcaccgggtcgcatctgcttagcagcctgcacattgctagcgagagtctccactcagcctgaacatagtgcttgggaggaggagggccgccaggccacacccgtggggtgcaggatgcgccatgtcggggtccgtgagtctggggtgacgtgagatcccagaggctgagtctggaaaattgagcggatgtggccgcggtagcagaatggacgaaggcctccaggccgagagggagctctgtgtacaagggcacggcaagtggccaccggtggccagtgtggagtacggctccctccaaagcaggctcttcctgcaggtattttatccgggaggtggactcaggaagcacaggtaagggagtagggaagtacacgtgttggggagcaggtgagagccggggcccctggactagtcctcctggaggcctctgggagagcacaggacacagttccgagtgggtttgctctggttttgaggggccatccttgccgccccacctctgccaactgcacttccagcaagccccgggcataggccagcacccctaagcactgagaaaagcgctcaggcaggaagttgcaggtgctgggggcgggggggcgttggggtgcatgggaaaggcagggtgctgagagcgtcagccgcactgcatgtgtgtgcgtggtggggctggggaagggctggcgcgtgttgacacgatggtgcgggcaccggggagcaccacccccacatgatcccctgtatgttgcagagagatgatggcaccagtgggcacactgctcgcaggtcaggaggaaacagggcttggtcaggccagagacagtaggagcctaaaccgcaggcctgcagaggttgaggggaggtgtctgataattagtagggtgtggaaatgagaatgagcgagttgaggatggtgcccaggcttctagtttgggtggtccggtgagtggcgctgtcttctggccctaaagccctgtcacggtaaggagaactgcctggaaaacgtacacttggggaagacagaagaggttattacaaacactccttcactttacaacttggctattttgtgataagttttagtgcatttatttgagtttattaaagatgccatgttactgccttcttaacaaatggacataggcagatagctgttttcctgttgtggtgagtaatggccaggagaggcagccttctgtggagcaggcaccgcagaacctttgcatgcagatggcatctcctctacaatggcgccgg

SEQ ID NO: 15823 - DNA, 859 bp, Artificial sequence
  DNA replication origin
ctaaaccgcaggcctgcagaggttgaggggaggtgtctgataattagtagggtgtggaaatgagaatgagcgagttgaggatggtgcccaggcttctagtttgggtggtccggtgagtggcgctgtcttctggccctaaagccctgtcacggtaaggagaactgcctggaaaacgtacacttggggaagacagaagaggttattacaaacactccttcactttacaacttggctattttgtgataagttttagtgcatttatttgagtttattaaagatgccatgttactgccttcttaacaaatggacataggcagatagctgttttcctgttgtggtgagtaatggccaggagaggcagccttctgtggagcaggcaccgcagaacctttgcatgcagatggcatctcctctacaatggcgccggggttgctagagccacagacgctgagcttattttactcagaaagccacagaaacaataaccaaaaaaggatactatgaaggcagcatagatcatatgctttttaaaaagcccatcgtcagcatcagtgacaacaccattaccgctcagtcaccgagattaaaaattagtcacacgtggaaaatagaaacaggttttcagggagaagaaggttttgattccactgaataatgctccctcttttgcttggtaaatagatgatccatatttcctgatgatgtacattttcgagggtagctatgcctaggtggtctcagatttggggaaaaagccttggcctcagttgactgggaagggctcaaaaactataaattgtatccaaaaatgtctgacaacaaggtattcagtaatgacatcagagactccatccagact

SEQ ID NO: 15824 - DNA, 1264 bp, Artificial sequence
  DNA replication origin
cagttgctggggacagagtgccaggatagttcacgacagtgggcccaaggaggagggcaacagaaacagggtcaggtggcccccaggagctcagggaggaaccagttccaagggaagccagtgaccaacacatgcgccatcctgcgccattgacagcaagaccaggctgccaagagtggaggaggctggtggagaccctgttggaagtggtctcagggggctttgagagtgagaccttttctttttgagacaggctgtctcattctgttgcccaggctggagtgcagtggtgtgatcacagctcactgcagtcttgaactcctgggctcaaacaatcctcctgcctcagcctcccaagcagctgggattacaggcatgagaaaccatgcctggctcatttttgtattttttgtagagacagggtctccccatattgcctaggctggtctcgaactcctgggctcaagtgatccgccagcctcatgaaagtgttgagattacaggcatgagccactgcacccagccaaagaatgagagtgcttcaacggggattaaggtgagtcagaagagcagagacggccatagggagtgggcacatttgaattctgaggacaggtgcagtactgtttgtggggccaggggagggctgatgggtggctggcacttaatagggggcgtgaagtgttcaaccacggtaacaggagagaagatggaggggagcagaggtttggtgggtggggggcacaggcgggacagatgccgtgttgggagtgtggggtacctctgtggattgtccccaggtgtcagtgacacaggaagcaaggcctctgcccagagtggccagggaggggaagcgggcaggacgggctgaggacaggggccggggcccagccgaggtacatggaggctcagaagaccgaaggctgggctggaccagggcttaaagggaaggagaggggcaagggccagccccgtggtggctcagatgaggattgtgtctcgctgaagtattgtgatgcacacaagaaaaacgttcttttttaaaaatattttatttaattttgagacggagtcttgcggccgggcatcatggctcacgcctgtaatcccagcactttgggaggctgaggcgggcagatcacgagatcaggagatcgagaccatcctggccaacgtggtgaaactgcgtctctactgaaatacaaaaaattagctgggtgtggtggtatgtaacccgggaggcagagattgtagtgagccgaga

SEQ ID NO: 15825 - DNA, 1471 bp, Artificial sequence
  DNA replication origin
aacccaccaagtggacgacaagctgaagggctcccagggagcagacacttcaagggccccaaaaggccaggagaaagaaaaaaaaaagccgggtatggtggctcatccctgtaatccagcacttttgggaggttgaggcagatgaattgcttgagcccagaagtttgagaccagcctgggcctgggcaatgtggcgaaaccctgtctctacaaaatatacaaaaattagccgggtgtggtggtgcaagcctgtagtcccagctattcaggaggctgaggtgggaggatcacatgagcccaggaggtggaggctgcagtgagctgtgatcgtaccactgcactccggcctggggaacagagtgaggccctgtctcaaaaggccaggagtggaagacaggccctagccaggaggtttcgcgtggctggcaggggccttatgagaaggctgttgctgggaggggcctgctgcagatggctgcggcagaccacggagcttagccttcaggatttagatctggggatgacaggctcctgtgtgcttgttgcggagccgggagcacaggcaccagaatgatcccagggctcagctccaaggctccgctgggcctgtggtggggcagtgaacgtggacaagacctgggcttcagaggaacttgatgaccaggagccgtggttaccgcctgtgccctggccttcctgctcttcaaagggtgtgttctgagctgaggcgagacccacacgaaatccgagcgggctccggagtcaccagacacctagggaagtatggaaggcccggaaggacacacacagccgggtgagccccgcagggagctgtgcagtctcaggtcgtccagtcctggggctgcaggccagttctccaagcaggtggtcctggaggcaagctggttttgaaagtaggttctgaaaataggtcagtccaggaaacaagctctggaagtaaagagattcggaaagcaggttcgttctggaaacaagttctacaaacaggtagttctgaaagcacgtgggttccagaggcaggtgctagaaggatgtgggttctgtacggaggttctggagggaggcgggttctggacggaggttctggaaggaggcgggttctggaggccggttttggaagcaggacgacaccgacagaggcgcctcggactggggccaggcctggagcctccgctccgcgggcagagagaagaaagcaggcattgtcggaggactcacacaagcacttgtccctaacaaaaccgtttttaaaaaccccattgtgaacatttttggaacaagcctcttagagggtcccgttgccggggtgacaggacgaaacggcgcgagcgggcagactcctggagtccccgcaaagggagccgaggagctaggcgcgccgagtccaggtccgccctgactctcagcttgggacgttccgtatagtttttttctccgtttcccgaacttc

SEQ ID NO: 15826 - DNA, 2005 bp, Artificial sequence
  DNA replication origin
aacctgccagccagccgcgggcgttccggccgcggttgccaggggttaccgtcccgcgggcgggcggagctggccgtccagagcccgccttcctggaactctggttggctgatatagctgtccgtcgaagcggcattgccgcctattgggcaatggccagcttcgcacgccagacccgtgccccgcccagccgcgccgcgggccgcccccactcaggagggacagtcggggaccggcgcgggcactcaggagcccgcggcccaggtggtgcgggcggccctagcccggctgcggagcgctgcgcgagcggcgggctggctgaccccgagggacccccagcgcagcgggtgcggcgatgatcctggaggagaggccggacggcgcgggcgccggcgaggagagcccgcggctgcaggtgcgcagaactggcgcggcggcgggaggaggggcccggaatcccggccttttcctgccccccctcgaggcgcgttccgggcgcccccctcctacgtctcattcggcccggacgcaggcagggaaactgaggccagagcctgcgtccctcctcctctgagctcggtggaggtgcttccaggccactcatgtgagccgggaaatgcggacagccaaagtctggatcatcctcaccgctgaagcgggttggggggacgccctcctcgtgtcccccttctgggcggatgtggggctgggctctgtgagcgccctccccacacccgccatcgtgttcctttccggcacctgtacagcctccttccctagttcggtcctccctctgcatccgctcaggaactgcatgcccattgggtgcactggtagcagcgggcagcgaagcctcctgggtatgggaaaccgagagaggtcttcccggctggcctcttctcacttcccaaacctccttcccttctgaagtccctaacccggggtgctgactgggcaagtgggaggggtgggcagggctgtggagacctgctgagtctgtgcctgggaaggaggggacgtctgtgggccttgctctgcagcccagagcctgcttgttccctgcggaccagctcgaggctgccccagtcctcctgccaggccctgggcgcccacgcccgccacgggctttcagccgcgggctgctcctgctcctcgccccgggtgagcctttgatagcgcgcggccctcctcccctctgggacgtcagactgtgttgtccctgggctggttctactcggctttggtgtttggggttaggtctcctagaggaggaggcggtgctatcagccagggtttggcttcaggtcactgggctggtgatgctgaccgtagccctcaaggacgcccttcttgcccaccccgaggcgtgccagaggctgcagcacctcctgggcactggagggaaagaggcagcctgtgcctgccccctatgaacttgctctgtcagggcggccatgcctgcaggtggcctgggacggcacatgttgttttgggtggaatgtttgggaggctgtacaaacaagatgtcccagagggctccggaggtgacgcttttcaggctgggggctgtgcctgggctccctgtcctggccctccctgggctgccaccttggaaagttggggagaagctgtttccaggctgccgtgtctctcacagcgtccagaaatgaccccacagtcagggtactggggaggggcccgtgggaggtggcagtggggcggaggcaggccctgtgtcacacgcgcaccactcaggctgtcctgccatctggaaagtcttccccgatgcctgctgccgggctagagtgaggcctgttccacccccatcaggctggcccccaaactggccctaaagctcagagttcagtgggtcaggggtcggtcgttcatccacttagaggccacacctgggcctgaggccctgtggacaggtctgggtgacttgtatttgccccaggcgtgatgagagcaggcttccagcaagcgcttacctggtgccagggcc

SEQ ID NO: 15827 - DNA, 1613 bp, Artificial sequence
  DNA replication origin
ggccctgtgtcacacgcgcaccactcaggctgtcctgccatctggaaagtcttccccgatgcctgctgccgggctagagtgaggcctgttccacccccatcaggctggcccccaaactggccctaaagctcagagttcagtgggtcaggggtcggtcgttcatccacttagaggccacacctgggcctgaggccctgtggacaggtctgggtgacttgtatttgccccaggcgtgatgagagcaggcttccagcaagcgcttacctggtgccagggccagtgctacagctggagtcctgccattggtgcctcccaagccctgggcctcagcccgtctgatgaacagggtgagtaagtggccaaggctgccaagctgggaaggggagaagcctggcacggcccagggtggccaacccagctgccgtccctcccgcaggggctgcaggggctcccgggggaggaccacaaggaatacagcctggctgtatgcagaaggttctgtggtttcctggggaggccagtgggagaagggggagcaggctgcagagggagagcgttggagcagcaggtgggcagggtggctgtgcccccctcacctggtctccagcatgccgagtgggtcagcctgaggttccccagcctggctggacaggagcaccctctgggtgctggttacaggttcccaggcccctgcccaggtagattgggctccaggaagaggggtgctcaggaagcaccagtgcctgggtaccccagggagcatcagagagagtgggagtccctgccgtgagtggccagtctatgattcctctggcgtgcgtgctgcttatagccctgtgtcccaggagacacctgtgcagcaatgccctttgaattctgttccctcatcagtggggggcagagatggtgggtcaggtgggtgctgggcttccaccctcctggggcttccagttcttgcattcaggtgagacttcagtgggggcagaggagaggggtacctgagatgggtggctgtcagcatacagggtgcccagggccagggctctgaagggaaaaagctggtttgctccaggtgggtgacctctccctggggactgcctggcccagggccaggggatcctgggggagagtggaggtctggccctgctctgatgttttgctgttcccagacctgggctgggataactatctctgccttttgcccgtccccaggtcagccccactctggccagggccacactgtttcctcctgggcagaggagccccagtgtcagggttggggggctgtttctctgttcttcgtccctctccatcgaggcatggccaggcccttcatgtgtggctgcctctcgggacccccacagaccacagcctctctgtcctttcctaatgcaaggcggaaatggccacagtggggtgtcagggcaccgtggacgtgggggtggggagctccaggtcacctttgtctccagagggtggggaggttgtagcaggagtaggggcctgaacgcctgtgtctatgccccttccactgggctcaaccttcaacccagtgtggaaagtggggcatgggccgcccacctccaaggtctacccagcctcaaaggtccggc

SEQ ID NO: 15828 - DNA, 2735 bp, Artificial sequence
  DNA replication origin
tccctctccatcgaggcatggccaggcccttcatgtgtggctgcctctcgggacccccacagaccacagcctctctgtcctttcctaatgcaaggcggaaatggccacagtggggtgtcagggcaccgtggacgtgggggtggggagctccaggtcacctttgtctccagagggtggggaggttgtagcaggagtaggggcctgaacgcctgtgtctatgccccttccactgggctcaaccttcaacccagtgtggaaagtggggcatgggccgcccacctccaaggtctacccagcctcaaaggtccggctcgggtctgctcctccgcctgtaggccgggaagtcacttggcctgcagggagcactgcgggtagggaggccgaggaatggaccaggcccacagcaggtgcctgtggggctccaaggggccaggctccccgcagctctcctggggccaggaggggagcagggacctggctgggtgtctgatgcccgtcgcacagccagagcccttaaagctgctggagccttgcagcggggcctttgcggggagggggtgtagctgcggtgggtggcacgggggtctcctaggtactgggcagaggccctcgaggtggtagcgccggtgggaaaggtagggatgggaggcgggggtgggcgggcctcaggttcagggagcttctcagatctgaggcgcccatgcccctctcccacctgtgggcctctccagcccgagtccctgaagcagctctggagggaatttcttttctggaggaggcgggagtgagaaacgggagcagggtgagggttcccaagtgcacatcggcccgtccgctgctgggtggtgtccacgggggcagggctgggctgggggaggccagggtcctgggccggcacaccctccttccggctgcctgtgtccctccctccagctgcctgtgtccatccctccggccgcctgtgtccctccctccggcccctaagcgccaactcatcttcagttcagggacctccgtcaggctccctcaccccagcactcagcaggaggctgccggcctgggtgtccaggggatggtgcgggtgtccagcagacagtacaggggtttgggggatggtacaggtgtctgggggatggcgtgggtgtccagcagatggcgcaggggtttgggggatggcacaggtgtctgggggacaatgcgggggtttgggggatggcgtgggttccaggggatggtgcaggggcttgggggatggtgtgggttccaggggacggtgtgggggtttggggatggcgcgggttccaggggacggtgtgggggtttggggatggcgcgggttccaggggatggtgtgggggtttggggatggcgtgggttccaggggacggtgcgggggtttggggatggcgtgggttccaggggacggtgcgggggcttgggggatggtgtgggttccaggggacggtgtgggggtttggggatggcgtgggttccaggggatggtgcaggggcttgggggatggcgtgggttccaggggatggtgcgggggcttgggggatggtgtgggttccaggggacggtgtgggggtttggggatggcgcgggttccaggggatggtgtgggggtttggggatggcgtgggttccaggggacggtgtgggggtttggggatggcgcgggttccaggggacggggcgggggcttgggggatggtgtgggttccaggggacggtgtgggggtttggggatggcgtgggttccaggggacggtgtgggggtttggggatggcgcgggttccaggggacggtgtgggggtttggggatggcgcgggttccaggggacggggcgggggcttgggggatggtgtgggttccaggggacggggcggggatttgggggatggcgtgggttccaggggacggtgtgggggtttggggatggcgcgggttccaggggacggggcggggatttgggggatggtgtgggttccaggggacggtgtgggggtttggggatggcgcgggttccaggggacggggcggggatttgggggatggcgtgggttccaggggacggtgcctcatcctccagtctctgtctctgccttcccatggccacctccatgtgactgtgttcaaattccccacctcgtataaggacccttgtcactgcgattaaggaccccctactccagggtggcctcatcttaactcattatatctgcaaagaccctatttctagaaaaattgcagtcacaggtactgggagtcaggacttgaacctgtcttttgtggggacacaattcacccataatagatggtcacccgctcagctggctgctgtgattttggggggctggacgagcaggccttctgtctaggaaatcaaacctttcttgtataatgggaataaactaattaaaatgcacacaaagatctcgttcacattagcaaaaagaactctctccagatatctaggagaaaacccaggaaaacacgtgtgagctctttacggggaagacgggaaggcctgagagacgtgtgtgcgtggagagggtgtcgggtccacagaggggaagacccagtgcgtgtgcacgttggccccatgaatccgcagcttcatgcagtggtaggtcagtttcatggtggcaagattcaccttcagacgccacaaggtcctggggaagaagaggtcctgtctcccgacaagggcgggaagcagtcccaggagc

SEQ ID NO: 15829 - DNA, 1025 bp, Artificial sequence
  DNA replication origin
gagaggtgtgtggctctcacccaccatccaaggagtgatgtttgagtgctgtcgagggctgtatgagccccaaagaaagccgtggtgctgagggaggtgcccccaggccagagtcggaacatgcaggtgctggggtcggggtgatgaactgtagggggcatcacctgtgagcccccggatcccactgctgcccctgccccacccatggggggcagaccctgtcagcgacgtcctctgcagggtgggcttggagctttgacaggtcagctggcaggacggctgcagtgggcacggggcctttggctctgccttggggctgggctttcaactgccgcggcctccctcagagccaccagcaacaaccgggtgagagagacggtcgccctggagctgagctacgtcaactccaacctgcagctgctgaaggaggagctggaggagctcagcggtggcgtggaccctggccggcatgggaggtgcgggtgggggccgggacagcacgtgcgtgtatgtgtgtgcacgtgtgcgtgtgtgtgtgcatgtgtgtgcacgcatgtgtgtctctgtgtgtatatgtgtgcattgtctgtgtgtgtgcgtgtgtgcatgtgtgtgcatgcatgtctgtgcgcgtgtgtctgtgtgcatgtgtctgtgcatctctgtgtgtgtgcgtgtgtctctgtgtgtatatgtgtgtgcatgtgtgtgcatgcgtctgtgtgcgcgtgtgtctgtgtgtctgcatgtgtctgtgtgtgcatctctgtgcgtgtgtctgtgtgcacgtgtctgcgtgcgtgtgcatgtctgcgtgtatgtgggtgtgtgtttgcctctatgtgtgcgtgtatgcacgtgtgtctgtgtgtgtctgtgtgtgcgcgtgtgtgtgtctgcacgtgtgtgcatatatgtgtgtgcgtgcgcatgtgtgtctgcatgtgtatgcacgcatgtgtttgtgtgtgtgtgtgcgcgcgcatgtgtgtgtctctgtgtgtgtgtgtttgcttttggggcgg

SEQ ID NO: 15830 - DNA, 847 bp, Artificial sequence
  DNA replication origin
ccccatggtgctggtgcccatgggacttcccagggcagtgtgtgtgagtggggtgggccagggcggtggggcccagtggctcctgccctgcaggccatgcggacccccagccggaatgagtcgggcctggagctgctcacagcctattacaaccagctgtgcttcctggatgcgcgcttcctcacccctgccaggagcctcgggctcttcttccactggtaggggctctgcgggcggaggcaccctggggaggggaggcccagctgcgggaaccgtgggaactccacccagcctgacccaacactgcaggtacgactcgcttactggggtcccggcccagcagcgtgccctggccttcgagaagggcagcgttctcttcaacatcggtgccctccacacgcagattggggcgcgccaggaccgctcctgcaccgagggtgcccgccgcgctatggaggccttccagagggccgctggtgagggcggcccgggccgcggtggggcacggcgcggtgccagggtgttgcagagccccttttgcagggcaggagctggggagtggttaggacatcagtccctcaggtagggggagtgagcacatcaggtccatatgtgtcccaggagcatccctagctggccgccctgagtgctgcatggggcagagatgggcaggtacagggccctgcctgtgtgagcacccctccctccgcaggggccttcagcctcctgagggagaacttctcccatgcgccgagcccagacatgagcgctgcgtccctctgcgcactggagcagctcatgatggcccaggcccaggaatgtgtgtttgagggcctctcaccacctg

SEQ ID NO: 15831 - DNA, 1487 bp, Artificial sequence
  DNA replication origin
ggtaggaggccagtgcagggagggaggtgctgaggagcgtggtcatcccccaggcccctgaagggcccagcagctctgtgggtccctgtgatcgtggcctggaaagtgctactgctgtttaattcatcgtggtgactgcatctttaatgcaatcagcctccctttctccaggacgaaggcccccaccctggccagggatgcagccacccagacaggccctggctgctcacgctggatgtccggggcctcggcagcctcacagaagtcatcctcacggtcgagctccgcatacttggccagtgagcgctgcagcgtctgggagatcacagcccgaagcaggtccacctcgcgcaggacgcggcacagggcgtgcagccgcagcgcctcctcctgccccaggatggcacgcttcaggtgtgccttgcctgcacgcggggcactgggatgtcacacaccatgtgggcccgtgggccctgggacgtggcagaaggagtgggcaacgccagggctgtggggctcatcacagccactttcgttgggggtgcgcgccacgggggtgaggagctggctgtgcaggagggctctgccacgtgcaaagcaggggccagggatgagctgctcccagtggtctcccacctgctcagaggctgcccagcactcctggggcccctgcgctgggccgtcacccatcaggcacaggccatccagggataggtaggtggcccaactcgtcagcacggggacagcaggtggcaaacagcatgagggtggtgggggacaccctgccaccgttggtgaccatctgagccccagggcactccacccatgggcgccttaccaagctgcctgcgctcctccagctcctgcggcagcacagggcctcggggcttagaggaggtggggggctgcaggaagacctgctcgtgcgtggggagctctccctcggtcgctgctgggggacagagaggctgtgagccctgcgcgggggggccttggcagtaccatgggcaagtgtggtgggcactcacgggagccgtcgcagagggccatggctacgtggtagtgggccagggagcggaagtactcggccttgacatgcaccagggcagtccaggagacaggcacgtagtcgtggacgggtggctgggccatggtccggtgcactagcctgtactcggctgccacctgccggtggatgtggcaggcacgcgagggcctcccactctccaggtggtgcctgcttctccctacccagcctccacctgctccgaccaccatcccagcagcctccctggcacctcagttcctgctgctttgtgccatcccctggaggcagaggctcgggtccccaggttcctgaccagcccccccagggagcaggacaacagctggctcggggctgacacacaaggaaggaggtgggagagctcacgcatgcctggacctgggctctgaccccagctcggccccaccccctgcatcctgac

SEQ ID NO: 15832 - DNA, 1176 bp, Artificial sequence
  DNA replication origin
gccttcagctccgtcaccacctccgcgtgtctccaccacctgcatggctgcccattcactgacacaatgtagtcgccctccttcaggccagccgcctgtggggagacttggacggtgaggtggggacaggacaccctggctggcaccaaggactcagcctcagggggccggcggggcccttaccgcggcctggctccctggaatgacggcagcgatgaggacaggcgagtctccccgaagcgtgaggccaaagccgccctctcctcgggtcaggtggacgggccccaccagccgccaccggttcttggctgagaacacagacaggggcccctggcaggggctcagaggtcagaggcccagctgggccacacactgaggagaccccgcctgactagcacatccatccaacctgtgcaccgagggacaccgtggggttccacaaggtgggtggggagggctggaccaccatcaatggcctgtctgaggccatgtgctggtcagagccacacagcccaagctgcccatgctgggcggtgcctggggacgggtgtgctcaccagccgatggaagatgtcaggccccttcccctgggacaggcgtggcatcctggcctctggcttctggtgggtcttagctgagagggtgtaagagcagagctaagctgggagactgtggagacctgcctcggggattttccagggcgcagggcatgaccctgagtgcacacaggccccgcttctgacctccaggcctggccactctgcaatggtgggaggagctgccccaggtgtgccctgaacacacggccccctctgccccaagtggctcccaaaatccctccctgaagtcccagccatgcctgtcctgggtctgtgggcttcccctcagggtaggaggccagtgcagggagggaggtgctgaggagcgtggtcatcccccaggcccctgaagggcccagcagctctgtgggtccctgtgatcgtggcctggaaagtgctactgctgtttaattcatcgtggtgactgcatctttaatgcaatcagcctccctttctccaggacgaaggcccccaccctggccagggatgcagccacccagacaggccctggctgctcacgctggatgtccggggcctcggcagcctcacagaagtcatcctcacggtcgagctccgc

SEQ ID NO: 15833 - DNA, 1011 bp, Artificial sequence
  DNA replication origin
ccagctgggagacgcatggcaggctgacctaggttcagctcaggagagccgctggaaactctctctgccatgctgggctctgggctgtcagcggtgaagacaggcctggctctgcggggctgaccatctggaggctgagattgcatctcagggcagaggaagctcggggaggtgtgagaggcctggttcccgctgcacctccaggcgagcatggtgtggaaggagtgcgggccaagcagggctggcatgggagggcaggccgcctgtggaaggggacctgggcccctatggggggctgccccaagagggtactgcctggggcgctgcgccgatgcctggtgggtgctactggcgcctgcacccaaggaccagggggcatcaccccagagcacggcttatgagggtgctgggcggggtgtggggggcgccaggggatgtctcagcctgggtgtcagcagaggaggggcaggttgggggttcagcccaaggtgggcccgctggtcgggatgccagtgggttcccaggggggcggcctccaagaagctgctgggtgcacactctgtggctggagggggactcagggggacctgggggtcacccaaagccatgggagagggttgggggctggacctgaggggaggactgcctggggacccctggagaggagtttgaggagacttggggcacaggggctgtgctgcgggtggggaggaggggaagaggagcgggaggagagagagaggagtggggaaagaggaagggaggggacaaaactgagcagaagtggtgagctctgtccacctaagggcaagtgcagcccggctttgggtgggagcccttgcggagggagataggcaggggcccctgtgggtcagcagcccaggctgggcttggggtgggtctcctgggtctgggagcctgagagctgctggggtaggctggacaagaggcctgggcaggcccctctcaaggctgtctcctctggagtcagggctctggcctggccctgtc

SEQ ID NO: 15834 - DNA, 1715 bp, Artificial sequence
  DNA replication origin
actcagtgtttacctggtggggggtattggcggcccccgcggctccagctccccccacacccccttcggcccctagaccgtgcgccagacatgcattaaggcaggagtgacttatcgagctgtcagggggagcgttttaagacagaattataggggagaggaaaaagatttttaccaaattaatgaaaaatcaatgtggcctcaaaaatccattagccttcataatgcgctggttccaggctgagccgcataatccgatgccggctgttaaactcgtggcggtgcccccgcccaccattcatcaccgcacggtgcttactcctgagagtgacacctgcccggtgcccagagcccctgggggcccctgccctggctccctgaccacacacagaggctgcagggagccctggggtgaagcatgtagacggggcagtggcgtggatgggatagagagtgcgccgctggttttggtggtgtccagggtaatcagctgccagggtggcattgccggggtggcagagggcctggtgtgctgttggtgagggtggctaacagtgacggtggcaagtgactgtgaggtgagtgacctggtgtgaatgaccacggggtgagtgaccaggttttagtgaccacggggtgagtgaccaggcttcagtgaccacggggtgagtgaccagattttagtgaccacggggtgaatgaccaggtttcagtgaccacggggtgagcggcctggagtgagtggctgtggggtgagtgaccaagtgaccatgagggtgactgactgtgggtgagtggcctggagtgagtgactgtggagtgagtgactgtgagggtgagtgaccttaagggtgagtgaccatgggatgagtgaccgtgagatgagtgactgtaggttgagtgacctggttttagtgaccgtggggcgagtggcctggttttagtgaccgtgggatgagtgaccataggtttagtgacctggttttagtgactgtgagggtgagtgacatggttttagtgactgtggggtgaatgaccgtgcagtgtgtgacatggttttagtggctgtggggtgagtgacatggttttagtgactgtggggtgagtgacatggctttagtgaccgtgggtgagtggccgtggagtgaatgactctggggtgagtgacctggttttagtgaccgtggggtgagtgacatggttttagtgactgtggggtgagtgacatggctttagtgactgtgggtgagtggccgtggggtgaatgactctggggtgagtgacctggttttagtgactgtgagggtgagtgacatggttttagtgactgtggggtgagtgacatggctttagtgaccgtgggtgagtggccgtggggtgaatgactctggggtgagtgacctggttttagtgactgtgagggtgagtgatttggttttagtgactgtgggtgagtggctgtggggtgagtgacatggttttagtgactgtcggtgagtggccgtggggtgagtgaccgtgcagtgagtgacctacttttagtgactctggggtgagtgactgggtcggtaaccatgttgctgcgtggagacagggtgggcaacataggaggctgctggtcttggggctgagccaaccgggctgtgagatgttggaaagaggtgtttgtacagccataacagcgaccttgcggtggccaggcaccctgaggagga

SEQ ID NO: 15835 - DNA, 1640 bp, Artificial sequence
  DNA replication origin
cttggtgggcactgggagcctctgggaccccggagccaggcaacccagaaaaccgcagacaggtccttgggccaccacacccaccccaccaatccaccactaatgaattgggatttgatccatgagacaatagtggtggccaggctggctccagcagggctgagtgagctgagtgctggagccccggagacagctgcacaccggctggggtgctgcagattgggggctggcgctgcccaccgcccctcatgcttgtgcccttgggcaaaggcactcccttctgggctgtggctccccaactcaacgcaggtgggagcaccctgaatatcccctcctcccagccctggtattgtccctccctggctctggctgctaggctttgtatgggctgctgcccatgcaggccccaggccaagccagtgagggtcggggcagaaggcctgtgagagccaggactgagacactcctgggcggccagtttgcagtagggcaggaatcccaggagaacctcagggaccctttggtgaatggatggatggatggatggatgggtggatgagtggatggatgggtggatgagtggatggataggtggatgaatggatgggtgggtggatggatggatagatggttggatgatggatggatgggttgatggatgggtggatggacagatggacaagtggatggatggatgtgtggatggatggatgggtggatgggtggatgaatgggtgggtggatggatgggtgagttgatggatgggtgggtgcatgggcaggtggatggatggatagatggatggtcggatggatgggtggatggatggatggattgatgggtggatggacggatgggtggatagatggatgggtggatgggtagatggatggatgaatgggtgggtggatgggtggtggatggacggatagatggatggttggatggatgggtggatggatggatggatggattgatgggtggatggatggatggatggatgagtggatggatggatggatggatggatggatgagtggatggatggatggatggatggatgggtgggtgggtggatggatgggtggatgagtgggtggacggatgggtggatggacggatgggtggatggatgcatgcgataagaaggggattgggagctccagagggaggataaacctactggaaagtgcagtccgggtgcgcagggcctatacatggggccaggtggggcacaggcaggtgggccacgtgccactgtggccttggctggaggagggtgaggcaagggggccggggagaggggcacaggtgaggggagctgccagatgcacgtggcctgagggcccctggactacaaggtgatgggtggtttccctgggagtcctgccctgccccatggagagcccttcagggaggtggggacaagagagctgctggccctgcctctctgtgagggatcagagggagggggccactgatggaggcagctgtcagggccccagggagagttttaaggtgagattccaggagagaccagggcaagagagacttttgtcaatttaataaaaaatccatctagattcccagtgcctcgcctgttccatgttgggcacacagagatctcaggcaacccctc

SEQ ID NO: 15836 - DNA, 797 bp, Artificial sequence
  DNA replication origin
gatgtgcccggacattgatcagacagatgagggcctggctgggcctgggggtgggggtgtccacccagcagaggccacggagtgagcactgatctggagaagcacctcctcccaccccaacccccaccaggcactgctccatggacccagaggcctgaggggactccaatgctgccctagggcagtggacagagctgaggcctggccccccctgctgtgagtggcactcagccctgcccaggatgggcagggggacccaatccctggcccgtgagctccaccttggccccaggccgaagggtgggaggctccgtgacctctgcacccaggggcagctacagccccttcccaggtgcctgctggccctgagggccgggctttactggctgcccagccctgggcatcccagatcctcccaggtgtgagaagagacagccccaagggagaccctgaggggagggtccccagcaacagagagggaggaggccgctcagaggctgtggggcggtggggagaaggcagacacagacccagagagaaggagggagcagggaccccagatacccacatgagacctgcagacagacacactggggaaggatgaagattccaggacaaagacagagaccagcaggagggggtgtgtcccaccggcagggaggggctgggaagtcaggaatgtggctgcttgtgacaagggccctatgccagccctgggcacccctcagaggtcaccttggggtggccctgccagcctgagcaattcatggctggtgcatgtcatccaccagatcgac

SEQ ID NO: 15837 - DNA, 883 bp, Artificial sequence
  DNA replication origin
ctgtgcctgcatgccggcctcacaggctggctgagggcgggaggggtgggagtgtgccaggccccctccagccctggggcatagtccatgggggccttgttctccctctgtctcacgacatcctccacaccactccacacccctctccaggaaagaccctgaaccccaactcccaggagtcccttgaaccctcataacctcaacagacacacctgggaatgctcctcagaggagcagctcgggcaccccaagctgaggcccgtgcccacctgggctgcgcccagactccggtcttgaacctctgggctctcctgctcttggacagctcagtgcattcattcagcagtgggccctgctgagcgtcccccaagcgcagggccctgaggaacagctgtgacccagtggactaagacccctgccctccagggcctgggtgtgcagctgggtgggggcgggtccagccacagcatccatcggcaaggggggaggggcttgcaggcaaggtggggacctgcaagggcatggtatgcgcgctgggtctgtggccccctgtgcaggggtgagtggctgcagggccgagaggaggctgtgcaggggtgagaggaggctgtgtaggggtgagaggaggctgtgcaggggcgagaggaggctgtgcagggtgagtggaggctgtgcaggggtgagagggcatgccagtcctgtgggaggtgggaaaagggggtccagggtgagcagcgggctcgagatgggggtgtctgctggagcctcttcccagctgcccagtgcgtagacctcagggacaccttgccagcctcccctccccggccttccctccacaccccaggctgtgctgcaccctacggccaccagacggcgtgcagag

SEQ ID NO: 15838 - DNA, 914 bp, Artificial sequence
  DNA replication origin
ggagggaggcggagggcagcaggggcttctcagctgcaggttcctgagccccttccaagactctagttctgtcagggtcccagtgaggggtcctcgggaggagtccagggacaggctccctgcaagccccctcccctgctgtcaggggcagggacaccaggagctaccccggggcagatccctgcccttgggattccgaggcccagcccagccgaggagctgcaattttacaaacaaacacctgcaacactgccatttgctccaaggggacacctggcatcaggccggacacctggcatcaggtcggacacctggcatcaggccggacacctggcatcaggttggacacctggcatcaggctgcacacctggcatcaggtcggacacctggcatcaggttggacacctggcatcaggccggacacctggcatcaggttggacacctggcatcaggctggacacctggcatcaggtcggacacctggcatcaggtcaggcgtgcaggatgggacaagaaaggagtgggatcttactggggaaggcagggcacgcctccctcgctgacaggggattccccagcaggagcagcaggcagggtgggggtagaagcccacagacttctgggagggatgtgcgggggcccagctgaccacgtggctggatcaccagggcctgcaggaagcgtaggggcagcagcgagagggagggcttcctggtggaggtggcatctgacgtaaccctgcagggacccacagccagtcagagaggccagagaccagccgagccaggggaccgaatagcagggacacaggggctggagaggtcagggccccagctgggtggcagaggcaaagtcacccctctctaattgtctctgacttgtacaccccaccacccacagggctccttgggg

SEQ ID NO: 15839 - DNA, 1237 bp, Artificial sequence
  DNA replication origin
gggtggtggccagccccactcgggtgtgtgatcacccctggtccccttaccaggaaggggcatgacctaccaggcggagattccaggccctgatgtcctcggctctgagtggcatcagtgcccaggccagcctgaggcaggcagggcagagcttggttgtgcagagcaggggtcctccagccttccctcctacctctgccttctccaggggttgtgggctgaggaagcttttggatgcggacccaggagagcctcttgggaatagctgaggctgcctggggttggagaggaagcctgtgagaaggcggcctcctccactgtccctgaggaccactgtggggagcacgccctgggcagagttcccttccacccgggtcctgcgggggaggccaggccagcctaccaggtcccctggctgaaggggaggggccccagccctccctcctggctgctgtgggaggccttgagcctcacgtctcaccaggccgcgtgctgtgggtagaggtgggggtgggagcccacaggggcacatcgccccagtccttggaagaggagatggtggcatgggcagcgtgaagtggaaagcactcaggctggccggggccacgcagggccagggagttgagggagtaagggctggggtgcagctgtcttggcggctggcaagcaggagcggtcaggaggctgaggtccctggggtgtggctgcagaagggcctgcaggccttgggatttcagcctgcatctgcgctgagccaggcgtcctgcccccctgggctgtgatagggacacatcagatctgccttgggagcccaggctggcagagagagtgagctgggagctggcacagtcctgcctggaggcaaacagctggaggtggaggccgggcaggggcctcctgaggacgggggtgctaggagtgggtggggctttctcctagaaacccctcgggccaatacacttgattaaaattaaaagaatttgattccagccagcactcaatgtgtttttttaaagcgatgaaattctttgctcatggtttccccagtcaaatacttttgagcaaagtggaatgtattggtcacagatagctaattttcttaggggtggggggactcgaggctgagaccgggcagccacggagggaggcggagggcagcaggggcttctcagctgcaggttcctgagccccttccaagactctagttctgtcagggtcccagtgaggggtcctcggg

SEQ ID NO: 15840 - DNA, 877 bp, Artificial sequence
  DNA replication origin
tcgcagagggcaggacacccacctccccgtgcacctgcttcttctccggtctcccgcccccagcagcattctaggacccaggggtgtcatcgggtcggggagggaggggctgagcctgggtttggggacatcgggacagggggaggggctggcgctcccgtctggccgggaccccgtggcctagcgcggctccacgaccgacagacggcagcggacgtggggggtaggagcgcgcagggcgggggcgtcagatggcgccgcctggggctgccccccgcccgccatgaggaagcgagttggggccccgggctctgcttatctggaggggccacgtgcccgctgcgccctgcggatggcaggagaggtgacacgccgactgccaccgtcggtgcccggggctgccccgacctggagggtggggcgggggtaccgcgcgcgggcacagctgtctccccgcagttgcccggctaggggtccccgggcggccagtgcacgtgcgcggggtctgctcctgcggggtacaagggggacaacagcgagggtgggcgagggggaggcgagagcagaagcgagaaatgcgggcacagggtgagaagcctgggacctcctgagagggtgagaaggcctgcccccaacggacaccctcatgcctgaaccaccagccactgagctctccttgtcaagagtcctggggcccctcgccagggagacgccaactgagcacccagcaggacgacgccccgcagggaaagatggcttgggttgggcctggggagtccctgccgcctagacgggtccctggggagggtcagtggcacagcctggtagactgggcctgagtcaggcagtctttcggggaggacccctcactcagcga

SEQ ID NO: 15841 - DNA, 754 bp, Artificial sequence
  DNA replication origin
ccactctcgtccagcccaccagccccggtctccatcccagccaggcctgggtcaccaggcggcagtaggaccgcaccctcttttccctggaggagagaagaggggccctgtagattggccacgcgctcgctgagcctcagtgacctcagctgtaaggtgggtgctgatgacagacgtacctgctgcggggtgggaggagcaggtgacaggctcattcccggtaaggcgggcctggtccccatcctggctgctctgcctgaggcgctctgggagagcagaggcggacacagaggctgggaccacctgagggacttgctggggctggaggaatcccagtgcagaggcggacacgacagggcggggcaggggccgggaagggaaagggtgggcggggaatgggtggggccgatgtcggagggacgggaccgggaaggggcggggccgaggccggaggggcggagccggaaggggcggggcagatcggggcaggggccgtggcaggaaggggcagggcggggaccggccggggacctgggcgaggcgggacgggtttggtgcttgaacccgatcttagcgctaggagaaggtccagggggtgggctcctcgcagagggcaggacacccacctccccgtgcacctgcttcttctccggtctcccgcccccagcagcattctaggacccaggggtgtcatcgggtcggggagggaggggctgagcctgggtttggggacatcgggacagggggaggggct

SEQ ID NO: 15842 - DNA, 2246 bp, Artificial sequence
  DNA replication origin
ccaactcgcttcctcatggcgggcggggggcagccccaggcggcgccatctgacgcccccgccctgcgcgctcctaccccccacgtccgctgccgtctgtcggtcgtggagccgcgctaggccacggggtcccggccagacgggagcgccagcccctccccctgtcccgatgtccccaaacccaggctcagcccctccctccccgacccgatgacacccctgggtcctagaatgctgctgggggcgggagaccggagaagaagcaggtgcacggggaggtgggtgtcctgccctctgcgaggagcccaccccctggaccttctcctagcgctaagatcgggttcaagcaccaaacccgtcccgcctcgcccaggtccccggccggtccccgccctgccccttcctgccacggcccctgccccgatctgccccgccccttccggctccgcccctccggcctcggccccgccccttcccggtcccgtccctccgacatcggccccacccattccccgcccaccctttcccttcccggcccctgccccgccctgtcgtgtccgcctctgcactgggattcctccagccccagcaagtccctcaggtggtcccagcctctgtgtccgcctctgctctcccagagcgcctcaggcagagcagccaggatggggaccaggcccgccttaccgggaatgagcctgtcacctgctcctcccaccccgcagcaggtacgtctgtcatcagcacccaccttacagctgaggtcactgaggctcagcgagcgcgtggccaatctacagggcccctcttctctcctccagggaaaagagggtgcggtcctactgccgcctggtgacccaggcctggctgggatggagaccggggctggtgggctggacgagagtggcaggaggtctctccagacagtccccaacccccaggctccccacctatccccaggcttccctccgtcagccttcccaccccctagcccctctcctcaccccacgagcctgttggggaggggccgctcagaggagaaggactcccagggtgtggggtctggccatgctcacctgcctctcacctgatgccatgttcaggttcccgtggacctgtggctgcttggagaggccgggggtcacagatggcgccaggacactgtggtgaggagtgagtgtgctgccctgggggcagagcctggacagggccagtggctggaggctccaggacacactctgccccaggaggctgcccggagagggcctgaggcccagctcccaggacgctaggctgtccttgggcagggatgctgaggggtgtgtgacagaggagagagcccagcatggggaggggtgaccaggcctgagagtcacagaaggacaagagaggccacaggccgtgaccagaaccagggagatttgggaccatcaaagttgggggtcaggccaggggtgggaggaggggcagggcctgggggcccaggccagaggtgcagacatcacagccaacagctggggctgagggtaacaggaggcagaggtgagggcacaggggccggacaagggccaggtagagggtgggggccagggtgaggggtgggggccacttcctggggatgcagagagcagagctgtccaggctggggagggggacttggtgccaggttgcccttcaccctccttcagtctcaataaagtcactaattagcatcctgaccactcaattagttaggctgtatgcacttaattatgacagagtacaccggtgggggcaggcagtgccatcagctcctccagccccaggagccagggtttattgaccagaaaagacatatgagactgtggcccgcagccctgcttcctgatgcggggcagggtgagcggaggggtagggaggcaggcgggaagacccccaccctgagcgtctacaggggttcccatatcctctgctcagctcccccaggcccctgggagggagtcctccccactccacacctctggcctctgacttccacctgtacctgcctctttctctcagactgcgattacctgaaggggtccaggcagggtgggttcatggcctggtgcctccaagtgaaggccacaccacttcccagccctttgctcctggggcctggagcagatgtgtctgagtcagcttctctttgtagcctctgtcgggctgacagtgacttcaggaatgctctcctcctgccgcactctggacctgttggccatgctgttcaa

SEQ ID NO: 15843 - DNA, 1267 bp, Artificial sequence
  DNA replication origin
gcagatgtgtctgagtcagcttctctttgtagcctctgtcgggctgacagtgacttcaggaatgctctcctcctgccgcactctggacctgttggccatgctgttcaacttagcaaatgttcttcctcaccgccaaccacagtggccaggtgcaagtccctcttggacaacctcagccctggatacaccgccttatttaccacttcgtgagcaaaaatagtccttttttttaaatggggtctccttctgttgaccaggctggagtgcagtggcgcaatcacagttcactgtagcctgacctcctgggctcaagcgatcttcccctcagcctcccaagtaactaggactacaggtgcataccaccatgcccagctaatattgtttattttgtgtagagacagggtctagctatgttgctcaggcttgacctttagtttttctcagaatttcaagaggttgtgtcttatctgccaacagatcatgcaaccagcaaggctctggtccaagtaggaacggatggtaaactgggcagtgatgatggtggagatggtggtggtggtgatgatgatgacaatgataatgatgatggtgatggcagtggtggtagtggtgatggtgctggtggtgctggtgatatgatgatggcagtgatggtagtgataatagtgatgataatgtgatggtagtgatggtggtggcagtaatagtgatggtgatggtggcagagagggtggtgacagtgatgtcagtggtaatggtggtggtgatggtaatggtgatggtggtggtggtgatgatggtggtgatagtggtagtgatggtgtggtggaaatgatggctgtgatcgtgatgatgatggtagtgatggttacaatgatagtggtggtagtggtggtgatggcaatgatggtattgatggtgatggtggtggtggtggtagtgatggtggtggtggtagatggtggcagtgaagacggtggtaatggtagatggtggcagtgaagatggtggtaatgatggtaatggtgatagtggtgctggtggtgatggtgatggtggtggtggtggtagtgatggtgatgatgatggtgatagtgatggtggtggtggtggtggtgctgttagtggtggtggtggtgttgctggtggtgttggtgatggtggtggtggtggtggtgatggtcatggtggtggtggtggtggtggtggtgatggtggtggtggtggtggtcatggtgatggtggtgatagagccaagaggctcttg

SEQ ID NO: 15844 - DNA, 1437 bp, Artificial sequence
  DNA replication origin
gggtagatgggtgagtggttgggtaggtgagtgggtagatggatggatgggaggatgaggcatgggggaatgggggatgggtgggagtgggtgagtgggaggagggtgaatgaatggatgggcgggtaagttggtgagtgggtgggtgagtagggggtatgggggtgagtgggaagatgagtgggtgggtgggggggtatggggaagagtggatgagtgagtggatgggtgggtagggggttagagagtcagtggatgagtgggtgggtgggtgggggttggagggtgggaggatgagtgggtgggtggctgggtagggggttggagggtgtgtgggaggatgagtgggtgggtggggggtagggggctgaagggtgggtgggaggatgggtgagtgtgtgggtagggggttggagggtgggaggatgagtgggtgggtgggtagggggttggcaggtgggtgggaggatgggtgggtggggggttgggggtgagttggtgggtggatgggtgggtagggggatggggttgcctgggtgggtggtttaggaagctgtggaatgactccaaacgtggagtgagggagctcagtttgtaccaccgaacctttgctcatctctcccctgggccctcttccctcttctctccagagccctcctcaaatctcacacctccattttcaagaagctggcctcacccatgcagcctctgtagctctccttcccctccaagcttgtttctctcggcgctgccaccgtcggattcctgtgctggttcttgctggttttcttcacctcctgaccaccagaacactggcgccgggagggcagggtccgtgtgtttccacggttgatttcctagaggctgcagcagcgcctggcaccgaggaggtgctccatcaatatttgttgaaaagaaagaaaaggaaagcaggatggagatggactgaccctgcccagcacccctgtccagcccctgcccagcacccctgtccagcccctgcccagcacccctgtccagcccctgcccagcacccctgtccagcccctgcccagacccctgcccagcctcccctgtctattttccagacagcagccagaggcgtctttgcagacaccactgtcctgcagcaaccctctaaacccttcgccggctccacagtttgatccaggtcagtctgagttgctcagtcagtcctgagacctgccctctcttgtccctgttctcactgccccctgaggcttccagtcttcctttaggatctgggccaaaatggcctcctccaagaagaccccaggctgttctgtgagctggtttccccctgtgtccaggaatgcccccactcccacagtagtgaagtctactttccacctgctaccatcagagttgagcccagttctgggcctggcacacaggtggggcactccacagggtctg

SEQ ID NO: 15845 - DNA, 947 bp, Artificial sequence
  DNA replication origin
ttacctggaaagacctttatggaaaattccagggccaggctgagctgctgcccacacccacaggctagcagaatccaagagggacagtgtgggggcgggagggccacacggaccccttccttcccccagacctcctttcttggtgacagggagaaggagcaaggtgaggaggcttctccaccgtgagtctcagacggagagctgtgccctcattcacctttggaacctctgacctgaggcaccttgagacgcaataatattaataccttaactgcaagactccgcgactcacagagagatgtaagtgcaggtaacagagagctgaaggaacaatgactccaacaaattcaatggaaatttaatttctatgttgtaaaagtccagaagctgatggcccagggtggccgtggtgactgcttcacagaacgctctggattgaggctcttttcatcttggcctgtactcccagggtctcctggcccacaatgtcagcttccactccaaccatcacatctgcatttgaagatgaagaaaggtgaaagaggtaaaaacaaaaggagcatatgaggtgatgggtggatgaacggacagacagctggacgtgtgacaagaaagatgaggaagacagcaggatgggtaggaacgggaggatagtggctggatggaaggatatatggatggttgatggtgggtgaataaatggtgtgtagatgggtgaacaggtgggtgagtggatacgtggatggtcagttgggtggatggatgggtggatgggtggatggatggatgggatggtgggggaatggggagatgggcagatgagtgggtggatgatgggtgggtggatggatggaagggtgcgtgggtgagtgggtagatgggtgagtggttgggtaggtgagtgggtagatggatggatgggaggatgaggcatgggggaatggggg

SEQ ID NO: 15846 - DNA, 920 bp, Artificial sequence
  DNA replication origin
gtgcaccgccctggcaccaccatacctgagagctcaggaggtgcgggtggtgcggagggctcgcgcgggggtggctctgcgagtctgggaggaaggctctggtctcctcctcaccttgtccacgcgtcttctctggagcagggtgggggctgccatcgccttggaggcgggtcaggcggtggggcgtgggtggagacggggccttggacctcgtcactggccttggttaggtcaggtgggcacctccccagccccccggcccagtcaccaggccacccccgccatggtggcagaggggctggactggagtcggcctgacctctgcccttccccagctggaggtagagcgggggccgtctctcagggctcaatcacctcatctgtaagaagacgctcctcccatcggccatccacacaggggcctcatgagcagtaaagagagggacccgttcagcaagcccttcgtcaatctgagaaggcttcttggaagagggggctctgttccgaggggagggcgtggagtgggatgtgcctctccaggtgcaccggggcgggatttacaggggtgcccccaatccaagaccggagatgtcttggccacgtctgtggggcttgcagaggggcctgggggaacagagcttggctcctggcaggaggggagcagggaaggagcaggcatgggaggggcacccagagctgccatccatggggggtccccagctcagcccagctcagctcccagaaggctttcctccccctactcagccgcagtgcgctgcccatcactgcagtccccactcctccttttcaaacccctcatccgctgggtctgtcccctcaccctcccttccacagcccttcccagaaggtaaaacccagccctgcccagacctgtgtactagggacagaacagccccaac

SEQ ID NO: 15847 - DNA, 1329 bp, Artificial sequence
  DNA replication origin
gggtatggttgggagcctggggacccaacacccctaccttgggcctggaggaagggcaaagccatccctggcccagggcctggggacgtggaacagggcgggtgtcaggaagagcctggccttctccccagggggccttggtctccccacctgccagccactctggaaagcagatactccggggctctgagtcagacacagaggtgatgggctgacatttgcaggacaggaaagggccaccagccctgtggggtccatgctttcccttgcccagccccgactcctccccgctgccctcatggctgaagcagccatacctctgccgtccctgggcctgggtgcctgctcagcagttcctggccacggagtccagccgagggctggggaggcccagcaagggtgcggggcagggcctgagtgcccccgctgtcccagattcaagcccagcctggccccaccctcacaggggcccacctccctaaggctgagggtcctggcaggttgtcgggggcagcaaaggctgagaccagggcgagggcccagatggtcccggagagcgtggatgggacggacctgggggagacctttcctgataggagctgggaggcgcgtggaaagtcggggcgtgaggtggatgcaggttctgtgttcgaccttgatggtgtaatccctgagggtgcacggggaggggcagcacggggtggactttgggggtgcagcatgtgggtcagcagggagagcccgaggctgtgggctgagccggggagggtggaggcctgcggggtcttggctgagcctggctcctagggggtctcgaggtgggggcaggcagctcagacaggagtaccctccagggtccctgagaggaggcatttggatccccgggctcccagggagagggtggcggccgagggaccctgaattagggagtctggggtggcaggggagactggcggggcagggccagccagggcccgggaagtgggaccggtgctcagaggactcggaagttgtgggggaggaggcagggcctgggagagggtctgaggcgggaggctggcccaggaggaggggaaaccgcttcctcacctgggaggcggaggaggtgggggatgggggaagggagtgtaccccgaatcaggaggtggcaggaaggtgggagtggcttggagcccacaccctcgacccccacacacagtcggcagtccgcatggggagcagtgacagaggaatttgcggctggcgggctcagcgcctgcctaatttgcagtgacaccgctcagctgcccagggctccagctgtcacagccaattagcccgcggccgggg

SEQ ID NO: 15848 - DNA, 1060 bp, Artificial sequence
  DNA replication origin
ccctcctcccggacagggtgggctgggctgaaccgagcagacagtggctgaggaccgcacttcactggagaggcccatgtcagagcccactgtggccaggcgggactcagcatggaggaccggcccagacaaaaccatggggttggtttgcgtatagggccggtgggtccacatgcatgtgtctgggtgtaactccaccctcatgtgtgccagccaggtgcacgcgtgtgtgtacgcagggccacaagtgtgtctgctgttgtgtccccgggtgggtagagtctgctcccacattctgggctgtgtgtatgtgtgtgtgcccgtgcatgtgtgcacgtgccacagcgtacccacccttgtgctggggctggggcagaggacacttccgctttgtcctggccctcatctcagagccggctctataggaggctgggggggccctgccgacagccaccactgtgacgtactggggggcagtggggggaggaaacagggccacacttggcccagcgcctgggaatggcagaggaaggagggaaggccctggccttctcctgtgagcacccccagcccaagccctgtgcgtggctgacgggggcttaaggcaggagaccagtgaccatccaggtgggctgtcgggcccaggcgagcgtgtgtgtggggggtacagatgggctgtcgggcacgggcgagtgtgcgcgtgggggggtccaggtgggctgtcgggcacagacgtgtgtgtgcgtggggtccaggtgggctgcgggcacagacgtgtgtgtgcgtggggtccaggtgggctgtcgggcacaggcgagtgtggggggagtgcagccagtgctcctgctcgtgtgtccagtgtgtgccatgggtgtccacccaggcccagggccttaaccccggccccttcagcctctccctgctgtctgggaagacacagctcccattggtgggagatgggacacaactcctggggccacatatctgagctgccccaggaacactaggtcctcacgctgcaccctgttcaaggcagcctcaggccccagcctcccctctc

SEQ ID NO: 15849 - DNA, 859 bp, Artificial sequence
  DNA replication origin
aggaggtcatccggctcaagcagaagcggcgcacgctcaagaaccgcggctacgcgcagtcctgccgcttcaagcgggtgcagcagcggcacattctggagagcgagaagtgccaactccagagccaggtggagcagctgaagctggaggtggggcgcctggccaaagagcgggacctgtacaaggagaaatacgagaagctggcgggccggggcggccccgggagcgcgggcggggccggtttcccgcgggagccttcgccgccgcaggccggtcccggcggggccaagggcacggccgacttcttcctgtaggcgccggaccccgagcccgcgccgccgtcgccggggacaagttcgcgcaggcctctcggggcctcggctcggactccgcggtacaggacgtggacaccaggcccggcccggccgtgctggccccggtgccaagtctgcgggcgcggggctggaggccccttcgctcccggtccccgttcgcgcgcgtcggcccgggtcgccgtcctgaggttgagcggagaacggtgatttctaaggaaacttgagccaggtctaacttctttccaagcgtccgcttgtacatacgttgaacgtggttctccgttcccaccttcgccctgccagcctagagggaccgcgctgccgtcccttcccgggtggcccctgcctgcccccgccctccttcgttctcttctcagcctccctttccttgccttttttaacttcccctccccgttttaaaatcggtcttattttcgaagtatttataattattatgcttggtgattagaaaagaaaaccttggaggaagccccttctttccccagccggggtccgccctcagt

SEQ ID NO: 15850 - DNA, 2164 bp, Artificial sequence
  DNA replication origin
gtctccaggggcctcagctcccacacccggcggccggagagtccggggaagcagacggggaccgcgcccggggaccccctcggggcctcgtccgcctcgggccacgcggcgggacgccccctcggccccctgggtttgcggccgggcctgggggccgggggcagctccgctagcggcggcggcggcggcagcgggacctccgggcctctggacacgggtgacaccgcgcggcccggcagagcgcggcgcgctgagccggttatttttagcccgcggctcagacgcgttcaggaatttggtcaacaaagttgccggcacctccgggcaccgggaagcacggggcgggcggagggggacacacgcgtgcggggcggcgcgaggggccggggacggagggccggcttgtggggggccgcggagagcgcaggactgtgggggtcgcgggacaacgcgggtgggtgcgagcggcgggggcggggcccacgggctggcagcccctcagggcgttaggaatccccgcccaagcggccaccactgcccactttcgccccccgcagggctggaggcgccttgctgggcctggagtgggacggggggtaactgagacgggaaggcggggatttccacctggcggccgtgcacctgctgggaggagacggctccggttcacggggcaaaggaggtgacgatgggcggtgggcctgtgaccccaggtccccgacaccagcgagccgggtgatgggagggttgcgccaggagttacaaggccggtgacccgaagtgggcctattgtttcttctcgaaattctctccattgctgttctatgacttcagcaatttaaaaaaaaaaaaaaaaagtctaaaatgtaaccacctgtgtagagaaaaaaagcctggaaggagttgcgcagaggccacagggaggcctggtcacggcgccgcagatttagtaccaggctctcacctccttccctctacaaagatctattgttttgtaacaagaagactgtcatgaagtgaggactgaacatctgcttcctaaggtgtctcggggtgtccctggcccttccctgggccctcccactcctctgggcagagctgggactgctgatttgggaagaccaggccttcctccccgcaagggagggccaaggacagcatgaggacccacctgcagggacccctctcccccgatcctgtcccagagggggctctgagctccccacccttctacagatgaagaaatgaagtgggcatgcagcagagccaagtccccacactgggtacctggacttgagaccacacgagtggtcagccagccaggggtgtggggtttcctttatggcaccccgtgttgagagggaggcccgggaagggaggatgccgccgcgcagtggagctggtggtagtccaggttgtctgcacctgcagccccaggagaggccttggggctacagggccctcccacggcccctccaagggtctagcagcatttctgggtaccacaccctggaggccctggggcacactggaaagggggttgaggaggaaagagagagtgtttgcaccgggctgtgtccccactgtccccccctcccgcccatcgcactgtggctcctgccaggccaaggagaccaggagagggtgtttggtcaccagcccaggaggactccagcacacccgtgggaatgaaggagacgcctgaccccaggctgttgcagtgggaaccttccccggggccacagctgtgacctcaggctgagggacgctgaccccacagccatgcttggactcagtggcacccccatcccgccaccacccacaggaagcctaagtgcctcatcttgctctgagaggtgggagaaggtggtggaggctggggtggcctcaaagattgaccccaacccatccgccccaagcctgccaagccctccttgaggcttggtgctgtcaccaccaagccaggatggctccctagaattcgcctgtgctccgctgttccctgggctcccagaagcgctttcccttcccgccagcctcccaacccaagggcttctcacaccctccaaactttcagcatttggtcctcacagaattctgcaggggcagtctgtgtggctgggtaactcaatgcacccaacaggcttctcttgagcacctagag

SEQ ID NO: 15851 - DNA, 1467 bp, Artificial sequence
  DNA replication origin
cttgctgcagccttctgcaacagctccgctgagcacactcaaatgcctgcctcggaggggccgcctcctgttcacagcctccacgtcaggggcgtggagccgtggccagaccctccgccccacgagacctgggcacccgctccctccatctgggtgggcctctctggggtcggggagcagatggggccccgaggcagcgacttgtatttttttttttttttaagatcaggaacctagcagccagttccagagccagtggaggtgggcagggtgctgaggggtcctgtgtgcaccttgggcggggcctgggaaaggctgcagaaacctcccctgcttggccatggccaggagctcgggcaggtggaggtgcctgggacagtctctgggcaggaagctggagctgctgctggagcggccaccgcaggggcaggctgacgggtcagagcctgtgtagtctgtagcctgggccctggctgctgggcccgactcagctgtgcatgggtgagcgggctcatcggccctgaagaggggcacctgggcaggcccagtcctgtgggcagctacacggagacatctctattcagcgggccactgtggtgcctgtcgggtggtctggaggggagatctggggagggaggagaggcgctggcacccagtgagtgaacattcatggggcaggagcccctgggcttccccgctgtggggaactgctccctccacactgcctgcctccaggccctgcccgcctcaccctggggcctctgctctgctcctgcccctccccgccacagcttgtgtgcaccccggctttccacatggaagctgcatcgtggccgcctcgtgtgtctggcagcctcactgaacgtgcagggcagtctggtgctgtgtgcaccagtactgatggcccaccctgcagaccttgtggccgggactgccgcccgcccaggaggacccctggactgtaggcagaagcctcagttgacctcatagactgagcctgcaccatggctagacagccacagaggctcaccaggacctgttggcagcagggggcagaagctgaagcctgtggcctgtctgtgctcttctccctcgaactcaggagggtatctctgcagaccttgctgtgtgtgcttgggctgacagagccccccgatcctgagcccgatcaggagctttgcaggctggggaggttcttccaggggtttccgggcacctaacttttgccctctttgcatagggaagcctctgcacatcaaaccacgtctgtgaggaccccagggaccggcctgcacctacctcagaccctcatccttggagaggaaagaggctctgtccaccactctaccccacaggagggccgcccgccaccaagcctcacctgggggccacagggacactgctctgcctgcctggccctcaaccttccatgaccagcgtgtgcgcagggcctggtcttcctccccc

SEQ ID NO: 15852 - DNA, 1364 bp, Artificial sequence
  DNA replication origin
tgatcttccagaacaaattaacagaaatgggtgctttctaattaaatcagccctcagctggggcagactgcgcagcggccaccgctacactcgcaccttggctggccctgccccagggctggcaggtgcacccctggcgcccgtgggactcacccaggccccacctggagattctgacgtggtggtctgagggggcatttaaagctcccctgtgcccgagcccggccatgctgcctacctgagcccttggtgaggggggccctgggggcctgagccaggccatgctgcctacctgagtccttggtgagggaggccctgggggcccgagccaggccatgctgcctacctgagtccttgctgaggggggggccctgggggcctgagccaggccgtgctgcctacctgaatccttggtgaggggggccctgggggcccgagccaggccgtgctgcctacctgagtccttggtgaggggggccctaggggcccggaccctgggctgggctcctgggctcggcgaggactgcagggagatgaaggaaggcagcttgcagagcctgttggagcacgctgctgctaaggcagcctcctggagagatggtgcctcgtggtccaaggaagcgggaggggatgaggaggaggaggaggaggaggaagccttcgaggatgagggagaggctgacccccctgggcagtggggaggtgcagccacggcagccgcagtgagggcagccgagctgggcgtctgcctggtggggcgctgggatgctgaaggcttcctgcagggaaggaaggggcagacgtgtgaggtggggtgacgggtggggatcccagcgacagactgcccatgctcttggctgcttcctgctcccgtggccctccgtggtctcagggcagagctggaggcacaggtcaggcctggcccttggccgcaaggacaggctgggtgcagggatggccccagctccacaccgagcctgcccctcacatccagggccttggcttcctggtctccatggggctccacacccacatggcaggtgggctggatgagggggcccccagactcctcccggggctgggcctcccacccggtcccagtgagcaggtctctgtgaggccccaccttcctccattggccagggatgcccttggctctgtccagacttggaagtggggtaggggcatctctggaggtcatgtgatccccagccttggatagggatttctttctggtctgaggcccaaagagctggagttggcgggagctcaaccagagggccccgggcatctccccagacagggagggggccacccaggctcacatgcacagtgcccactgccccatcacctgggcccgtggc

SEQ ID NO: 15853 - DNA, 1369 bp, Artificial sequence
  DNA replication origin
catcaaggaaaaagaaatgtgcattttacattattttgctcctactaagtctgagtcctggcacatggtttacaccaacacccacacctcagctcacactggctgtgtggcaggtgccctctggacatctcagccgggcactctgcatccagtgttgcccaccagccgttgctggggctgtgggtgcatctgataaaatgcacccgcagccttggcaatgcctgcagtcctgcccctttgtgaacagtggacctgcacacccccacgcccgtcccagtaccgcgtgggatgcctgtgctggtggcagggctttccttgtcaggcacagccactgcccctgcccccccccccccccggaggccttgcccccgcccccccaccccccccggcccctgaagcctgctctgctgcaggaccgggcatctctccagccgcaggcccctgaggagcccctggtctctgggccccaaagcactgcgaggcgctgtgtagagggactcagactccgtgtcgcaggaatgaatgagtgagtgagggtgcaagcactggcctgagcctggcttccacctgggggtatggcgggggccacaccacaggatccagggaaggtatggggtacagtgtagggcccggttctgagcaggtgctcacggccagccccaggtacaggagcagtacctgggatcccagattcttaggtcaggtgcctggcaagggactgtgtggctgggaggatgtgggttcaaggctgtggcaccccacgagctggaagcactccggccactctagtgccgtgacagatttgagctccactcttggagcttgtcacagttcacattggggacgcctgtcgcttagtcccatgaagagcagtttgggtgccccatgcagtgggctctgcagggtgagggggagggcataccctccctgaaaggccttgggcacgaggcaggcaggcagctgggctgcagagcagagcccgggaggggtgggcagaggaagggcaggctgggcgccctgcaccacaggccaggctgggccgctggggccttgggcagcctctttgtgtttccctgtgggcctggtaggagagctggggccatgttgctgcccagagcacctgctggctggcacaccccctgccctgtgggtataattagcactgtgacaggtgctagggatcgcgtgcccagcccagcccagccctgacccagtgcagcctggccttggctgacctgccccaccctctcccggcccagcctaagacccccaggtctctagccacacccaccttcccgggctccctctgtgctgccaggatgggctggctggggtctggcagaggcagcgggtgggcagagccctgagc

SEQ ID NO: 15854 - DNA, 1153 bp, Artificial sequence
  DNA replication origin
tgccacagccttgaacccacatcctcccagccacacagtcccttgccaggcacctgacctaagaatctgggatcccaggtactgctcctgtacctggggctggccgtgagcacctgctcagaaccgggccctacactgtaccccataccttccctggatcctgtggtgtggcccccgccatacccccaggtggaagccaggctcaggccagtgcttgcaccctcactcactcattcattcctgcgacacggagtctgagtccctctacacagcgcctcgcagtgctttggggcccagagaccaggggctcctcaggggcctgcggctggagagatgcccggtcctgcagcagagcaggcttcaggggccggggggggtgggggggcgggggcaaggcctccgggggggggggggggcaggggcagtggctgtgcctgacaaggaaagccctgccaccagcacaggcatcccacgcggtactgggacgggcgtgggggtgtgcaggtccactgttcacaaaggggcaggactgcaggcattgccaaggctgcgggtgcattttatcagatgcacccacagccccagcaacggctggtgggcaacactggatgcagagtgcccggctgagatgtccagagggcacctgccacacagccagtgtgagctgaggtgtgggtgttggtgtaaaccatgtgccaggactcagacttagtaggagcaaaataatgtaaaatgcacatttctttttccttgatgacatgttgaaatttttgataggatgggttaaataaaacatgattccatctgctttggtgtataatcttttttaaccttttaaaggtggctactagaaaagctgaaattcacaaatgactcatccatgtctgtactggacagcgccgatgagaaccctcctgcagaacacaaccaaatcccgaggatcaaagagaactttctgaggccctgcacagtggctcacgccggtaattccagcactttgggagcaaaagcgggtggatcacttgaggtcaggaattcgagagcaggcctgaccaacatggtgaaacggtctctcctaaaccgtctctactaaaaacacaaaaattagctgggtgtggtggcacgcacctgtaatccaagctacttgggaggc

SEQ ID NO: 15855 - DNA, 776 bp, Artificial sequence
  DNA replication origin
agactgggaaccagcagtgccgacagaccgccgcattgccgcgtccctcaccccacaggctggcaggtgtgagggcgtgcccgtgccgtctggactgggccctgctgcccacccggggacaagggtcccggcctgagaacgggggctgccctgagcacccccgcgttggtccctccgcaccaagaccctcatcaccctccctttgcccctggccccccacacgcctcaggtttctgcgttcttcaacgccccctttcctgccccaggtaccatgactagctcctgctcctgccccagccgggctcgctggccactcagctctggagctgcccttttgaaacttgagacgggctgagtggggacagtaggcagggcccctgagggtgaagggcagcagcaccactgaccctagctagggagcactgggctggacgcaaagcacaaagcgaggagtggggggggctccagcctgggggtgcgagggagcggaagccttgggtcctcgggtgggagtctgcggctgctgggccatctgggagagtgaggacgaggctgctctctggtgctcaagagtggggcaggtctggctatttggggctgggcggctttgggacatccctttttaaaccaggatggctttgtcaccacctcaggtccccagaatttctgagtgatgtcacctctgcctcttaactgcagtgtccatttcagcatttgccctgtaggaaattggatctggtctgggaaggatcatgcgcgtatttgaggaacccggg

SEQ ID NO: 15856 - DNA, 867 bp, Artificial sequence
  DNA replication origin
tggccctccctgctgtgggccagctgctgcgtgttcctggcacgtccggcctctgcgcctcccctgctggtcacctgcccaccctccctggggtgacgaaggccctgtcggcttgcccccgccccacactgcctcttctggggcaccctctgccgctggctgccttctcccaagggcacagcctccatgtgccagacggacgtgccctggagggcctggtgggcgcgctgtgagcagaccagggcttggcgcagccctgcctaacttcttgggagagtgctggcctgggaattggggctgcctgcgtgccccggtcatcgtggatgttgtcccttgggccaggcagcagctgtccagtgggtgctggccggagcagggcctggaggtgctgaggaacctctgactgcaaggcccccaccccgcttgccttgcagagcctgacatccagcggtgcccagagctggcactggggcaccgagcagggggtggggctggtgggagccgagtctattctgagaagatcccggggaagtgaaagttctctggaatgcatggcgccttctgctgtggagctgctgggggttattcagttgaactttttagcacttctcaggcagcccttgcttcttttccagccagctattttatgtgcattttttaacactgcaaagcatttgaaaaagtgcctcctgttcttgtcagaactcctgccgtgagcctcacactggcatttttttaaagagcacaaagtggaaagggaggtaacccctcctgctgcacccggtcctgccaggcgggcacgtgatgccagtgtgtccctgcctggagcagatggcgtcgcagtgtcactggcagcctgggcgagag

SEQ ID NO: 15857 - DNA, 1056 bp, Artificial sequence
  DNA replication origin
gtcctctgccgtcaggggcccagagcccagggggtcagccaggacagccacccccaccccttccaagaaggctgctgcactttcttgttgaagtcaaatttctgctgacaccaggggaggaaatttatttctttaattattattcctcttaagtgggctggtcagcggtatcccacagctgggagccatctaccttcctcatggcgaggcggggccggtggtggcccaggcagctggagctgtggcctcgcctgtcgacccaaagggcgagtgcggcctcactgggctctgcacagccccaggactgccacagtcgccaccaaggctggccagcgggacaccggaggccatagccctactcgatggcaggcgggcctccccaggggcaggggtgggagcaaggaggcccctggacccctgcctgccctggctggcaccagcctctgtgcgccagaccctccttgctggcgttgctgaggctgaatgaaggagttctgggttgctgctggtgcaggggtgagacatgccccagaagggctgggggaaccagactggctctctgatggctctgggccaagggaagggccaacggaggcagaggccagtcagcaagggtggccgggatagactgttcacagtgtggtgacgtcaggggctctgcgcccgccagggctctgccatgtgtgtaaatggcaaggcgagattctgcggagctcagcacttggcaccgacggggagacacagcagcaccacagcctcccagggaggagtgtgcagcccctccctctcctccccactgctgagcgggccagggctatgcactccctcctccccaaagctcagaccctgggccatccgggtggtgggcaccgtgtctgagggggccaagtgcaaacctgctgcctgccacaggcgtctctgtggacactgagggatgggagagctgggatggcaggtgcacctccccacacaggcccacccagcccaacaaacgtgggccacaggatcccggcgagggctgagacgacccaagggccccggtgcggggagacggac

SEQ ID NO: 15858 - DNA, 1030 bp, Artificial sequence
  DNA replication origin
tctgcggagctcagcacttggcaccgacggggagacacagcagcaccacagcctcccagggaggagtgtgcagcccctccctctcctccccactgctgagcgggccagggctatgcactccctcctccccaaagctcagaccctgggccatccgggtggtgggcaccgtgtctgagggggccaagtgcaaacctgctgcctgccacaggcgtctctgtggacactgagggatgggagagctgggatggcaggtgcacctccccacacaggcccacccagcccaacaaacgtgggccacaggatcccggcgagggctgagacgacccaagggccccggtgcggggagacggacccatgccacaagcccctccgtgggtcccgcgggtgcacggtgcagggagaatcccaaggacgcaccgcgacctgggtgaacaggcggggccagccttggccctgtgcagggagtgggatgcagctgctgcagtgggggccactccctgagtgggtgggtcctccctgggatgggctctggctctggaaagggcagtaggcatcccctccctggctccagcttccgcagagcagggcagggcctgcagactgactgccaggagcagcctctgctgcctatcctggccgcctggggctctcgcgtacgtcaggacatcatggtctccatggctgctgtcttggccacttaattatcaacctcagtcagtactactatcgtgactaccgggagctttctgaatgtgggtgcagtggtgccaggtagaccccgcctgcccccaacccatctcctccccctgctggctgtgcacagggtcctgcgatgcctcacgccccctcccactcctgcccaggcctctgcatggcggcctcaggatgctcttgctgcttctgtcccttctgggccctctcagttttcagctcatgagaaaggcctccctgaccacctgactggacacgagtctgcgtatttacacctgtgggccccaggaatcttcactggtgttcagcccacgcctct

SEQ ID NO: 15859 - DNA, 1067 bp, Artificial sequence
  DNA replication origin
ggccgcggcgcccgtaatcgcattggcgacgcctcgacaactgtgtctggaggcagccggcgccgccaccttgcgccctcccagcccagggaaacaggctcaggagaaggaaatgctttggattcacttatcctacaaattaactagaaaaatattttggtttcagtccaattttaccccctttcttgtccatcaaaaaaaaagagggagattgcaggtggtgttgggattgcagaggctgggccatgctggctccccgacccgcctgggacctagagagagaacaggttcagcccctggaggaggtagactccgacggcagggtctgcgggggtcagaggagaggcaggaagcgtacctccctggaagccagcctcactggccgccctgcctggctgtgttcctagcatccatctctgggctccaggggcttctgggctgtttcctgggcagagtcgctgggagcagcacgggggccctggcacctgccccacagggctctgagccacactgtggctggtcagtgcccatgaccatgcctgtagcctggtggctggggctggggggtcctggtgaactgggcaggaataaatccccactcgctgaggatctggtgagaagccctgggtcccttcctcggcactgtgtcacccctgtgtgtgcctcccactcactgaggatctggtgagaagccctgggtcccttcctgggcactgtgtcacccctgtgtgtgcctccgcttccccacccgtaccttgagggactgggctgtgtgatttgtgcgtgtggtctcatctctgctacaccccgggtgctcagtgcaggagctggctcagaacatgggggccttggtgaggctttgcccctgggggatgctgccgtgggttgggggataggccttcctgtcacccagcagggccttctctggttacctctgatcctcggactctggagcttggtggcctgtggggctacacacagctgtttgtatcgtggaggggaggggcctcgggcttctctccagcagtcatttccctgagtgaagtataagcccctggccagtctct

SEQ ID NO: 15860 - DNA, 2877 bp, Artificial sequence
  DNA replication origin
gcctgtggggaggcagggagctgggggctcccgggagcaagtccaggctggccctgagcagcctttccggggcgaggaccacagttagctttggccccagttgtatgatggccagaggctctgtgagtggctggtgctgcggtgggggggtgcaccctggccaccagccccctcaccctcccaatggtgagacccctgaggcctgtgagtactgtggggctggtgcagggccctgggctcagcctgactgggatttggggtcaagctgagtgtcccccaggtagtggccgtagctcctgtggaaggtcagaacctgcctctgagccccccaggctgatggggttctccaactgagaggctggtgcaggaggtcctgcctggcctgcctccctccaggcctggtgccaggataagctgaaggtacaggccatgcacctgctgggcctgcaggcacctggaggccggggctgcactgggaccccagggtctgatgagagcctggaggtctgagtctggctggcaggatgcctaccctccacccctctggcccagacagtgcccggctgggggttggggagcagctggagtgtgcagggcgcagacaggataggtgggaggtgggggccagcagaccactcagcactgccaggccccttggtgggctctttcccgccaagattggtgtttgtgaacttgaattttaattaaaggaaactgggttaagtgctccagccgccgtgcttgtacttacactgcagctcccatccccggcaccgggctctctctgctcccattctctctctaatgggcccttggaggcccccggctgctgagaattaccccagcttgcaggcagagggaccaaggcccggaggggttgcagggctgagtggtggggatggcggtggaacccgacagaagggctgctccatccccagtaccaccaggtctgttggctcctcgtgggtggctttgatggatatgctgctgtccccctgtacctgccccatccagccagacaagcgagccccaccttcatgcatgctgcgggcctgggtctagggggcaccccaccctggcccagaccagctggaaaagggtctcctgcggctgtggatgggttggggggctcaggtactccacagcagagagggctgtgtagctgcagggccatggggaccagtgtgggatggggagcgtagagcaggggcacagccctgtgccaggcctgagctgcccgtcctcgcctcccacttgactggtccctttgctgcctgcgcacccatggctgcccaaaaatgtcttgcccagatttgctgggggtgtggtatccacctcaggggtcatggcagcttgagcagagcgtgagctcatgtggaatcaagctcaatttgccaggccctgagccccccaccttgggggctgcttgcccgagggtccgcagggctgtgggtgtggctggcagctgcagggaggtgcctctggagtgcagctcaggcccctcttgtcttactctgccccttggcttcctggaggctgtggagtatttggcaggagtgggggctgccagggctcagggtctgtcggcctaggtctcttcctctagccagggtcatcagctcagctaactccaggggctgtcgcggcctcttcagcccttggacttgaggcaacatcagcatttccctcaaacagcctggcccggggtctgtgaggctgtccccatgccctctcagtgcagggctctctgagctgtggatgaaggggaggcaggacagggtggaggaggagaagaggcagggtagcctgctgaccctatggtgtctgtggtcctgacggccagggtggtatgtgctggggccggttggtagaaatagccccagccttgaagccgactcaagggagcctcagcccaggtgccaagggccaggtgtgcttctcaccaacacgcagacaccttgcagcccctctgccctgcagccccagggacccttaccctgcagcacacagccaggtggtcagggcccaggggtggttatatccacggggaggtgtgcactggaggacgacgctgccctctcaccgtggcttctaggggcgcatgagttcccagcctcgtgggtggggtcgggggcgccacctcctgggactccttgtcagtgttccctgatgacggccaaaatgtccctgaggtgggggttgggggccagagggggacagaggtctcttggcagctgggccaatggcccgtggtcacccagctggagtgtgtacccaccgcaagtgctgctccctgtcccccttgggaggccaggcctgggctcggcccctggcactgaccatcagagctgtagtctgtcctggggccaggtttgacgggcatttcctgtctctgcaggtccctggtgctgaaccgcctgcgtccagttgccagcgggggtgggaaagcccaaccgggctccccttggtggcggagcaaaggctaccgctgcatcggaggggtcctctacaaagtatctgccaacaagctctccaagacctccggccagcccagtgatgcgggcagcaggcccctcctgcgcacaggtgagaggtgagggcgggggcgctgggagatgacaccgaccggctagcgtgtggtgggcattgcaggccagaccccctaacctccaacatgctgtggctgctctgggccttggctcacgcccctgtcttggggaggaggtcaggggcctcatgctcccagggagccagtccaaacaagcacttcccaaatgggtcacgtcccatcctgggagttaatttcactcttccatacacccggcgccttcgtagccatccctagtgagaccaacagggcagccggagaatggaggg

SEQ ID NO: 15861 - DNA, 676 bp, Artificial sequence
  DNA replication origin
atctgcacttggcctcaggcctgccctgggatctggacagagggacagcacgtgcaaagacctggcgccaggagggagcacagtgctttccagaaaccagaacttcccaggagaactggagttctaggctggagagaggctgcatgggggctgtggccagcaggacctgagtgcctggccctgcagggctttctaacctggtcatcttgagaacgaggggacccactgcagggtcttggcagggacttgatcaaatgtgcagctttcaaaccaactggcagggtggggtgggtgcagccccctttcagctgtgaaccagggcggagacccagctggctcagtgccggcctggggctctgcgtggcatgttcagggcctgggcattgcctcggggcagggcttctgccagtggtgaggctgagggccctgggcagggggtccgagtggaggctgatgaggcccctcatggggagaactgctgaccgacactggctgcggggcctggctgtgggagcaggagggccagctagtgctggagtgtgtttaaaagacaagactggagctggattggcagcagccggaggtgcagagcgacaacacgagggtcctggaaggtccccatcgtccctgtctgccttcagtttccctcccagggtctgatgtcccctcgccggct

SEQ ID NO: 15862 - DNA, 963 bp, Artificial sequence
  DNA replication origin
gcctctctccagcctagaactccagttctcctgggaagttctggtttctggaaagcactgtgctccctcctggcgccaggtctttgcacgtgctgtccctctgtccagatcccagggcaggcctgaggccaagtgcagatgtcacagcactggggaggccggccctacttaccactggggaaaatgagcacaggggccgtatctgcaaagaccactgctgcacccctggccctgcggatgtgccgggcacgcagggggctctgtaaatgtgtgttgcgagaacacacccaagtgtgtgccaccctggggctcccaggaccttaagaggtcctaagggaggagtgtggggtggggaagggtcaggaggccctggtcagttacagacactcaggaaggagacctgtggcagagaggtggctgccagggcttggtcagcagatacaaggagtgggctcaggcagcaagggccaggcgctgggaatgcgggctggggcaagatgggctctctgagaacaaagggagcagcggggctcaaggagggaggcatggtcagaacacatgccctgagagctccgagaagggcgagcctgtccctgtctccccaggacgatggcaaggctgctacggacgtgacacagggacgtgcaatatgcagacgtggaaagaccctcgggggcataagtatggtgacagcaggagaggccaagggctgagcgaggtcttggcccggccctagcagccagaagaggcaggaccacaggagcaggtaccgggccacggggacacgacctcagggccttctaggccggggttgtgtctgtgtgtgggccggggacccagcagcccctggccaggccgcccaggccagtggcaacgtgcagtaaacaggcagtccagctgagacacagagaaaacaaccggagaagcattttcaggaaatggagcacaatttttcgaagcttg

SEQ ID NO: 15863 - DNA, 2759 bp, Artificial sequence
  DNA replication origin
gagcccttcccacctggggcgtcccctgcccagtgggtactagcagtcatggagagtggcagagcaaggataggattcagttagggcataggtaccagacccagctccaacctttctctggtgtctgcagcctggaaggctccctgcaggcaatgacatttggccaggtagacacaagctgatccccacccaggccccacctcactcctctcattgctggtcttaggcccttcccagagaagcgccttcatctggatgaacagtcctgggggtcagcgctgccactggcttgggggacagagggggcatgactgctggcccttccgggcctcgtcagcgtcagcagccacgggcagaaacatggacagcggatctgaggagggtgccatccaggcttaactttaattcttggtcaagttcaacatggtttgtgttccctattcgcttgtctccagctggcttgtttcttatggattcatggaactccaagtgttcagggggagtcgcctttttgtcattttcctcgctttgaatttcgtgaggatgtttgcagaagtttttacttttctgtgcacttaaatctgccagtctcttgagatttcatgtattgatgtgctgagaacagcctttcctacctaagatggcatgagttctggaagcttccctctggctcttcccactcatgtctaccccatgagcacctgcttttctgctctctgcctaccttgattggctttgcctgttcctgaacttcgtggtgatggggccgtgtagcgggtgctgttctgtgtctgagcttcgtggtgatggggccgtgtagcgggtgctgttctgtgtctgagcttcgtggtgatggggtcgtggagcgggtgctgttctgtgtgtgagcttcgtggtgatggggccgtgtagcgggtgctgttctgtgtgtgagcttcgtggtgatggggccgtgtagcgggtgctgttctgtgtgtgagcttcgtggtgatggggccgtgtagcgggtgctgttctgtgtctgagcttcgtggtgatggggccgtgtagcgggtgctgttctgtgtctgagcttcgtggtgatggggctgtgtagcgggtgctgttctgtgtgtgagcttcgtggtgatggggtcgtggagcgggtgctgttctgtgtgtgagcttcgtggtgatggggtcgtggagcgggtgctgttctgtgtgtgagcttcgtggtgatggggccgtgtagcgggtgctgttctgtgtgtgagcttcgtggtgatggggccgtgtagcgggtgctgttctgtgtctgagcttcgtggtgatggggccgtgtagcgggtgctgttctgtgtctgagcttcgtggtgatggggctgtgtagcgggtgctgttctgtgtgtgagcttcgtggtgatggggtcgtggagcgggtgctgttctgtgtgtgagcttcgtggtgatggggccgtggagcgggtgctgttctgtgtctgagcttcgtggtgatggggccgtgtagcgggtgctgttctgtgtctgagcttcgtggtgatggggccgtgtagcgggtgctgttctgtgtctgagcttcgtggtgatggggcagtgtagcgggtgctgttctgtgtgtgagcttcgtggtgatggggtcgtgtagcgggtgctgttctgtgtgtgagcttcgtggtggtggggtcgtgtagcgggtgctgttctgtgtctgagcttcgtggtggtggggccgtgtagcgggtgctgttctgtgtgtgagcttcgtggtgatggggccgtgtagcgggtgctgttctgtgtgtgagcttcgtggtgatggggccgtgtagcgggtgctgttctgtgtctgagcttcgtggtggtggggccgtgtagcgggtgctgttctgtgtgtgagcttcgtggtggtggggccgtgtagcgggtgctgttctgtgtgtgagcttcgtggtgatggggccgtgtagcgggtgctgttctgtgtgtgagcttcgtggtgatggggccgtgtagcgggtgctgttgtgtgtctgagcttcgtggtggtggggccgtgtagcgggtgctgttctgtgtgtgagcttcgtggtggtggggccgtgtagcgggtgctgttctgtgtgtgagcttcgtggtggtggggccgtgtagcgggtgctgttctgtgtctgagcttcgtggtggtggggccgtgtagcgggtgctgttctgtgtctgagcttcgtggtggtggggccgtgtagcgggtgctgttctgtgtctgagcttcgtggtggtggggtcgtgtagcgggtgctgttctgtgtgtgagcttcgtggtgatggggccgtgtagcgggtgctgttctgtgtctgagcttcgtggtggtggggccgtgtagcgggtgctgttctgtgtctgagcttcgtggtggtggggccgtgtagcgggtgctgttctgtgtctgagcttcgtggtggtggggccgtgtagcgggtgctgttctgtgtctgagcttcgtggtgatggggtcgtgtagcgggtgctgttctgtgtgtgagcttcgtggtgatggggtcgtgtagcgggtgctgttttgtgtgtgagcttcgtggtggtggggttgtggagcaggtgctgttttgtgtgtgagcttcttggtggtggggtcatgtagcgggtgccattctgtgtctgacttcttttgttcatcacttttcatggactgaattgtgtcccccaccaagttcatagatggaaaccctaacccccaatg

SEQ ID NO: 15864 - DNA, 908 bp, Artificial sequence
  DNA replication origin
ttcggctcctgctactattaatgtagttaatgctgagattatatctattttctggcgtcaggcggtgatttattcaagccatttttccggtggaggctcccacgctgttaaatcaagcgccttgccaattaagtgctgacttgggaagtggacgcaatcttagcagacgtccaaccgcaaattaaaccgcgcctgactctggggagtggacggggcagcgggacccttgctgacttgcaggaaagtcaggaaagtggtgggtgcatcctacccactgtggtccctgggccggtccctgggcctgtccctgagccacgggtctctggaactgcagcccacacccacactccaggccacagggttccagggaaacacccttagacacccgtggttcctaaaccacgcccagcaagcacctgacacacagggccctggcaggtactggggatggggcaggggcggcgggggtgaagggggccatgaggaaggtgggagcctccccagcaggtgggtggggctgcacagtgctcagcagctgggaggccccccggggcctggaccctgcaggagtctcacccacggtcccatctctgagggcccacatagcaatacaatagaaaggaggtagggaggccagggttgggggcagccaggctaaggactcccacccccaacaggcccagctctcctgaacactcctgtcccctgtgggggcctcagtcctctgtcaggcactgtccacatgccaactgcagtgaccacccaggcccagcccagagaccacccgggcccagcccagagaacctgctgtcaccctcctccccagtggggccctgggacaaggtaggcagatgtgccacccttgtccatctgccagatactcagcccagccttgagaggttaatcat

SEQ ID NO: 15865 - DNA, 1949 bp, Artificial sequence
  DNA replication origin
tcagtgtttgcaaccttgggcttggcagtggtcctggccagcaaagggcccagaaatgcggcttgcgtggtttcggcagctctccgccccttcttgggggaggctcacgttggtggcttgcatttgagccatggctctgcctctgcccctgcccgccctgtgcccctcttccccgccctgtaccccctgcactgccctgtgcccctctgccccgtcctgtgcccctccgccccgccctgtgcccctccgccccgccctgtaccccctgccctgccctgtacccctctgccccgccctgtgcccctctgccccgccctgtgcccctccgccccgccctgtaccccctgccctgccctgtgcccctccgccccgccctgtacccctccgccccgccctgtgcccctccgccccgccctgtacccctctgcccccggttcccatcccccttgggctgcttggtccacacagcagtgtgggggccagtaggcccaaggtggtgagtgggcagaacacggggtgacccccttcagccggggaggacagggctgcatggggcaggaggctggttgggagcactgctgcctacttgtatgtcctagcacagctctgggggcatcctggagccaccacagcctccacggcccttcctcgcctccgtggcaggacagcaggctggccaggcaagatgaccggtgagcgggccacactcagaggctgtggactcaggtcagggggtctgggtgcaagtgaccctaagtaccgggatctcctgattccccccgagccagaagggcaggaaggctcagccctgcaggttctgggagaacgcggcctgacagggcttcacatagaggggtggtgctttgggttgtgatttttaactgggtaggagccttgagtctatggggttttgtggctgctgccactcaggctgaggtctggcttcttgaccttctttccagggtcccccaggcaggtggctgtagcaggctgcgtgacacagcccctgccccgggccccggtgcgtggcccaggcagttcctgccgttctccttggctccttcacttgcattcgctcacccggtgtgtgttgagggcctgatctctgtctggccctgcctgcatggaagctatggccccgtggggacttagggacaggctttttggggcctcttcgtgctgtggtgcctgccaggcagagaggggactctcttggggaaggaagcagctggcacagcaccggggagccccagaaagccctgtgggaggcacagcgtgttcgagtgcagagacctggccaggcctcgagctgctggcggcccagataacacacgtgagacccggagaccactgaggggacctggacttggccgtaccagacagccatgtagcgacggccctggttcagctcctgctgtggggctgctggccggcaggtgtgacatctgtgttcaggcttgccctggcccctggctgcccagggccctcctgaccgcagcattgcgtctgtgctctgcctactccaggactccactgagaccttggcctaccggtgggtgcagtcagcaccaaaagaccacagctgccaggatgggacaggggcaggcggtgctggtcctgggctgttgcctgtcggaggtggtactgctctgtggctcatggcccatgtggaccccaggctgcccccctggctttatggctgcaccttcgggggcagcttcctgctgctgcccacccagctgcagggatgaggtggctgtgactggtggcggggttgggggggattgggaaggcggtgctgcttgatggacaggtggatgcagaagccttggggcaggcctgggtgccgagtctccctgtcctggctgttctgggaacccctgggagggaggagaatagttgtgtggctcctgggctctctcctctttcctctcctaactagcttcttg

SEQ ID NO: 15866 - DNA, 999 bp, Artificial sequence
  DNA replication origin
agaccccctgacctgagtccacagcctctgagtgtggcccgctcaccggtcatcttgcctggccagcctgctgtcctgccacggaggcgaggaagggccgtggaggctgtggtggctccaggatgcccccagagctgtgctaggacatacaagtaggcagcagtgctcccaaccagcctcctgccccatgcagccctgtcctccccggctgaagggggtcaccccgtgttctgcccactcaccaccttgggcctactggcccccacactgctgtgtggaccaagcagcccaagggggatgggaaccgggggcagaggggtacagggcggggcggaggggcacagggcggggcggaggggtacagggcggggcggaggggcacagggcagggcagggggtacagggcggggcggaggggcacagggcggggcagaggggcacagggcggggcagaggggtacagggcagggcagggggtacagggcggggcggaggggcacagggcggggcggaggggcacaggacggggcagaggggcacagggcagtgcagggggtacagggcggggaagaggggcacagggcgggcaggggcagaggcagagccatggctcaaatgcaagccaccaacgtgagcctcccccaagaaggggcggagagctgccgaaaccacgcaagccgcatttctgggccctttgctggccaggaccactgccaagcccaaggttgcaaacactgaaggactcagcagaggctcctggctgtgagggaagcctgggagcagagggaagggcctgggagcagaggctcactcctggccgtcagggaagcccaggacgaagagaaccgcatgtcctgggttctctggacagagggatgagggggcctggaggttgaggatgccatgcagggcatcaacacccagggccagagcatggtgggagccgggaaggcagtggcaagggctcccagcccctcccgcccagcagccaggccccag

SEQ ID NO: 15867 - DNA, 1151 bp, Artificial sequence
  DNA replication origin
agtgagatagtctcaaaaaaaaaaaaaaatagacattgtgacgtgacggtgtggggaggtggggtctgtgagaggtgattggctgtgaggcttccacccctgtggatgggtcagtgctgtgtggtgggaggggcccctgatcagaaaggcagggtgtggcatgattgcctctcaatctcaggcacctgcttgccttctgccataagaaaaccctcacctggtgccggcaccatgctcttggatctctcagcctccagaactgtgggccaaagacacttgttttctgtataaatgacgcaggctgtggtattctgttatagcagcagaaaatggacttagactccagggcttgctctgcatctggtgagagccagagacgccctgcccgcctcatcctggcagtgtgcagatgctctgctcagccagccccaggcccgggaccctgttacaggctggcatggggaggtcctagacaccaaaggggtgtcagtgtgtagcgtcagttgttgagtgcccggcactggatgggtggggctccccccacccacagatacctgggcagcaggcagctccagagtttgagcaggcaggctctgcccactgtgctgtccttctgtggggagcggtcaggaagcaagcagacaacagaagcagatagttctgtgggtggctgctgccggatgtgctgaggcccacccaggatggatctgtgtggggctcagagaaggcccctttgagggcaggggcctgtggggggttgagaggccagcatggccataccacgaagggtttggagtgtttgcagagaggataggggctggggggtggtgtcgaaggtgggatttgcagcccggccgctgctctggtggggggccaggggttatcagggcagggccagcccccggtgaggagcaggccagctgagaggcggcactgctgcgggcctcctgggctgtgagggccggtgtggctccagggcacgtttccagggtgtttactgcctccctgctacctcccctctgacatggagcctggggagcttgggcctttgccaagagtgctgaagccctgtgtctgcccgtgtctagcttggcccggtccccagggcctccgtggagggtggaggtatcctgtctgtatccttgctgccc

SEQ ID NO: 15868 - DNA, 1470 bp, Artificial sequence
  DNA replication origin
tgctgctgacaacagccctcaccttgtcctctctctgaccctgtccctgggacctcccctgccctcttttcccgtcccctccccttggctgtgatgctcatggcggggactgcaccgccctgaggaggcacgagaaggggcccctctcctggccatgagcccccaggacccctctgcagttcctctcagctttcggttggagagccccaggccctgagctattggccctagctctgccctgggcactggggagggctcagggtgattaggcctgttccctcctctgggaagctctagaaactccccttccctgcagcccgagggaaggagggtaggcaagtgagtgcccggcctgagtctaggcctctgccctgtcccagggggtgatttggcacacgcgccctctctctccccctcctaatttaagtagaaacttactgtcggcctggtggtcatgttgggcccatgtggaaggctggaggacagcgtcagggcccgttgatggctgggtttgtaataggggctggggcctctcctccctgtcagcggctttctctggacctgaacatggaggaggcggtggggagccagctgggtgctggaggaggtaggtggtcgggagatggctgggtgctggaggaggtggtcgggggatggctgggtgctggaggggatggtggtggagccggctgggtgctgggggaggtggtggtggagacagttgggtgctggaggaggtggtggtggagacagttgggtgctggaggaggtggtggtggagccggctgggtgctgggggaggtggtggtggagccggctgggtgctgggggaggtgttggggagatggctgggtgctggaggaggtggtcgggggatggctgggtgctgggggaggtggtcgggagatggctgggtgctgaccagtggcctcaggtttgtggccggccagtgctcgtcgttgtcagatggaaggcagaggctgctgggcagtagcttctggggcttctgtgtgctgccagccagggtctctgaggatgggcacaccattgaggcacacgccagacatcatgtgtggagactggggtggggcagagggtgggaggagaaaaggagcagtgcctgtatgccaagggcagaacgggactcctgcctcaacgggtggcatccacggtgccacctgtgctcccatcagaggccgcgttgccctggcctgcagatgcccggccatgtggctgcttggggcggggcaacagctgacgggggcatgctggcggtgtgctggccatgtgccacctctccccagaagctgaggcatgggactgggttgttctgctgagcgtggtgcccgtcgcatctgccaaatacacaggacggggctgttgctctggctcggggaccctgggagcttactgtactgctgccttacgcatacctcggccatgccacagtggtccctgagagccggcctt

SEQ ID NO: 15869 - DNA, 1519 bp, Artificial sequence
  DNA replication origin
ttcttgggctatgctcagaggaagcagaagaggattcctgagagaaggccgtgccacatggcggagctgggtctccgtgccgcccggcagccagttggccccagatctgttccactgaccttgggatccagccaggcccagccatgtgaaggtcaggggtgggctgggagggaagggcctcgggctccctgggttaggctgaggccgtttccagcctggactgcccagtggaatcacctgggtccccccagacaggagcctgactctgcgctaggccatcctggccctggagctgcctgctggcccacagcgccagcccctcctgcagcaccagggccatggcgctcatgcagaagggctgggggccctgtggaccaggagacctgaggctgtgctgagtggccgcctctaggtcctgtaccctgagacgtggtggccagggcctcggggcttggccgtgcctcactcagagcctggagctgctgtcctggccccgagcaggtctgtcctctgggggctgctcttccgccctcgagtatctgagtgctcccagtaactgtgtgtgcaggtggggcagggagcacaggtgggcctggagattcggggagggagctcaggtgcggggcaggcaggagcggggggtcaaagcagagacaaggtgaagaggcgttctcaatccggcagagctcccagccctgggaagggcccgtcccaggtgcctcttatggccagactgggagcaggtgagccgcaggcctggggttctgaacacacaggctggctggggctgcaggccagtggggagagcttgggagacgtcgttcacagagcacgtgccctgggccccagtgcccttctttgtgaagtggggaccgaggctgggtgcacgcttggccacacacacacctggccaggcccaagcccagctgtccttcgctgcagcctgcatgccccgagcctaccccacctgcttggagcgcggcctggggtacaggcccaacttggtccggtttcctcctgctcctctgcacccctgcccaaggcctgtgttcaccctttttgggaacccccttagctgcctgctgcactgtcttctccagccgtggagggcagggaggccccctcccttcccctgcacctgaggctgggtagagccgtggggaagaggggaggaagccccactctccataatctatagcaactgtcacggagcaaactattcccatttcatacagacgggtcaggtgtcggcgtgcgatcgatggctcgcgcacaataattaacgggaactagcagcttgtgttgcttgagtgactttaagaagagtagggtctcaatcttccctttaatagggctctgacagtccgcggcagcggcttcggtggtgctgcgtctccagctgacagtgttgtcattaaacaccaggtagtgtggaacaacagagagcacggatcccacacgggggggacagggcggctgacagcggtcatttgtcatcactgagctgcccaaactcctc

SEQ ID NO: 15870 - DNA, 1809 bp, Artificial sequence
  DNA replication origin
gctgccctgcagagctctgggcacccccaccgctcctgccttctgccagggcccctccttgagccccgaagaagcccacccagttccattgtgccttcgtgtgggaaggaggtgggtggggcgagcagtgctgttccagtcctgccaggcctggggggcggccctaggcaggctggggggtggtttgcgtctgttgggatggcatggggctggcgcagctcccctgtggcaccgtcgggctcagaggtgctgggccgtggcttcccacagggcagggcacctctgggactgcgggggtgtcctgcgtcccctgcagtgcagcctttgggcccgtgatgagtcctgtgcatggatggagtggtggccttggctgccctggggtctggtcaggctgttgtccccaggtggcctgaacgtggggcctgcggctgtgaaaggtgaggcgggccgcttgccccgtgctgctgtgtgggccgctgtggcgcatgtgcacgcacacagcacggcacgctcgcctgtccttcccacgggtgccagtgtgagcacacgtgaacactggtcagatcctgcctgccgcttggggcttgcctccgggcagcctgagcctccgtttctgcggctgtgatgtggggtgctcaggcctggggtaacgaggaatgcaaggcttactcatttttaacctttgcgctttcaagacacatgagctcatcttaccgaaagatgagctcccaaccccaggtccctcccattgcactatggtctggggccctgaaggccagggctggcactggccccggtggttctcacccacccttccctgtgttggccccgaaggctggagccccagggcattggccaggagtctagttagggggaatggagctggtagggggcctgtctgcagcctgcctccccagctcctaccctgacccgaatgctgggccactgcctgcctggccctgtgccccactgcccccagtcagccgtcagcacactcgctgctacccctctcctcccctccttcagaggccggtgagtcaccttcctggggaggccggcgtagtgctcgctgcaccctggcctggccttagcccccatagggtccctcgctcactgtgcactggggatgcatcaccgggaggcaggcattgctgctggggctgcaccccgtgcttggggatggaggatccagaggagaggggatgggcttccctcaaaggcaatgggctgcctgccgggctggtgccaccccggtcaaggccaggggagcctctgtcccttgcccctgtggctcccgttgggtgggctgagggcagggattcctttgctgccttctcagggtccccagttgcacgtttgtatgtgccagagggagcacaagcggtcgggccagtgtccctgagactgcgattgtggctcccacgtgccatctccagctttggtgggcctggccccggtgctgtggctgccaagaccagccctggaggaggccctcagggcacacctggtgcctggcatccacgacctcccctctgcggcctgcccactgtcccgcagtcacaggaaaggccaggagtggcccagaggagagcggcatgtggccggggagtcctggcagcctgcggtttctgtctgagcgggacacgtcgtttctctcaggggccgctgctttctgtggagggtgttgccaggactctctccaaagagtctttcttgggctatgctcagaggaagcagaagaggattcctgagagaaggccgtgccacatggcggagctgggtctccgtgccgcccggcagccagttggc

SEQ ID NO: 15871 - DNA, 947 bp, Artificial sequence
  DNA replication origin
ggcaccaggacttgaggagccctcaagacctgggagggggtaccagtgggtggagtgtggggtcagtcccttcagactttcgaggctccacccacatatcaccaccttcacggcctggatcttggtgtgctcggtagccctgtgacctcgggccagtgcccccacccgcgcctctgccctgtgtctccagcctccttgcctcgtctcgttggcaaggcctcttgggaggagccaggctgcccctggggtggccgtggttttcttgttgagaaccctctgggctgggcaggggctgtggcggggccgggcctgcccctcccagggtctgtttcactgccccaggccagctgtttgcagctgagagccctgtgggccgggcgggccgtctacctgtgtggctgtgagtgtgtgtgggaaacttgctgctatgaagcctgatcccctctctgggtatacgggccagaaacccagccatggagggtgctgctgggcagagcaccagccaacgaggcagggagggggcagctcctggcctagctcctgggcaggggtgggccctagtgggcaccgtgagctgcctgtcagtgggaaatcagatgttctgtcccatggggcagaaggacactgtgagattcagccccacagccctgttagcggggcagtgctggccagctgggatctggggtgtctcgaggtggacgctcacaaaacgtggaaaggcctagaaccttgtggcaaatggaaacggctcagcctgggctctgcctgaggattggaggacgcaaaacttggctccagccagaagcttacaaggctgggtgatctcggggtgtctgggtgggcccggctgaaaccagcaccctgcggtacatctctgacctgcaccccggtgcttcccagccggttcccactgcgtgggcctgggaggacgaagcagcaccagggct

SEQ ID NO: 15872 - DNA, 1435 bp, Artificial sequence
  DNA replication origin
ccatgaggacacggaccagaggctgcggtcaccggactcagccctggaaagagggggctccagtcaagggtgccacagacagccctggtcttcctgctatgccttcccatgcacctctctacaggaagcacagtttgaccagctgggatgccgccactcagcacccacgcagtgaccagagctggccattcactgaagcagttctgtaccgagggacaggatgggacaggaggacagggaatgggccaggccatggaggcgggcagtgcctctgcaccactctcccaggaggcctccccacccagctggatgccacgcctgccacacaaccccaagcctgccgtccgcctgggcctggcactggccccgcttcagcggcatcggcctgcggctggcccagagcccagggtgctggcactggtgctgacgatgtggggggcctggagaacccccacagccaccatagttcaagtccacccagggctacaccaaaacccacgctaggatgcaggctgctgccccagtggggccacagagggcactgacttcagtgggggtccagtgggagaaccctggagagaccctggctggacattctctgtctgccatcaggcaagagcccagcacctcccaccaagagtcacacccatgacatcagggcctcgccaggctggcccaccagtcacagtcccaacatagccccagagctcagcggatgcccagtgagcaagggcagggccagttctggagaatgagtggcaggaagaccaggtgcctgcgggcaggagacactggcctggggctgcttcctctcccagtcctgctgctggtgccgagcaggagacccctcagggaaccaggacttccttcccatcaggaccccgcccagcacgcgattggacttggtgcagggggaaacaaccagtggggatcacggggttcccagacgatgcccaagtccacatggactctgaccacacccagctttgccacgacccacctgtgggaccacagcaggggccctcaggcaagggtcaaggtggagagacagaggaggctggcaggggccacttacgggcagcagatggggcacagaaggctacagccccagcaggggactaaacaggggcccagcaacatcctgaccccatgcagagaaggggccaaatcccagaaggtgcaggccacattcgtccccagctggaaagccgcctcagtgcccagagccacacccactccccagtccctcaacaggaggccagctgaggctggcagagccatgcccccattactttggtgggagaaccgagagctggtgaaaagacaccgccaggaggcaagcaggaggcaagcagcacaagccctgctggccatgcctgaagatagacccctgagaggccggcacaggaagaggacaggcgggcagagtgggagg

SEQ ID NO: 15873 - DNA, 1052 bp, Artificial sequence
  DNA replication origin
ggaccctaccgtcccccaccccagccgccacccagaacacgcgggcggtgagcgaccccttcgacaagggggcaggggacccgccgcgaggtgagggggaaagaaggggactcgcgtcccggccccggccggacctaccctgcagtaggcggatctgccgccgtaatatctccttttcctccatctcccgagtccgcgacggccggccaggcccccacgacgtcatcgctacgcgacctttttcccgcgggcggggcggagcgggccagggcggagctgccaggagcaggcccggatgtctgccgaccgccgaggacccgccgtcgcgctgacaacggcagcggagaggcagagccgcgcacgcgcagaacgaggcggggacgtcactagtgagcgccgggaagtggcctggtaacggctgggaagggactgcttgggctctgggaggccgcgcgggcccagcttgtgcagtccgggatcgcgtccccttgggagacttggcgaggggcgagacctggggcccacccagcccataccgcagttccttcccacagtccctgcgtttcatttcgccccagttgagtgttgggggggggggggtctacgcggggacccatgggagaagggccagttaacaattactcttgacccaggagggtctgtgaaacctcttactgtggccagaggagaagacatcggagagcaaggttccctggatagacatgttgaacctctgaaaacatgaaagtttttagttcgtcattggaaacatgtacaagtgtaaacctctgtgcgctgttggtgggaatgtaaatggcgcagcaccgcagaaaactatggagattccacaaaaggttaaaagtagaactaccggatatgagggcgatctggctgcgacacctgtcatcccattgatcgccagggttgattcggctgatctggctggctaggcgggtgtccccttccttcctcactgcttcatgtgcgtccctcccgaagctgcagctcagtcgaagagaacgaccatacccaatagaagagctgggcttccc

SEQ ID NO: 15874 - DNA, 718 bp, Artificial sequence
  DNA replication origin
atctgcgtaggcatttgtctgtctcctgccactatcacgagggcctggggcctggctgcatgcagaacccccacctggcaaggaaggtggctggaggggtcagggctccagggccacacccccggggtgggtgtggctgggtcactggaggggagaggcagggacttttgcagggcaatgagatggggttaggggtggggtggaggggtggtggggtccggggagtggtgttggggggcgtggggtacataacaagcccacaaaaggcctgacattctgcgcatgtcccctgataaaagtgcgtttagcatggctacactgcgtcttattagtcctcccttccccaacagaggctagtgcttggggcagccttctgaggttgggctggagagaagtggggtgctttgaggcccagagcacccctgggggggtgttgggcaggcgcagggcagcttgcggacccagagggaagaaggctgcttaggctctggtgcagagtaagcccctgcataagaaaagagctggaagctgggtgttggggaggggaggagagcagagggaggtgggatggggacagagaaaaatcccccgtggggaaggaggggagaagtccactgcaacagacaacagtgatggcttactctcggggttcatctgtttactgaagtctgatgggaatcccaccccactcagacccacactgggcagcgctatggga

SEQ ID NO: 15875 - DNA, 1136 bp, Artificial sequence
  DNA replication origin
aattcccataccatacaattcatccatttaaagtgtgcaattctgtgggtcttagcatattcagaggtatgcaaacatcaccaacggccaatatcaaaacacttcctcaccccagaaagaaaccccaaaccagcaaccgtcgctcccaacccccgtcccgggcaccggcagcgccatctcccttcttccctctggacgtgcccattcgggacacatcacgtgagcaggatcacgccgtccgctccgtgtgcctggcttttcacttagcatgatgtctccaagtctgtgtcgcccgtctgtgtcgcccagtgcatcagggtctcattccttttgaccgtgggcgccgttctacggcctggattccagtgcctggactggccatgtttagtctatgcacgcctcagtggatggacagggtttccaccttgccgctatggcgaaggatgctgccgctatggcgaaggatgctgccgctatggtgaaggatgctgccgctttggcgaaggatgctgccgctatggcgaaggatgatgccgctgtgacgacagctgctgccgctgtggcgaaggatgctgccgctgtgacgacggatgctgccgctatgatgaaggatgatgccgctgtgacgacggatgctgccactatggcgaaggatgctgccgtgaactttggtgcacaggcatctgtttgcgtctttgctttcaattcctgtgggtggagctaggagtggaattgctgggtcacacggtaactcttggaggagctgccaggcttattccagagggccgcacgggttgacattcccaccagcattgcacaaatgttccagtgactccacgtgccccccgcgctggttattcacctttagtaatacgaccatctttgtcagtgtgcagtatctctctgtggattccatttgcatttccttgatgactaagggtgttgagcatctttgcatttgcttgagggcaatttctacattttgtacatctttggaagatctgcccagacccttcggcacaggcccaaagttgtttgtttgcttgtttgtttttgagacggagtctcactctgtcgcccaggctggagtacaatggcatgatctcggctcactgcaacctacacctcccaggttc

SEQ ID NO: 15876 - DNA, 2081 bp, Artificial sequence
  DNA replication origin
ctgctcgccggacggctcccagggagagcagacgcgccagacgcgccaccctcggggcgccgacggtcacggtgagctgcgccccgccccctcccccggcctggctggagctcccgagtggggccggccgctggctcccgggtgggggatgctggccctgctgccccagcgttcgcccagaaggccccgcgccgcacacgggggcggaagctccaggcttcgggaaaggctgcccctggccagcccaggggcccggcctttggacctgggcttgggcttgactcccaggtccgccatccaggttcccgggccggtgctgttcccgcccccagctgccttctgggcccagcctccactttcagcagacccagcactcagaggcttcctggggcagctgcagcccctccacagtggcccaggtgccccctatcccagcggaggcccgctatggcctctgacccccaaagcctcagccttggacaggtggctcatggagctccaggcacagagaaggccctggaggacgcagctggggtggggcgacactctggctgggttttgcagtgggtccctggtgacactctggctgggttttgcagtgggtccctgcaccacgctcaggaggtgacagcttgtttcctcccagccagaggcagccattctagtggacagagccctctgtgttagagcaggtctgggcgtcaggcctcactgtccctggctggaggtgctcatggtaccgtagacaacagggagaacactgtaattctgtgttggggagggccggggacagaagctttctgctagtgggagcatcccaggatgagctgggcagggctgttctggagggaaggagtcccccatcatgggagacatccaagtactgacccttctcccactccctcccgcccgccccgagagcacaatgcctgacccatttcccctcctcaggagcatggggtcggcctttgagcgggtagtccggagagtggtccaggagctggaccatggtggggagttcatccctgtgaccagcctgcagagctccactggcttccagccctactgcctggtggttaggaagccctcaagctcatggttctggaaaccccgttataagtgtgtcaacctgtctatcaaggacatcctggagccggatgccgcggaaccaggtgcctgatgtggtgctgaggcagagccccagggaggctggatgggagaggggagcgggctggggccaaccatccactgggctctgcagcctctagctctgggcctctcttccagaggccggggcctttccaaaggtccctctgccctggggctgggacagggctggtgggggcgggggagaggcggggcgctgggcacagcctcaggtctggccttgctttagacgtgcagcgtggcaggagcttccacttctacgatgccatggatgggcagatacagggcagcgtggagctggcagccccaggacaggcaaagatcgcaggcggggccgcggtgtctgacagctccagcacctcaatgaatgtgtactcgctgagtgtggaccctaacacctggcagactctgctccatgagaggtgggcccgaagagggcagggcagggcagggccccacctaccccaagcaaccctgcttttatttatttatttatttaaattattttttgaggtgaggttttgctatctcggccagggtggtcttgaactcctggcctcaagcagtcctcctgcctcggcctcccaaagtgctgggattacaggggtgagccactgtgccaggtcccagccttgctcttgggaaggtcacaaccttggggcatcaggaaagtcccagaggcaaaagagcgctgtggccggaaccagcttgcaggaaggaagctgcaggggtcatctggggcctccgctgccaggactggatcctaaggaccggactgagccccaggctgctgtgaggacaaggggtggtgtgaacacgggggcccaggtgagggggccgcacctcgagtctggacttggagtccccgagtccacctttcctcatggggtcccgtccccgtggggagcacacgg

SEQ ID NO: 15877 - DNA, 3417 bp, Artificial sequence
  DNA replication origin
acccacagacctctggagggcccctctgcaccacctcccccggtggcgtggggctgtcaggggagggaagacgccttcaggggctgcggcccagcgagctttgctgctcctcggacacaggcacctgcggcagccagaacacaaagtcctgcagcagctgcgcagccgcggggacaacgtgtacgtggtgactgaggtgctgcagacacagaaggaggtggaagtcacgcgcacccacaagcgggagggctcgggccggttttccctgcccggagccacgtgcttgcaggtgtgtagccagccccgggccacgcctggccccccacgtgggcatgcggcggcgggtgacggaggcggcgggctgggctccgccaaggcccctcggagcagctcccagccctgcgcttggctgcggagccgaagtcacctggcggcgggcctgcccccggcacccggcccgcacccgcaccccacggcccggtgccagggcccagccccgagcccatctccatgcctcagggtgagggccagggccatctgagccagaagaagacggtcaccatcccctcaggcagcaccctcgcattccgggtggcccagctggttattgactctgacttgggtgagctggagttgggggtgtctcgggcccaggccctggcagagaaacagggaggcctggggagagctacccgccagcttgggctgccgtgggcccctggctgaacaacgtcctgtgtctggcaggtggctgaggtcctgtgctctggtgtgtgggtgattgggcagggcctgagctggacaggggagctcctagtaggggaggggaggggatgctgggatctaggtgacatgcctgtccctgtctgctcccgtctggctgccagacgtccttctcttcccggataagaagcagaggaccttccagccacccgcgacaggtgagagccgagagcccccagcatggggtgtccggtgggaaaagcacactccctgggcagttgaggccttctcctcatgttctcagggcacagggaggccgggcagccccctgaggcggtgggcaccccccatacacacacaaggggcaacacaggacagctgaccctgggcctccccagcctcccttcctgccctgggctgccagtgttggcagtggtgagcggggctgtgacggcctggggaaggcctcagccctctctggctcagacacccttccccggcactgaccagccctgccctcccatgcccctgcccaggccacaagcgttccacgagcgaaggcgcctggccacagctgccctctggcctctccatgatgaggtgcctccacaacttcctgacaggtcagtgccctcctgaccgccccggggacctttggtgggctctcctgccccctggggtctgcctgtcctgaccgaggctttccagggccctgtaagcacctgggcagtgccagcccttctgtccctacagatggggtccctgcggagggggcgttcactgaagacttccagggcctacgggcagaggtggagaccatctccaaggaactggagcttttggacagagagctgtgccagctgctgctggagggcctggagggggtgctgcgggaccagctggccctgcgagccttggaggaggcggtgagcgggggagggtgcccggggcacacaaggcctgcccagccagccagactcacctgcccttcccgtgcccacagctggagcagggccagagccttgggccggtggagcccctggacggtccagcaggtgctgtcctggagtgcctggtgttgtcctccggaatgctggtgccggaactcgctatccctgttgtctacctgctgggggcactgaccagtgagcggccgctgggggcaggtggcgggtgggagggagggaggtgggctttcccggtgggcgttcagaaacccccttttacctgactctctcccagtgctgagtgaaacgcagcacaagctgctggcggaggcgctggagtcgcagaccctgttggggccgctcgagctggtgagagggttgggttcgggctgcaggaggatgggctgagccagtggaaggggccctgtggcacctgggaaggggtggtatgggcaggcacaagatgcccagatttccccatctgactcactcctgccctgtcttggcaggtgggcagcctcttggagcagagtgccccgtggcaggagcgcagcaccatgtccctgccccccgggctcctggggaacagctggggcgaaggagcaccggcctgggtcttgctggacgagtgtggcctagagctgggggaggacactccccacgtgtgctgggagccgcaggcccagggccgcatgtgtgcactctacgcctccctggcactgctatcaggactgagccaggagccccactagcctgtgcccgggcatggcctggcagctctccagcagggcagagtgtttgcccaccagctgctagccctaggaaggccaggagcccagtagccatgtggccagtctaccatggggcccaggagttggggaaacacaataaaggtggcatacgaaggaaaggctggtagcagagtttttgaggggtcctggatctggggtagggtgggtaggggtggggacagtacccatgcatgatcaggagggacatcagggccaagtgcaggtgatgtctgcattgcccggcttcttttgcaccctggagctaaggggagccccatgctgggcttggccgctctctagagtaatgggcccatggccctgcccacccctgcctgtgtgtttctctacctgtgaggaagggcagggcgatttaggtgagacagttccaccaggcgtgtccgtggctgaggcatggcaggaacctctgcttcagggagcttgaggcatgtgctgaagggtgtagccatcctcggcccacaggggctttaggggtgcaggtgtgactgatgacaggccctgccctcctggggccacacaggaggttcctggggaagcagtactaaagaaactgacctttggtacatttcacccacatctgcttgcctgagctaagagcctggagagaggaggtctccggcctgtgggaattaagcaggtccagggtcacatccagttgcttacttgcaggagctcagcagctgtggcctccacgtccagggagggacacgcaacacttgacgtggccggggagtgattgttcctgggagagtggacaaccttccttggtggggaccagtctacctgcacatggtcgccagccttccccacttctgtcagggcacacaatggccacacaacttgcagagcttgcaaaagagaaggaacagtggatttggctacaactgggacattaaatccaccagaaaacctggtatccaggcccaacagtgactttt

SEQ ID NO: 15878 - DNA, 2036 bp, Artificial sequence
  DNA replication origin
tagggcggagtggacgggagcggtgggtggagggccaggggcccgggcactcggccctcctgggctccccagcctgagccgcgatctcctcgcagacctagggcgactgcagagcgaccccaagccggctgtggccgcggcagcgcacgtgtccgctcagcaggtggcgatgctggcccgtgcccggggctgcccccgcgggccccgccttctccgcatcgccccgcgccccgcccggcccccaccagtcttcgccgacagccccttccagcgccggagcgtcgcgggccgctggggctgctccggaccccgccgagcctgaggctcggggctggggcccgagggccagggtccgactcgggcaccccacgcgcatagcagcctgtccccgccctgacggaggggctccctgggcctggtgctggacgccaatgccctcccccaccccccacccccgtgacccctcttcaggcacccaccaccctgatggtgacagagggggacagccagcacccatctgtccccgtcagggctcttgttctcacagccccctggagcatgccccatgccccaaccttgggcctggctcctggcccagatggcacctggcctcttgagtctgctgggggaccccaaagttggtggtcccatagcctgccctcctgggtctccacctcatgcctggacaggacgctgtggcctgtccgggccttggccagccctgcagctgcacccccgatcctcatccctcaccccattccctgccagcatcctaaggctcctggcgggcatcctctctgctcaaaattattgacctgtctcccggccacacctgctgtgccctctcagccaggccatcatcaccccctgttcattatgtcaggcctcatgggagcctggccttctccagaagctggccccggcgtcctcccaagctggaccacgtaggccccagatcacacctgggggtccagatgtaggggtcctgtgtgcacgcccaatcagaccgagcacttgtgacactaccccaacacctctcccagggctgaatgaggaacgcgccactggacacatgaggaagaggctgctctgggagctactgatgctgtgacctcacctctctggctttgggcggcaggtccctgcacctaggatgcctgcctggaaatgtccttgcattcgtggcctccttcacagcctcctcctcagagaagcctctgcgagtgcacagggagtgtgtgcagccttgtgaagggctgggaccacttgcccagactggggcccctcaggcacaggcgtggggtcctactgacctgtctccccagctcccacacagaaagcatctaaaataaacacacgtggatggaaagcgttgggcatctgttttgagtgtggttatgggagctgaccctggtccaagatctggctcaggctggggtaataggccatagtccctgatatggccccaggtagagtcagtttggcagcagggttaaaggtcaggcaggctccaggcacaggctatggccaggtcaggttgggttaaccctaagacagagaagctgcgctctggtctaacaggcatggaatggatggggttagagctgtcagcaccggggtgagtgtctctttgcaggtcatatgcaggaagctgaggatcaggtgaagggcccgggtcttcgtggagtcaggggcaaggtttggtggatgagtttggagcctccacagcagataccaaaacgggattcaacataccagaaacagatagagagaaagaggccagagaggccagaggccaccagatgcccagtgaaggtcagatagacggaagccccatggacgtccgtgctagccttcaggaagctctcaaaccagccatctgtccgaggtccgcacctcccaggacgggctaggagcacccatggggggcacaccctcggcactggcggggacgggtttcgggacacagccacatggatcgtctcagtagcagccccaaagagggaagcaagcccggcctccttgctcaccttgca

SEQ ID NO: 15879 - DNA, 1310 bp, Artificial sequence
  DNA replication origin
gcgaagactggtgggggccgggcggggcgcggggcgatgcggagaaggcggggcccgcgggggcagccccgggcacgggccagcatcgccacctgctgagcggacacgtgcgctgccgcggccacagccggcttggggtcgctctgcagtcgccctaggtctgcgaggagatcgcggctcaggctggggagcccaggagggccgagtgcccgggcccctggccctccacccaccgctcccgtccactccgccctagcaccagccacgtctccaggacaccatcccctggcaaggtggggcctcaccctggaacagggagtccagcaggtcctggttgacacagccggggctggcgtggtggacaaggaagcctggaccacagcagatgcatgagtgcaggccccacagccccccagggggaggctggcccagctcccaaagccccggtgccaggggcagtgtgaccccgggcggcctcacctataagcacggcggctgcccggcgcagggggtcctgtggactccgcaggtagccctgggtctggctcaggaagttgggcacgtggcctgggtatcgctgaacctggggacaaaagggctagtggcaggacaggagggctgatcctgagtgcggaggaggctgcagagctgaatccaggggccggggttccaggggagcccccagggcaggtggcatggtcggagaccttggacttgccccaccagtagcctatctggtttggctgcagtagaaacggttgggggccccggtgaaccctggaacaagtgggctgctgatcatacccccttgcggtcaccttgcttcccctactgaccaggcggcagcagaggtggctcagggcctcggggctgtcatagtgggccacggtgaccaactcctccagcaggccccagcaaaaggcgtggtcacagcgggccagggtccactctgagctctgggataggggaagtgagccgggtcaggggtccaggaagtagaaaggcaaaaggtggggtgggaagagggggagcaagggcatcgggtgaggggcagaagagcccagggcaggagactggattgattctgctcaagggaagagcagtagtaacctggccgcccgtcacacctgccactgaggtccttgggatgggtgagtccctgacctgtaattgtcggaggggaggcacggtgggagtggtgagtgttggatggcataggggtgggatggtgtcgggggctgctgacctcagcagcgtccctgctggggtcatgcaggcgcagcagcagcggcacgagactctgcagcacc

SEQ ID NO: 15880 - DNA, 872 bp, Artificial sequence
  DNA replication origin
cactctgagctctgggataggggaagtgagccgggtcaggggtccaggaagtagaaaggcaaaaggtggggtgggaagagggggagcaagggcatcgggtgaggggcagaagagcccagggcaggagactggattgattctgctcaagggaagagcagtagtaacctggccgcccgtcacacctgccactgaggtccttgggatgggtgagtccctgacctgtaattgtcggaggggaggcacggtgggagtggtgagtgttggatggcataggggtgggatggtgtcgggggctgctgacctcagcagcgtccctgctggggtcatgcaggcgcagcagcagcggcacgagactctgcagcaccagcttccgcagggggccgcggagccccagccggagcccgccccggccccggcgcaccagagtcccaaggagcccgacggccgaggcgcggattgagtcccgtgtctgcgtgggagggcgcagtcagggcaggcggagacagagaggggctgcaagggtgggagggggcggccagcgcggagcgaggaagcggcgggtctagggaaggctgctgactcggtgtgatctggggacagggaacagggcctggagctggacctggttgggaagcctggagagcccctgcagggggtggggcttgaagggatggggtccggaaggaaaagtcgagcggggaggagcttggcgggacacggccctggaggggcggagctgggcgacagcaggcgggaggggcgggggcggtcaggagggaagaaatctgggacggagacactggggggacggggcctgggagggagaaactggaggggcggggcggagcctgggaggtcagggcctgggaggg

SEQ ID NO: 15881 - DNA, 1623 bp, Artificial sequence
  DNA replication origin
agttatctttggttttattctctgtggcaatttttttctttttaataatgccaggtttgtttcactgtcgctgacccaacgggactcccagtgggtccccaccctgcagctcagcttgagataggctatgttgtggtctgcacaattaacccttcatttgtttctctgagatttggggatggggggagatgggaggggtttcctgcccctcccctgctggagtcctactggctgcctccaccctggctggggactccctacattccctggacacccacccatctcttgtctcacaccagccccctccaaaccctcagggtagcagccgagctctggcgcagcctaagccgtaaccagcgtgtaaatgggcaggtgctggtgcaactgctgtgggcgctgaagggtgcttcggggccggagccccaggcactggcggtaggtggctccagccattaccagggggtgggggcgggggtggggggtggcgaggagcggggaggatgggcatagggagtttgcacctaggtaactgctcctggaatgtcccatgcgtgtctgaggctgtccccatcctgttgacagcacgcctgtccctctgctgcccagtgcagctccaggcgtgccccaggcctgagtgggccacttgctccacaggccacacgtgctcttggggagatgctggctgtttcgggctgcgtgggagccacgaggggcttctacccacatctgctgcttgcgctggtcacacagctgcacaagctggcccgcagcccgtgctcccccgacatgcccaagatttgggttctgtcccaccgagggccaccacatagccatgccaggtgagaggcaacaccaggttacgtggggcgggccagcatgctgtcaccctctcagctcccactgcccacctgctcactgtccccaccaccagctgtgctgtggaggccttgaaggcgctgctcaccggggatggaggccgcatggtggtcacgtgcatggagcaggcaggaggctggaggaggctggtgggagcccacacccacctggagggcgtcctgctgctggccaggtgaggagggtgaggaggggccccagggtgtcacaccaggaagagagtcgttgctggccaggtgctgggcagggggacagggaaaaggcaggggcatgagggtggtgttgggatggggtcttctcgaggagaaaggccgccaaacggagcgagagctcccatttccacccaccccagtgctatggtggcacatgccgaccaccacctgcgaggcctcttcgcagacttgctccctcggcttcgcagcgcggacgacccgcagcgtctcacggctatggccttcttcacaggggtgagcctgcttcccggatgggtggtgaagggtgaccctggacttgatccctgaatcgcagcggcctgcacggggaccgcgggcgtgctgaccccatgtgcctcgcctagctgttgcagagccggcccaccgcacggctcctgcgggaggaggtcatcctggagcgactcctcacctggcagggagaccccgaacccactgtgcgctggttgggcctgctgggcctgggccacctcgcgctgaatcgcaggaaggtgtgaga

SEQ ID NO: 15882 - DNA, 1035 bp, Artificial sequence
  DNA replication origin
cctccagcagcccaggcaggagggcccctcaaaggcccattgtaggcacgtccgtgtggctccccagcccccgcaagctcacgctagcgcacgccaccacgcccgtccgtggtcccgcccggggcggcttctaggtcagtcctgggcacaacttcgcaggaggagcagcggcaggtgctgcaggcaagggccgccatggctgggggtgtgtggggccggagccgggcccgggaggctcccgtgggggctctaaccctgacagcactgactgaaggaatccgggccaggcaggggcagccccagggacccccttccgcaggccctcagcccaagtcctgggaggtcaaacctgaggctgagccacagacccaggcactcaccgccccctctgaggcagagcctggacgtggggccaccgtccctgaagctggcagcgagccctgctccctcaacagtgccctggaaccagcccctgaggggccccaccaggtgacgggggagggaagggatgttgtgcgaaccggcctgggggtcctgtggatggtaggtggaaggcggggtggcaggggggcggtgctggccccgggggaggtcagcgtgaaacaggctggtgagcaacagaggagcaagggattttgtaggaagccaggtgggaggccgagggaccaggaggagagctaggagaggtttgggcacttcagacgccccacccatcctgccctaggttccccagagttcctgggaggagggagttcttgccgacctcgcgttgtacacggctgcctgcctggaggaggctggctttgcagggacccaggcgacagtgctcaccctgtcctcagccctggaggcccggggcgagcggttggaggaccaggtcagccttcacccacttcatgccctacagaatcctgccggttcgggcaccaaggtggtgggaggggcctggagagcgcagcctgaccctgccatcttcaggctgctcctgccaggcgggatcagggtgggggtggaggtggggtgcaggccagaggg

SEQ ID NO: 15883 - DNA, 1471 bp, Artificial sequence
  DNA replication origin
ctgcggctgggctggagtcgggaatctgagctcgaggtagcaggaagatttgcatcccagtgaaagcacaggccctgccggcgtgggagacagccctgtgctgaagcccgaagggcagtgaggagttccccggctttgggtaggctgtggggagtcagatcccacactagaactacaaagccacaggcagggagggctttggtgtctgccttggagttgagggagttgctgcagacctttccttgctagaggcaggctggggacaggacagggttgggggtagtgccaggtaagagggtccagccgtggccctgggctcccacgcctgcctaggcactgccccccaggctcagggtcagtgaagacgtctcaaactccccaagtcaaaagggagtgctcaggtgtctcctgccactgctgctgccaacccagcaccaccctggcatctggcgtcagggacacagctcctgacccagcagcccacggaaggagaggaagaatggggaagaagttgaagctccaggagatgactcagccccagacacctggccagagtggcactgcacgtggctgtgctgggctggccctgcctctgcaccagcaagttcctgatctcagggttccgccagtttgggcaacgtgagcttcaagaggaactgcttgggggagaggttctaggcttggcaggaagtggaggctgggggcctgggcctctcttgtcgaagcagcctgaggtggcacagacaggcaagggtgtggggggaatgctgaccgcctggggcacttccgtctgcccaggcattccaccagaccagctcacctggctccccgggcttcagggtgggcagcaccactgtgtggttggctgagggtggagggtggggacttggagcagaggcccagtccagccagccccggggagtacgagctaggagagagatacagactcacacacattggacagaacacaccacaccccaggcacccccagggcacccgcgcactccgaggggcccagccagagtggctgtattcttccgttcttgcactgctgtaaagaaatacctgagactgggtaatttctaaggaagagaggtttaattggcctgtggttctgcaggtacaggaagcatggctggggaggcttcaggaaacttaccatcttggtggaagcggaagcgggcaggtcttacatggccggaggaaggggtggggcggtgccacgcacttccagacaaccagatcttgagaagtcttatcatgggaacagcaccaaagggggaagttgcccccaggatccaatcacttcccaccaggccccacctccagcactggggattacgtttcaacatgagatttggccaaggacccaggacccagaggggcctgcacaagctctggaggggccaccgctcctctggtgtcttcactgccccctccacacctccgggctgccccaagctcacccagt

SEQ ID NO: 15884 - DNA, 2142 bp, Artificial sequence
  DNA replication origin
agcagcagcaacgtgctagcgggccagctgcgaggtgtgccggtggccgggaccctggcccactccttcgtcacttccttttcaggcagcgaggtgccccctgacccggtcagtccctcctctaaaccctgctgtctccaggcgacaggccccaagccagcccttgccctggcgagaggtgtgccacccaggcaggtcaccccagtgctgtcccaggaagctggcacgggctgcattacctttgctctcaaactagggtgtccctggctgctcccaggcctcatcctgcattcctggcccccattcttcaccgactctgttccacagatgttggcgccagcagctggtgagggccctggggtggacctggcggccaaagcccaggtgtggctggagcaggtgtgtgcccacctggggctgggggtgcaggagccgcatccaggcgagcgggcagcctttgtggcctatgccttggcttttccccgggccttccagggcctcctggacacctacagcgtgtggaggtgagcccgggcactttaggggtgggctcagcagaacctcagcagcctctgactcccttatctatttctgcaggagtggtctccccaacttcctagcagtcgccctggccctgggagagctgggctaccgggcagtgggcgtgaggctggacagtggtgacctgctacagcaggctcaggagatccgcaaggtcttccgagctgctgcagcccagtgagtttcccggggaggaggtgtgcctggtgggagatccccggggtttgggaatgggcagggaaggacagtgaggtactctgctgaagtttcagcggtgatactgcaggccgtggcagggaagtaagtggtggggctccctaggagctcccaagcagaaggtgagcacaggtgtccttgactgaggcggggcggggagcagggggacaccagggtgaatcaggaagacccgaggggtggcccccaccctttctccacccacgcggcaggttccaggtgccctggctggagtcagtcctcatcgtagtcagcaacaacattgacgaggaggcgctggcccgactggcccaggaggtggggtggatgagtgggtaggcggagggtggctggggggctctgggggcccctgcaggttctggctgggctcattgccacctccttccccgcccagggcactgccacccccttccccacccagggcactgccacctccttcccccacccagggcactgccacccccttccccacccagggcactgccacccccttcacccagggcagtgccacctccttccccacctagggcactggcacctccttccccacccagggcactgccacccccttccccacccagggcagtgccacctccttccccacccagggcagtgccacccccttccccacccagggcagctgggctcacggccacccccttccccacccagggcagtgaggtgaatgtcattggcattggcaccagtgtggtcacctgcccccaacagccttccctgggtggcgtctataaggtagggacagtgtcgggggcccaggtgggggcaggtctgagggatggtgctgggtgggggataaggaccagccagctcaacgccctcttcctgcagctggtggccgtggggggccagccacgaatgaagctgaccgaggaccccgagaagcagacgttgcctgggagcaaggctgctttccggctcctgggctctgacggtgaggccctcccatcccccctgctgtccaccttcaaagcaccagggcccccgcttattcttgccccgtccacacagggtctccactcatggacatgctgcagttagcagaagagccagtgccacaggctgggcaggagctgagggtgtggcctccaggggcccaggagccctgcaccgtgaggccagcccaggtggagccactactgcggctctgcctccagcagggacaggtggctgccccaccgccctcatcctgacccccagccccggtagagccctgactgggagctagccccaagcttctctttccttacctcctccctgcagctgtgtgagccgctcccatccctggcagagtctagagccttggcccagctgtccctgagccgactc

SEQ ID NO: 15885 - DNA, 2089 bp, Artificial sequence
  DNA replication origin
gaagaacgcaggatccgtgtctgggggcagcaccgaggccaggaactgcacgtctggaaacgaggtaactgcgctgagaccagcgcggggacagaccggtcgtgggacatggggggttccacggggggacaaggacttccaccggccataggtgggggtttctgccgggcgtggggggctcgtcgcgcggacgggggactaccggcgtcccgcaggcggaaggcgcgcaggaagcgcacacagtcgcgcaagccggcggccaaggcgaaggcgccgccgaacgggcagcggcggaagaagagctcgaactcggcggcgtcccgcgcccggcccgcgcgccaatagcccaacgccatggtggcctggtagaggtcagtgagcagcggccgcgccgccgcgcgcgcctcggggtcctgctccgccgccatcctgctcccgacgtccggactccgccccgccccgaccccgtgacgcgccccggcctatggcgcactccctgtggggcttatcgtgccgtttgggagcggcacgggactcgatggaggacgggtggggctaatagtatcggcgcgccgagaggggctgaaacagctggacccgggatggggtgggggatgtcacccaactcctctcggaccccccaaccccactccaggcccaacggcctctttggagcgcagcccggtcttggtcaccagaggtgcccccagtcgctcgtgtctctgccctttggccgggcaatgaggtgcagctcaggacttgccaggcggcggaaagggtggaggacagaccagccagactccacccccaccgacccagaagacaaccgctggccagcagccagctcctgccctgggcctggggagggaggccagaggctgccttagttagagcttgagcagccaggctaggacgaggcagcccagatggacgcaaatgtcgcttggaaagagcttggcacccaggaaagggcggcgtggggcaggggggcgcatgcccactgtcggctggcaccaaaagaccttttgtggctatgaaggcccagtgtccctcagtggtggcttttatggggtcctgcagtccaagccccacaggaaactttctaaaggtttgagggcaaagtcaggggccactacccagggagaatccattcccctgtggcttggggccccgaggacagagtctgaccagaagtaatcaagtaattacaccccatcctctttcaccccaatgcaaacacgggtggtccaggggagggagtgtggccacccatgctgaccacatacggctgtcaggatgctgaggcacagctccacagagcccaggcagccacgttctggccaccccagaacatcatgggaggggcacagtccctggagcaaggggcagggattccaggaatgaatgaggtgaggggagggccgggacagcacatgacaaagggcatggcagcagggccgggtgctactgggacttctttcctggacaattccaggcttgcacgcttgctcccatggggacaatgccaacaggaggcagagtggtggggtggtggcctctccagatagtgacctaacagtttctgtttctggctttttaaaccccctgaactggacttgcttttgcaatggaaagaagagggagggccagagctttgggagggagtggccaggagatggagggacaggcggaggtctgctgggggcaaggtgacatggccacagagggtggcagcagccaggatgactgtgtgggaacagcagggcagagatggggctgagacagggagggagacaggccaggtacgagcaggaaatgaccaggacggagccagagggccggtctcagtctttaatcgtggcagggcctcacgcacgcgcgcacgtacacacactcaggcttcagatcttgttgaaagctgcgatatcgacactctgcacctgaggagaggcggagggtgacggtcagggctgttcccctacagcccactcggagccaggagcctcctctgaggtggggttcactctgggactcgctccccactgccgtggggtggagtgcagggtatgggccagggtccccagtctcc

SEQ ID NO: 15886 - DNA, 887 bp, Artificial sequence
  DNA replication origin
atgtcacggaggatcacgctggcgccgttctcctgcagacagtgcagaaagaaccagtcttttttttattattaaaaaagaatttaattaaaaaacaaaccaaaaaaccccatgaaccctcacatagagacagcaagaaagtactgcacagaacgagagcttggcgggccagaaaagcgggagatgcctgaggctgtgacgacaggcaaaggcgcccatgtctgcgggggaaggagtgccaggcctggccccacaccaagtgcacaggcgccggcaggagggccctgagcagacccggcccgggggcccggccaaggccgcctgccccgagaccccactcccagcacccacagcagagccactgggccagggtgcctctgccttcctggcctggctgaatccgctttgtgtgccccggccactcctgtcgggcagcagagccgcccagccgccccacgtgcagctctcacctggcgggaggcacctgccacaggcccgttcatctgctcgtagaatctcctttctgcgtcgtcatatttgaacttgtcgaaccagatcttctcatgtgctaggaagtttgtagccatttttctgctgggaggggaaagaggcaaagtcagcatggctgggaagtgggcctcggcatcaggacagcccagaagcaccaaggtgcagtggggctgacacccgcttcagacaccagcggttctccacaaagcgacaccaagcccgtaagccctcaccccacatggcatccccaggcctgtcttccagacgaggagttctcaaagtgtggtccgagaacctctgagggtccccaggcccttccctttcactcacacgaagctgggtttatgtcaaacagctgaagtgcggaggcaggtatg

SEQ ID NO: 15887 - DNA, 1817 bp, Artificial sequence
  DNA replication origin
ccccgctgggcagcctgcaggcactggttcgggaggtgtggctggagaagccccggtatgatgcagccgagaggggcttctacgaggccctgtttgacggccatcccccagggaaggtgcgcctgcaagagcgagccggcctggccgagggtgcccggcggggccgcagagaccggcggggccgcaacatcttagggaacaagcgggccgggctgcgacgggccgatggggaggccccctctgccttgccctactgttacttcctgcagaaggatgcagaggccccctggctcagcaagcctgcctacgacagcgccgagtgccgccaccacgctgccgaggccctgcgggtggcctggtgcctcgaagctgcctccctgtctcaccgacccggtcctcggtctggcctgtccgtgtccagcctgagacccaagtaggagaaacgtgctgggtgggcacccagcctgggctgtgggcacagggacagccatcccaggctggggctcctccagcttcctcccctgcccacctggggtgggggctccccgagacccgtgggcccagcagagttgaatgcaggagcaggctgagtaaaggtggtgctgcgcttgtgggttccagggacactgcttgaggttacaaagttccaggctgcctggatgagggcagggaagggctcagcacagggcagaatctctgccttgcccagggtccctctttggctgggaagctccccaagtcccctgtggctgtcacatgccagggctgagaagataaggctacttataggggcgggaagcattgaagctggtttctggccctagcgctcccctgcgatgagatgtgggagccagtgtgtccctgcctgtccatcctgtgcacccccagctttccttgtcacctgaaaccacctctgagggaaggtggtggcgtctcagatgcatgggcatgtggctggtcaggtggcctccatcccagggtgccccgtctgtgtgacctccctctgggtgctgtgggcttgctccagggtgcaggtgcaaccccagcagcggtctctggggccaggcaggtgggtggacgattggacttggaggggaatacagagggcatggaagtggcgaggctggcctgttggcgagggtgtcctggtggtggggcgggctgagtcagggaaggactctgaaggtcccaagcagctgctgaggcccccaaggaagtggttccaaccttggacccctaggggtctggatttgctggttaacaagataacctgagggcaggaccccataggggaatgctacctcctgcccttccacctgccctggtgttcacggtggcctggtccctccttgccgagagagtgtcctgggtcagggacgcagaggacgctcacagactccagccctttgttaccgagaggacacttggcaaggtccagcgatggtccggagtccacacacagactggcggcagggcaggagggggacagttctgttgtgcttggttggacagtaagagggtcttggccagtccagggtggggggcggcaaactccataaagaaccagagggtctgggccccggccacagagtcatctgcccagctcctctgctgctggccagtgggagtggcacgaggtggggctttgtgccagtaaaaccacaggctggatttgcctgcgggccatggtccctgtctagggcagcaattctcaaccttcttgctctcaggaccccaaagagctttcattgtatctattgatttttaccacattagcaattaaaactgagaaatgggccgggcacggtggctcacgc

SEQ ID NO: 15888 - DNA, 1177 bp, Artificial sequence
  DNA replication origin
ttgggtctcaggctggacacggacaggccagaccgaggaccgggtcggtgagacagggaggcagcttcgaggcaccaggccacccgcagggcctcggcagcgtggtggcggcactcggcgctgtcgtaggcaggcttgctgagccagggggcctctgcatccttctgcaggaagtaacagtagggcaaggcagagggggcctccccatcggcccgtcgcagcccggcccgcttgttccctaagatgttgcggccccgccggtctctgcggccccgccgggcaccctcggccaggccggctcgctcttgcaggcgcaccttccctgggggatggccgtcaaacagggcctcgtagaagcccctctcggctgcatcataccggggcttctccagccacacctcccgaaccagtgcctgcaggctgcccagcgggggctggccattgaccggtgggctgggctggtgggccaggtcggggacggccacctgctggcctgtgttgggagtcccctgcctgcggctgccgtcgggggccagcaacagggcctgagaccactccacgaaggcccgctcagcctggtcgaaggaggacttgttgacccagatcccccaggtcacgtggtggcaggccacctggtttccatgggtgcagagaccccaaggggccaaggcaggaggccaggctgcctgggcagccacatctgccagcttctggcggtaggagctctctgcctggtcgaaaagtgacttgtccagccacacgcgttcggccgagaggcccaggagggccaggtccgcggggccgagcccgctcttgggggagcgcttcctctttttctgcaggggcttcctgctgtcctggctcttcctgggatcacgcctgctgccgccgtcaggggcttccgcctcatcagcgtcctcagggtcgtcctggccgggcccattcatggctggcccctcggctggcagctgctgggcggaggcggccgcctgtgtggcctcgtgttcgtagaagcgccgctcggcctcctcatacttgtgcttgtcttcccacacggtctccagggtgcaggaggccttcccgctcctcatcttccggacacagcgataaaaagcaagcagagggcagagttgcaacacagcgggtggccgcagccccgtgcccaccctccccgtgc

SEQ ID NO: 15889 - DNA, 1397 bp, Artificial sequence
  DNA replication origin
cccagcctggggaaggaatgagcaggggagcctagggagcgtcttcatgggccctgtggcctcccatgggccccggttcctcgttggtgccattagaacttgttgctgggactgcgggattcgggccacatgcccgcaaagaactccatgttccacttagaggctgcagagtgcagtgccaggggtgccttcccaaaagtcctccctgcctgggtggagcgtagacagctcagcaccccacggggggcgttggagccagccttggttttgttgggtaaggatgttagaagaggggcgaagacccatagccactggtgtgaagggtctgctcttgaccgaaggctgcctccctctgggtgcagaccaggcaggtggtcccagtcacggtgccctggggccactgggtctgtctgccctcaggctccactagacacacctgcggaggcagcagactagcagcggtgtctgtgaggggcagctgcacagccccctcttgagggtgctcctaggcgttggttaggcccaggcgtttctgcttttggggagcagagcctggagtcgggcatggctggggaggaagctatcgcaggctgagcgcgggctggggtgctgacctgcatcccaagagcagatttgcccctggccttctgggcctgtcctttctgtaacaccacactggacacctgggagcagagcgtgcccccggcaggatcccacatggctgctggagcactggggcagcaggtgactgaggtcgcccagagcttgagggaacacctcatccagggaggaggctgaggctcccaggccacagtagcaagtggggagtggagcctcacaacctgcctcccaccaagatggtccctcttaacattacacagaagcaaaaccttagagggggccctgatgtcctgggactgtgagagccccatgattcccctttagcttggatggacccaaaggtatggactccagctgggaggcgggggcagctgatagagagcctagagccgtctcagtgctccaggcgcttggcccctcctttctacacagtggtcaccagcatcctccctggcgtctccttcatgagtgggcactccaccctctgcccggccacctggccccctcctggggaggacagtcaggcccacaaagaagctccctctttttttttcttttcccctgctctgttgtccaggctggagtgcagtggcgccatctcggttcactgcaagctccgcctcccggcttcacgccattctcctgcctcagcctccctaggagctgggactacaggcgcctgccaccacgcccggctaatttttatttttatttttagtagagacagggtttcaacgtgttagccaggatggtctcagtctccagaccctgtgatc

SEQ ID NO: 15890 - DNA, 1130 bp, Artificial sequence
  DNA replication origin
gggatgacggagtgacgtcacctgtgtggactcagctgccacctgggattgtggtggcggcgggtctgtctggcgctcagcttccatctccaccagtgtcacctccacaccacctcgccaagcagcttctggaaaggcccccggccgccccgggctgacctgctgctgtgtctgacccggttagtctttctggctgcctctaaccttgctgcttttccttcatgctgtcctaggaggccaaagcaaagtaagtactcgcctgtcctcatgccccattccccttcatttgaccggggaacccccagccctcgctgcacctgagggaacccagcaccacctgcgcatggcccagtctgcccagagggcctcagtttcccatctggaaagtggaggaattgggttttctggatggggcagcagcaggtgggcaccctgtgtggccgtgagcagggtcctgtcctgggctggcgggtcagcagctgacatgcggctccctgcagggaacaggtggcagtgccaggtctcggtaggagccttgaagtggcttcccctccctgagcggcggcttctgcccggagcccccaagaacatagtctgaggccactttggccaataaagtctggtagggcatcaacactgggggccagctcagtggcactgctgatgggacctgcacggctccatgggagcagagagactggtgggggtaccaccgcacgatgtcacaatgccctgtctcctgggctcttgctcccaccccacccccaacccacaacccctgcctctgcccatcagcctggccttggtaagtgctgccccagcctggggaaggaatgagcaggggagcctagggagcgtcttcatgggccctgtggcctcccatgggccccggttcctcgttggtgccattagaacttgttgctgggactgcgggattcgggccacatgcccgcaaagaactccatgttccacttagaggctgcagagtgcagtgccaggggtgccttcccaaaagtcctccctgcctgggtggagcgtagacagctcagcaccccacggggggcgttggagccagccttggttttgttgggtaaggatgttagaagaggggcgaagacccatagccactg

SEQ ID NO: 15891 - DNA, 1245 bp, Artificial sequence
  DNA replication origin
tcggacgtgtggggggctgtgctggctgtcctgggaggctctctgcccgctgttagtggccagctccccaggtgacgggcctggcctccaggtctccagcatggcttactgtggtgtctcctgagggcttcctctctgcagggaagcccacccaagatccctcttactggtcccatggggcagctgcctccgtagcatcctcgtctccaccagacccctgcagggtgcccagttcctccctgcagggtgctccctgctgcagtgtggggtgcacagaggtgggcagggccctggggccggagctcccgttggtgaaggaagacggatcccagccagggctctcgggttgatcagcagtaggaggtggcccctcctgcccagtcccacccaggacatgggctggtggctgggctttcagctgtgcccagctgcccttcgcagagcttgcagggtttatgaggtggctctggtgagattaggggcaggacacctagtgtctccagccgaggagtgaactgggtggaggtcctgtccttgtgtgcacattgtgggagagtcagtctgggaggcctttgtagcttgtgctggggcccttgggtgccagccctgtcttgacggtggctcctgctgagagagaggccctgtattaatgtgagccctgggctgcctcccccttgagggtccttgtcatcttccgggcctccttcagcagaccggacacaggggcagtgcaggtgaggggcttgggggagctccttggcagctccaggggatgcttgtgggcgctggcttatcttgtctcaggctaccttgctcaggtgacgacagggtgggtggatttgggaaaggttggctcagatagtggtccctgcttgtcccccagggcctgcctaggctccaactgacagtaatcccaagagctcccctttcaggggatgacggagtgacgtcacctgtgtggactcagctgccacctgggattgtggtggcggcgggtctgtctggcgctcagcttccatctccaccagtgtcacctccacaccacctcgccaagcagcttctggaaaggcccccggccgccccgggctgacctgctgctgtgtctgacccggttagtctttctggctgcctctaaccttgctgcttttccttcatgctgtcctaggaggccaaagcaaagtaagtactcgcctgtcctcatgccccattccccttcatttgaccggggaacccccagccctcgct

SEQ ID NO: 15892 - DNA, 829 bp, Artificial sequence
  DNA replication origin
cgcctcctctggaggactaggccctctgggctttgctcccgggttgctgggtgaggctgcaaggtttagcacaggtgggcacacgtgcttgatgatggacaaagagtacctgggctgtgccgtgcactggcgtcagccttctgggggctgaggacaggaaatgtggcattgaggatttgtgggtcatcatcctgtgccagtgtgttaaggtgacatcagcgtgttggaagctggtggcagtgagttatgctaagtgctggtgtaggagcctgccacaggtctccagctctcccacctcgctgacagccaagggtgccgtgtgaggtgtggcgtgggtattgtctggggttccagaaagcctgtgccgtgctggagtcacccaggaggcacaggggctgcgccgggcaggcaggtcggccagagcccctcaagcagggctggccatggagctggcctgcagtggcatttaagaaaagacgtggttggggcggggcttggcctggggcagggtgggttgggtagctacagtgagtgctctgagatatgcaggacaggctggcgtttcccagtggggctggaatatccaggggtcagacaggaaagtggctgagtgggaatgtggaactgtggagttttttctcttaaaaagaccaaaggcggctgggcgtggtggctcatgctggtgatcccagcactttgggaggccgaggcaggcagatcatgaggtcaggatatcgagaccatcctggccaacatggtgaaaccccgtctctactaaaaatacgaaaattaggctgggcgcatggctcatgtctgtaatcccagcact

SEQ ID NO: 15893 - DNA, 1857 bp, Artificial sequence
  DNA replication origin
ctccaacggaattctgcctttgaagtgtcggggcacggcgcgtcgagggtcctggcggccaggcggggcgtgtgcaagggtcgcgtcccccccccgggcccccggcccgtggctcttggtagagcccagtgcttcatttcccgtgcgcggcccgggcggccctccctttcatcagtcttcccgcgtccgccgattcctcctccttggtcgccgcgtccttggctggcgtgtgagtaccgcggcccccgccggaaggagtcgggcgcgacagagacgcccgaggggccgggagggcgggcggcccgggctgcgccagaagctcgcgccgttagggactgaggcacaagtgcgccagcgcgggcttaggggccgtgggccaagtgcggcacttggggcgagcgcagagaggcggggcgacggaggccacgtggccggcttggagggcgtccgcgggacgggggcgccgggagcactgtctcacggcgcatcccggtcgtggaagcccctcggccaggctgctggggcctaaggcctgtgtttgctgccgtctccgtgggagaccagacatctgccccagctgtttctctggcctgcagaccttcgtacaccacgtctttgtcaagcaccagttactgcacgcatcagctgagcacggaggggataggcacggacgcaacacttttggaacttagacgctagtgagcacggaaaggaataagcctgtactgtgactgggtcaaaatttctgtctcttgatttggatagggtggtcgggcagtctctgaagggggcggggatgctgttgctaagaagtagtactttcagaggctttaagtggaaggaagaaggcaaagggggcggagtgggttggggacctgatgagacgtcaggattggtttccagaatgaaggaccgcctggcagcagaagaactgtgtagctaaacttggggttgtccctgcccgacagggcggggtgcttcttaagttgacactgcctgcggctcacctcccagggaggcaggccaggccatctcacctgagcagcctccttctacagctccgcccaccccgtcatctggaccccatgagccttaagcagctggctcgcaggcagttggttacttccggagcccgtgtgtgcccagccccgttctgggggtgggggatgcagctgaggggctgggcaggtgtggaaggagcccccgagcgtcctctgaggaagtagacgctcaccttcgccttctcaccacatgcctcaggcccagccaggctcctagacctgcctctgtagaggctttctgggcgcagtgccaatcctgtgagacagcagcatctcccctgggctgctgcagggttcacacgcagtcagtgctggcagagtgagcgcccagccgacagagcccccgctgcctcccgcctcctctggaggactaggccctctgggctttgctcccgggttgctgggtgaggctgcaaggtttagcacaggtgggcacacgtgcttgatgatggacaaagagtacctgggctgtgccgtgcactggcgtcagccttctgggggctgaggacaggaaatgtggcattgaggatttgtgggtcatcatcctgtgccagtgtgttaaggtgacatcagcgtgttggaagctggtggcagtgagttatgctaagtgctggtgtaggagcctgccacaggtctccagctctcccacctcgctgacagccaagggtgccgtgtgaggtgtggcgtgggtattgtctggggttccagaaagcctgtgccgtgctggagtcacccaggaggcacaggggctgcgccgggcaggcaggtcggccagagcccctcaagcagggctggc

SEQ ID NO: 15894 - DNA, 1635 bp, Artificial sequence
  DNA replication origin
caaaggcagcagccgggcacatatccccgcaccgctggagcagggcgtggtggccgccttcaaacagctgtacaagcgcgagctgctgcgactggctgtgtcctgcgccagcggctccccgctggacttcatgcgcagcttcatgctcaaggacatgctctacctggctggcctctcctgggacctggtgcaggcgggcagcattgagcgctgctggctgctgggcctgcgggctgccttcgagccccggcccggcgaggacagtgctgggcagccggcccaggccgaggaagccgccgagcacagcagggtgctcagcgacctcacccacctggcggctctggcctacaagtgcctggctccggaggaggttgcggagtggctgcacctggacgatgatgggggtccgcccgagggctgcagggaggaggtgggcccagccctgccccctgcagcgcctccggccccagccagtctgccctctgccatggggggcggagaggacgaggaggaggccaccgactatggagggacctcagtgccgactgccggggaggccgtgcgggggctagaaacagctctgcggtggctggagaaccaggaccccagagaggtggggccactgaggctggtgcagttgcgctcactcatcagcatggcccggaggctggggggcatcgggcataccccagcaggcccctatgacggtgtgtgaccaggccagcccagtgacctttctcctgctgcacttggagggaggggacatacacacagtctcccatctctcctcccctccccctggggtggcccaccgcatgggtacagggggttccaggaatccaaatccagcatggcttggaggagctctgttggtgagaggtcgccctgcctcactggcaccctgggggcacagctggaagagaggcctggcccatgctcctctcagggcaggcacatgtacggggcatacaaggcacagcgcctgttggaacaggtggctgtgttcctgctctggcccccgtggggctgggcctccgcccctgcaccagtcacatgcactggacgagggccgaaactcctgtctgctatcgagccctggtgctatgtggccccggagccacagcacaatcatctcagtggcgaagcacaccacttgattctatttttttttaacacattaaatctgtttttaaagatactcttcagaggggccgtgagaacaggggccgggtgggctggtctcgggccgccctgcggtttctctggaggtcagaggccccaggtactggagcatcactgtggagtgggaggggtggagccctgtattaggttctgggtgcagcagggaggtgtagagttccgtttccttggatttttagttttccctaagaaaactgaacagatctcttattccgtgggattggcagctgcctggctttgggccctggtgacttggccaacggcaggagagtttcccctgcttcctcatcagccacagaccattctgtccagtcccagggcctggagccacctgacttacctggaagcaggccctggcattagcccccagggcaatacgcagtgccaccctctgtgggctctcctccccaccctcagacttttctgcctctcctg

SEQ ID NO: 15895 - DNA, 826 bp, Artificial sequence
  DNA replication origin
tatttagctgaagtttgcagactggctggtctgggctgggaaaagggagattagaggccaggaggaaagtaaggttgtggagggccaaagcaaagtgtttgtgtgtgtgtgtgtatgcatgtgtgagtgcatgtccgtgagtgtgtgtatatgcacgtgtgtatatgtgaggctatgcgtgtgcatgtgtgtatgtatgtgctcatgtgcgtttgcacgtgcgcttgtgtgtgcgtgtgcacgtgtggtgagtgcatgtatgtcagtgcatgtgtgtgcgtgtgtgtatgagtgcatgctcatgagtgcatgtgcacctgtgtggtcgtgagtgcacgtatgtgcttgtgcatgtgtgcctgtgcagatgtgtatatgagtgcgtgtgtgcgtgtatgagtgcgtgcgtgtacacatgagtgcatgctcgagtgggtgtgtgtgcatgtgtttgtgctcatgagtgcattcatgtgtacatgtgtatgtatgctcgtgagtgcatgtgtctgcgtgtgtgtatatgaatgcatgctcgtgagtgcgtgcatgtgcatgggtgtgtttgcatgctgggtggtggtcacagacattcactggggatggagggctcagggcttggggaggcgctgacatcaggatggcctgtgaggagtagggctagtctgggggagtcttgggcactggagaagtcggggtggtctagacacttgcaatgggagaggccctgggaccatgggaacgtgtggcatccagcaggaagggctgtgatggagagggtgcgccgcttacatggcccctgaggcttggtcctggtgtccctggc

SEQ ID NO: 15896 - DNA, 914 bp, Artificial sequence
  DNA replication origin
caatgggcagtgaggggcggcatagccctttcgggccaataagcagcgagaggcggggttcccgcgccttgcgaacttgtagagtgcggacaaaaagccggccggagtgtgccgtcccagtaaccaatcggcgagggtggggacggggaggcgagtcctattggagggcgggggtggggcctagatctgtgggcggggcgcggcctgtggatgggcggtgagcgcagcggcgtccgaggcaacaagatggcagctgcggagccgtctccgcggcgcgtgggcttcgtgggcgcgggccgcatggcgggggccatcgcgcagggcctcatcagagcaggtggggcggcgcggggctaggcctgcggtctggagtgggagcagccccgtgggaggtgtcctgccgcgagagtggggccgggggcgcgggcccagccaaccgggtctccgctccgctgggcgcagccggggccacgcctgtttgctcttacttttttgacgtggctgcgggaagatttgagtcacacgtggctaggtgccgcttccgtggccggcttcctggccgcgtggccttggccaggctcacctcttccagcctctgattttctctttgcgcgccagcccctctcatggggagcagcagggcttctcccccagacaccttggctctagggacacctgggccagactatccatcctgtgccagcagcacccccacgttgtgacagccaaaaatgcctccagacactgccgaatgtcccctgggtggggggaggagacaggcaaaatcatcccctgttgagaaacactgctttatacccggaatatttatgctgaccatatactcctccaggcatttagaagcctctctgcagattgtggatagggagagctgggtgacttttgactctctgcct

SEQ ID NO: 15897 - DNA, 907 bp, Artificial sequence
  DNA replication origin
tgctcccactccagaccgcaggcctagccccgcgccgccccacctgctctgatgaggccctgcgcgatggcccccgccatgcggcccgcgcccacgaagcccacgcgccgcggagacggctccgcagctgccatcttgttgcctcggacgccgctgcgctcaccgcccatccacaggccgcgccccgcccacagatctaggccccacccccgccctccaataggactcgcctccccgtccccaccctcgccgattggttactgggacggcacactccggccggctttttgtccgcactctacaagttcgcaaggcgcgggaaccccgcctctcgctgcttattggcccgaaagggctatgccgcccctcactgcccattggctgagagaaactgggggcggggccgtaaggggcggggccggcggggtactcgcgctcggagaggccggaggagcggggaggggtcccggtcgcgcgtgcgaggagcacatgttggttttccggaggggaggggtagcgaagcgggttgcggggctggtccagagcgtgcggtcactgaggccccgccgaccacagacggtggagctgcggggaagcactaggggcggagacccaggtcacggagagcaggccagggccaggggcctgagaccgacggaggggacagtcggggagggggtactcgtcacttttaatgacacaaggaaaacaaggcttgaagatctgagtgcggttttttcatcatccaatctaaagctgcatgttacatatgttattttcttttgaagcctttgacattttcttttttcttttttttgagacggagtctcgctctgtcgcccaggctggagtgcagtggcgccatctgggctcgctgcaagctccgtctcccgggttcacgccattc

SEQ ID NO: 15898 - DNA, 1159 bp, Artificial sequence
  DNA replication origin
ccagcaagccgaggtgtcctccaggcctcccctgagactggccccctcttgggtcaaggcctccctaccttttaggcctcagctgaggtggcccagcctccaaaacaccttccctgatggcaccttcacagcgcctctcggagcatccaccctgccctgctgggattgtttgtctggaaacctctgggagccccgcctcaacccctaaccctcccgctgacaccccaggacctcgagctccaggagacgggttggcctcgttcacagtgtatcccctggccccagccctttgtggataaaggctctgcccatgtgggggttcaggaaaggcctcctggagagggtggcgcctatgtggctgcttggatccaccaggtgaacagtgggaagaagcccagccaagagcagagaggtgccctggacacaagccttggctggctgggtgtccacgtcagctgagggctcccagctgatgctcagaagcccagcccggcatgggacggagaagctgaacggggctgggcccctgggcctccttttacccactgtggccctgggcactcagccagcaatcctccttcacctcgcctcagtccacttgtttatgatgagctttgtccttatgtatgatggcatggcactggatgcctctggcccctctcacctccccacagccttggtcctgagccatcactggcccagggggcctgggagaaaatccagggagtctgtgggaaggggctgggaggatccgaggtggcaggagatacagctgctgacgctgtgtgctggtgcaaagtgtccaccacccacgtttctcggctgcagtggccgaagcagcctcctggtggctttctgtccctttccacctcatttgcttcagagccttgacacactggctgtcctgcgtgtgtgctgactgtagtctgtctacactgccaccaagcagggctgcagggtggggtccagcctgtcccatctgctgccgtggggtgatcttgcccaggcccagagcagggcccagaggctgcagctgcacagtgaatgttgaatcaatgagaggatttcattactgaagagcttagaaaatgtcaaaggcttgggccggcacggtggctcacgcctgtaatcccagcactttgggaggccgaggcaggtg

SEQ ID NO: 15899 - DNA, 1397 bp, Artificial sequence
  DNA replication origin
tccaagggagaaaggagggacccctgttccccaggctgagcccccactgaacaaggacagcagtatggactccccagcaggggcgtttgggagagggttggctatacccatggtctctgaccctgcctgtctgacctctaggacctggcccagctctttatctgggtcctgcgggagtacaatgaagtggagcccatcatcctctccggtgggtacctcagccctcagcccccttcctccatggtaggacaggatccaaggttgtcctgggaggctggctgaggggtgggagcaggaatattcatgggccgtcgggtggcaccaaggggaggcctgacccggtggctccccacagtgggcgaggaagatgaggtctccatcaaggaggcagccgaggcggtggtggaggccatggacttccatggggaagtcaccgtatcctctggctccagtgctgggggttgggcgggggccccttgggcgggctcagtggccacccggtgtagggccagcgtgggtgggacactgcggagggaggatgctcaccctggcaggcggaggagctctgctgtggctcccctgggaatggcagaggttcaagggcaagctgcgggggctggggtggaggtgctcttctcgctgtggccttgacaaagcctccagtttgatacaaccaagtcggatgggcagtttaagaagacagccagtaacagcaagctgaggacctacctgcccgacttccggttcacacccttcaagcagggtgagccctgaccccacagccctccacttggtggaggcctgccccagcccctccctcatgctcgctaccagggcagaggtgaggtgccccctcagagcctgtactgccctggaggtgggacaccaaagctctgaggggtgacttccctgtccctgggcctcctccccccacttcctcccatgcggccccgaccctccctgtccatggccctcacctgcctgcctctgcagcggtgaaggagacctgtgcttggttcactgacaactacgagcaggcccggaagtgaagctggaagacaggatcaggtgccagcggaccatcggctggcagagcccagcggccaccacccgtcaaccctgccaggagctgagggcaccacccagcaacctgggcctgcattccatccgctctgcagccccaagcatctttccagtggggcccccattcacgttggtcctcagggaaaccagggtcccgggcaggcccggcgctttgctccccacaccagccccctgcgcgtgtccactctgatcctgcatcccactccctgggagccaataaagtgcattttcacaggcctggccttggcagctctgtgctgagccgtcccccacacccagggactgccccctag

SEQ ID NO: 15900 - DNA, 1291 bp, Artificial sequence
  DNA replication origin
ctgaagggccagggtgtgtctccacttctgcgtctggaggagcaggtaagggctgggatctggcctggggagcctgaactgtccccgcctcacccctgcagaggaaaaacgtgcacatgaacgacaacgtcctgcactcggcctttgaggtgggcgcccgcaaggtggtgtcctgcctgtccacctgtatcttccctgacaagacgacctacccgatagatgagaccatggtgaggggcagggcctggctgtgggtggggccggggagccggtgggcagggccaggaagtagcggcctctgcctctcccacgcccgcagatccacaatgggcctccccacaacagcaattttgggtactcgtatgccaagaggatgatcgacgtgcagaacaggtcctcgcgcccatcctgctgaggcccagccaggagtcggggagagggcccccaggggcgggtggggccggctggtcgggtcttcgtgccagcctcagtaagaggccagcggcagcctggggtgggatcgcgggcccaggacgagggcaggagacgctgtgcctccgcagggcctacttccagcagtacggctgcaccttcaccgctgtcatccccaccaacgtcttcgggccccacgacaacttcaacatcgaggatggccacgtgctgcctggcctcatccacaaggtgcacctggccaagagtgagtgcgtccgtccgatggggtgcccgggctcagctcgggaggaggtgacccagtgcctctgacacctgctccttccccaaatctgcaggcagcggctcggccctgacggtgtggggtacagggaatccgcggaggcagttcatatactcgctggtgcgtaaaggaaggcacagctctccccagagaacctgccctattgagccctgggctggcccctgctgggctgtcggggaggtggtgcaggagggaggctcctaccagcagagaatctgggctgagctccaagaggagccatctctggtcctcgtggaggccccataggctcctgtctccaggagtcactggcgtagctctgagctccaagggagaaaggagggacccctgttccccaggctgagcccccactgaacaaggacagcagtatggactccccagcaggggcgtttgggagagggttggctatacccatggtctctgaccctgcctgtctgacctctaggacctggcccagctctttatctgggtcctgcgggagtacaatgaagtggagcccatcatcctctccggtgggtacctcagccctcagccccc

SEQ ID NO: 15901 - DNA, 1661 bp, Artificial sequence
  DNA replication origin
cccaagcggctttgcggccgcggactccaagtcccagctgtgcccgggacgctgcgcgcccccgggactccatttcccagagtgccccgccccagcctcccggccccgccccccacctggctccgcgggcagccggagcgcacccggccggaagccgctgtcggggagccggcggtggggctggacgcaggtgaggtggcaccggactcagccgcgccctgggccctggatgctccgtgagagtcagggagcgctgtgggggtctgggatcgaggggcatgggggcagcctggggctgtggtagagggtctggctgcggtgaggtctccccgcgtgcttgggagccgcgcgacgcctgcgcagggccccctcccctaagggctggccctggggccctgccgggggagcccgagcaggtttccggctcccaggatgggatccttgagggtggctgcgccccgaggcctgtcctgccctggaggaatctggctcgccagggctctccaggaccagccagcctcgagtgggcgtgggctgcacacaggcgccgtctcgtgcctgtccctagcatgcgggctttagctgcgaaccgtgttaacgacctgtgccaggagcccccgtcccaaggttgtctgcctcccctcttgtcagtcagaggggagtagaatgtaccttttctcggcctagtggggagtcgtgggttgggaccagctgctctgggctgggtggtagctcaggacccctgcggcgctgtaggctgagagctcccaggggaacagggctgcgacgagggagtgcctcggtccagctgggtctttctggttgccagtggactatgccccactctgagggcctcactctgtgccagttgccacagaagagtggggctccaaaggatgagagcgtgatgacctcagcctcccactgtttgacattacaggtgcaactgacatgggtgaaccccagggatccatgcggattctagtgacagggggctctgggctggtaggcaaagccatccagaaggtggtagcagatggagctggacttcctggagaggactgggtgtttgtctcctctaaagacgccgatctcacgtgagtgagcccatccccagatcagcccttcctctccatcctaccccccaccctagaactaagagttccaggctgggcatgttgctgagtctaacagtagctgtgtttctgggtccttcctgccaggtggctggcctggcctgggtgtgcttggctgtgttcctggaaaaacaaacaccctcccatctcttcctggaagcctgcaccctcatatcagccaggccctggggccaccctcccttttgactgtccctcctgccatagtcccacccagttcctgcacttggcacccaaccctggggtgctggttccctccagagcctcctgacagcctggcttcctacagggatacagcacagacccgcgccctgtttgagaaggtccaacccacacacgtcatccatcttgctgcaatggtggggggcctgttccggaatatcaaatacaatttggacttctgggtaagtgagggtggccccagcaagcactggaaaccaggatcccaggttctgggaacttcctggcgggcttcccactctcacaggcccacattcccaccccagg

SEQ ID NO: 15902 - DNA, 1576 bp, Artificial sequence
  DNA replication origin
acagccccaggctgcccccatgcccctcgatcccagacccccacagcgctccctgactctcacggagcatccagggcccagggcgcggctgagtccggtgccacctcacctgcgtccagccccaccgccggctccccgacagcggcttccggccgggtgcgctccggctgcccgcggagccaggtggggggcggggccgggaggctggggcggggcactctgggaaatggagtcccgggggcgcgcagcgtcccgggcacagctgggacttggagtccgcggccgcaaagccgcttgggaagcgcagtctcgtccgccggccgcgcgcgggcgggtccccggacgaagtcccgggccgcaacctctttagcccgcggggcgctgggcccaggccctgcttgggacggcggaaggacacgagacgagggccagccggcagcgccgcgcgggatgcccgcggcgtcggaaggagcctcgccggcgctggggccaggcgggcttacgctgcggcgtctccctttgctccccttccctcccagggttccgcccccgaatacgcagacctcgcgccgcagcctcttggattccggccgcgatgaggagcccgggttgtcgtcccaagcacttgcactgtcacccgcgcccatgggtacgcccaggctcgggcagcaagcagcaaacaacaccagagttacggcgaatcacgttgggtgactgtgggtgacagcgggtcacggcgggttaagaaggatcacatcggatcacgatgggtcacggcgagtcaaggagggtcgcggcggctcacagtggttcccacggtcgcgctgcgagccgccagctgctcctgccctcagctcagagcccagtcctgctgcctggggcgggagggggtggcagcgcggccctgacatcgagaggccaccgtcatcgtcttccatcgaaaggcgtttaaaagcagtcacggccatgcgcggtggctcaggcctgtgatcccagcactttgggaggccgaggcgggcggatcatttgaggtcaggagttcgagaccagcctggcaaaacatggtgaaatccggtatctaataaaaatgaaaaattagtcgggggtagttgcgcgcgcctgtaatcccagctacttgggaggctgaggcaggagaatcgcttgaccccaggaggcagaggttgcagtgagcccaggtggcgccaccgcaccccagcctggacgacagagcgagactccatctcaaataaataaaataaaaacagtcactcaggctgacaagggtaagggaaatgtggtccgcccccaccaccttaacatcttgctatgaaaggacgtttcatgatgataacgtttaaagacatccgtaaggcgatggcttttatctgactggaagttagcaaaacattagagatgactgaagtgagtcgctgctgggtatgtccacctgctctggtgatgggcaggcagcgttgcttaataaagatttcacaattttaggccgggcgcagtggctcacgcctgtaatcccagcactttgggaggccgaggcaggcggatcacgaggtcaggagat

SEQ ID NO: 15903 - DNA, 1557 bp, Artificial sequence
  DNA replication origin
aggggacggagccattctgaagacaaagcagaaattctgataaaagatcccaaaacatagtttcaagctatctgggatgtggggtttaggaaaacaggccatgggtggtcttggtacgggagcaagcacaaaactgtctgggaaatgtccctgaggaaggccactgtgtcttcgggccatgagcagagctttcctgctttgggcgaatggagtctggggacaagttgatgacaatggagggctgaagacagcttgggaattagtctttccgagataactactgggtggggcagattgtgtggtcccggtccaagccacacaggaagcccacactggcttctgagcaggagtgtaacaaaagccagatgacactggaaagacacgttggctgcgtggtgaccacagaggacagggtgaggacggtggcaatggcagccacacagcagagcacctggggtgagactggaccgagccaggaagaggcagggactggctctgaaggccgagggagggttcacaggagggtggggagtgggcaggaagctgacatccatggtgacgcagggtggggcaggtgggagaaaggtgaaagaagaacagaaggtcactttgggatgtaagtttgagaccttgctgctaagtgaggccaaaaaattaaaagatttttaaaatctgctggtagctggagaaggacccgagacgtgcagatgggagttgtggcagtagtggccatcttgagggacagacaccgggagaaaacgagtgatgcgtgcaaggaggggcatcgctgagcccacacaagactcaagatggatgagacagaggcggcctcaggtgcctgcaggtggagagagaaggtaggggtggcctggaggcaggtctcttctgagtatcacaaagcacatccaaaagtaaatgatgccgggtgtggtggctctcgcctgtaatcccagcactttgggaggctgaggtgggtggatcagctggaccaacatgatgaaacctcgtctctactaaaaatacaaaaattagctgggtgtggtggcacgcgcctgtaatcccagctacttgggaggctgaggtaggataattgcttgaacctggaaggtggaggttgcagtgagccaagatcatgccattgcactacagcctgggcaacaagagtggaactctgtctctaaaaaagaaaaaaagaaaatgaggtaggaggtggagctcaactccggaggcagggcttggacatgggaccaaactgaggactagctaaaacaggtccagggcagaagagcctcctgtaaggcacacccaccagtgtgccatatcagtttaccattgccatggcaacaccggaagctaccgcctctttccatggcaacaaacagacaatgcagaacttaccaagctaattctagaaatttctttttttttttttttttttttgagacaggttctcactctgttgcccaggctggagtgcaatggcgtgatctcggctcactgcagcctctgcccccagggttcaagtgattctcctgcctcagcttcctaagtagtggg

SEQ ID NO: 15904 - DNA, 1574 bp, Artificial sequence
  DNA replication origin
ccgggggtcttagtccccgggcccggaagtccgcaccactgagaggggagccgatccctggcgctcctagaacggcgcaggaagtttcccaggcggggcctctcgcgacttccggtcgcggcgggctggcggcggtgcaggctttgtcggctgatctgtggggcccgcgccggcggggtccagtcagcggctgcagggtcgggctcgcgccgtcctctccccgcccgcgccgggtgagtggcgcgttccggacgggggcgggcaacgccttagccgcagccccggctggctccggagcccggccgccttgccagggcacagtccgccgagagggccgggcggggtccgcaggccgctgcccgccccgctagggcgtccaggagcggggccttggctagtcagtctcccggacgcagccacggccgcccccgcgaggctgcggcgtctctccagcgagcccgcctcgggcccgagcctggggtcttgtccctgaggagcgccgtgtgggtacccctggttccctctccttccccccgccctgagcccaggccggagagccgcgggcttgagtgtccgtgtcgcagtcttcaggtccgccaggcctgcgtgaggttgatgccgcagacatgttttacggtgtggcaggactgggtgtgggcgttcccgcggctgtgcctgaaccctgcctccgctccctggggcctcgaggcctctcggtgctggaggagatgcagcgccagcatcttctgtgctgttggggataggggtggggagggaaacatgatgagcagaattagaattaagtacaagacttggacctggagaattcccagatggggagaggtggtgtggctacgctgtcctgctttttcttgaaggtacccttttcccttcgcgtctttaagaatcccagtggcgttctctgtgcttctgtcaaggctgtcttgctcccttcacacacaggctacgtcatggtccagggactctcagggtctgggcagcgcctggatgctggcctcagactcataggtagttggtgtgaagcagctcagggagctgccgagcttgtcttcgctgcctcagggtcatggaagatgacccaggagaggacacagggggctcgtcgttgtccttgggcagagccctgagcagcatgccggtagcagaagccaaatggcctgggtggggcgggggcagttgacagctggctccagttctctgaccttacgcttcttacctccctgaacttccggggcatcgtggggagcactaggaacagaagcgctccctgcctagcctgtggcgcccagtaggccccttggtgtggcgcggggcaaggaggtccagatgttagtggagctctagtccacgtctcactcggttgccctctggttctgcttttcctgtttcctgagggtgaagcttggtgtatcctgttaatttcttcaggctgtaagcaacacacagtgactctggctgggagcttgaggctggaatttccccttaccagtgtgggtgcaagagctgggggcttctaatgccagatgggacacccctagacaccccagagctgc

SEQ ID NO: 15905 - DNA, 3112 bp, Artificial sequence
  DNA replication origin
aataggattgtcaactccttaccaatttatatttaccggttacataaaaaatggtacagtgacctccccttccagccatgattaacaagtattggacttgccctcctgccctaaactagaaagctggacaaaatccatgcaacagctgctgttagatgttggagggtgcagtgctgtgacctgcccaggaggatggagatggggggggcacctcccatgatgccagctctctgcctggtggcattttctagaatacagcatatgaaggggaaacacaggcatggtatcaactcactaagttgaggaggcagaggttggactctggggaggtacagaaggctcgcatttatggggtccagtacgagaaagaaactgggacccatgaagaggaagtccccagtgctgccatgagtgtttggatgaacgttaagctgcacacaccatggggccaggccacaagccacggggagctgacagcagacaatccccaaatagcttgcaggcctgggaggtgctcaaagtgtgatgagccagagtggtgggccttgctgcccagtggcggcactcagtgagaactgcgaagggtccagccctaccaggagcacggctaacctggagtaaaggccgctgtagaccagcctcagccaagctcagaaacaagcctcaaaggactaagctgatctacagtcattaagctgcctgcaaaaaaattcaataattttgaaaggaagacaaatttcagaccctcaacaatgtaacattcacaatatctatcaaaaaaattactaaacacacagaggtgaaaatgtcacccatagccaagagaaacatccatcagctggagaacatccaggccgggtgtggtggctcatgcctgtcatcccagcacttcgggaggctgggtgtgcagatcacttgaggtcaggaatttgaggccagcctggtcaacatgacaaaaccccatctctactaaaaatacaaaaattagccgggcgtggtggcgtgcatttgtagtcccagctactcgggaggctgaggcaggagaatcgcttgaacctgagaggcagaggttgcagtgagctgagatcgcgccactgcactccagcctgggtgacagagtgagactccatctcaaacaaaacaaaacaaaaccctgaagaacatccagacatgataaagatggtggaattagcagataagaacttttaaaaagccaaatgagtaatttcacaggtttaaaggaaaacgtggtaatgaggaaaggaatgaaaggtataaagaagaatccagtagaacttctacagctgaaaaacctacatctgaaatgaaaagttcaatggtggaatgaacatgagaccacaaaggcttctgaacctaaggtgaccttttagaaataaaaacaaaacaaaataaacaaacaaaaaagacctcaaaggcaaaagaaaaggtcaatggacttgaagacaaacccacagaacatgcccacattgcagcacagcgagcgaaggggcaggaaggcaccagcaaacagggccacagtgccccgaaggcgagcgaaggggcaggaaggcaccagcaaacagggccacagtgccccgaaggcgagcgaaggggcaggaaggcaccagcaaacagggccacagtgccccgaaggcaagtgaagaaggagcaggaaggcaccagcaaacagggccacagtgccccgaaggcaagcgaagaggcaggaaggcaccagcaaacagggccacagtgccccgaaggcgagcgaaggggcaggaaggcaccagcaaacagggccacagtgccccgaaggcaagtgaagaaggagcaggaaggcaccagcaaacagggccacagtgccccgaaggcgagcgaaggggcaggaaggcaccagcaaacagggccacagtgccccgaaggcgagcgaaggggcaggaaggcaccagcaaacagggccacagtgccccgaaggcaagtgaagaaggagcaggaaggcaccagcaaacagggccacagtgccccgaaggcaagcgaagaggcaggaaggcaccagcaaacagggccacagtgccccgaaggcaagcgaagaggcaggaaggcaccagcaaacagggccacagtgccccgaaggcgagcgaaggggcaggaaggcaccagcaaacagggccacagtgccccgaaggcgagcgaaggggcaggaaggcaccagcaaacagggccacagtgccccgaaggcgagcgaaggggcaggaaggcaccagcaaacagggccacagtgccccgaaggcgagtgaaggagcaggaaggcaccagcaaacagggccacagcgccccgaaggcgagtgaaggagcaggaaggcaccagcaaacagggccacagtgccccgaaggcaagcgaagaggcaggaaggcactagcaaacagacccacagtgccccgaaggcaagtgaagaaggagcaggaaggcaccagcaaacagggccacagcgccccgaaggcgagtgaaggagcaggaaggcaccagcaaacagggccacagcgccccgaaggcgagtgaaggagcaggaaggcaccagcaaacagggccacagtgccccgagggcaacaggaagcaaatttcacctaaaattgcaattcctggctaggagggatggctcacgcctgtcatcccagcacttggggaggccgagttgcgtggatcacctgaggtcagaagtttgagaccagcctggccaacatggtgaaaccccatctctactaaaaatacaaaaattagccgggcgtagtggtggacacctgtagtcccagttattcgggaggctgagacaggagaattgcttgtatctggaaagtggaggttgcagtgagcagagatcatgagactacactatagcatgggcaacagagtgagactctgtctcaaaaaataataatgaaaacaaaaataaataaataaaattagaattcctcttggtgtgggagggtggcagaaaaacattgtaagaaactgtgggctgggtgcggtggctcacgcctgtcatcccagcactttgggaggccgaggcgggtggatcacccgaggtcaggagttcaagaccagcctggccaacat

SEQ ID NO: 15906 - DNA, 1163 bp, Artificial sequence
  DNA replication origin
agtccagtgcccattaaggcatccactgaatgggccaacctttgctcgtggaccatccagtgggtcaggcctttgggccatgttgggacgaggcaccccactcggttctggagcgaccgtacctgtgtgccgctgttggccccgcgtgggcaggaactgctccgattccccttccaaacaggtttcggaaatgatgtgtttatcagaccagtagccaaaaaccacatgcacgtggccacatcagtctcttctggaaagaccatgtggatggccacaagcgtgcctcagctactactgtttaagcctgtggtagtccactgctgtccaccacggtcatgcagcttccgcaggggttgggtttccagattgtaaggcgggtggggacaggcagatggggacaagggggacaagaacaagagggacagggacaagggagtgtatggggacaaggggaatggggatgagggggatggaacaaggcgggtggggacaagagggacagggataagggggatggggacaaggagggcagggtaaagggggatgtgaattaaggggacaggaacaaggtggataaggggacggggacaagaaggatgaggacaagggggatggggatgagagggatggggataaggtgggcggggatgagggggacagaaacaagggggatggggatgaggtgggtggggacaagggacaggaagaaggtgggtggggacgaggggcacagggactaggggcactgggacgaggagcctggggacgagggggatgggagcaaggcgagtgcggatcttttacgtcttcacaggtggccttaacgcctgccattctccacagagggtagagttgcaggagcttccactttgattttcccactacaagactcactctgttgatcaaggaaccagttgaggttttgcccagttgccaggtgtgtccaaagtgattttgttcctttcacaggacattctgcctccctgacagcgcgggggatgcttccatggcctccacaagttataaaatactccaacaccagtagtatgttagttacaccagggtgccattaaaaatactgcagagtaggttacttaacaacagaaattaattattctctcacagttccggaagccagaagagactaaagtgtcccaggttgg

SEQ ID NO: 15907 - DNA, 1136 bp, Artificial sequence
  DNA replication origin
actgcagcctcgacctcctgggctcaagtgatcctcccacctcagtctccccagtagctgggaccaaaagcgcatgtgccaacatgccctgcaattgttttaagttttttgcagaaacggggtctcactatgttgccaagactgatctcaaactcctggcctcaagagatcctctggcctcagcctccccaagtgctggggttacaggcgtcagccacagcatccggcctaagctaccttttttttttttttttttttaataagatgatgtctcgctctgtcgcccaggctggagtgcagtggcgcgatctctgctcactgcaacctctgcctcttgggttcaaacgattctcttgcctcagcctccccagagtaactgggattacaggcgtgcaccaccacacccggctaatttttgtattttttgtagagacaaggtttcaacatgctgaccaagctggtctagaactcctggactcaagtgatccacctgcctcggcctcccaagagctgagattacaggcgggagccaccttgcctggctaagctacattttataaaagatcctctgtgatgaacaaatgagaaagcagcaaaacaggatgggggtggggagaagacagggaggcgttcaggtgagagaggaagacggccaggattgggacttacagggtgggaatggcaaggaggcaaatggttcagttatggagctaacgcaccagtgactgtgtggctgggcgtgggcaggaaaggagaagaagcgaatctcgggtttctgcctcctccccttcgcggtggaatgcctgggaggaccagagggtggggtgtggaggttgcaggagctcagcctggggccggggagctttgggtgttatgaatcaagtctaagcgctcgggtctcatcggagcgatagggctggagacacaggtgtggaaagtgtctatgagggataactaaggtcacgatcgcggacggggtcggccaggaagaaaccagcttcaagaggatacgcaaccgggtcctgacaaacctgcaagtgtaaggagcgaggagagaagaggaggccgagccggaagaagctgaagaacagcccccgaatagccgagggcacgggcagcctccccggtctgtccca

SEQ ID NO: 15908 - DNA, 915 bp, Artificial sequence
  DNA replication origin
ggctggcctggcgtcttaggctgatgcacaactgctctgagcctcgaccctcactttgtcctcagtacaagtaaaacagaaacttttctctcctttgagaaggattttgcagccccagaccagacctcgtctctcgcctggaacagtgggaggagccgtgggttgaagaccgggagagacctgagttccaggcagtgcagaggggaccccggccaggtgagtgctgggctgtctgggctcggcgggccccgtccctgtggcccacagctcctgggtagtgctcagcacgctgcagtgaccaagggtgtgtccttcccatgggagagcagacacacagctgctctctaaattagacaggcattagagacgtaggggcagccacgctcctgccctgatggacactggccgggggtggggctcgaaaggcatagtgctgcaggatgacatacagctgcagctcggaggggcctgaggctggagtgacacttgaagcctgcacctagccacccaggtgctgtccggcggaggccattggtgtgggtgtctgacctccctgtgatggccatgtggggtcccaggcctggtactgactgcacgtgagggtctccaggtatgtggctctgggtaggagtttgctccacgtccttgtttgcaaaactgggacagtggccatgcttccctccattaggtgagggttgctcttggggcagttgtcagcagggttttgctttttacttacattttcagagtgggatggagcagctatgtgaacacgagccctgggaggtccccgggtatgtggagtccccgactgtggagtgtcaggttcctaggtgtgtggagcccccgactgtggagtgtcaggtccctgggtgtgtggagcccctgactctggagtgtcaggtccccgggtgt

SEQ ID NO: 15909 - DNA, 928 bp, Artificial sequence
  DNA replication origin
gtgtgtggagcccctgactctggagtgtcaggtccccgggtgtgtggagcccccggctggggaggtgtcggatccccgggtgtgtggagcccccggctggggaggtgtcggatccccgggtgtgtggagcccccggctggggaggtgtcggatccccgggtgtgtggagcccccggctggggaggtgttgcatccccgggtgtgtggagcccccggctggggaggtgtcggatccccgggtgtgtggagcccccggctggggaggtgtcggatccccgggtgtgtggagcccccggctggggaggtgtcgcatccccgggtgtgtggagcccccggctggggaggtgtcggatccccgggtgtgtggagcccccggctggggaggtgtcgcatccccgggtgtgtggagcccccggctggggaggtgtcgcatccccgggtgtgtggagcccccggctggggaggtgtcgcatccccgggtgtgtggagcccccggctggggaggtgtcgcatccccgggtgtgtggagcccccggctgaagggagccatggctctgaggctgagtggttgagaatcaggtggagctacccgtcttctagacgacatcctagcaccacctccacccgcatgagtggggcctgctggcgtggacagggtgaaaggacattctcttggcccagttgcttctgttggttggcaggcatgtgtcggctctccctcacgtcagcagtgccgggtggcctgcgtaccaccggggctggggaagcatctgagctcatcttggcttccgctgttgatacctgtggctcatctgtgtttctttgaacgagttttcctgatcactcgtaaccatgtggaatgagctgagtcaatggaagccagtccacgcacacagcaggagggtcctctgggctttttttttttttt

SEQ ID NO: 15910 - DNA, 1633 bp, Artificial sequence
  DNA replication origin
cgtgggggaagaggtgacctctttgttttaaacttaaggtgtctgcttatccagccagaaataaaaatctgccagtggtgttcccaagggaagacccccgtgggaatgggtcgggacactgccgtgtttcaggttagccaattatttttgcttttgcctgtttttctttaagaattgcagccaggccaggcgtggtggctcacgcctgaaatcccagctactcgggaggctgaggcaggagaatcgtttgaatccgggaggtggaggttgtggtgagccaaggttgcgccattgcactccagcctgggcagtaagagtgaaactccgtctcaaaaaaaaaattccagccaacagatgcatatgtaatgttggaatcagaaacgagtttacaagaaatagggggatgaggagaaggttgaacacaccgagaggaagccctgagccagatccggctggagatgccaccagacggcgacgtttctgtgggaagacgggcacgcagaaaggccgagggggctgtgtgtgaccctggtaggagcaaaccgagtgcgaagtcacttttgagacaatcatggaaatgtgggcacgggccgtgagtcgggtgggtaggccgtgagtcgggtggatggactgagtcgggtgggtgggccgtgagtcgggtggatggactgagtcgggtgggtgggccgtgagtcgggtggatggactgagtcgggtgggtgggccgtgagtcgggtggatggactgagtcgggtgggtgggccgtgagtcgggtggatggactgagtcgggtgggtgggccgtgagtcgggtggatggactgagtcgggtgggtgggccgtgagtcgggtggatggactgagtcgggtgggtgggccgtgagtcgggtggatggactgagtcgtgtgggtggccgtgagtcgggtgggtgggctgtgagtcgggtgggtggccgtgagttgcgtggtgggccgtgagttgcgtgggtgggccgtgagtcgggtgggtgggccgtgagtcgggtgggggtgcggaattggctgctagcggtgatggtgacacagggttacggaggaatcctcactcagatgcatttggacgtctttgtggggaaatgacgtggcgcctgggatgtactttacgattctaataaagaggagaaagacacaacagtattggctgaatgttgacagctgttgaagccgggaggttggtgtgcttaaaagttccccaaatcttttatttgcagcatgagtatgagtttcttcgtgctcacggaagattgtagagagcagctgtcggtcatggagtcacagggctgccttaccaggacaccaccggcagccccacagacaacacaggtttattctctccagctctgcaggctggaagtccgaggtagaggtgccaacagggtccgtttccggcgagcgcctcctggttcagaggcatcctcatgtcaggaggggctttggtgtcaccttttccttgtgagggcccggatcccatgacccctatcaccccatcgaagccaaatcacctcccagagacctcctcataccatcacgtcgggcctagggcttccacatgggaatttcagagtgaccattcagcccgtagcagaagctcctct

SEQ ID NO: 15911 - DNA, 950 bp, Artificial sequence
  DNA replication origin
atcttttatttgcagcatgagtatgagtttcttcgtgctcacggaagattgtagagagcagctgtcggtcatggagtcacagggctgccttaccaggacaccaccggcagccccacagacaacacaggtttattctctccagctctgcaggctggaagtccgaggtagaggtgccaacagggtccgtttccggcgagcgcctcctggttcagaggcatcctcatgtcaggaggggctttggtgtcaccttttccttgtgagggcccggatcccatgacccctatcaccccatcgaagccaaatcacctcccagagacctcctcataccatcacgtcgggcctagggcttccacatgggaatttcagagtgaccattcagcccgtagcagaagctcctctgggtctgtcctggcccacagaccctgtgtaggaaaagcacttgcccctgcggggcaggccctggcagagcccggtgaggcagtgagggccctgcaggataagtggaaatctccccaggggggatatgggggtgcctttctcttacagagtccaggctggtaaaagcgcatgtgtgtttcgtgtctggtttgtcccctgcccagcgggcgccgttggaagggccttcaggtgcttgagcacaggtggggacggagcagctggtgtctcggcagtagatgcggcggatcataaggacttgggttttgagcgccctgcaggaagccactggccgcgtccagggtcacctgtgcctggtcgttagtccctcacaatgctgtcactttgtgacgctcttgtgcaggattaaatgtgaacagcagagacgtgggtgatgcgctgcctcgtcagatgatggtcagttgtccaagcgggctgccttgctcttggtggcctcatcatccagggctcacacactggatggttgggccacagtcgcggtaccccccgggctg

SEQ ID NO: 15912 - DNA, 913 bp, Artificial sequence
  DNA replication origin
ccacctccctgcccgcccgcctcgggcgcagagccccagcgttggcagctcctcgtgaggggacagagatggctcaggtgggcccaccctggtccctgggggtcctcaagctcctgggaggagcaccagggccaggccccgggaggtgctgggggggactgggggcacccacttgagaccccaacaagggaactcagggccccggggagagggaagcccgggctgagcgccacagacctgctcagagggaggagccggcccgcgggacaaggggcaaaggaggccaccaccaacccgcagagccgcagccgcctccacgcacccccggaatccacgcctcccgaaccggaagcgcggcgccgctctagccctgggcactcgctggtcgcgtcgcggccacgaggaaggttgagcgcgagctgggcgggcgtcccgcgcagcccggagagctgaccctccacggaggggcattttaataaccgcctgtacacatccagacgcgacaactaaatgcaacacgtgaccctggaagatggggacagccacagaaacacttgggacgggtgacaaagttgtgatgtgagcgacgatggggataatattcctccacagtaaatgtcctggttctgatcactgcactaaagcatcgtaggagaacatccctctgttcaggaaatacacacgaaagtacttcggggctccggggccagcgtctccaaccgcatctcaaacggttccgaagcaacgctcgtgcacagcgatacacacggaccaaattcacgggcagcgtcagcggccgggcatccggataaagggtccatggcggtccctgtgctatttttgcaactttctctaagttggaaagtatatcaaagttttaaaattactgaaaaactcccagtaggttgaacat

SEQ ID NO: 15913 - DNA, 1055 bp, Artificial sequence
  DNA replication origin
ggagcacacgcagctgctccaccgcgtgaagcggcgcttcctggaggacaaggcggccttcgagcgcgaggcgcgtcagcgcgtgcagtcactggcgcggcgcgcggagcgggaggcggtgcgcgcgcttgtggcgcacacgcaggccatcaaagcggacaacggacgcctgcggcaggagctgctgctgctgctccgccggacccagctgctgcaccacacgcggcgccagctgctggaacagcgcgagcaactgcaccgcgagcacgaggacacgcgggacctggcgcgtgtgcacggctggctgcgcaggggccccggaggcccgccgctctgggagcggccggccttctcccagcccacctcgcgccccgggtcattagccgcccccataagcccgtcgcgcgcggcctcccagaccccgtctgtggtaccgtcgcgcgcggccccccgggcctcgtccgtggtcccgtcgcgcgaggcttcccgggtcccctcgttggtgctatcgagcatggactccagggtcccatcgctggccacttcaaaggtgggatcccggatgccatccctgaccgcttcgcgcgcaggctcccgggccctgtcgctggtgcagtcactcgagggctctgggatctcttcggggtcctcaccgagggtgtcctcacaggacactctccgctccacgaagtctggccccaagcttctctctggcctgtcccgggatcgggatccggctcttctccccccacagtcggaggacagcgtgaacgctgaagctgcggcagaagcctccccgggtagagcctgaacctgcagagagtgaggcccaggaggccctagtgtgggcgagtcaggcgcgcagggcgcttacggggataatgcaatggttaataaaggcgtggcccccaggcggctctgacacccgcgtgcatgctctagcatttccggccggccactcattcgtgcgtccaatttccaagctgcaagagagctcagcgcctgctttccctgaatgccctttgggaccccgcatccctgccctcagtggggcc

SEQ ID NO: 15914 - DNA, 2110 bp, Artificial sequence
  DNA replication origin
agacagagtctcgctctgtcgcccaggctggagtgcagtggcgcaacctcggctcactgcaagctccgcctctcgggttcacgccgttctcctgcctcagcctcccaagtagctgggactacaggcacctgccaccacgcctggctaattttttgtatttttagtagagacagggtttcatcatgttggccaggatggtctggatctcctgacgtgatctgcctgcctcagcctcccaaagtgctgggattacaggtgtgagccactgcgcccagcctaaaatacatttttttacaaggagtaaaatgcctcaatcgtgttcttaattttaaaaggctctgctgcacctttcaggcaggttggctgatcagagcaagcccagccatgtccatgagccaccagacgacctccaccacaaacctctgtgcaaatgtggttttctaaactgtgtccctcacaaagatcctcaaatctgcccacatcccagcaaatgtggacaaactgggcagaaactcaactctatgatgacagaacacaaaataggggtcgatttaagttgtgtgtcaaaggctgctggacacactgttcctgaggcatctaacagaacgggagctggggaccgctggtctagacggaggcaaatcttacaggaccaacaggtggtgatgcctgctgtgcagtaatgaccaatacatcaagacagcagagtttgcagcagagaaagtgtcatgatccccggacaccgagcaaggagatgggagggaccttcaaatccatctccctgagttctgggctggggtttttaaagggattgtggcgggtgacggactgtaaaatggggtcatcaattggccggggaaaggggatgaagtcctcaggatgtgtaccctgcgttctttggcacattacctcctcgtggggtgcttcagaccagctgggtcagtcgcttcatgggtgtgcaggacctgtcaaatagaaaacctcacattttactatgtttaagttgttacctatagagcagttatggggacctctcatcttgtgacagggtctgtgtgattctggggccacaggcaccaaacagctctgaggaaggagttgggaggcaggctgacctcacaatgaatgctgagcgagctgcaagctgggtttgttttcctttctcgcctcccttcttccctgattaataaagtctataggaatggtttcaataatgatgttgtgtccacaaagtcaacagaaaaggagaaaaagccagccctttttggatccctatgtcctccagccatccgggcacacggggaagggaagctacccagctgcagagccgcggatgagctgagcgggtgccgcacgcgcgcgcttaggaccttcagagagaaacgctctctaggcgcccagtggactccatacttcaggaaccccaattcccacgggggcctcaccgaaggaatcacgaaatgctcagggaaagcaagggtccctgaagaggcgaatgctccagggaagcgctccctcctgacaacacagagatttcactcgggaaacgggggggaacgtggtgaagctcctcttcaagtgggggacaacccgggagaaggcccgttgctgaaccgaaggcgaagggcgcttctggggtctgtgagattcagaagcacgtccggagtccgtctgaagcccagttttgtcagctcaggccctatctctgggggcacattcacaagcagtcacgggcgactcaagatgagagagttgtgcggaatgaaggagtcggccatcgccagagtaacggggtgggggtgggagaggacgagtaagttctgtctccatagagaccgtgcccgccgagcagcaacattactaatgttaggcgcacccagacggacagcgaaggtccagcgggagcccacgagtgaaggttggcaaagctgccctgacccgcgacccaaagccccgatctgcctccccaaaagcctcgtgaccccgaggcgcgtcccacctctgggcctggcgcctagaatatttaggccaggtaagaggaagggctaaattggggaaggggccggggtcgctgccctcaccagtcctggtggtccaggcaccaacccat

SEQ ID NO: 15915 - DNA, 1027 bp, Artificial sequence
  DNA replication origin
ggggcacagggcagcttgggggaggggaccccaccagagggagtgcagagaagtgggaggaacccctcacaggtccaagtcacagccccagcagttccagggggctttggacaactcaccttgcctcggtttctccatctgtgaaatgggaacagaggctgctgggagggctacactcggtgtgccaggcacacagccccacccccgtggctacgctcagtgcagggctcaccccagtctcaggagatgaatcaggcaggacatgcaaagcagtaggggcgggaagacaggggcacggtgggcggggccacctggggagcctgtgggagcccacaagccccaggagcagacccaaggtggccctgtgctgcagccttcagggtccccagcagggcccagcataaggggctggggggcaggagggaggctggcctggctgcggaggggtgggaagggaggctggcctggctgtggtgagggtccggaggaggctggcccagctgtggtggggaggagggaggctggcccggctttggggcggtggggcaggcggtgaaacgagggaggctggcccagctgtggtggggaggacggaagctggcccggcttcggggctgtggggagggcggtgaaaggagggaggctggcccagctgtggacggggagggcctcacagggagcagacagtgcccctcttcccagggcctttccagtttgccagcctgtatctgaggggggtgagactgcaggtcctggggggacaaagaccaccatgccacttgaggaggcctgcatggcctcgggggaagacccccgagggtgggaggtgtgtcacaggaagtgagttctgtccccatggatggtgcaggacctggtgaaccccagagaccgcctgccttcctaacacaatgagagaaaagcctgggggatcctggggaggcatctgagcccgcccccaaggccaggctctccccacttccccgcaaagaatcgccccatgcagcgtggccccccagcagaaaccagg

SEQ ID NO: 15916 - DNA, 1201 bp, Artificial sequence
  DNA replication origin
caacagtaaggccccgcgggcgtcctggccgccatgtgcaccgtagtggaccctcgcattgtccggagatacctactcaggcggcagctcgggcagggggtgagtgcctgggggtgcgtccgcgcgccgaggggcgcggcagatctgcggagagaggacctgcggggcgcggccggtcccctcggaggcctgttccgtcacacactggcgtcctgcctcctccgtaggcgggagaggtggtctggagccccttcgtgcctcagtttcctcatggggtaacacgatcctgactcccaggaacctggctcctggaggcaggtgacagccagggccgccagaggcctcaggcagagggatcctggcgccccactccccacgcgtccacagtcgcccgcttcccgggtgcacacgacgctctggggaggctgggcccgcgcccgggtcactgagaggaagggcggaccccaggctcaggagcacaggggcgaggcccgagaagggcctgagcggttatggggtgggcgcagagtgaagggcagagccttgtgtatctgtgtgtgtgtgtgagcatgtaagcctgtgtgtgtgtgcgtgggtgtgtgggggggtgttcgagggtgccatgggggaggggaggaagagccttccaggcagtgcagacggtaagtgcgtaggcccagtgcagggttgtgtatgtgcaactggataggagatggagagagacaggtgagtggtgagggtccgatcgtgtgggagctttggggaacttccaagactttggtttttactgttgctgaggctgggagctgtagcagctgctggtgtcactttacaaggcccacccctgtgctgaggacctaccgtgggtgtgcacgggagcggcagacggagatgagttaaggggttagcgtagccacgcagcgagagatgccagaggctgggaccagggtgggggcagaagagaccgtggcaggggctagattctggaggaatctgaaggtagggccaatgggattgggggtggatggggtgtgagagaaagggagggagagtgcctgggcagctggaaggatgatagggcatccccgagcttcatttcctgcccagacgctcccctctgtggcctcctttcctccagggcctcgccagctctcaccctcccttccctctacctcccctcctctggaagatgtcggagtct

SEQ ID NO: 15917 - DNA, 770 bp, Artificial sequence
  DNA replication origin
gagtggaggaaccgggtggcccgcaggagctggtagaagatggagcgcacgtggacgtcctgcagcaggccgcccttccggatgactgcgttcaggtcagtgtctgcagagagggtgcgcactgcagtcgggggtggggggctgggggggcaacctggggggagtgggagaggggcacctggcaggtctgtcccactttgaaccagcccacggcctggccgccccgctcctccatcctgtgcactgcctgtgggcacagcggtgaggtctgcaggagttttaacactttatttcatgttgcctttgtttcataaaatgagaagaaaaaggagaacgcaactgcaaactgtggtcagagcaggagcctggggcaggtgggacgaaaggggtcgctgctggctctggaggctgacactagtcagctgtctgtccctgagtccagggtacatggtgagggagcaagccactgtgggccagctgcagagggacacgcagggggacacgcagagggacccgcagacggcgtcaggacagaacagaggtggggctggggcgctggccggggcctcactcacccataaactcaaacaccaggtaaatgtccctgtcgttctctgcccggatcacgtcaaggaggctgatgatgttgggatggtccccaaactcctggggagagagtcggaggcggctggaaggccaggaggggctgtgctctggggcccaagaaggccagtttctctcctgtctggagagatctgtacctgggcaag

SEQ ID NO: 15918 - DNA, 1127 bp, Artificial sequence
  DNA replication origin
ctccaagcaaagccctggcacccccctgggcaccctgcaaggcagaggtgctgaacatcctccggccgggccgggcctccggaggaagccggggagggacctgtgtacagttgagggtcacataaaggggccatcagagggggtgcagtggaggggaggccttgaggtcctcgagagatttgaactggacattggaggggcaatgggaagcatggggaagggagggaaaagcaggggggaaggggaaaggggaaaggaggatgaggggacgggggcagactgggccgggcttacctgttgtacgctggccaccctcaccccaccgccccggttccagtcaccccggatcagggcctggttggccacctgagccgcagcctgggaggtcagggagggcgcagctcccctcccgcttggcttcacctgggaagggccatgtcacagggtcactgaaaggtgcagaggaggggtccctcctgtgcccgccccaccatgacttaccagcgagagtgtcaaggggggcgcttccttcgccccagggggcctttccccattccctaggagagcagtttggagcaggggagcggagttctgcctgggaacgttcttggctgcacggggggactctgtggggtcagtgggtcaaccccggggtcagtgggtcaaccccagggtcaggaaccgaatgctgcgcatagttggcagcacaggcagaaggggcccgggccgtgctccgcgtgggcggccagcaaagatcacacaccgtgctcggcagggtcatggcctgggctgctctggggcctgggtctgggaccctgcacaggtgtcctagaaggcagctgagggtcggctctgggtttgtgcaggtgtgcctggcttggggagacaccctccgggcccttctctctcgaggtgccgctgctgcctccacactccaggatcatctgcgggaggggaagggtgctcagaggtcacagcctgggcatggggcgtttgggggtctctgacataggaggcagcctccagggtgcagtagacaggggatgataggggtcgagagccggagcacctgatagacgcggctgcggtactcaggcacagagagctggaccccttcgtgtgcccgg

SEQ ID NO: 15919 - DNA, 729 bp, Artificial sequence
  DNA replication origin
aggtttcaggacgggggtggggtggggtcctcagaggagtggaggcttcaggaaaggggccggggcccccagctagtggatgctgtgacctcagaggggaggggaggaacgatggctgcttaggttgggggcagacatgactttattggaggaagtcagtggggcgggggcagggccctcatctgctcccccgaggagacccgggcaagctccctggaacttcaacgggccaggcaaagcagggagggctaaggggtgcaggagactggagaggggtctggggaaggggctggggcaggaacagagggccaggtgaagggagtagggcggctcacacatggtgcccctccagcaggggcaggtggcccagtgccgagtggcagacagtcccgtaggcttgggagtagcctccaagcaaagccctggcacccccctgggcaccctgcaaggcagaggtgctgaacatcctccggccgggccgggcctccggaggaagccggggagggacctgtgtacagttgagggtcacataaaggggccatcagagggggtgcagtggaggggaggccttgaggtcctcgagagatttgaactggacattggaggggcaatgggaagcatggggaagggagggaaaagcaggggggaaggggaaaggggaaaggaggatgaggggacgggggcagactgggccgggcttacctgttgtacgctggccaccctcacccc

SEQ ID NO: 15920 - DNA, 923 bp, Artificial sequence
  DNA replication origin
aggacacctggcaccctaggacacaggtctgtgcccacagggcccctttgatctttgcagccctgcacagccctggcctgaactcacaccagggaccttgcctgggggtgacaagaggaggtaaccctgacctcgcgagatgtctgtctcccaccctcacctacggagacctgaagacagatcaggtgcagtggccatactagggggcgcaggctgcagtccctgacagcagggggaggggtgtcccccttctctctccccttctctcctctggctcagagtcacaaacatggccagggggtgaccctacatccctaccccacaggaccaccctggggggcagcctggaccctgaagccacagcaggtaaggaaatgatggacaaagaacaagaagctgccccaggcaaacctggagggaaaagcccagtgctggatgtgcagtgggcagggcctctagggggcggcactgggctctggggtggaggtttcaggacgggggtggggtggggtcctcagaggagtggaggcttcaggaaaggggccggggcccccagctagtggatgctgtgacctcagaggggaggggaggaacgatggctgcttaggttgggggcagacatgactttattggaggaagtcagtggggcgggggcagggccctcatctgctcccccgaggagacccgggcaagctccctggaacttcaacgggccaggcaaagcagggagggctaaggggtgcaggagactggagaggggtctggggaaggggctggggcaggaacagagggccaggtgaagggagtagggcggctcacacatggtgcccctccagcaggggcaggtggcccagtgccgagtggcagacagtcccgtaggcttgggagtagcctccaagcaaagccctggcacccccctgggc

SEQ ID NO: 15921 - DNA, 1345 bp, Artificial sequence
  DNA replication origin
tttccctccaggtttgcctggggcagcttcttgttctttgtccatcatttccttacctgctgtggcttcagggtccaggctgccccccagggtggtcctgtggggtagggatgtagggtcaccccctggccatgtttgtgactctgagccagaggagagaaggggagagagaagggggacacccctccccctgctgtcagggactgcagcctgcgccccctagtatggccactgcacctgatctgtcttcaggtctccgtaggtgagggtgggagacagacatctcgcgaggtcagggttacctcctcttgtcacccccaggcaaggtccctggtgtgagttcaggccagggctgtgcagggctgcaaagatcaaaggggccctgtgggcacagacctgtgtcctagggtgccaggtgtcctcagctgcacctgcccatgggttggggttggaacacaaggaggcagctggaaagctcacaggctggaggagctcacagtctaaagggcgcggcctgtgctgtcggtggcggagttgggctgccaggctcacagtctgggaagctcataggccggaggagctcacagtttgaagggtgcggcctgtgctgtggtcggtgttgggctgccaggagaggggcgctgctgggttgtggaagccattgccaccatgggggagggcggggaaggacaagatgtgggtgggggagctgagcagaaggtgagagctggcgctgccctggtgctggaccaggcacctgcaagagactcagaaagggaggctgggtttgggagaaggttggaggaggcggaggagggatcgggagggcccgaggaagcggtgagccagtcagagacccagcccaggggctgtttcctgagggggctgccgagggaggtgcttgttgagcttcaaaagcccaaggcgcaggcccagggtgctgaacaagcaggacagagaggctgtgggagaggaagctgcagagaggccacggggctgcagggttggaggcttggcctcaggctgggcagtgtgtggtggggctgctgagtggggaatcgcaggtgggcacccaggagtgtgcctgcacagggggcatcggggacagggacaggagagcagcgtgaagttggggaggccaaggtgggccttggaagtggagctggggggtctttagtgccccccacaggggtgggtggtgggtccacaggggaaatctgggaggccacgtggttaaaggctgcaggatgtaactgggcgattatacacactggggaacatgctagaatactttgtgtgttgtgttttattaacaccaaaatgtgccacatcatggtttagaaga

SEQ ID NO: 15922 - DNA, 968 bp, Artificial sequence
  DNA replication origin
agtttttgtatttttagtagagacagggtttcactatgttggccaggctggtctccaactcctggcctcaaatgatcagcccgcttcagcctcccaaagtggggggattacaggcgtgagccttgcaccccgctaagtcccctatcctcttgcaagggtctcgcctctgtgcctcaattcctcattctctgggcccttctcctcctcagggcctcctgttctcagggcctcccccctccccgctccctccctctctcaaggtctcctccttccctcccccccccccccccccgtctcccccctcccccgcctgggcttcacttcctttcctacttggattctcctgctcgctgcctcccagcatcttttttggaggcccgtctcttgctgtggggaagactgggctggctgcgggcagtttgcaaggggtgggtggggcaggggggggggagctggaccagaagatgccccttggagtggcaaggaagctggacagggcaggcctctggggacgggacacagggaagcccgaaggggcgccttggccaggtctgccatctcctccagcgaggctctggccagcactgggtgagagtggggagggggcattggcctttgcagcacagtaaaacatggtccagacaacctgtggccccggcctcatgagcaccccctgcacaggcccggcccaagccaggcgctagaagggctggttgtggagtgcttatccttgacaggtatggggccaggtgagggcaggggacaaggtgcagctgaggccgagcccaactaggtcctgggcacccctgcaggtgggagtggtccttgtcctcctggtatccagcagacacccccctctccccaccagccccattctcaggtcctttcctctttgtcaccaacaccaagaatctgtccagggttcttggcttatcttttatctcttttcactcctagagaggaattgc

SEQ ID NO: 15923 - DNA, 1333 bp, Artificial sequence
  DNA replication origin
ataagcactccacaaccagcccttctagcgcctggcttgggccgggcctgtgcagggggtgctcatgaggccggggccacaggttgtctggaccatgttttactgtgctgcaaaggccaatgccccctccccactctcacccagtgctggccagagcctcgctggaggagatggcagacctggccaaggcgccccttcgggcttccctgtgtcccgtccccagaggcctgccctgtccagcttccttgccactccaaggggcatcttctggtccagctcccccccccctgccccacccaccccttgcaaactgcccgcagccagcccagtcttccccacagcaagagacgggcctccaaaaaagatgctgggaggcagcgagcaggagaatccaagtaggaaaggaagtgaagcccaggcgggggaggggggagacgggggggggggggggggagggaaggaggagaccttgagagagggagggagcggggaggggggaggccctgagaacaggaggccctgaggaggagaagggcccagagaatgaggaattgaggcacagaggcgagacccttgcaagaggataggggacttagcggggtgcaaggctcacgcctgtaatccccccactttgggaggctgaagcgggctgatcatttgaggccaggagttggagaccagcctggccaacatagtgaaaccctgtctctactaaaaatacaaaaactacctgggcgtggtagcatacatctgtaatcccagctactcaggaggctgaggcaggagaatcgctggaacccgggaggcagaggttgcagtgagcccagaccgctcaactgcactccagccctaggtctcaaaaaaataaagggggcgggggggactgaggcacaaagagatggcggagccagacgctgcgccacgcaaggctgacggtgcagagatgaaggtgctgaggggagaaaggcactggtggcgaggggtgcagccccagcgttggggaggccagggggcagagacggcagctgccaggtgagcctccagtggagccgaggtctggcgcactcagccaagccccaagcggccgtggcctgacagccgctgctcaagcagatgagcagggctctctgttccgcggggcttctggatgaccggggcagcgatgcgggcaccctggcctgggttgccaggccagaagactcacttcttgcttttgaacgtgcccaggatcttgggcacgaacttgcccaccttgctgtccctggtgccctcctccgcggggccttcccctgccccagggctgctggcctcctctttcttgcagaagacctcg

SEQ ID NO: 15924 - DNA, 2670 bp, Artificial sequence
  DNA replication origin
aagtggctggtctggaagcggaagtcgtcgccgtggctgaggaacgtctgccgcgacacctgccgcgcggccgcgaagttctccacggcgcccgcgccctcggtcgcgaagctgtgccgcttgaaggcgtccatctccaggtgccgcgcctggaagaagccccgcgcgcccgcgagctccccagccggcccggcctcggcctccaggcgccgcgagagcggccgcagccccgcgtgcggttccagcgcgccccccggcatccgcggcggctcctcccggcggaaggccgacaggaagtggcggtccgggtcgaggaaggaggggaagcccaggccctcttcccggggtggcgggaacaggaggtgcgctcgtttagggaaggagaagggggttggcgccccgaccccagggacgcccacgagaggcccggccccggcatacggagccagggcataggcgtccatgcgggccagggccgcggccgagggcacaagcggctcggactgcgcgaagaggatgcggaactcctcgtcgaagctggagaccagctctccttggaacacgtgcgccaggctgcggtggatcttctcaaaggaccacatgaagctgtgggggggtcagggccagagtcaaaccgagctggagcgagggcactgcagccccgtgggcagcgggtggggcgcggaggacgcagggatgtgaggtctgcaaggacctgggcccggctaggctgtgcaggggtctacaggacaagggctcctggcgaggagggccctggtgtggaaagggggtgctggggttacaggaggaggccccagagaagggggtgagggagccccgcgggcgcacctgtagctcccactcatcaccacggcacagtccaccagcaggaacttctccttgacgtggcccttgaaggacttcccagtgcggcagtagtaggtggggcccgccacagtccgtacgcgcaggaactggggagggaggggagtcagatctctcccacgggtcctccccaatctcccactcccgggaactcacatccacgtgctgcaggttgacacggcacttgtcggccatgtccaggaagtgctgcgcgttcatctcatccagcaggatgtagactgggacccgacgggccgcggcctccagcacttcgctgagcaggtccacatcagtgaacatgtccatcaccacggccaccacctgcaggggcgggtcaggacggagaggagaggcccctgctgtccccacaccattgtccagcctcccctccacacccgggaggtgtctggatcacccacgaccactgtgaaacaagctagtccatcctagggagttggcgccacatctgggaagatgggcaggaagaagggaccaaacagaagaggtgtggaacggctggccataagggggaaaccgaggcaggtgcagggcagagaaccctggatgagggtgggccaggttggggcacggcaagggcccctcaatcccctccaccctacagacggctgagctgcccccattccagggcagctgtcagggccaagtgccaggctccagttctgccctgggacggggttgttgccctgggcaggggagaaagtcacaagcctttagcgtctggacctcatgcctcagtcgctatggtttaacagcaccttccgccgtctgctagctgtttggtgatggttagaagccctcagctggccaagggccaccgggcaggatgagaggtaattatctgaacaatgaacccaggctggtggggtgcccacccatccccagagcccccgagtttctgggcactggccatgaccacaggcaagcagacctgtgcagagcctgcagcccctgatgaccgagacctggcagccctgaagatctttgccagggacccccactccagctggagctcaggctcacccctcaagctgatcatgctcatgcatctcctccacccccgtgcctctagcccaggcccctcccccactaccctcaagcccaagatggcgcacctgctgggcggaacggatcatcctgcgggcctcatccttgatactggggctgtcggggggcggtggctgcaccaaggtggtcacctcggtgccctggaagccgaaggtcagaggccagcccaaatcaagctcaggcacggcctggtctgagttcactggccagtatgtacccgaggagccatccatgtccacgtcgagaaggctgccttcaggtggctctcgggtaacatactgcggaggccgaaggtgtcggctcacatgttccagctcttcagggcacaggaagtctggtgccccctcggtagcgaggaagcggctgtaggcctccgagccaccctcggccagtgcatccaccgccaggcggtagtactctttgtagtgaggcggcaggtacccgggtgccagtgggttgtccccctgcgaggagctctgagagcgacgggccatgttggggccaggggcctggaggggcagggagacacatgactaggggtgggggcactgggaccactcctaccctcgagcatggacacactgtggaaagggccgtcagtgacttgggtaggctggagtttagcccatgcccaggaggccttccagggcaccagccgaaccaggctcacagagagcaacccagaccctaggatgcccc

SEQ ID NO: 15925 - DNA, 951 bp, Artificial sequence
  DNA replication origin
ccaggtatttcccatgtctcaactccatgtcacccccaggggcaccaggcaggacggctgcctcctgaccccaacattctcagccaagtggctccggctagcacccatgtagtccagctggccggcatccatcctgtcagcgcccaggggcacgctcctctgggcaccttcctagccagggccaacattcaggaacctgtgtgctaggcggggacaggtgtcctgcctccctccccaacccgaggagcagtgggatggactgagcagtccctagggctctccttccagggagaggtacccaggtagctcagtgaccctgtgtgcgtgggccctgggcgctccccatctgacacctttctggagaggccaggcccccgcagggaccctttggagaacagagtgggctgtggggcagccaagcatggatggtggtggcgagcccaggacctggaaaggtccctgctgccctggatgggggctggtggggacaggactctgagcaagtggagagccagatttgggcgatgtggagtgcaggccctgcagggccctgtgggcaccaaggggctgtggcccagggaggttttatctgagagggacagtgacaagaaagaggtcaaaggtaggccaagggaaggagggggtgctgggagacagggacggagtctagggatcagtgttccaggactgggcggtcatagaatgggctgtgggagcccaattgtgaaaccctgaggatggggaggaggtgtggcccgggactatgtgtggggcttaaggttgccattccaggaggagggtagtcacagccctgtttgctgcgctcaccttgggctaggcgtggtgtcatgtggaccctcagctgtgttgtgcagtagaggtaggccagagaggtgcagtgacctacccacagtctcccaggcagtcagagacggacacatgggcagcatg

SEQ ID NO: 15926 - DNA, 1604 bp, Artificial sequence
  DNA replication origin
gggccctgcagggcctgcactccacatcgcccaaatctggctctccacttgctcagagtcctgtccccaccagcccccatccagggcagcagggacctttccaggtcctgggctcgccaccaccatccatgcttggctgccccacagcccactctgttctccaaagggtccctgcgggggcctggcctctccagaaaggtgtcagatggggagcgcccagggcccacgcacacagggtcactgagctacctgggtacctctccctggaaggagagccctagggactgctcagtccatcccactgctcctcgggttggggagggaggcaggacacctgtccccgcctagcacacaggttcctgaatgttggccctggctaggaaggtgcccagaggagcgtgcccctgggcgctgacaggatggatgccggccagctggactacatgggtgctagccggagccacttggctgagaatgttggggtcaggaggcagccgtcctgcctggtgcccctgggggtgacatggagttgagacatgggaaatacctggtgccactcaacagccctagatgccaaccggcttgggagaagctgtcccaacatttctttgttggggcaccgtcctcatggttgacatatggggctggttagggcacaccgctctggttgtgccaggggcagatcgaggccaaccacatgggggtgaggtgtaggcctgtctggctgggccgaggagcccactcaccattgccagcctgtctgtaggggcggtgtctgaccatacagggcagggggaacaaccctgctgatgttgtttgagggtacttcccgacactggggggacactctagaaaggacccccactgtccctttggatttcagtgtccaggctccaggctgtgtgtaatgggggcagggaccatccagacagtggaagcccccgtggccaggagccctcccagcagacatgcctcgtcctcacagggtgatgcccagacctccaactgcttcattcctcacgtcgtctcctttcatgggtacgtgtctcctgggctatggacggggctgcagccactcccgagcccaagatggagcaccccagtggcctgcatgcccacacatttgcctaccaaacgtctgcccaagggagggagggcgcggaacccacccatgggcaatgactcagcacgaatccactcttctgcttgctgacccctgacctctgactcgaagtcagggccctcagctggccttcaaggaccccatcctctccaccctggcaggaagtggggttcctgagtatctggaaggaggaccccatggaaggatctggagttcctacacaaagtggggtgaacctgtgccaagttccgatgggcgcaggagggcgcggaggctctaggcggcggaaaggtggggtgcggaggacggggctcacagaccggaagtcgctcagtgataacttgcggagtgggcaccccagcccccaacggggtcagtgcaccctacgagctcgcggctgcggccgctgggtgccctatccgcccaccccagcccaggaacgtgggcgcgaggggcagcactcccatcactcgccctgctc

SEQ ID NO: 15927 - DNA, 1353 bp, Artificial sequence
  DNA replication origin
gatctggagtctagcactcttctccctgccccaagctgctgggttgccagtgggccggtctttgttctcaccgtaatcatgagcatggccctctctgctgaagcctccatgcctctccactgccctgggaagccagcccacccctgagcctgctccccagcccacccaaggcactcacccctccacaccctcagaccttatgtggtcccggctctggcagatggtggtgtcaggccctggagcaacacccctctccctagtccacacagctgacccccaagttcatttccctgggaggctcctcctgcctgccccagcctgtccgggtcctccccggtgccccatgcccctcacccgctgcagcacagttgcctgggcactggtctgaccccccacccatgtttccagcatgctggtaccagtggggtggcactgagtgtttggggaaagaacaaatgaaactgggactgaccctgaaaacagaaaataggatcacatggcaagaggaacaaagagaaaggcgactgatgaccatcagaaagggttgaggcagggccagtccttggggtgggagtggcaggggcgaggggtggtggtttggacagatgatccagtgtagggcagggcctaagagggggaggggccctaagtgagggcctgagggggacctgggggactggagcacccaggggcagctcggggtggtgtgtgggggttgctgtgtacatgggggggcgtctggtatgaggcttggtgtgcacactgggtcccttgtccgttggggcttggtttttgcagagtccctgtgtgtacacagggttccgtatgtgagggaggtcccctgtgctctcagagtcagtgtgaatatggcatcccctgtttgtgtgtggggttggtgtctgagaaatctcatatgcaggtggggttccctaggtgtgcggatgtcagcgtgttcgtgggtgactggcatgggcaggactcggtgtgcttgtggcttctgtcttcctgaggagtctcctgtgcttgggggttggtgtacatgaggcacaggtcattcggggtccgcatgtgcatgggggggtcactgcggcagagtcccctacaagtgtgggcatcggtgtgagggggtgagggagaaagatgggggaccccaggtacttgtgggcatcagtgtgtgtggtgggggttggggtctgggggtcctctgtgtgggcggggtcctcgtctacgtgtggggcgctggtgcggtgggagaccggtgtgtggtgaggggatcccctgtgctctcggggctcccagacccggccccgcccggggctcgacgccgccccaccgtcctcacctgtcgcacct

SEQ ID NO: 15928 - DNA, 1600 bp, Artificial sequence
  DNA replication origin
cacatacggaaccctgtgtacacacagggactctgcaaaaaccaagccccaacggacaagggacccagtgtgcacaccaagcctcataccagacgcccccccatgtacacagcaacccccacacaccaccccgagctgcccctgggtgctccagtcccccaggtccccctcaggccctcacttagggcccctccccctcttaggccctgccctacactggatcatctgtccaaaccaccacccctcgcccctgccactcccaccccaaggactggccctgcctcaaccctttctgatggtcatcagtcgcctttctctttgttcctcttgccatgtgatcctattttctgttttcagggtcagtcccagtttcatttgttctttccccaaacactcagtgccaccccactggtaccagcatgctggaaacatgggtggggggtcagaccagtgcccaggcaactgtgctgcagcgggtgaggggcatggggcaccggggaggacccggacaggctggggcaggcaggaggagcctcccagggaaatgaacttgggggtcagctgtgtggactagggagaggggtgttgctccagggcctgacaccaccatctgccagagccgggaccacataaggtctgagggtgtggaggggtgagtgccttgggtgggctggggagcaggctcaggggtgggctggcttcccagggcagtggagaggcatggaggcttcagcagagagggccatgctcatgattacggtgagaacaaagaccggcccactggcaacccagcagcttggggcagggagaagagtgctagactccagatcctgcgcccggcaggatgggctgagcctggggcggaggggcaggcaagccacggccagggggacgggaggtggccaagtgctcttgccaggcatcccggctcaagcttctgggcacacacccggggcgggcaggcagacaggacaccagctgggaagcctcaggggagcccatgttcctgctgtcatccactcaggcgcccatggtgtgccctgttccccactgccactgcccctgccctctgccactctgagcaccctctccctggtccttccctacccaccccccaggagaatggacagtaagaaggggagacccaaagctgcagctgggaagtggcagacgctccaccctgggcccaagacaagagctgctgctggtaagtgcaccctctgacctccagagcactgtcacccagacactgacctgtgagaccttctatgtagccaccgagagacaccccctctgaggagagcccttcttccaagagtggcttttaggggacctctgagttgggattaggtgtgattgactgagggttcagagcccattcattcatctcagaccttgagcctgaatctatttttttttttttttttgagacggagtctcgctcttgtcacccagtcgagtgcaatggcgcaatccctcctcactgcaacctccgcctcctgggtccaagtgagtcttgtgcttcagcctcccgagtagctgggattatggacgtgcgccaccacgccctgctgatttttgtatttttgttttagtagag

SEQ ID NO: 15929 - DNA, 1734 bp, Artificial sequence
  DNA replication origin
aggagggcaggcagggcccagccggcagctgggcagcagggccctgaggtcgagcccccgccccccaccccagggggccctcagggtgaagcgggggtggcccctacagggcacgtgaccagcatcgagccagcacctcagggacaccccagggtggccaggccagagcagccacaggcagcctcgagaccggtgccggccactgctccggggtctgagctggtgctggtccttgctgggcacatggaaggctgtggagcaggggaccccatgccggccctgggccccgaactgctgaggctccatgaggtccagctgtgcctggcccaggagcagctgctgctggaggaccggtggcggcaggtccagctgcagatgcagctgtggcgggaggagcagctatggctgcagcagctacaggaggagcagctgtggctgcagcagctacaggaggagcaggcctgggtacacgtggaggggctgcagctggccgtggccctggagcagctccggagtgagggcttcgaagcactgcagacccaaggccaggtaaggcctggatggggtggcgggaggggtcccggactgttgtgttggtgcggtggccactgcagcaacctagggatgcctgtggaggcccaggaagccaggctggatgcagggtatctgtgggcccatcttcacatctgccaagtgaagccggtgcccgccacacagggcactgcaagaccaagggacagcaagcctgcccaggctggcccaatgcttggtggaaatgggcactgagggcagatacttgttcagggacagaggtgtccctgcagcagacccaggcatgctgggccagagccgtccagggcagtgtatgggctgcggtgcagggcgaaggcctgggtgtgcagtcagtaggtagcagaactgaagagcacagcccccacccctgcaacccagtttcctggctgccttgctggtccacctgccctgccccccgtttattggagtgcagtgtactcagggctagagattgcggaagcagcatgcggcacctgtgcccattatcctcattccaggagggcggctggcctcagacgcagctggggctattttggggaactaggatctaaccccagcctggcgtggaggagcggtcaccatcatcccacctgctcctgtgaatctgggagctctctggcaaccaggggtgttaggccaggcccactctaagcagaggggcagtctggggagcaggatggggtgctctcttagcaagcacagaccccagtgcaggcctgggtgctgaaggaccccagatttgcaacctggaatgtgttcacagccagcatagagaataaatgggagctggagcaagggagtgacaacagtgaaggcggggctggggtgggggagggtactgggggaagtctccttcctgacccacaggaaaacccagcccaggtgagctgtcaccatccaacctggaagtgactatggagaaggtgactgggagcaaagccgcaggcagagggcagcacaggatggcccagatggagcagagagtcagagaacacatgcttagactgagaatccccaacttggactcaaaccctcctgtttcaaaacccatttttggccatctaggcgcctcccactggctcctgcccccttcccacctccatgtgttccaaagctgggcttctctgagtgctacccctaggcccccaccccaaccccagg

SEQ ID NO: 15930 - DNA, 952 bp, Artificial sequence
  DNA replication origin
caccgcagctcgggactctggctctgcctatgggcctcactgaccccactcggtggggccaggccacgccagggagtttatagggactccacggcgcggtggctcgcctgggctgagaggctgactaacgcgctgacacggcggcacggggctttacaggccacgggccctgccggcgagactgggagggaggctgagaagctggaggaggcagcgcagcagccagagtgcctgctgtgcgcagcaacgggcgtgcctggtcctgccctgggcggcaccaatgccccccgcccccgccccatcccggctcccccggtcccacagctggtcgagggaaactcaaactgcaggccacagggccaggagctgcatcctggtcgcactgaccctcagggcccagaccctccctggccacagacaacctgagcccagctggccatgggaacccgcagcccatgcactctggagggctccagggcagctagcacgcccacaggagccccgctggggtttggtggagacaaaggacccagggacccggtgggagctagggcagggttcgggccactgcactgcggctggctggagagactgggccctcaaagccctgcgtggcactttgtgaactgatgtggggccccgaggaaagtcctggcggtcatggaggtggggcgggggctcttggtgccatcctggctgggggctggctgtcctgcactgcactgcaacaagggcctgactggatcagagctgcctttgggtctccaggctggaggtgggggtgcagggctagccccaaatgccggcgtcctctgggcttcttgttgggagggtgggctccaggtggcctcctccctagcgtttccccagcccggggctgctgactcacgcccacgcccagggccccatcccagccggctcagccacactggccggactggtttgcctggcg

SEQ ID NO: 15931 - DNA, 968 bp, Artificial sequence
  DNA replication origin
cacgcccacaggagccccgctggggtttggtggagacaaaggacccagggacccggtgggagctagggcagggttcgggccactgcactgcggctggctggagagactgggccctcaaagccctgcgtggcactttgtgaactgatgtggggccccgaggaaagtcctggcggtcatggaggtggggcgggggctcttggtgccatcctggctgggggctggctgtcctgcactgcactgcaacaagggcctgactggatcagagctgcctttgggtctccaggctggaggtgggggtgcagggctagccccaaatgccggcgtcctctgggcttcttgttgggagggtgggctccaggtggcctcctccctagcgtttccccagcccggggctgctgactcacgcccacgcccagggccccatcccagccggctcagccacactggccggactggtttgcctggcgcaaccctgcctgaagcagtgctcctgctcctgttcagtcctagtcccagaagctcaggagcagagggacagccacctgccaggggagtgccgaattggacacacagagaccggaaagggcctgggggagggacgtggcacaaggtgggggacagtgtcaggggtggggcagggccagcaggcggcactgccagcccacagggtccttctagcagaggcaccacctgcccatccttgggcccacaagagcccaggtgccttcctgcgggctggctctcgcctgtgcctccctgaggccccctgtgcagtggagtatgtgctgctggaggagcccgtgctccttaaggttgtccgtgtgcttccctcgggaggaggcccgggtggggggctccctgtctgccaggacgcacggccctttcggtgccccataagtgtctcttgaggctaatggggatgggggtctctcatcccaagctcactgacggtcgttttcccttaggga
